United States Patent Application Publication US 2004/0123343 A1 - sequence listing, part 42

SEQ ID NO: 131675 - protein, 390 aa, Oryza sativa
  Clone ID: PAT_MRT4530_33719C.1.pep
MAFSAPGTDRISSHLTRLKKKIENAMKKTENGKAAKNTGSPHRDMYAPFLTLSWGYITVFFMSLTPYNDHIQDIQTAFQTGKFTAAQNPANREKNRYSDVMPFDETRVRLKPSASDHPSSNEYINASLIETDDQGQSHTKFISTQGPLVKTFGDFWQMVYENQCPVIVMVTKFDGAKCDRYLPTNEGEERDYGKFSVKITKFKCDGVLELRGLEVQQNELRDFPRLGPAWKSGFWPNHAIGQYTVKFAHDLCSMHSKYSVYDYDLFAWFPNSILQVRHVLHILYSDWPDHGVPHDSAFVRKILKRLYGIPKEHPIVAHCSAGIGRTGAYITIHNTIERILLGDMSALDLSKTVKKFRSQRPGMVQTEDQYKFCYMAVVSELNDLLSNSKH

SEQ ID NO: 131676 - protein, 1718 aa, Oryza sativa
  Clone ID: PAT_MRT4530_3371C.1.pep
MAGHPPNHRGEGMIDFVAELARMTLVVGYPNAPEYTTIPPLSGELPHRVRLEVHGYVGTCLANMVVEASGGTADHACQEAAYLMMARLRERHNYIFHDTAYRFHPRRANGDDVSSFRPTASENDTTFGHMCAVMRGLDRMHSDLHKATKALNDGKLMRIVALKDEIARLKRENAQLKGLPAPGGVRIRTTPRKTTTAPVRIQLAPRNPPPSAAPAAPPVPPAAPAVPAAPAPASALSFAPASAARGPASGNGGCLFGMVYTRNGSRATGEGSNGEERADGVHPSSDSGNGPPPLPENPTLAQVMAHQTQMMAAMMQQMQQQHQQMHQRMMQHVEQQHQQFGPPPPQSKLPEFLRVRPPTFSSTTNPMEANDWLHAIEKKLNRLQCNDQEKVAFATHQLQGPASAWWDNHMATRPPGTEVTWAEFCRSFWKAQVPDGVVAQKKREFRALHQGNRTVTEYLHEFNRLARYAPEDVRTDAEKQEKFMAGLDDELTNQLISGDYADFERLVDKAIRQEDQRNKMDRKRKAAQFRAPQGSHQRPRFAPGQQGGPTTMIVRQHRPFNPSNFPQGASGSQNHHGGQSNRGAASRPPMAPAQSGPPAQAKKETGAKPGSCFNCGELGHFADKCPKPRRAGPRFIQARVNHASAEEAQAAPEVVLGTFPVNSIPATVLFDSGATHSFISKKFVGMHLLIREELSTPMRVHTPGNSSTSVQFSPSITIEIQRSPFLANLILLESKDLDVILGMDWLTKFKGVIDCANRTVTLINEKGETVVYKSLVSPKKGVSLNQIEAEIPVDTVEKNSRKLEDIPIVCEYPEVFPEDLTTMPPKREIEFRIDLAPGTAPIYKRPYRMAANELAEVKKQVDEQLQKGYIRPSTSPLGAPVIFVEKKDKTKRMCVDYHALNEVTIKNKYPLPRIDDLFDQLKGAKVFSKIDLRSGYHQLRIREEDIPKTAFTTRYGLYECTVMSFGLTNAPAFFMNLMNKVFMEFLDKFVVVFIDDILIYSKSEEKHEQHFRLVLEKLREHQLYAKFSKCDFWLTEVKFLGHVITAQGYYRRFIENFSRIARPMTQLLKKDEKFKWTAECDKSFEELKKKLVSAPVLILPDPMKDFQVYCDASRHGLGCVLMQEGRVVAYASRQLRPHEGNYPTHDLELAAVVHALKIWRHYLIGNRCEVYTDHKSLKYIFTQPDLNLRQRRWLELIKDYDMSIHYHPGKANVVADALSRKSYCTALCIEGIRSGGTAYAQANDSEIAELKKNMSVGKARDFHEDEHGTIWLGERLCVPDDKELKDLILTEAHQTQYSIHPGSTKMYQDLKEKFWWVSMRREIAEFVALCDVCQRVKAEHQRPAGLLQPLQIPEWKWEEIGMDFITGLPRTSSGHESIWVVVDRLTKVAHFIPVHTTYTGKRLAELYLSRIMCLHGVPKKIVSDRGSQFTSKFWQKLQEELGTRLNFSTAYHPQTDGQTERVNQILEDMLRACALDFGGAWDKSLPYAEFSYNNSYQASLQMAPFEALYGRKCRTPLFWDQTGERQLFGTEVLAEAEEKVRIIRERLRIAQSRQKSYADNRRRELTFEAGDYVYLRVTPLRGVHWFQTKGKLAPRFVGLYKILERRGEVAYQLELPSNMIGTHDVFHVSQLKKCLRVPEEQADSEHIDIQEDLTYVEKPVRILDTSERRTRNKVTRFCRVQWSHHSEEEATWEREDELKAAHPHLFSSSSESRGRDSV

SEQ ID NO: 131677 - protein, 82 aa, Oryza sativa
  unsure (1)..(82): unsure at all Xaa locations
  Clone ID: PAT_MRT4530_33720C.1.pep
VFVXQRRVVPXFCXVHSXCLPXTPVEWXXXXXXXXSLQRGCXGXEFLMXXXXXXXXXVXFXXAFYCTXYYXXAFXXTHXGYL

SEQ ID NO: 131678 - protein, 49 aa, Oryza sativa
  Clone ID: PAT_MRT4530_33721C.1.pep
MREHITGGDGRSEDALTVRAGVMTDGSDAMISPNRPPNLVITDDPPPLR

SEQ ID NO: 131679 - protein, 131 aa, Oryza sativa
  Clone ID: PAT_MRT4530_33722C.1.pep
MEFLQGQSTETAVAVAVAVVAVAAGAAFLLLLLRSSKKPKGCLDPENFKEFKLVEKRQISHNVAKFRFALPTPASVLGLPIGQHISCRGQDATGEEVIKPYTPTTLDSDLGRFELVIKMYPQGRMSHHFHE

SEQ ID NO: 131680 - protein, 145 aa, Oryza sativa
  Clone ID: PAT_MRT4530_33723C.1.pep
PLRPGLKSKIHSFAARHLFDVMPRPRGGDDRLGALPDEALQHVLSFLPLPEAVRTGALARRWRHLWKSMPVLRITGEGRVLNRRGVRRLNRFVNHLLLLRDRSARLDACEINLGTFRSQDDPQINLWIRHVLLCEAQDLWVHLSI

SEQ ID NO: 131681 - protein, 57 aa, Oryza sativa
  Clone ID: PAT_MRT4530_33724C.1.pep
PSKRRIVLTNQKFDFLVSRMRFNSQWLALKQPTNYTFFHGHILNPTVIIEHNPTKSY

SEQ ID NO: 131682 - protein, 319 aa, Oryza sativa
  Clone ID: PAT_MRT4530_33725C.1.pep
MKKTNQIKLFLEKPTPTLRSVSFLFGGILPHWRRVEELGSIPFIRDVAKKTDSTKYAMPALLLTTSISGNGKPEMTILSMVYTKLLCTNAHLGGRRVDAHHFNVYICGSRSGIAILDSDKTLICLRTALHFIGSPIRKKCRSFLLKTNHLFRCEILEKMASCINDSQWKIGTFFSNYLAKKKFRLRTKKINFGLNQQPDCAVILNADRKSSVILEAARSQIPIAFLVDSTIPGESHKRITYPIPANDPIQFVYLFRHSVTKTGILERKSVHEPMQTGLKAVDSLVPIGRGRRELIIGGRKTSICSATSRVTKTRVLYCA

SEQ ID NO: 131683 - protein, 597 aa, Oryza sativa
  Clone ID: PAT_MRT4530_33726C.1.pep
MSLGKVGVAVVGGGRRRSRYRLETRGLSYVLPARGAAARLFLGGGGEERLLLRGVTCEAPPGEVVAIVGPSGAGKTTLLSVLAGSADPARVVAGEVLVNGRAMDAARFRRVSGHVPQDDALFPMLTVEESLVYSARLRLRGAGGGNGGAAVARARELMAELGLRHVAGSRVGRVSGGERRRVSIGVDLVHDPAVLLLDEPTSGLDSGSALHIVKMLRDMAAAHGKTVVLTIHQPGFRILELLDRVVLLADGAVRHHGSLGFLEARLAASGHGIPPHVNVLEYAMECIDSLKPEVTTADASHADAASGSSRRRASSAPYANSAAAEVCILSARFAKTVLRTPQLFAARMAQSLLAGAFLGTVFLGAGDLQSRLGFFAFTLTYVLSSTTEGLPVFLQERRILERETSRGAHRVASYVASNAAVFLPLLLASALLYAAPVYWLAGLAREPGRFAYFSLVVWLVMLTANSFVACFSALAPSYIVANSLIAGLIGCFFLFSGYFVASKNIPRYWVFMHYASLFKYPFEAFLVNEYGGARGGAECLAEVGGGLCVLDGATLLRQQGMRASMRWSNVAVMLGFVVGYRLLCFVFLWFRCHRMRR

SEQ ID NO: 131684 - protein, 176 aa, Oryza sativa
  Clone ID: PAT_MRT4530_33727C.1.pep
MSRASPSCALLPLVMRTAQTRGAAPYHAAPQQETDVASTVLAGFSRVKWTRYPPTICVIHPSEQRHTTIVRHHPNYHESPHRLWPRLFCPDIHVVPPLDPVQCAKGERPATWRRMSMRSACSGLTSSATASPSPPSQRGQSSPPKKPELPSAFFLYFSLFLCPPHSYLATPCQTPH

SEQ ID NO: 131685 - protein, 135 aa, Oryza sativa
  Clone ID: PAT_MRT4530_33728C.1.pep
MAPSPSPAPTRIGTVHYRQRGAVHEFVVPQEPYMPRTAGARQVELPFAESADSSSSCAARKKSGQIRQPRALGISAELKDKGYILLSVGFPTITVEVATQDLVEDEVYWLQFGRYFARGPVERDDYALELAMGDE

SEQ ID NO: 131686 - protein, 291 aa, Oryza sativa
  Clone ID: PAT_MRT4530_33729C.1.pep
MATNRMDLDQAGHLNRHKKARTFYSYDLYIDKKLGLEVEDETVPIMQFKAKNKLVFLAKQSSKRQNSAKLSFGQHPLSTYEVVGSWSNVSLPFCTEVCKKLILSVIEGVKANLEDGNCFEKFDENNLVVGPSGKRGWCFTKMYEHIKFKITAAQKNLILMRVPYHEKWRIIANQNAVLHETINFIYSNYGCLPKFNEKGVLYTEIEIQLHEAEMFLDFIRHGTAHRLQRNISLTPHQHELILLVMYPLLLPLLQEAILDVLGEPEFRKILLRSVLEVTMKDMKLLEMYDGD

SEQ ID NO: 131687 - protein, 1010 aa, Oryza sativa
  Clone ID: PAT_MRT4530_3372C.1.pep
MGAGGWSARSRWVGQGRRRSRVPGSKGRRRWWMAEAAGSSSSSSASAVVVAVVIAVVVVVWVVVRRKVRRAAARREEVLRLTRLAQEESEMAEVECARAYYSELFPSVVHATEMVDEAAWGAPPAVVPAQAEAEAEMEARAQPQPQPPVGAKGVCAVCFRPTTFRCKQCKAVKYCSFKCQIAHWRQGHKNECRPPSTDANHDDVAELSVAKERKIEQTSASEENIAETNTAATVKNLNDKTKDMPSEVLASVEVPDDDHSVSAVKLPQSSSQVASLGSRKTESNMKPTTPVENGSYTKDLDEALVCRFQPSPPKISGSGSLINKESLIDSKKHQDCSQTSNSKKYADNNNAQAALPVAVEPKTSRTALHVEVGHSKTKAAGSDNIGVSKMVPSVLTVDKVSPVPGGRSVTPNSSKRADNIAERNSKPSEKSISTANSLATSLKKIVRQQTAPKVVRHYPSEPTHFPYELFIKLYEKVELQPFGLHNLGNSCYANAVLQCLMFTRPLTSYLLGGLHSKNCSKKEWCFMCEFEKLVGEGRQGKIALSPTGILSHLPDIGSSFGPGKQEDAHEFLRYAIDAMQSVCMKEARKSGTHRLHEETTLMQLIFGGYLRSKIRCTRCDATSEQHERILDLTVEIDGDISSLEGALERFTSTEVLDGDNKYKCSRCKSHERAKKKLTISEAPNVLTIALKRYQSGKFGKINKAIRFPETLNLQRYMSPKADDTSPVYSLYAVVVHHDIMNAAFSGHYVCYVKDTHGKWYKTDDSQVKPVSLENVMSKCAYMLLYARCSPRAPSSVRPALMAQDPARVKKDKARVNSGRWHGGGPIHQGGQMYADHMTDDLPHTYDEFGHGPYSPAESPSPSESSSIFTSSDTGSHSTDSSESTRNSTSEDMERLIFGDQVSYFDGSMFGHGENGRMTYSRSKSSLGTSSSGQEVDQYRPDEHRLQGAREGWNQGDESSSLYTNQSKHQFSSKLTEQYRRRLDGTEHDPGEANSVLLRRSARERTAQTFY

SEQ ID NO: 131688 - protein, 79 aa, Oryza sativa
  Clone ID: PAT_MRT4530_33730C.1.pep
LSMLEADRSLFPPRTLFLRYAGMSTYVHQSSSGSDNEILIIILSADRLSFKGIAVKFLCPIERPSWVHPLCASENMGLW

SEQ ID NO: 131689 - protein, 177 aa, Oryza sativa
  Clone ID: PAT_MRT4530_33731C.1.pep
MTRNGTIGSVLIATVAFAAAFTVPGGFIADDRPHAGTAILASRFAFRAFVVTDTMAFLCSIVATSFLIYGSAKEIPRGHRWWYSLLASGLVPWGAQFLIGTFALGFHLVLGSANRGLVIFVYMVSSAAVLFCFPGIWEFLESLFTGPLMDIRRTLFPVLISVTFVVAIALDIVMPRQ

SEQ ID NO: 131690 - protein, 113 aa, Oryza sativa
  Clone ID: PAT_MRT4530_33732C.1.pep
GFLSRVFPKGVWFLFPGGFFPFRFILNPPKPAVAIFALGGQNPGVFFFPNRGFGSTPPFSVVFFLRGFRGVKKFFVLLPARFLKTPSCLSFWLPPQGRFFPGPCCLVPFFFVP

SEQ ID NO: 131691 - protein, 54 aa, Oryza sativa
  unsure (1)..(54): unsure at all Xaa locations
  Clone ID: PAT_MRT4530_33733C.1.pep
MASEKKQANPMREIKVLKLGLNIFVGESGDRLTRAWKVLEXVSGQLPLFSKARY

SEQ ID NO: 131692 - protein, 164 aa, Oryza sativa
  Clone ID: PAT_MRT4530_33734C.1.pep
PQSYEYKHLLQLSSVKILGVTQQRPYSGPYNCHASPEAHNDECHHTRDVLPSKKHIEGSSGLLHPTLANEQAWIPCHAEHDMLVVLQCKRHGEDHEVITRPSLFLDMELLRDVEHAIEDGGCDGHQRGTPLLIEFIAAINHVHLEGNPALIHPNLANELAWLNW

SEQ ID NO: 131693 - protein, 105 aa, Oryza sativa
  Clone ID: PAT_MRT4530_33735C.1.pep
GPRCAAASATAAAAAEVASATRWRSGAAASARRGSSGMIPSATRSTSTRAPPTTKTTTTRPATTTVPTAFSTGASHRRRRPSPPCKPPATGSFDRLQRICEYIYI

SEQ ID NO: 131694 - protein, 522 aa, Oryza sativa
  Clone ID: PAT_MRT4530_33736C.1.pep
MDNAAAVATFMEITSCGSQEAAVQHLASCRWDLDAALNRYFIFGGVLAAAPAPAPVADVAPPAALDDGVRAPIPARSDTLYGDMYGGARRRDRDSRPAPSVWEDEPPAVTPSVAPVYIQMPSANPAVAPVQIQMPSETAASVPAAPVPVHAPSQPPVVAIAVKKEQNEKDEEEDNGRDDDDDGYSDSDYGMDTDDDDDRYDECIEKTPSPPPKSTQQQATTLAEMYRRPRELMHDADFHSTKVHAARQDRWLLLNLQSAGEFASQMHNRDLWADQVIARVVRESFVFSLLENSYGDDDDEASKVCCFYKLHDQLPAVLVIDPITGQMLAKWSGVIQPETFLVDIEEYSKSKPSMRSKPYIFQRKPMPVRSAPAASEQHHQEPAMVDTAAPMDIHNVQEPDTAAPAPAPVVEHGVQQPATAGAGAQQPADEQDDDDQPMEGEKMYRMRVRFPDGSVVTKEFGCKRRVAVLFNYCRSVLHDKPQAFKIKRLLGVGGAFHELPQGDHSFEDLGLNCATVSVILDT

SEQ ID NO: 131695 - protein, 140 aa, Oryza sativa
  Clone ID: PAT_MRT4530_33737C.1.pep
QQRPLLTGGGGGSGGGVRRQLPSGFVPPHGVHLLQLAPEAIATSSLATLGFRGGCFRFDFALRVTPLWCSRRRRQWRHRQTEETSRSVDDGDRAPCGVDDGGYANVAELRGVDNSGYVDVVELGAASMRMWLLITRVEEE

SEQ ID NO: 131696 - protein, 142 aa, Oryza sativa
  Clone ID: PAT_MRT4530_33738C.1.pep
IHPHTDPSPSSLPKLLAATAPSQATRPRPSCPRRLPRPRPSRLPHPRLCRLDARRAAQLPAPASSHRRTTQVAVPPPLLASSLRPSVRRHRASASSSTLRPSLHPFEFVIRAYLFDLGSFVASDYVMICICELCDLALLLCC

SEQ ID NO: 131697 - protein, 39 aa, Oryza sativa
  Clone ID: PAT_MRT4530_33739C.1.pep
PLLFPVCYDFTRPCPGVLLFSPLLPCTLCSVRPIKMDTT

SEQ ID NO: 131698 - protein, 331 aa, Oryza sativa
  Clone ID: PAT_MRT4530_3373C.1.pep
MDITGWRSTLNSTLFAGTDLSLYVEKNPASLQGSFSGSDVVDVPLSTSTGGSFDIEPSGVGDGAHVAGRRRRRRQNVFPLTAYPGNVAVNSEIEGEVGNAVGKSSVLRRERRLWCGSRWRRTEGKSREMGSSQRGGAGAQPPAPSIRFRRPAFAAGTPHRRPPLDPPDRRRPSPPTSSRSTPPLPDTAAVASPRPLHSRTPPPPPRHAGSTPGRCRRRLASPDPGRRRDSRRRPGATPTATLPRSSRQSPIHIRGRCRPPIHIHIEDSQGSKRQPPLRALPTASAARITDLLHADYLLRGRCRPPIHSEDSRGQLNHIHTAVPGGEPQGFD

SEQ ID NO: 131699 - protein, 96 aa, Oryza sativa
  Clone ID: PAT_MRT4530_33740C.1.pep
FFFFFFFFFFFFLGVLTGHIPPRMTLSLLYSNETGLLYIWLNLQIRGNIISAGFSSKIFLQTSNFSITSKLSYKHKLLTFLSHRSNFNQTFNFSVN

SEQ ID NO: 131700 - protein, 114 aa, Oryza sativa
  unsure (1)..(114): unsure at all Xaa locations
  Clone ID: PAT_MRT4530_33741C.1.pep
QKTRGLGDLLNSSAGPKLAFGCISVPVDLILXSTRNKNKRTVVKSINDSRSARTLSIHGNHLEAHQPEPDVAHKSHYXNRLYQLTQPSSTLADPXVADPDSSQFLLCSRTRSPP

SEQ ID NO: 131701 - protein, 68 aa, Oryza sativa
  unsure (1)..(68): unsure at all Xaa locations
  Clone ID: PAT_MRT4530_33742C.1.pep
XSQLXHRRLXDXLGXYVGQRXYGXARXFAXPXEGXPTRXSSMAXXSKVLVRGXEXVRXLDXTXACVDX

SEQ ID NO: 131702 - protein, 72 aa, Oryza sativa
  unsure (1)..(72): unsure at all Xaa locations
  Clone ID: PAT_MRT4530_33743C.1.pep
TFGFEKKKKKKKKKKKKKKKKKKKKKKKKKKKKKKKKKKKKKKWEEEGKNSXNFYKIKITGKKGEKNQKLIN

SEQ ID NO: 131703 - protein, 140 aa, Oryza sativa
  Clone ID: PAT_MRT4530_33744C.1.pep
MGELACGIGTIKVESVWHRVPTNMASSRIPPSPLVLADGGAAAPMLHTVCLQVKRLEARIHEAVAALADGFRGPTFSFPLRNLHELASINPKVSTTGTASSLRPPPLARLDKLWGKPDVFRYRRLLRPTVTTAPLLGVCR

SEQ ID NO: 131704 - protein, 87 aa, Oryza sativa
  Clone ID: PAT_MRT4530_33745C.1.pep
MRRKEKNMGLGKNVRDAGGSRLSVGVKIGSNQEGTPRCGPTARMPPCAKFVVIVSQGAARSARPNKLASLSPLLFWKLMKKSILFCL

SEQ ID NO: 131705 - protein, 170 aa, Oryza sativa
  Clone ID: PAT_MRT4530_33746C.1.pep
MAVPRLAVFFLLALLAVMSPAAASASAAAAPETCVRTMQRMLSCLDFIEHRTDAVPRPCCAQLNATVAKQPCCLMHVLHGDVARLVGPGFDTARAMVNVTAACLGDASVLMSIARSCAGKPLPPLTPEYPFTTGVPPAPPQTSGATRLEGTSNTALLFALGAVAIAMLRI

SEQ ID NO: 131706 - protein, 114 aa, Oryza sativa
  unsure (1)..(114): unsure at all Xaa locations
  Clone ID: PAT_MRT4530_33747C.1.pep
TGKPGCLTSARKAXLNXXADTXYXXLXIXILCSSRFLESVLLPINSVTFRKIQTLPVVVHFFHSFVRLTPXPFSVXIIAIXPCFLDXELMYXAHSLYTHXHTHTHILRIQYVYY

SEQ ID NO: 131707 - protein, 121 aa, Oryza sativa
  Clone ID: PAT_MRT4530_33748C.1.pep
MREREEKGEAAAAAEGKEKEKGKKVSASGYGRVGEGDVLRFHLGYDPTMPLEAREINSARRQRWGSGAQATGGGVAGGRGRSGAWASCFAPPFPGPASPRPAATLVSRVAPSTSLRPCTEK

SEQ ID NO: 131708 - protein, 36 aa, Oryza sativa
  unsure (1)..(36): unsure at all Xaa locations
  Clone ID: PAT_MRT4530_33749C.1.pep
CGGXLYYKXKTCKGALTTXPSFPNLRGKQQKDAPFL

SEQ ID NO: 131709 - protein, 425 aa, Oryza sativa
  unsure (1)..(425): unsure at all Xaa locations
  Clone ID: PAT_MRT4530_3374C.1.pep
CQIWREWITGLLSTSTSKIILNGIPGETIKHGKGLRRGDPLSXLLFILAIDPLXRLLDKATETGILNKLRGREVRFRTSMYADDTAVFIHPTKXDVTAFAELLNHFGQASGLCTNLQKSQVAPIRCDNPDLDDVLQVTPATRANFPMKYLGLPLTPGRPRRIHLQPLFDKSMNRISRWRGKHMGLAGRTTLVKVVLTSQXCFLLTGLKASKESLEALDKQRRKFLWAGGEALTEGKCKVNXNXTCLPTAVGGLGILNLEKFTRALRPRWLWHEWKSPEKAWVGSGTPCDDTNKLLFVATTILTIGDGAKISFWESAWFQGXRLKDAAPLVYAVAKKKSASLQQASHSDQWLMDLDLPVVSGWTTXLISQLVNVWGVVRILHLIESKEDKTTWKLTSYGEYTAASAYNAQLLDTTTSNFNPIVIQK

SEQ ID NO: 131710 - protein, 370 aa, Oryza sativa
  Clone ID: PAT_MRT4530_33750C.1.pep
MGNRIGGRRKAGVEERYTRPQGLYEHRDIDQKKLRKLILEAKLAPCPFCKTPSYAVEYRGVKTKEERSIEQFEEQKVIEAQMRMRQQALQDEEDKMKRKQNRCSSSRTITPTKEVEYRDICSTSFSVPSYRCAEQETECCSSEPSCSAQTSMRPFHSRHNRDDNIDMNIEDMMVMEAIWRSIQEQGSIGNPVCGNFMPVTEPSPRERQPFVPAASLEIPHGGGFSCAVAAMAEHQPPSMDFSYMAGSSAFPVFDMFRRPCNIAGGSMCNLESSPESWSGIAPSCSREVVREEGECSADHWSEGAEAGTSYAGSDIVADAGTMPQLPFAENFAMAPSHFRPESIEEQMMFSMALSLADGHGRTHSQGLAWL

SEQ ID NO: 131711 - protein, 84 aa, Oryza sativa
  Clone ID: PAT_MRT4530_33751C.1.pep
GLCFFFFFFFFCVFFFFFFFFFFGRNGRTEGTTFRGKKQPRVFHRGPLNLRVGGRKKIFWAPTRGAKKGAPQNPAPKKRAFWEN

SEQ ID NO: 131712 - protein, 358 aa, Oryza sativa
  Clone ID: PAT_MRT4530_33752C.1.pep
MASLAIFAAVAFVLLAASVSSSSAALYTVGDARGWAVPPTGSESYNHWGLKNRFRVGDVVEFKYVNESVVVVNHEGYRNCSSLSPVIRFTDGDTKYLLDRPGLVFFISGVQERCERGLRMRLRVRPAAPGPAQAPAPGPTRAALTLRRPPIGAPRPAAVTAAFTPTSPSASRPSARTSPSPSPGPAQAPSGERKVRNSSVPRARFHRRNGSSTSAFCCASHARFHRSRRALGSRLVHIPRDHVRCHARAHAHAHACGRRATGWLSASSFQDETGRTIPKFGAWDVNNPASADGFTVIFSKARDEKKGPVNVDASTRSNSDMKDSNNNKATEKINPYHRRTNSASKKWFCCVSPSPTQP

SEQ ID NO: 131713 - protein, 49 aa, Oryza sativa
  Clone ID: PAT_MRT4530_33753C.1.pep
MVNRRFDRQRQGFVIYFVRGFVVSKFYLETKATHDIKGIPPKGLRIFES

SEQ ID NO: 131714 - protein, 265 aa, Oryza sativa
  Clone ID: PAT_MRT4530_33754C.1.pep
MFFQRKNSKKVKDSNGSSSKKDKDSRGKNIFDSAKGGLGALTGTLQTAKNDAGEKAENLQDDVKTTIGAILRRGSGVLEKAKEIGGHSEASQSKELEQGSEEQGKKDMEALTKVMDKVKEVKSNPEVVEKLDKVKEDISSLAHALHLGKHDKEHESEEKAKEGETAKRADEGASASKSEDSGVVVQAVEEIQAVVTAVQQQLHTEGAAAETPNEAAAAETSAEGEKPEESKRDVEKDDPSKRLDFKGFFAMIFERCCNPGNKKKD

SEQ ID NO: 131715 - protein, 509 aa, Oryza sativa
  Clone ID: PAT_MRT4530_33755C.1.pep
MGVSALLLLLLAAAATAAPPEQPALSATPSSAAAANNSSGGGGGAASNGVNSNSVLVALLDSHYTELAELVEKALLLQTLEDAVGKGNVTIFAPRNEALERDLDPEFRRFLLEPRNLRSLQRLLLFHVLPARLHASDSSSPDFPSSHPTLSGERVDLSASPMRVGAAAVTRPDAVVRPDGVIHGIERLLVPRSVQEDFNRRRSLAAISAVLPTGAPEVDPRTHRLKKPAPPVPPGAPPVLPIWDAMAPGPSIAPAPAPGPGSGKHHFDGHSQVKDFIQTLLLYGGYNELADILVNLTSLATEMGRLVSEGYVLTVLAPNDEAMARLTTDQLSEPGSPENILYYHMIPEYQTEESMYNAVRRFGKVRYDTLRLPNKVTAREADGSVKFGHGEGSAYLFDPDIYTDGRISVQGIDAVLFPPKDTATGGEGSGSGSSGAAPARKAPAVTAHSKSKLRRGQEVVGRGMPSDGLPRPKIAIRELPIDYDNGLMDKYVYLPLLFAQLMTLKHEPK

SEQ ID NO: 131716 - protein, 76 aa, Oryza sativa
  Clone ID: PAT_MRT4530_33756C.1.pep
HEACVWQCAPWNFSDDHGFVLASSYLLLLCCWLSLLGWPLALSLFASSSPLNLRPSLPRRRASPLLPIDKPRVRVS

SEQ ID NO: 131717 - protein, 82 aa, Oryza sativa
  Clone ID: PAT_MRT4530_33757C.1.pep
WPRCVRDPFQKLPFHLWSPTPPAPSHLVPAGSPPLLPLTKSENRGDHSGSLGPALSGVISDAEAAKRGMIIAGGCGRVRFID

SEQ ID NO: 131718 - protein, 100 aa, Oryza sativa
  unsure (1)..(100): unsure at all Xaa locations
  Clone ID: PAT_MRT4530_33758C.1.pep
ELTRTNDKKNKLKRKKYVTCRIFQSSTGKLLVSKTQSCKRNLEVLISPKPGKIGCNFFCRCLWIYIICPIPSPYEKLTCSHKIPXNILLPRRFACATVAG

SEQ ID NO: 131719 - protein, 36 aa, Oryza sativa
  unsure (1)..(36): unsure at all Xaa locations
  Clone ID: PAT_MRT4530_33759C.1.pep
PPASXKTYLFQPKYSWPIFPSSVLVAFFWGFPPSLS

SEQ ID NO: 131720 - protein, 123 aa, Oryza sativa
  Clone ID: PAT_MRT4530_3375C.1.pep
SKYKFYISCYILIMAIKKTLMMIGSREAEAVMPHSFSSLFPSSPIVFFFGFTSSDPSIAPLLTTSEPPSKRCSQPIPEIKVPIHSPPPPPPSFSSSLSCLLLLLLYSFSFWLVGSLLETPKPN

SEQ ID NO: 131721 - protein, 59 aa, Oryza sativa
  unsure (1)..(59): unsure at all Xaa locations
  Clone ID: PAT_MRT4530_33760C.1.pep
XTNPHHHQPTYLNLNPSFHIPIPPHFFLLSXTQIFQNHPSHLNYQLXHQLILILYYTLY

SEQ ID NO: 131722 - protein, 499 aa, Oryza sativa
  unsure (1)..(499): unsure at all Xaa locations
  Clone ID: PAT_MRT4530_33761C.1.pep
LQRPEKWMRERSDQLRKDKXMNLVDTLQRLGIDHLFEEEIATTLNTIHGAEFDSPSLHDVALRFRLQRQPGKRATADVFNKFKHRDGSFIIDITNDPKGLLSLYNAANLLTHNEEALQEAILFSRHHLELMKSNLKSPLAEQVSRALQIPLSRNLKRVEALSYILEYNVHEQTYNPSILELAKLDFNLLQHIHQRELKTITQWWEDLSNDIGLDYIRDRIVECYFWSYSMYFEEEYTRARMILAKFFMLTSLLDDTYDTHATLEECRNLNVAIQSWDESDISVLPDYLKKFFLKVMSNFVEFENELEPHIRHRNAYNRKVFQLLSGYYLQEAEWFHHNYVPSFKEQIEVSVMSAGIQALSVCILVGMGNIVTEETLEWAIGNNDAVRAGGEVARFMDDMAAFKNGRNKLDVASSVECYIKEYNVTSEVALAKIGSLVEDAWKTINQAHIDRRELLPFVHRVTNLSRSMAILFLDKRDAYTYSKDFKRTMESHFVKPIPL

SEQ ID NO: 131723 - protein, 569 aa, Oryza sativa
  Clone ID: PAT_MRT4530_33762C.1.pep
MESTPEPEDGRELYALLHLSPDASGEEIRRAYRQYAQIYHPDKYQDPQMKDVATENFQRIRDAYEILSDENKRQIYDIYGMEGLNSGLELGPKLNKPEEIKEQLERLKRRKEEEKFLAHARPTGSIIANFSVPQYLDGYGIMRGMGMSSEVQLPVSKKNTVVVGGNLVVNGTDGTGAASAVLRHQLSSVASVEFMATAGLRSLISVQTFRQISPHSTATSGLALSLRDGSINLSNAWTRQLSDNIVGNIQLALGTDSSISVGWQKKDEKNSAAGDVKLGTNYFGASAHYTRYFSTKSHGRVAGRVGSTALDFEIGGGRRISEFSTVRMIYNIGIQNISILELDTVINKVGMIKWESIVIGGEVEGVSWRFELHRAGQKLVIPVLLSTDFNALLATSVFAIPSTLYFLLQTYFVKPYCLKREKQKELEKMESLSSQLTEARRAAKKAQKLLEPVSNRKKNRQLEDDGLVITKALYGNRKKVKESSESNELNDDVASQVLDVTIPLNFLVSEAGQLKLHEGIKKSGIMGFYDPCPGDPKLLLVEYTFHGQKYKVMVDDYAALLIPQDIHQI

SEQ ID NO: 131724 - protein, 90 aa, Oryza sativa
  unsure (1)..(90): unsure at all Xaa locations
  Clone ID: PAT_MRT4530_33763C.1.pep
SSVPGDPIKSRWFNNLNFRQAIAYGIDRERMVNNIYRGLGEKQNSFIPVQSPFFNPDVKVYNYDPEKAQAXQKAGGFTYNNQRQLWRSSE

SEQ ID NO: 131725 - protein, 59 aa, Oryza sativa
  unsure (1)..(59): unsure at all Xaa locations
  Clone ID: PAT_MRT4530_33764C.1.pep
KAGANDVRQHSFFRVIAWQLIGCMNSPDLYVPLKLIGXRLMHKLSANEYVLVNVDTFSG

SEQ ID NO: 131726 - protein, 120 aa, Oryza sativa
  Clone ID: PAT_MRT4530_33765C.1.pep
RAATRDGRVLRRACRPRRPAPPVARRRRRRRRRRVRLRRRQRHLPPQRFRISLKFDVYSPAQSTTSRKVPCSSNLCDLQNACRSKSNSCPYSIQYLSDNTSSSGVLVEDVLYLTSDSAQS

SEQ ID NO: 131727 - protein, 47 aa, Oryza sativa
  Clone ID: PAT_MRT4530_33766C.1.pep
TLGYYVIFSGIKTSYKRQLIFRADYTCEQKKNKRKKEKNPLVVFSLL

SEQ ID NO: 131728 - protein, 567 aa, Oryza sativa
  Clone ID: PAT_MRT4530_33767C.1.pep
MDPRARYPPGIGNGRGGNPNYYNRGPPLQQQHNHHQQQQTSAPHHQQYVQRQPQQHHHHNHHQQHQQQQQQWLRRNQIAREAAGTDRNSEPKAVAQSPAVDGIDSSSQDWKAQLKLPPQDTRYRTEDVTATKGNEFEDYFLKRELLMGIYEKGFERPSPIQEESIPIALTGSDILARAKNGTGKTAAFCIPALEKIDQEKNAIQVVILVPTRELALQTSQVCKELGKHLKIQVMVTTGGTSLKDDIIRLYQPVHLLVGTPGRILDLTKKGICILKDCSMLIMDEADKLLSPEFQPSVEQLIRYLPASRQILMFSATFPVTVKEFKDKYLPKPYVINLMDELTLKGITQFYAFVEERQKVHCLNTLFSKLQINQSIIFCNSVNRVELLAKKITELGYSCFYIHAKMLQDHRNRVFHDFRNGACRNLVCTDLFTRGIDIQAVNVVINFDFPKTAETYLHRVGRSGRFGHLGLAVNLITYEDRFNLLTKLYIANNLTEFQRVFTFSKGNKKTILVNTSSSAHTSEFDLEVEKRGFIMDLLWHMGTFIFGVLFEMRQTTLPMDTLCLYHFG

SEQ ID NO: 131729 - protein, 143 aa, Oryza sativa
  Clone ID: PAT_MRT4530_33768C.1.pep
MPEETATSAGAWARRKGLPKELRRGGGRDRGQAGVEGDAATSREEMVTSVGVPVMNSSRPETEQWRQRHCCRRGCTSGGLRGKQRAGRRRGGGCDAGGGDGTAGRRSGEEGEAAGGGRRGEKRRATAGRGDTTTGRLGMRLKR

SEQ ID NO: 131730 - protein, 103 aa, Oryza sativa
  Clone ID: PAT_MRT4530_33769C.1.pep
MAGVLKLLLVLVLLVSSSDGSDASRHLKGDAIERSGAAAGEAVMMRAVMIHVIKGMELEMQTCHYTGQITVQDSRKTCDLEMPRINITALCICSIAWGKTPAG

SEQ ID NO: 131731 - protein, 726 aa, Oryza sativa
  Clone ID: PAT_MRT4530_3376C.1.pep
MGPTTATDTGARMKPTTVASAVHRVQMALYDGAAASREPLLRAAASLLSGPDYADVVTERSIADACGYPACPNPLPSEDARGKAAPRFRISLREHRVYDLEEARKFCSERCLVASAAFGASLPPDRPFGVSPDRLDALVALFEGGGGGGDDGGLALGFGASGDGKEVEEGRKVEIMEKEAAGTGEVTLQEWIGPSDAIEGYVPRRDRVVGGPKKEAKQNDACSAEQSSNINVDSRNASSGESGMVLTENTKAKKKEATKTPLKMFKQDEDNDMLSSCISDSIVKQLEDVVLEEKKDKKKNKAAKGTSRVGKSKPAKRPVGRDGHEVDFTSTIIMGDRGSEMMDHGALGQYNFSSSILANEQPSSSQYAAIDSVQAYTEELDELFSNAVNIAKDETSDDSGRCTLRSSLKAVGSKNAGHSVKWADENGSVLETSRAFVSHSSKSQESMDSSVRRESAEACAAALIEAAEAISSGTSEVEDAVSKAGIIILPDMVNQQQYNNDYDNDKDAGENEIFEIDRGVVKWPKKTVLLDTDMFDVDDSWHDTPPEGFSLTLSSFATMWAALFGWVSRSSLAYVYGLDESSMEDLLIAGGRECPQKRVLNDGHSSEIRRALDTCVCNALPVLVSNLRMQIPVSKLEITLGYLLDTMSFVDALPSLRSRQWQLMVLVLLDALSLHRLPALAPIMSDSKLLQKLLNSAQVSREEYDSMIDLLLPFGRSTQSQASLPS

SEQ ID NO: 131732 - protein, 297 aa, Oryza sativa
  unsure (1)..(297): unsure at all Xaa locations
  Clone ID: PAT_MRT4530_33770C.1.pep
SVTETERRGKNRHERSVRPATHPAKRGGRGRGSREHRPAPPSPRAASTPPRAPAARTRRRETRGARPRRGQTEAXRATTPRHPAGADRKATRKRTRPRDRERAARGTAPKGRSQRRDRTKQPTAPNISRKKHGTPTDQRHRRRRAGTQPTNGGPTRETKXRRAKATGRKEQQPPARHSQGGGNSGESPTTRRQGGTAPETAHQEAPPPPPQKQPASTRASTTPRPARDKDSTNLQRGASGTVPPKRSSGEPDGIKRTRSAGQEKSVQRAGPAESIASPPRRREDQQAAQEQTHQRSP

SEQ ID NO: 131733 - protein, 52 aa, Oryza sativa
  Clone ID: PAT_MRT4530_33771C.1.pep
PFDVVVEAQENKEEPVFQGIHEPNPWQTFVVKKKTGLPCVLSLLSLTFMSGE

SEQ ID NO: 131734 - protein, 42 aa, Oryza sativa
  Clone ID: PAT_MRT4530_33772C.1.pep
AECTLNLCPGPARIHKRQLLMYRSTSYKNIKDYKCSGKDKTS

SEQ ID NO: 131735 - protein, 88 aa, Oryza sativa
  Clone ID: PAT_MRT4530_33773C.1.pep
GRWEYVLAGLLPYRGYLLRGRRRLSPLTHQAHVSVTAGASRGYVRAVRCARWTARWATRREPGGGWRVARGFVALRREAASGSKPSPL

SEQ ID NO: 131736 - protein, 123 aa, Oryza sativa
  unsure (1)..(123): unsure at all Xaa locations
  Clone ID: PAT_MRT4530_33774C.1.pep
CPIRILSFPFIFTCFLIANKGFIGVSADFITLDLQPMYALTFGSXLFYHLIASRLVYTVLYYCYTILSSVDCLYIIIXSSVRLYIGHKADSLXNPIVIGWHRLSAGIGIGWNYSIGLSADQPF

SEQ ID NO: 131737 - protein, 36 aa, Oryza sativa
  Clone ID: PAT_MRT4530_33775C.1.pep
LKILFPDLYAVNSQQNASVRDIYQEGAWELSFRRNL

SEQ ID NO: 131738 - protein, 704 aa, Oryza sativa
  Clone ID: PAT_MRT4530_33776C.1.pep
KIDNGMVIKKIVMYPIQHRDYRPGIDNLLVLLIGGIPIAMPTVLSVTMAIGSHRLAQQGAITKRMTAIEEMAGMDVLCSDKTGTLTLNKLTVDKSLIEVFQRGVDQDTVILMAARASRTENQDAIDATIVGMLADPKEARAGIQEVHFLPFNPTDKRTALTYIDGEGKMHRVSKGAPEQILNLAHNKTEIERRVRAVIDKFAERGLRSLAVQYHQVPDGRKESPGGPWQFVGLLPLFDPPRHDSAETIRRALNLGVNVKMITGDQLAIGKETARRLGMGTNMYPSSALLGQDKDESIVALPVDELIEKADGFAGVFPEHKYEIVKRLQARKHICGMTGDGVNDAPALKKADIGIAVDDSTDAARSASDIVLTEPGLSVIISAVLTSRAIFQRMKNYTIYAVSITIRIVLGFMLLALIWKFDFPPFMVLIIAILNDGTIMTISKDRVKPSPQPDSWKLSEIFATGVVLGSYLAMMTVIFFWVAYKTDFFPRVFHVESLEKTAQDDFQKLASAVYLQVSTISQALIFVTRSRSWSFVERPGFLLVFAFFVAQLIATLIAVYANWGFASIKGIGWGWAGVIWLYNIVFYLPLDIIKFLIRYALSGRAWDLVLEQRIAFTRKKDFGTQENQLKWATAQRTIHGLQPAATAAVFRDMTSYNDLNQLAEEARRRAEIARLRELTTLKGRMESVVKQKGLDLETIQQSYTV

SEQ ID NO: 131739 - protein, 120 aa, Oryza sativa
  unsure (1)..(120): unsure at all Xaa locations
  Clone ID: PAT_MRT4530_33777C.1.pep
MESRRGGRDGGATRHRGCTAXEEERERWRPELLFGSSAVSWAVRKRRRRGCKGRRRRWKLIRERGRGSSALSRWGRRTVVSVSSSKRKRTRAGERVLGHALQSSRQAAGPSGNVAQAADH

SEQ ID NO: 131740 - protein, 1779 aa, Oryza sativa
  Clone ID: PAT_MRT4530_33778C.1.pep
MVIVVELVVARATEQGESGEGRRLRDAAEVMPAHGSTGEEDASRADRLAICKLGQAWPSTNADAQNMHIFTPMNTSLLRCGMGAYLLTWGSLSLVLLSVLQSSMMYMSSGCFTEERAALMDIKSSLTRANSMVVLDSWGQGDDCCVWELVVCENSTRRISHLHLSGIYYPPISTPSDRWHLNLSVFSAFHELQFLDLSWNYPSSLSFDGLVGLKKLQYLDFTYCSLEGSFPVFNGEFGALEVLVLNHNHLNRGLSAQAFQNLQNLRQLNLSLNHFGGELPTWLFELPHLKILDLSNNLFEGSIPTSSSLKPFALEILDLSHNHLSGELPTAVLKNIRSLNLRGNQFQGSLPASLFALPQLKFLDLSQNSFDGHIPTRTSSEPLLLEVLNLQNNRMSGSLCLWSERAFGNLQNLRELYLSSNQFSGSLPTFLFSLPHIELLDLSANLLEGPIPISISSNLSLSLKNIRFSQNNLSGTFPFIWLRNLTKLEEIDFSGNPNLAVDINFPGWIPPFQLKRLVLSSCELDKSTLSEPYFLHTQHHLKVLDLSDNHLTGNMPNWLFTKETALVRLNLGNNLLTGSFAPVSNNELSGLIFDGVNNLSIISQLYLDNNKFEGTIPHNLSGQLKIIDLHGNRLSGKLDASFWNLSSLRALNLADNHITGEIHPQICKLTGIVLLDLSNNNLTGSIPDFSCTSELRFLNLSRNYLSGNLSESYFNTSNLIALDITYNQFTGNLNWVGYLGNTRLLSLAGNNFEGQITPNLCKLQYLRIIDFSHNKLSGSLPACIGGLSLIGRANDQTLQPIFETISDFYDTRYSLRGFNFATKGHLYTYGGNFFISMSGIDLSANMLDGEIPWQLGNLSHIRSLNLSYNFFTGQIPATFASMNEIESLDLSHNNLSGPIPWQLTQLASLGAFSVAYNNLSGCIPNYGQLSSFSIDSYLGNDNLHKISQGKRCSPSPGAVAKEDVGERVDPFSAYRVCITMQSYTQKGDVEVVCDGKEWDIVVDGDKFNLIALTDEIKEHFEWGTNQKASMLYLDSTGQYLPLTSDAALRSLVDSNFLFREISVLVRVEDIVEVADADGNGNANCNGGDGPGGDGSGGDGSGADVNGGDGNDGDGNVVVGEKEMQQKASSKWQAMFWDDTPISNPEYPEDEPIGVNEEHLYGVVDLQSQKKGTSGKKTDKEGSSGNEVATQDVPNDFDPQHVPEEEVPVDEIGIAVPLFVHNRENPTFVVDATFPNGEAFKLAMRQFAIKGEFEVNVSHSSKARYIAKCAKTKDCTWRIYARKETKSSVWKISRLSEIHTCATTSKLSGKMASSGWIADRAKDIMTTEPNIGPKALQDRLEKKYNVTLRSGRTWEGLQKAKDDIHGSWEASFQLLWSFKAEIERSMPGSIVDINVNAMGEKWHMQFLTRKNYENWEWFMQRLKQAVVEYRECFRHLMLNFSKKFRGEVFDSNMWPAAWTFSLYKYQEYMDQIKEACPAAYEYLEVHHPHTWTRSKFSEACKIEYVCNNLAESFNAWISDIKGLPIIDLVNKLKQMIMKQMSRRKIVAEGLIGKILPSVVRALNAKSRGLNYEIARSGLTDAEVTVFDMKTKKHNTYGVFLEKGASLEDYVGEFFSVDRFKLAYASSIVPMSDKTQWPKVDIGFKMLPPKLGRSARRPQKNRVPNSAEGKGKGKRKRCSRCQGFGHQARTCKEPEWVDPSDLASAPAPPKRKKRKTKPTVVVVSKPQTRSKSKCDASSSSQPLPTSPSHPAGVVSTSQPPTRTTPPRLAKTKARTAGVRPK

SEQ ID NO: 131741 - protein, 86 aa, Oryza sativa
  Clone ID: PAT_MRT4530_33779C.1.pep
SGPPPPPPLPRPRPPPSRPPPPPPPPSAASPHAPIPRGRRRRGGMGGGARRRTGSGRGSTGCASSRPSSPLTVEPPWESRIHGLVR

SEQ ID NO: 131742 - protein, 2478 aa, Oryza sativa
  Clone ID: PAT_MRT4530_3377C.1.pep
MANFSSHIQELRELIAASSTTTSTSAPASVHFEVKLREVLPNLLRDYVVPSSPTGAADGREATAVLKLLSYTAGKFPGVFFHGRAADVIRVIGRVLPFFAEPNFRSRHEIIFDTVWSLLSLLRTGDREAYRQFFLDVMVAVQDVLYVVASMHGDRPSGVLTERYLVKCLCGSFSDILDSPGIFSDLPDSCQPKNGPGVLVDLTDGTLYVEGLVNMPFVSAACSIICYGDESLHKVCFDFARIVATVITVEILPVENIIRSIMCILSQDVNGLSDIRDADYDFSMGACLHALHSSCPGYIVAITASDIVNVFQRAVHTSRSSELQVAMCNAYKRIVELCSPRVWKPEILLKLLCLPKPCAKLIECIRLVVDKSGQSFLSSDDRDDGSSLLAKSEGLDLPKVGQKRIALDEENSFPKRLKMTEPRFSSGSFMVDELSAGVGQELEKDHGCDFRVQLYSLINCLSPDNHMAYPLEPAISIQVLSLLCLSLSVYPKTNLFSRISKQVLSWIPWICKQTTKICMFSFDVSLYFEAVQTVMLLQSFLPGHTKLFEDEPLLIGNGCTDFEYPRYADLINLLKLVSDDGYLTSQTCSEKLKCLAVQIIAKIGSRQNAECDLQVLELAIQSETGELQNEALMSLPIIVLYSGPRMLGAMFRKLETIGTLGCKKLWKSIAISLGFLSCLNGTTDCTDKVGNHCKLFLAKHCEQPILTLNLLRGFWCPQCDVRTVHIEDQVPIVDIALSEDKNIDFKINMFKAHSLFFKFLYAETSEECIVSIVEVLPRILKHSSRDVLLDMKFQWVQCVDFLLLHEMKAVRDAFSSVVSCFLETNAMDILFSDGTGMSGGTSRVKFMDKIKSAFTEAEDPQILLTLLESTAAIVKASDIHGEVFFCSFVLLIGQLGNHDYIVRVTALRLLQRCCTYCFKGGLELFLSKYFHVRDNLYDYLSSRLLTHPVVISEFAESVLGVKTEELIRRMVPSIIPKLIVSHQNNDQAVVTLNELASHLNRTDSKEIFSAALPTLLDEIICFPGESDQIETDRRMAKISPTIQNIARILTGNDNLPEFLKNDFVRLLNSIDKKMLHSSDVNLQKQALQRIRKLVEMMGPYLSTHAPKIMVLLIFAIDKETLQMDGLDVLHFFIKRLAEVSCTSIKYVMSQVVAAFIPSLERCRERPLVHLGKIVEILEELVVKNIILLKQHIRELPLLPSLPSLSGVNKVIQEARGLMTLQDHLKDAVNGLNHESLNVRYMVACELNKLFNDRRGDITSLIIGEDIADLDIISSLIMSLLKGCAEESRTVVGQRLKLVCADCLGALGAVDPAKFKVMSCERFKIECSDDDLIFELIHKHLARAFRAASDTTVQDSAALAIQELLKLSESSGAIVHGITGGQSEVCIQAVFTLLDNLGQWVDDLKQEIALSQSNYAMAGRQGGKLRDESNSMYDQDQLLVQCSNVAELLAAIPKVTLAKASFRCQAHARALMYFESHVREKSGSSNPAADCSGAFSDDDISFLMEIYGGLDEPDGLLGLANLRKSSTLQDQLIINEKAGNWAEVLTLCEQSLQMEPDSVHRHCDVLNCLLNMCHLQAMIAHVDGLVYRIPQSKKTWCMQGVQAAWRLGRWDLMDEYLAEADKGLVCRSSENNASFDMGLAKIFNAMMKKDQFMVAEKIAQSKQALLVPLAAAGMDSYMRAYPYIVKLHMLRELEDFNSLLGDESFLEKPFAADDPKFLKLTKDWENRLRCTQPSLWAREPLLAFRRMVYNLSHMNAQAGNCWLQYARLCRLAGHYETAHRAILEADASGAPNAHMEKAKYLWNIRKSDSAIAELQQTLLNMPADVLGPTVLSSLSSLSLALPNAPLSVTQASKENPDVSKTLLLYTRWIHYTGQKQSNDIKSLYSRVADLRPKWEKGFFCIAKFYDDLLVDARRRQEDKKIASGVGPVPPSSTGSLTTATEEKPWWDMLPVVLIQYARGLHRGHKNLFQALPRLLTLWFEFGSIYIQDGSSFNKPMKEVHIRLLGIMRGCLKDLPPYQWLTVLSQLISRICHQNIEVVKLVKCIVTSILREYPQQALWMMAAVSKSTVAARRDAAAEILQSAKKGSRRGSDSNALFMQFPSLIDHLIKLCFHPGQPKARAINISTEFSSLKRMMPLGIILPIQQALTVTLPSYDTNMTDQSTFRPFSVSEHPTIAGIADDAEILNSLQKPKKSLRAAGRKLYIRTFAVVPLTEDCGMVEWVPNTRGLRQILQDIYITCGKFDRMKTNPQIKKIYDQLQGKMPEEMLKAKILPMFPPVFHKWFLTTFSEPAAWIRARAAYAHTTAVWSMVGHIVGLGDRHGENILLDSTTGDCIHVDFSCLFDKGLLLEKPEVVPFRFTQNMVDGLGITGYEGVFVKVCEITLSVLRTHKEALMTVLETFIHDPLVEWTKSHKSSGVEVRNPHAQRAISNITERLQGVVVGVNAAPSLPLSVEGQARRLIAEAVSHSNLGKMYVWWMAWF

SEQ ID NO: 131743 - protein, 70 aa, Oryza sativa
  unsure (1)..(70): unsure at all Xaa locations
  Clone ID: PAT_MRT4530_33780C.1.pep
XNPNHAQLPSPRATXRNLAPPTRLASPWNPPTPDRGGDHGALPRRXRXRFRVGGAVARGGVXXVPALPGS

SEQ ID NO: 131744 - protein, 69 aa, Oryza sativa
  Clone ID: PAT_MRT4530_33781C.1.pep
YYQKNDQADVACGFSNLATITGQDPSTGTCRFGIMIEVDSAFSWKLQHVRSSNLLMLLLVLLQLCLSFS

SEQ ID NO: 131745 - protein, 210 aa, Oryza sativa
  Clone ID: PAT_MRT4530_33782C.1.pep
MEEPASADPPRIFWKSRRRSASANGRSLQQELNKEAADEQLNNQAHEEAMKIDDANAVSTDDDVHPDPKANLSEKRKALFEPLEPINGKRSSAEMLLPPPDFEPASYPKGWLVGKKRKLVNVDVVESMRRIAIQEMNRKDREINGLNEQLEEDSRVLELLQKQLADERKKRTEIEKENSMLHEQVSMLMNMLDENEAFDEEGEAPPPDTL

SEQ ID NO: 131746 - protein, 143 aa, Oryza sativa
  unsure (1)..(143): unsure at all Xaa locations
  Clone ID: PAT_MRT4530_33783C.1.pep
MEAWSRGGGGVDRRRRKRRRSGQGGGGGGGVRGSAEAARVRVRVVREADWRRREDAVAFIYEAWARGGGSRWASSGRAYRYTGLGRVGPSCRAGPSCRAGPACCCGSLGMARLSGQAGTGTNTDGPGRXLGRAVGLRAIWPSI

SEQ ID NO: 131747 - protein, 446 aa, Oryza sativa
  unsure (1)..(446): unsure at all Xaa locations
  Clone ID: PAT_MRT4530_33784C.1.pep
MPAQYLFILSTHLTGRWGAERTGGSFDGRCVTGDCASALSCSASGELPTTLPEYTATRSXSRPGTGDDFLDLSLIDGFNVPVSFETTNGGGAGCSKGRGPSCAVDITARTCYMPADKLLHVLQGAMRLDAYSYAKDDQTSTFTCPAGTNYRVDFCPPTSGVTAGDDDGVRGHGLPRLTCRICASAAMVMVLLLPPATASHGGDRRELPNFRGFGVGLPFLPPPATVKTAIELSDCAAAVTVLLPPLFTASRGASWWRRTPRRTLSSRRQPASLACSGAHLPVRSREEEREERETKRSEDEEEERRERAWAQIAQRQAFGAHDDGRSAQAQYEELHQCAKWDAEGRRLLVSNFFDVGVSKLYAAGTAGKEKEEERVVSGMYELQRHREGRAGVHHRHTEGALLIVYADRMPRFGYSAHNSGSLPEFAAPASVSCAGTERTRRTLAAA

SEQ ID NO: 131748 - protein, 470 aa, Oryza sativa
  Clone ID: PAT_MRT4530_33785C.1.pep
MEFTEAYKQTGPCCFSPDGRYLAVAVDYRLVVRDVVSLKVVQLFSCVDKISFLDWAPDSEYILCGLYKRPMVQAWSLSQPDWTCKIDEGPAGIAYARWSPDSRHILTTSEFQLRLTVWSLVNTACIHVQWPKHASRGVSFTKDGKFAAICTRRDCKDYVNLLSCHSWEIMSVFAVDTVDLAGVEWSPDDSAIVVWDSLLEYKVLIYSPDGRCLFKYLAYESGLGVKTVAWSPCGQFLAVGSYDQAVRTLNHLTWKTFAEFSHAASIRNPTNAAIFKEVDDPWQLDMSELCLSEGFSRNMQGNGAENGTEGGSRVKYAVMDAPITLPSQKPVTDKPNPKQGIGMLSWSSDSHYFFTRNDNMPTALWIWDICRLDLAAVLVQKDPIRAAAWDPNCPRLVFCTESPHLYMWTPSGACCVNVPLPNFRVVDLKWNSDGTCLLLKDRDSFCCAAIVSPLPEEEEADQSDVTSEDE

SEQ ID NO: 131749 - protein, 71 aa, Oryza sativa
  Clone ID: PAT_MRT4530_33786C.1.pep
ASLKPDPPDFTIGCMHCQSSSCMTSFSIEDFSLTELASISTSLSCQSIYVSSTMLDNTKIKDLINCYSISL

SEQ ID NO: 131750 - protein, 63 aa, Oryza sativa
  unsure (1)..(63): unsure at all Xaa locations
  Clone ID: PAT_MRT4530_33787C.1.pep
SCWPLSVSSDNYDLGETLTIRLXPYETLCCALAIDTPLRGLLILPVQINPIHASKLKKQARIR

SEQ ID NO: 131751 - protein, 823 aa, Oryza sativa
  Clone ID: PAT_MRT4530_33788C.1.pep
MKALTDDCGDLGKPVRDRTLVFNTLNSLSDKFNHLQSPILMQRPFPMFAELCSLLRLEEISKSPHSTTTSAVFLAGTSNNSGKTSNPAHTTGFGAGNQGNKGGGNNSKNRCRRGGGGSGGNGGGGGGGTPAANNGGNSAKSGAGGAQQWLTPHNPLAGTIHMWRARPKAGRASLRWGCACRPSRRPPGPTVAGHLDAWGAGPTSPIGGLPATHPHGLSTAYGLVRRCSLSMGSSVSRGLFQHHDTSAARHERMAPIGANRRPAAPLPAAPTPPQAAHTPGSATAASSSSPAPSAYRMTLSRSAGPSVPQATHSPGSSALSLGRRALLHDGPLTHGPRSTEPSPSTGPRQDYSAGSSKSPGLTEAAQAEPEVLAPPCPSLLPPSHVSIPTWPRSARVAGVPKPPSMLDASPVVNDHHMSTHSKHGIHKVPDRLNLHVDTLSPLPRTYRAALADPPWRSATEEFSALLVNRTSELVPRPPNINVDMVYCIQPPGFVDTTHPDMVCQLNKSLYGLKQAPHAWYSRFASFLLTLGFVEAKSDTSLFILCRGIDTVYLLLYSSSLLLSQRQYCLDIRDRAGKTNCKPCTTPIDTSAKHSATDDAPVAAPTDFRSLTRALQYLTFTRPDIAYAVQQVCLHMHDPREPHLAALTRILRYVRGMLDLGLHIQPSAATEPVVYSDADWAGCPDTRRSTLGYAVFLGDNLVSWSSKRQVTVSHSSVDAKYRAVANAVAKVAWLRQLLHELHSPPPKATLVYCDNVSAVYLSSNPMQHQQTKHIKINLHFVCKKVAVGAIRVLHVPTSSQYADIFTMGLPSPIFSKFRSSLNVH

SEQ ID NO: 131752 - protein, 469 aa, Oryza sativa
  Clone ID: PAT_MRT4530_33789C.1.pep
MGGGQEQRRSSCSRSSPPASSSCWSTSSMSATGGVAVGEYRAGGLVDEREQPVTELARLHCRRPSIPLSPPFLVVVPSTPSYVGGELAPGEDVGGLLPSAGQGGRGRGRRRRPVTGDTMAAAGDCAAEYVADPEIEGRELVGQMRPAPGEHAGGKCRAGVEAAEDEEEQASRGRRPLGLKLILAMVDVQDTKLDDMQLGSYGGKGYWFIRDIFPNLHQNQNHNQINQSMTMTLSSVRLRDVAMASNSRSTLAPSAAAAIYARFLTRLPAAADPNAAVVNPAAVLALSAADLRAIGVSARKAAYLHDLAGRFAAGELSESAVAATDEAAPAPSRQPTPLSPAAYPNEKSERERERRKGEERVMTWPADMWGPRGSHADSAVTSDKTGMKTTEGPRLRNLRCTFSIPFPPPLATNPSPSPAIPPTPGHLCFPGDVSALRSAVNARCPGYASPSPCVLVRPEPQIQAPEPQD

SEQ ID NO: 131753 - protein, 104 aa, Oryza sativa
  unsure (1)..(104): unsure at all Xaa locations
  Clone ID: PAT_MRT4530_3378C.1.pep
TPPPLLSHGRCLLPLRRHGSMSREREAPPPLGRTTRCRHRRSXSRHSTPCTVRHCDPRPPRRERERERGGDRRRERGGVGGGRDGGGDGWREKGGEGESGGRES

SEQ ID NO: 131754 - protein, 185 aa, Oryza sativa
  unsure (1)..(185): unsure at all Xaa locations
  Clone ID: PAT_MRT4530_33790C.1.pep
LPHVVIKREIREGLKSRNPSTPQPCWERPKNGWMKLNVDGSFDAASGKXGMILRDSTGNIIFTSCRSLERCNSPLESELRACVEGLNLAIQWTMLPLQVKTDCASVVQLLXCIERDRFELANIIHEANLLXAGERVISVNKICISQNIISHYLANKARAESFSGFWLGENCNFISHLMGENIMIE

SEQ ID NO: 131755 - protein, 84 aa, Oryza sativa
  unsure (1)..(84): unsure at all Xaa locations
  Clone ID: PAT_MRT4530_33791C.1.pep
MEGALLCAGNHAPLTPITFLDRAXLVYPDRPAIGDSSSGLTRTWWETRDRCLRLTDALDSLGVHRHHVVAVFAQNIPAMCELHF

SEQ ID NO: 131756 - protein, 121 aa, Oryza sativa
  Clone ID: PAT_MRT4530_33792C.1.pep
MLQLTGNVYSIGIVLLKILTCKRPTDPMFTDGLDIITFVANSFPDLIYDVIDAHLLKECKKLTQEKTVSEDKIYHWLVALLEVSISCTRSLPSERLNMKQVASKMHAIKTSHLDWKSKKYT

SEQ ID NO: 131757 - protein, 54 aa, Oryza sativa
  Clone ID: PAT_MRT4530_33793C.1.pep
HASDGLAMTHRSRLSLLCCLLEGFTIHARVGIGPPRGPWPFLGQLIKSGQGPFN

SEQ ID NO: 131758 - protein, 61 aa, Oryza sativa
  Clone ID: PAT_MRT4530_33794C.1.pep
SSTLRRHSIPSPGNPILHRRGLRQGDPISPMLFVLAMDSLSSLFSKAENEGLLQPLHRSIC

SEQ ID NO: 131759 - protein, 81 aa, Oryza sativa
  Clone ID: PAT_MRT4530_33795C.1.pep
IWGSLAPPRCRYFLWLVALNRCWTADRLRRRGLPHPDRCVHCTFDSLDYLEGAEQQGLQPTAKDLGLSGKGDGGRGRAFGA

SEQ ID NO: 131760 - protein, 648 aa, Oryza sativa
  Clone ID: PAT_MRT4530_33796C.1.pep
MGLKGMLGFGGEWAWSFSTMKPVSLASLMNTAVDRPSRRTVKVFAESEHRDLPVPVTKTTLSQAVDAFAAAGRGANELTMAAAMQRQFQAQVNELHINEHLAATGKCLSGLSVEPVLPGHTWLGLSVKITAEFGASWNFEGGEQRGEKGMGTCRKAGKGISGGWCMDAIELEFGVCEETVENKPLLKLKSVKTVVRKLIHDIAKLSAVPIDPNLPPPIIRKPPPKVKQPPPPPKKRVGRDDVEMKKGDWLCPKCDFMNFAKNTICLQCDAKRPKRQLLPGEWECPRRNMSCFHCEHNRPPDEYTNSQMEANQSVPRKRLERPAHKSEVCNAWNFDFDDNESDGADVAAFEFADSSKARNSLSVDNTSSRGGSKFSEDNEFGINETWREGTERRFSERERVGFDDFDDEEDDIDSYELDLSKGGQTDGMSRMSYLDFEDACDSADLNGRAKIRNSKHGEEEDIIGSPEDEEFDHPSLRSSHLAASWRKPVSCNGSNNHRRESFGSESDDGIISDLDGDINEGLKCKGGHNKHYPRRVVVRHNELDDVPFSDMDCDIGGCVQSDRRNRFSTKFSDEFHARASNSNRKKMNERFKSSDMRDGHPPFDRTRTRGTTELHDGSRDLQSNARRNWVKSGGFDDNNRPLRRLNRR

SEQ ID NO: 131761 - protein, 215 aa, Oryza sativa
  unsure (1)..(215): unsure at all Xaa locations
  Clone ID: PAT_MRT4530_33797C.1.pep
KFLHIYLYAQSLYTCLFLNRINVLFWEDNWIQGSSIYTLAPAVHAAVAARTRNCRTVREALQVALNRCWTADRLRRRGLPHPDRCVLCDQGDETIDHLLVACPESRQLWWFALRAIGLSDILPFNEPSFLLWLCDKRVKVAKAQRRGFDTIAPLIAWTIWKEQNNRVFNQQQKTWVXVAKVMAAEAELXWRLANAAMLELPLPTTEWRSQNFIGD

SEQ ID NO: 131762 - protein, 808 aa, Oryza sativa
  Clone ID: PAT_MRT4530_33798C.1.pep
MSIIYSLAGCDQNNCVEIDRVTDLIPKIIGFTSFKSAMVNSEAQQKVLLMSSLKVLQRLTSIEGEIGITLRYKISKHSFLLRNLAEILGDSSSNQRTKEDPFTMGPPVGLRSSTVPSPMRTRLDSKLKSVGCALKSWSDRKVGNVKLQLEMIRELIGKLDRAEEVRGLSAQERFLHRGLKKSNWNSTQRSQLPRKRRRNLHSPSSPKFLAQSVRPGQPLSDLEDPFTDEKVWQAVKEIPCDKAPGPDGFTGQFYHCCWDIIKVDVLAALQQLHRMDGSSLEKVNKAFIMLLPKRPDARNLRDFRPISLVHSFVKLFTKILSRHLAPKLDSQVANNQSAFIKKRCIQDNFMLVRQSAKRLHERKQSSLLLKLDIAQAFDSTSWQFILEVLEHKGFGSRWCAWIAMLFLIASTRVLINGIPGNPILHRRGVCQGDPISPMLFILAMDSLSSLFSKAENEGLLQPLHLPYRTSLYADDTVVFIRSDPEEISTAKEILHIFGEATGLGMNFAKCAALPIQCNDNNIALIQDELPCQAEQMALIGRVTMVNAVLSSIPIYLLMAINVPKWVIKGIDKIQGSSIRTLAPAVHAAVAARTRNRRTVRKALQGRTWIRDISGAFEIQAILEYLSLWTSLQSLDALTEEPDSIIWRWESSGEYSAHSAYQSMFVGRVQFQDKPIWGSLAPPRCCYFLWLVALNRCWTADRLRRQGLPHPDRCVLCDQDDETIDHLLVACPESRQLCWFALRAIGLSDILPFNEPSFLSWLCDKRMKVAKAQRRGFDTVAALIAWTIWKEWNNRVFNQQQKTWVEVAK

SEQ ID NO: 131763 - protein, 183 aa, Oryza sativa
  Clone ID: PAT_MRT4530_33799C.1.pep
MDSLSSLFSKAENEGLLQPLHLPYRTSLYVDDAVVFIQSDPEEISTTKEILHIFGEATGLRANFAKCAALPIQCNDDNIALIQDELPCQVTAFPCTYLGLPLSIFRLRKEDLQPFVDKVACRLPVWKAEQMAPIGRVTMVNAVLSSIPIYLLMAINVPKWVIKRIDKVHRGFLWASGAAGLGN

SEQ ID NO: 131764 - protein, 1210 aa, Oryza sativa
  Clone ID: PAT_MRT4530_3379C.1.pep
MAESLILPMVRGVAAKAADALVQRVTGACGAVDDDRRKLQRQLLAVQRALADAEAKSETNLAVRRWMKDLNAAAYEADDVLDDFRYEALRRDGDATAGKVLGYFTPHNPLLFRVTMSKKLSNVLEKMNKLVDKMNELGLSVDRTESPQELKPPYLQMHSAALDESSDIVGRDDDKEVVVKLLLDQRYEQRLQVLPVIGIGGSGKTTLAKMVYNDTRVRDHFQLKMWHCVSENFEAVPLLKSIVELATNRRCQVPDKDTIELLRRQLEGAIGSRRFLLVLDDVWNEDENKWKDELRPLLCSAAGGHGSVVVVTTRSQQVASIMGTMRSHELACLNDDDSWELFSKKAFSEEVRETAELVTIGRLIVKKCKGLPLALNAMGGLMSSKQQLHEWKAIADSARDKDEILSMLKLSYRHLPSEMKQCFAFCSIFPRNHEMDKEVLIQLWMANGFIQEDGIMDLEQKGEYTFQYLVWRSFLQDVKAKKTLDHLAELQPSTILQKEIMDKALPYESIGCKMHDLMHDLAKDVADECVTSEHVLQHDASVRNVRHMNISSTFGMQETMEMLQVTSSLRTWIVPSPLCRDLKDLSLASLRTLVIEKGIFHYHSVMSNHVITYSKHLRYLDLSMSQIVMLPSSICVMYNLQTLRLNGCSFLKYLPESMGKMRKLLHLYLLGCDSLVRMPPNFGLLNNLRTLTTFVLDTKAGCGIDELKNLRHIANRLELYNLRKINCRNNGIEANLHQKENLSELLLHWGRDKIYTPENSAYNEEEVLESLTPHGKLKILELHGYSGLKIPQWMRDPQMLQCLTTLRISNCLGCKDLSTLWLSVSLEHLQLSRMDNLTTLCKNVGVGAEGYTIPQQVFPKLKSLKLELLFSLEKWAENTAGEAKNLVTFPELEMLQIIRCSKLASVPDCPVLKELDRFGSYMLAMNELTHLTSLSKLNYVANSLCDCVSMPLGSWPSLVELVLRSSTHIPTTLQVEANQGQLEYLRSLSLVNCFTAASGSSEMRLGLWKCFAFVEVLHIHMCLSLVCWPTEELTSLIHLRHLYIEHCHRLEGKGSSSEEKFMSLSHLERLHIQHCYNLLEIPMLPASLQDLRLESCRRLVALPSNLGNLAMLRHLYLMNCYVLKDLPDGMDGLVSLKILEIQACAEIEEFPQGLLQRLPTLKELSIQGCPGLETRCREGGEYFDLVSSVQRICIPAAAKTEMEEESRSGI

SEQ ID NO: 131765 - protein, 419 aa, Oryza sativa
  Clone ID: PAT_MRT4530_337C.1.pep
MVETTTMMKVLVRVREFDVEKDLPAVEELERRCQVGLSGDMAAVHDHADDGDGAAAKEKKKTKTKTKKKKASMSLCVEQIGDPLARVRHAPEHVMLVAEYGEEEEKKKVVGVIKACVKTVSRGGKQEKPFVKVANLLGLRVSPSHRRLGIGTALVRRAEEWCVARGAEHATMATTESNAASLALFTGRFGYAPFRRPEFIGHPVHAHRLPVARGHRVFQLPPEVAAAAYARLLPPQDAEFLPADMPALLAHKLTLGTFVAVAADGASFAVLSVWDSTRSLSLRVSGAPALLRASLAALRALDRGAPWLHLPSIPDIFRPFGAYLLYGLRMSGPDGPALLRSLCHHAHNVARKNPACAVVAADISPDDPAAAAVPRWRRFCCDEDVWCIKNLNPDEHDADDWAAPPPPPGRHLFVDPREF

SEQ ID NO: 131766 - protein, 916 aa, Oryza sativa
  unsure (1)..(916): unsure at all Xaa locations
  Clone ID: PAT_MRT4530_33800C.1.pep
EATKLEEKISVGCALKSWSDRKVGNVKLQLEMIRELIGKLDRAEEVRGLSAQERFLHRGLKKRYLAYSSLERTMARHRSCITWLQEGDANTKFFHQQAAWRRRXNFVQQLEFDSEVATAPEEKAXLAQSFFSEVLSSVSPREFSLELSFLEQPGQPLSDLEDPFTDEKVWQAVKEIPCDKAPGPDGFTGQFYHCCWDIIKVDVLAALQQLHRMDGSSLEKVNKAFIMLLPKRPDARNLRDFRPISLVHSFVKLFTKILSRHLAPKLDSQVANNQSAFIKKRCIQDNFMLVRQSAKRLHERKQSSLLLKLDIAQAFDSTSWQFILEVLEHKGFGSRWCAWIAMLFLIASTRVLINGIPGNPILHRRGVCQGDPISPMLFILAMDSLSSLFSKAENEGLLQPLHLPYRTSLYADDTVVFIRSDPEEISTAKEILHIFGEATGLGMNFAKCAALPIQCNDNNIALIQDELPCQVATFPCTYLGLPVSIFRLRKEDLXPFVDKIARRLPVWKAEQMALIGRVTMVNAVLSSIPIYLLMAINVPKWVIKGIDKVRRGFLXAGKASASGGSCRVAWARVCAPKSYGGLGVPDLERMGLALWCRWAWQLRTSPEKPWHGLNVPISQKERNLLQVSLTCRVGNGMNVLFWEDNXIQGSSIRTLAPAVHAAVAARTRNRRTVRKALQGRTWIRDISGAFEIQAILEYLSLWTSLQSLDALTEEPDSIIWRWESSGEYSAHSAYQSMFVGRVQFQDKPIWGSLAPPRCCYFLWLVALNRCWTADRLRRQGLPHPDRCVLCDQDDETIDHLLVACPESRQLCWFALRAIGLSDILPFNEPSFLSWLCDKRMKVAKAQRRGFDTVAALIAWTIWKEWNNRVFNQQQKTWVEVAKVMTAEAELWRLANAAMPELPLLTTEWRSQNLVGD

SEQ ID NO: 131767 - protein, 48 aa, Oryza sativa
  Clone ID: PAT_MRT4530_33801C.1.pep
MPRRQVGSPGTGSVRKKGAPPPTPRHNTLEKNDRGLTWPPERCPNYTT

SEQ ID NO: 131768 - protein, 547 aa, Oryza sativa
  Clone ID: PAT_MRT4530_33802C.1.pep
MLPSAAPARCLLLLLLLAVAVAGAAFDLEEATVDSIRRAFADGELTSRGLVELYLSRAAALDPSLHAVVELDPDGALAAADRADDARRLFASAGGGALPPPLLNGIPVLVKDNIAAAGGGGALNATCGSLALVGSRPAGDAGVVERLRRAGAVVLGTASLSEWCNFRAPGIPAGWSPRAGQGKNPYVPSATPCASSSGSAIAAAANMVAVTIGTETDGSIMCPSSYNSVVGIKPTVGLTSRAGVIIISPRMDTVGWTVSDAVHVLEAIVGYDPRDAEATRMALQYIPEDGYRQFLNIDGLRGKRLGILRKDFFRFPSGSVQQKMTMTTSTVQSYAYSSLKMNEIKFLSFLLIPGCYKTESKMGAILVDNLEIPNMNIINDAVQSGERALMLAEFKLSLNSYLSELASSPVRSLSDIIDFNNKHPVEERMAEFGQSYLLQSEATDGTGPTEKKAIAKLNELCESGLEKIMRVNQLDAIVSPGASAHSLLAIGGYPAITVPAGYASNGVPFAICFGGLKGSEPRLIEIAYSFEQATKVRRPPTLQHSII

SEQ ID NO: 131769 - protein, 41 aa, Oryza sativa
  Clone ID: PAT_MRT4530_33803C.1.pep
DPPSPWVLVISFMLASCASELIHVMLLSSSSCIIGFWNSYC

SEQ ID NO: 131770 - protein, 144 aa, Oryza sativa
  Clone ID: PAT_MRT4530_33804C.1.pep
GRSRRPRGAAATRWCARRGCRRRSSARPAAARRRTARRRRRGAARRRGPRRACAGRTGSTRRPSRRRRRRPPRGTARRGRRSRAAGRGIPGPSGRGRRTCRAAGAGARRRGRAGSRRRWRRRRRRRRGRARRVARAGGGPSSPP

SEQ ID NO: 131771 - protein, 130 aa, Oryza sativa
  unsure (1)..(130): unsure at all Xaa locations
  Clone ID: PAT_MRT4530_33805C.1.pep
ASRSSGYYGYNHWNQIWPPAILLTSNGRRICIRSPFSAREYLMESSQSPLSNRSSFIAKFRAIWPXSHKQGAASPVLGLWACNYVWDPGPSGAXMWGAPQARIRLICTGKINNPRRGVSIAKAQRNVLYG

SEQ ID NO: 131772 - protein, 40 aa, Oryza sativa
  Clone ID: PAT_MRT4530_33806C.1.pep
PHKHDGDVGVCVTLACSQPPRQIVQGDMSCTCGYSRKLRV

SEQ ID NO: 131773 - protein, 103 aa, Oryza sativa
  unsure (1)..(103): unsure at all Xaa locations
  Clone ID: PAT_MRT4530_33807C.1.pep
STVATPFFQSPVFQMRTCQVMQHQSCHKLRMIAQQSPCPPITSVQPIXSPTLRPQQSASVHFAQSPAQAXAMLPINTPSIYGSYPTHNTAPCTIPPAGRPGSH

SEQ ID NO: 131774 - protein, 511 aa, Oryza sativa
  Clone ID: PAT_MRT4530_33808C.1.pep
MDFSEQDVEIFGEDYDDAEADGGGGGGASSGSSSPSSSSSSSAAGSSSSSSGASSSSGGGGGGGEDEDGVDQGDARGYDDDPFDGAPARAAGGYGDEERGEGDAEEEEEEEERDLFGSDNEDYVKTPARSNYLVPVLPSIRNTNNHSRGGYGGRNGRGPPLLPRPGGHPGRHNFGYGGRFSHGNGRNVEGFVSEMKLNKSEETLSRKFVAFQEPSEIACYSRIEGGDVYFDDRSLRLFKRNICDYVGENLNKGFESFIEKRDLGSEGFGDLLACIRNSTVPLQNIHFVTYRNNLNKILATAYLREPWKMGVHKRNGVVYLDVHKLPERPQSEVERRRCYWGYSFENLATENSIDEDGRGIDANVEFCAVIITKLGAHRIIMGAEMDCCDATDDGRRFYVELKTSREIQSFIAGVPYVVVGFRNDAGVLIRTERLRTKEITQKVKAKNYWQGGVCLAFADEVLCWLYGTVRENEDYILQFVHPFNRLELLRAQSPCPDAITHHVEQLSGTAG

SEQ ID NO: 131775 - protein, 722 aa, Oryza sativa
  unsure (1)..(722): unsure at all Xaa locations
  Clone ID: PAT_MRT4530_33809C.1.pep
MASRLLLLPRRRSRHGGASLLLARLLSSSSSEAGGGGAVEKVLVANRGEIACRVMRTARRLGIPTVAVYSDADRGALHVRAADEAVRLGPPPARESYLNASATVRAADRTGSTANRPSSCCLSVRANFEPLGESEGSTCLXVVISLLKDGAQVEEGQACHGYGSNEDGAXVKAPCAGYVEGLKATAGQQVFDSSVXHREGEQAKLRNPGRDSRPVQLNSQTLHKLAXCCRPSKSKQIISDNIEFTTQKQAKISNGFICVNKLVDELPXPTPCCCCRKPETVQCTLLLSHTVTKTIKXICSSIAXEFYFMEMNTRLQPVEHPVTEMIVGQDLVEWQIRIANGECLPLSQEQVPLNGHAFEARIYAENVPRGFLPATGTLHHYRPVPSTATVRVETGVEEGDTVSMHYDPMIAKLVVWGESRNAALVKLKNSLSNFQIAGLPTNVGFLQELAGHSAFEKGLVDTHFIERYQNDLLSTSTQALSGSHEAEELGAILAAACICKKDHVSSEVSLHDKKLSMWYAHPPFRMHHFAKRLMEFELDRELGGSSDDLLKLSVTYRSDGTYFVETEDGSSPGLDVKVDSRGDHDFRVDVGGLQTDVTLAFYSKDNCNHIHIWHGKHHHHYRQTLRAEQSPDDSSQPSASSEARSHPKGSVLAPMAGLVVKVLLKDGARVEEGQPVMVMEAMKMEHVVKAPCAGYVEGLKATAGQQVFDSSVLFTVKENKPN

SEQ ID NO: 131776 - protein, 43 aa, Oryza sativa
  Clone ID: PAT_MRT4530_3380C.1.pep
FFFFFFFFFFFFFFFFFFFFFYTLVLFIDSWRCTIPHTRTTTS

SEQ ID NO: 131777 - protein, 167 aa, Oryza sativa
  Clone ID: PAT_MRT4530_33810C.1.pep
MAIHAMSQLDGSADDPSPSPTPGARMSPSRIFAGLPTARGVANGSSTTARGARRAGVVAIVDLCGAADGARGGRRLLHHGEGCVGWTTTRGAQAAARLSPSRIFKLLRKRAHDYNSDDEKHLSAEDEEEEEWASSFEAGDARGHKAQTAATAGVVEKGVGGSISSGY

SEQ ID NO: 131778 - protein, 119 aa, Oryza sativa
  Clone ID: PAT_MRT4530_33811C.1.pep
LTPNIQVASILASMFYTVQTLMSGFMGPAPQKPKWWKWLYYASPLSWTLNVFFPPQFGDEHEKEIFVFGKTKSIAPFINDNFSFRRDLLPLAAIMLAMFPAMFAILFSLSIFKLNFQKR

SEQ ID NO: 131779 - protein, 124 aa, Oryza sativa
  Clone ID: PAT_MRT4530_33812C.1.pep
MGKKYMRYVNRCCRYLWRLDLAAPKLAVAGSGRSTPEHMGRQGQGKGDVISIFFRWEWGRAGFGYPQARGTRARGEAGPREGRRRETTLPAKGRACRHAGERFLSSKEGEKNEKVMAEDGLWLS

SEQ ID NO: 131780 - protein, 257 aa, Oryza sativa
  unsure (1)..(257): unsure at all Xaa locations
  Clone ID: PAT_MRT4530_33813C.1.pep
GRVGGRVGEDLDNYDIVFXIGDLPYANGYISQWDQFTAQVAPITAKKPYMIASGNHERDWPNTGGFFDVKDSGGECGVPAETMYYYPAENRANFWYKVDYGMFRFCIADSEHDWREGTDQYKFIEQCLSTVDRKHQPWLIFAAHRVLGYSSNWWYADQGSFEEPEGRESLQRLWQRHRVDVAFFGHVHNYERTCPMYQSQCVSGERRRYSGTMNGTIFVVAGGGGSHLSDYTSAIPKWSVFRDRDFGFVKLTAFTTR

SEQ ID NO: 131781 - protein, 651 aa, Oryza sativa
  unsure (1)..(651): unsure at all Xaa locations
  Clone ID: PAT_MRT4530_33814C.1.pep
MVSRKRGGGGGVAMAVAMLLAAASASRPSSSLEGFQPLSKIAVHKATVDLHGSAFVSATPALLGDQGEDTEWVTVKYGWANPSADDWIAVFSPADFISGSCPNPSRYPDEPLLCTAPIKYQFANYSANYVYWGKGSIRFQLINQRYDFSFALFTGGLENPKLVAVSEAISFKNPKAPVYPRLAQGKSYDEMTVTWTSGYDISEAYPFVEWGMVVAGAAAPTRTAAGTLTFNRGSMCGEPARTVGWRDPGFIHTAFLRDLWPNKEYYYKIGHELSDGSIVWGKQYTFRAPPFPGQNSLQRIIVFGDMGKAERDGSNEFANYQPGSLNTTDRLVEDLDNYDFXFHIGDLPYANGYISQWDQFTAQVAPITAKKPYMIASGNHERDWPNTGGFFDVKDSGGECGVPAETMYYYPAENRANFCLNFFFYHMLYRIKLFGSNWSVHTRTRHRYKVDYGMFRFCIADSEHDWREGTDQYKFIEQCLSTVDRKHQPWLIFAAHRVLGYSSNWWYADQGSFEEPEGRESLQRLWQRHRVDVAFFGHVHNYERTCPMYQSQCVSGERRRYSGTMNGTIFVVAGGGGSHLSDYTSAIPKWSVFRDRDFGFVKLTAFNHSSLLFEYKKSSDGKVYDSFTVERDYRDVLSCVHDSCLPTTLAS

SEQ ID NO: 131782 - protein, 80 aa, Oryza sativa
  Clone ID: PAT_MRT4530_33815C.1.pep
GVGAPARSERVALPTLGLLIGRLECDPVGWGWKLQGGGEEEEEEHEARVQRERQVVVVGVRSKSQLWGRVKKRGEGRGSL

SEQ ID NO: 131783 - protein, 38 aa, Oryza sativa
  Clone ID: PAT_MRT4530_33816C.1.pep
RRRRGSHGRGGEGEGGGGGGEREGGGGSGGEEGLIMFC

SEQ ID NO: 131784 - protein, 43 aa, Oryza sativa
  Clone ID: PAT_MRT4530_33817C.1.pep
FSLSHKKKFITFPIVMNLPFSLSVSHLQWSISFKLVFFFNCQI

SEQ ID NO: 131785 - protein, 50 aa, Oryza sativa
  Clone ID: PAT_MRT4530_33818C.1.pep
INMPFVSAQNLLMYRTKRKSCFTTNKYPDLFNRILVYPESTQQRNVKLTS

SEQ ID NO: 131786 - protein, 177 aa, Oryza sativa
  Clone ID: PAT_MRT4530_33819C.1.pep
MSSSSSSPSKAKRPGGGSIQGPRPQSLIVSPAAAEASRPTKKPRVVAGGGDMGPVIVYELTPRVVHAQPEEFRAIVQKLTGKPSTATATAPSDPTATLPDLVAGGRAAAAADPLVLALGQQRQPAPPAIDDNDDDDDDHSAHPFLLPSPAAASLLSPSSLFFSPTTMQALQELGVLF

SEQ ID NO: 131787 - protein, 59 aa, Oryza sativa
  unsure (1)..(59): unsure at all Xaa locations
  Clone ID: PAT_MRT4530_3381C.1.pep
PVRKDGPTLTDYNIXKESTLHLGLTLMGGMQILRKTLTAITITLEVESTTTIDYVKANI

SEQ ID NO: 131788 - protein, 205 aa, Oryza sativa
  unsure (1)..(205): unsure at all Xaa locations
  Clone ID: PAT_MRT4530_33820C.1.pep
LHLLLGRPSQTSLPPSAHPPPSTSYKPSHAPIPNKGNYATTTISPPNIGPAPPNKTPHSIEHGSFPRSPTQPQNPLKQRLPTILKKLYPLQPSTPIPPKXPPQPQPPPPPPPXSSPPPPPPISPATSCLPAVQPPTPLLPCRHRGSVGISHGTARSGHGRAGPASSTTAAEGPSSSMPPPATVAHGLLNVAYRSLAAISTTFDSL

SEQ ID NO: 131789 - protein, 577 aa, Oryza sativa
  Clone ID: PAT_MRT4530_33821C.1.pep
MVKEEQGGEVAMAAAAAVTTTVAPALPTQEHRLPLSNLDLLLPPLDVSVFLCYRHPAPSAAALKEALAKALVPFYPLAGEVVANGDGEPELLCSGRGVDFTESVAGEEMRGLRIGMVDERVEKLVPAKKAASVMAVQVTKFKCGGAVVGCTFDHRVCDAYSFNMFLVAWAAAARDGHGGGTAPPPPTIPSFRRSIVAPRDPPPPRSPSTDALIDRLFAPLGSAPPPPDDAAAAAVNRIYRVAAADAASLQDSAGPGRTKLEAFTAHLWQLNARAAAAERERPCCMGVVVDGRGRMFPDGAMRAYFGNVLTIPYGVMGSGELRAAALADVAGDVHRWVAEAATGDHFRGLVDWVEARRPKPAAARAYLGGTGGGDAAACIVSSGMGFPVGEADFGTGAPAFASYHFPWPAGAGYVMPMPSARGDGDWVVYVHVSPELAVAMDEEPTVFRSLDNSYVWCADARDLAHVRRRCPRSLRSCASPIPVVRRPPSALPLYAWLLAIREGWSRAQTTAAQRPRASPCGAGAQDPWLALALASMRDDVKPVAVDNRVVFLFEFVLGEIKDSAMSLLSVSGDTVGD

SEQ ID NO: 131790 - protein, 244 aa, Oryza sativa
  Clone ID: PAT_MRT4530_33822C.1.pep
MAAAAEEGEGVRLLGGRMSPFTMRARMALALRGVEYELVEEALHPRKSGRLLAANPAYGRIPVLLLPGGRAVCESAVIAQYVDDAWGGAGAGAAILPVDPYERAMHRFWTAYIDDKFWPALDAISLAPTPEARATATASTRAALKLLEEAFAARSNGGAFFSGGGAAASPGLLDVALGCFLPALWACENLNGLRLLDDDATPLLRAWSARLAATPAAMAVMPETEEVVAFTRFLQTKFGVAGSK

SEQ ID NO: 131791 - protein, 50 aa, Oryza sativa
  unsure (1)..(50): unsure at all Xaa locations
  Clone ID: PAT_MRT4530_33823C.1.pep
MRFLGWYLKIAVGGAAIGASMELFMIHTGFYEKVTXVLELEKRACENSPK

SEQ ID NO: 131792 - protein, 659 aa, Oryza sativa
  Clone ID: PAT_MRT4530_33824C.1.pep
MSSFVGVLVSDPWLQSQFTQVQLRTLKTKFVSVKKSDADHVAVKDLPPVMEKLRGIHEVLSEEEISTFLGESYPDMNQTIEFESFLREYLNLQAKGSSKTGGKKKLKGSVSFLKASTTTLLHVINESEKTSYVNHINNFLGEDSFLKNFLPLDPSTNDIFNLVRDGVLLCKLINVAVPGTIDERAINTKKDPNPWERNENHTLCLNSAKAIGCTVVNIGTQDLIEARPHLVLGLLSQIIKIQLLADLNLKKTPQLAELVADDNSKEAEELVTLAPDKMLLKWMNFHLKKAGYKKTVTNFSTDVKDGEAYAYLLNTLAPELSSTTMIETSDPNERAKKVLETAEKLECTRYVTSKDIVEGSANLNLAFVAQIFHHRNGLSDNNVAPVVQDTPDDVEATREERAFRLWINSLGIATYVNNLFEDVRTGWVLLEVLDKISPGIVNWKQASKPPIIMPFRKVENGNQVIEIGKELKFSVVNISGNDIVQGNKKLILAFLWQLMRTSILQLLKNLRTHSKDKEITDADILIWANNKDKSIANGVFFLELLHAVNHRHVDLSMVKKGEDDEEKKSNATYTISVARKLGCTLFMLPEDIMEVNPKMILVLTASIMYWSLQKHGPYQVPERVPQETLAEEEEEDEEGDFEEDEEEESIEDGVSNLTT

SEQ ID NO: 131793 - protein, 339 aa, Oryza sativa
  Clone ID: PAT_MRT4530_33825C.1.pep
PRPVLETAEKLECTRYVTSKDIVEGSANLNLAFVAQIFHHRNGLSDNNVAPVVQDTPDDVEATREERAFRLWINSLGIATYVNNLFEDVRTGWVLLEVLDKISPGIVNWKQASKPPIIMPFRKVENGNQVIEIGKELKFSVVNISGNDIVQGNKKLILAFLWQLMRTSILQLLKNLRTHSKDKEITDADILIWANNKVKESGKTSCIENFKDKSIANGVFFLELLHAVNHRHVDLSMVKKGEDDEEKKSNATYTISVARKLGCTLFMLPEDIMEVNPKMILVLTASIMYWSLQKHGPYQVPERVPQETLAEEEEEDEEGDFEEDEEEESIEDGVSNLTT

SEQ ID NO: 131794 - protein, 306 aa, Oryza sativa
  Clone ID: PAT_MRT4530_33826C.1.pep
MAGRGGGGGGGELQLLGTWYSPYAMRAKIALGLKGLSYEYIEQDLFGKSELLLKSNPVHKKVPVLIHAGRPVCESRVVLEYVDEAWPGAAPPLLPADPHDRATARFWATYFDSTFFPPWRALMRATTAEQRAEAFMNAVPQVEVLERAFVECSKGKAFFGGDAVGLVDVVVGGFVVWFKVVDEVAGSSLLDEAKFPGLAAWAERFLAVDAVREAMPDAGKLLEHYKGFLAKLASPAAPTSQEPATHGDKEAKGAREAWGHQGGHNCSTGRWKCGTARLGEREGAAPELAAVKRENEAEGEIPRHKN

SEQ ID NO: 131795 - protein, 63 aa, Oryza sativa
  unsure (1)..(63): unsure at all Xaa locations
  Clone ID: PAT_MRT4530_33827C.1.pep
RAXVPVNGRSGDHPEDYIIFLTLTAICSWGDRLVVEEFLFSQEHSLFCDDFRITRSIPFEGGN

SEQ ID NO: 131796 - protein, 118 aa, Oryza sativa
  Clone ID: PAT_MRT4530_33828C.1.pep
KNFGYHNVGEIATKEFDILALDSSNVPAWAMDVKVNLTTNGLYKCINKTAEGNVAPSNMSKYTALKVMRNHIHQDLKMEYMYEDPCALWTSFKNRYEHHKATLLLEATHEWNHLCLQD

SEQ ID NO: 131797 - protein, 163 aa, Oryza sativa
  unsure (1)..(163): unsure at all Xaa locations
  Clone ID: PAT_MRT4530_33829C.1.pep
QDVQSCAAPPQGDEQSSWGSNFACRLRQWLLHGFQLCAEVXGKVAVITGGASGIGKATAKEFIENGAKVIMADVQDDLGHSTAAELGPDASYTRCDVTDEAQVAAAVDLAVKRHGHLDILYNNAGVMGAMPQDDMASVDLANFDRMMAINARAALVGIKHAAR

SEQ ID NO: 131798 - protein, 207 aa, Oryza sativa
  unsure (1)..(207): unsure at all Xaa locations
  Clone ID: PAT_MRT4530_3382C.1.pep
NSTPCRATPPRHTAAAGQPTPRPRRSHARLGTHYRRSRRAXPSSSHGHAGAVRPFLXLLHRRTWQGTMKRRKKWKKKKEKALMGVAXHAATAXSNGAVARPPQRVNPSYLGGIYAPNRATVPSCTRARRIRPRCHVQRPSRLQRRPLTTSAPATRDVGRSPWALAHSTARSTDCTASPWCRQATATLQPAPSPRAARRGRWSWSGVA

SEQ ID NO: 131799 - protein, 95 aa, Oryza sativa
  Clone ID: PAT_MRT4530_33830C.1.pep
RELVSEFFFLFFFFVRTSMRVKSSSLAQKVTFPAAAAHALYEQGLMLSIHLGLIRTLSRLCFSTLSNDGLNPSPAKNSENSVAFSSVVTREIDEV

SEQ ID NO: 131800 - protein, 689 aa, Oryza sativa
  Clone ID: PAT_MRT4530_33831C.1.pep
MAETPRRIRRGGAGLSLVVVALLLAVAARAQQEYEANQQNACYATNASSTLGYTCNATSASAAAAAPCDAYLVFRSSPPLYASAVSISYLLNVAAAAVADSNAVDPVAPVAADRLVLAPVPCGCSPGGYYQHNASHTIRDTGVETYFIIANLTYQGLSTCQALIAQNPLHDSRGLVAGDNLTVPLRCACPSPPQAAAGVKHMVTYLVTWGDTVSAIAARFRVDAQEVLDANTLTESSIIYPFTTLLVPLKNAPTPDMLAPPAQAPPPPAPAPPRAQPPPGGSGSGKGVAVGVGVGCGVLALAGVFGLLFFCLRRRRGVGEESVRPGKVVGDVSSSAEYGALASGKQTTTATSMSSLSAARSLMASEVREALESLTVYKYSELEKATAGFSEERRVPGTAVYRGVFNGDAAAVKRVSGDVSGEVGILKRVNHCSLIRLSGLCVHRGDTYLVFEYAENGALSDWLHGGDAATGVLGWRQRVQVAFDVADGLNYLHHYTNPPCVHKNIKSSNILLDADLHGKMSSFGLARALPAGDGAAAAAAQLTRHVVGTQGYLSPEYLEHGLITPKLDVFAFGVVLLELLSGKEAASSGDGENGEALLLWESAAEALVDGGGEDAGSNVRAFMDPRLGGDYPLDLAMAVASLAARCVARQPAARPAMDEVFVSLAAVYGSTVDWNPSDHGNSGSSLIGR

SEQ ID NO: 131801 - protein, 412 aa, Oryza sativa
  Clone ID: PAT_MRT4530_33832C.1.pep
MSADSVAMYTLGHMSLNSGLPEQQLVAFWAPFLLLHLGGQDTIAAYAVEDNRLWMHDLQSFAVQVAAAGTVWALKCANANAGNDDNSRLVRGMDVIPGQRKSRRARGQSSDGDAEGLLLEAHLLFDICKRLIKGPGVAVAFREDQRRLLAVSLSSTAGQCHREQQQSQRFHHLHPVTRGQHPGDHFGAEGSLIRLDVGALVSTGIRPRSKVVACMGLQDWWNTKRHSWFISIPAAVMRTEATNLDDEVGRHRGRVTLRRWGLFEELGWSVGNEDDGDQASSFASSILLWHIATDVYLKLYRKEIDQDEGQRALVEAIKTLANYMFFLLVVRPQMLPAGSVEQQQQYATKLRAVELGKSDLLAGTFCASFWLSVSRIVRGMIGRKLSTFEHAPNDRCTLGGVPVLCGLRKPNA

SEQ ID NO: 131802 - protein, 114 aa, Oryza sativa
  unsure (1)..(114): unsure at all Xaa locations
  Clone ID: PAT_MRT4530_33833C.1.pep
AXASGPRVLLTRQPTEGRSRDGGLRLGEMERDCLIAYGASMLIFERLLISSDPYQVQVXGGGGLLGYYNHKLKASYCSMCXXGENMAKMRMPYACKLLFQELQANVVPRLMLTG

SEQ ID NO: 131803 - protein, 209 aa, Oryza sativa
  Clone ID: PAT_MRT4530_33834C.1.pep
MGSKLSCIYRPESDIVVESEAPAPPPPPARVIAADGSLRELPASPCVAVVSDVLGGGDDAASFFVCNSDALYFDDRPPALSPGEPLRPGELYFVLPRAMLGRPLSSADMGRLAVRASLALVGERPQRRRRHRQGGGKKQKKKVHVMPAQAQSRDDGDGDVDGVFNEKLNEQTLGVFAVFLSPARGAAPAAAAAARSPLKRALSLVEEEA

SEQ ID NO: 131804 - protein, 490 aa, Oryza sativa
  Clone ID: PAT_MRT4530_33835C.1.pep
MACGSPSTEVVDEFEKLVIRMNPPRVTVDNTSDMTATLVKASNTSLFLVLDNSCRRGCHSFLQVDSANKYGTLLEVVQVLTELKLTIKRAYISSDGEWFMDVFHVVDQDGNKLYDGQVIDRIELSLGAGSLSFRAPPERSVEVEAEAAAAQTAIELIGKDRPGLLSEVFAVLTDLKCNIVSSEVWTHDARMAALVHVTDADTLGAIDDQDRLDTVKRLLRHLLRGGGAGARDRKATARAAIPAPRRDGAAAHAPRRLHQMMHDDRAAAAPQPSSSFGDGGGRGRPVVEVVDCAERGYTLVNVRCRDRPKLLFDTVCTLTDMQYVVFHGTVIAEGSEAYQEYYIRHLDDSPVTSGDERDRLGRCLEAAIQRRNTEGLRLELYCEDRVGLLSDVTRIFREHGLSVTHAEVATRGARAANVFYVVAASGEPVEAHAVEAVRAEIGEQVLFVREDAGGGEPRSPPGRDRRSLGNMIRSRSEKFLYNLGLIRSCS

SEQ ID NO: 131805 - protein, 534 aa, Oryza sativa
  unsure (1)..(534): unsure at all Xaa locations
  Clone ID: PAT_MRT4530_33836C.1.pep
ALLLEEPQRLFQSTPERRESRNRGRGDAPRGAYVAPTRRPRGSHVGSPTDGPDLPPGRSDGGGGSRPGGRGVRRRGATRRRRKAASGRRRRAAATDDXGGARRATAARPRAXGSGTKREKGKDDGAMLTGVRPARGDDGERRRGMTGGRQRTADGLRNHLANKMRGVRGREENGRGRGRRPKAAAMAAPTGARAKRVPAADSDGGEMDGTARTTASATASTARLGTTASGGLRRPERXGGGGEEGDGASAVEGTGELGEMXKKREGRAVMRGREREREGVGAEDAGARAGMADVARGKRARAVARRRLWTAGGRRWETGRREEAAGSAGPWPSAGPAGRDPSLARRGGGAAPGRRLIGGGGGAHLLPASAPTSLSSVPVGTTSRLRRLPPASRLYRRRRPSPPCWIPAVTADAHQIPRLHRRAAPPPPRSMPSTIHAVGTISSGVVDVGLEPTHCLGSVEYMNIKLSYVIGGSATLGIRKLDSSMRTSKCSSPTRNGPLTIGFDTQEPKHLNCGPSWWWFDQLGDESLVDVQQH

SEQ ID NO: 131806 - protein, 69 aa, Oryza sativa
  Clone ID: PAT_MRT4530_33837C.1.pep
MRHRLAPAVRRNHCVGPADQLRGTARAGLRDRAGCRAVARGCGSVPRGSEGPASSFHGSERSHVPVLRE

SEQ ID NO: 131807 - protein, 76 aa, Oryza sativa
  Clone ID: PAT_MRT4530_33838C.1.pep
YNWWTLVADSPSTPRTLRSLVILISWKIWCEQNTRIFRNNASALSSILVKIKEEERAWAKAGAAILQEFGILGDIT

SEQ ID NO: 131808 - protein, 110 aa, Oryza sativa
  Clone ID: PAT_MRT4530_33839C.1.pep
MTTDEELRRKTTTYDASSCYIFGWFELQQRSAPAARRVSVARGGGGGASSAVQGKGARDVAVAATIVVVTTRRSPRSSRIAVTGRIQIHLLDRCGGLLTPPPPEHRPPPD

SEQ ID NO: 131809 - protein, 567 aa, Oryza sativa
  Clone ID: PAT_MRT4530_3383C.1.pep
MDAVAFPPPPAPFLDDDLDFGDFAFADPQPAAAAAFDAFGAYDDDWGDFVDSRLGSNPDGGSSAAAPAEKPPSWEKPRGPLPLSLFGADEDEEEEEGPAELPPTAADQRGASHASSNGSKPADLKDLIAGLYGSHPQPSSTDAAEVGTQEGSAVAAAEEEEEDGDGFEDDGWEFKAAAPSSSSDAVQDGGRQAHGDLTQDVPKSMSSDQEGWSSFTSVSENLNNVQTTDHVGTHENHSIKSASDRILIDFYHKLREESLTVISQYKKDLKESQKNSMLSDEKNEVMTETEREIQEICKELQDSSLAKGFCKDEHPSKDVCISELLNSAKEDHLKDFDKEYHLTEIIAMALEDMSSAVKLYKHSVSILRTLEIASKEEQCDYVSAWYSMLLSCAQELQHGAMIWQESCHANVGETVISQGAHYFIALGEIYRVAQILHISMLSFKPWVLADPGMLSKMLVCWNSCVNSWTSGLGMALTMVVDSKNLHAPVAKVLLESIININDIEVPNLQSFLPSDKMACKLTLLPTSLVPGMEVIIWDADHYFVKVANLWANQISSDPPQFSVSRVA

SEQ ID NO: 131810 - protein, 78 aa, Oryza sativa
  Clone ID: PAT_MRT4530_33840C.1.pep
DFNTLCSLQCTWLLLRGCLDPCHTLPRQTCGCHDSLTDVWLIRELWQPHFLLVHLHAYFRHSCGDYFSRHNLWRRHNL

SEQ ID NO: 131811 - protein, 58 aa, Oryza sativa
  Clone ID: PAT_MRT4530_33841C.1.pep
STSAPSRAAASPPAGAAPPPPPPPPTTTRRAPRGTPPPPGCGRRTAPAISSPRSPPAA

SEQ ID NO: 131812 - protein, 210 aa, Oryza sativa
  unsure (1)..(210): unsure at all Xaa locations
  Clone ID: PAT_MRT4530_33842C.1.pep
AHKASLYSPLSGPSSVGVRRRSCLADTAAAVRECISIHIGQVGMHVGNACWELYCLEHGMQPDGQMPRDKTRGGGDDAFNTFFSETAAGKHVPRAALVTLEPTARAEGRTGDYRQLLHPGQLIIGTEDASNNFARXHYTIGMEIDDLCLDRMRKLGDSXTGLQGSLVFNAVGGGTDCELGCLVLERLSEDYGKKSKLGVTVYQHGQGYTS

SEQ ID NO: 131813 - protein, 137 aa, Oryza sativa
  Clone ID: PAT_MRT4530_33843C.1.pep
MEPLPENGVQTSQAEVPAAASEPAKVVAAVADEMPDSTTSVPLPITAARHTASTRRPCYGWLIESESEDDELDNGVSAVEQSNPPSATNHKMSNGWSYVEQARPSVAMRHEMEPYTHHRGMLSKRRRPSGWDVRPSY

SEQ ID NO: 131814 - protein, 88 aa, Oryza sativa
  Clone ID: PAT_MRT4530_33844C.1.pep
MWGGRRAKERGRSGVNAMRSGSAGQQRPRMLRKSAPCRESARWRQQWSGVSAMRNGLMGMPDMIAHFCMLEAHDLAKFQALYLNKYTY

SEQ ID NO: 131815 - protein, 331 aa, Oryza sativa
  Clone ID: PAT_MRT4530_33845C.1.pep
MVKASMKPYFVAIVVQLIYTGMFVISKAAFNHGMNIYIFVFYRQAVGSLILLPAALLQRRSARPAMTLGVLIKLFFCALIGITLGVNLYHDRTEYVKLRSSSGIAKVTSVALCLAGVFTIVFFTGPSISPINHHRAFASDTSSKTVVPRGVWIKWTFLMAAVQKEYPDKMVVTVTRCLFSTMQSFVVAVVAERDFSRWKLRFDISLLAILYSGVMVTGVSYYLQTWCLEMRGPMFFASWTPLCFVFTIFCSSFFLGEIVHLGNILGGILLVASLYTMLWGKSKEGNETDDVTDDDIEKSTHIYPREQQHTTTDQAKESMLTSSAALHVQEL

SEQ ID NO: 131816 - protein, 82 aa, Oryza sativa
  Clone ID: PAT_MRT4530_33846C.1.pep
LVRNRSVSKHKSRAYRSRAPVELPVDTGREFFRRILGRILAKNIIFPRAVYANTITCVTLEPHFHRKGYWRCSPHVLSCCEF

SEQ ID NO: 131817 - protein, 302 aa, Oryza sativa
  Clone ID: PAT_MRT4530_33847C.1.pep
MLAFLCPRKMVKASMKPYFVAIVVQLIYTGMFVISKAAFNHGMNIYIFVFYRQAVGSLILLPTFLLERHTKVTSVAICLAGVFTIAFFTGPSISPINHHRAFASDTSSKTVVPRGVWIKWTFLMVVANMCWSLWIIFQAAVQKEYPDKMVVTVTQCLFSTVQSFVVAVVAERDFSRWKLRFDISLLAILYSGVMVTGVSYYLQTWCLEMRGPMFFASWTPLCFVFTIFCSSFFLGEIVHLGSILGGILLVGSLYTMLWDLRCTPSTSERCRAPRVFRMPAPAGANALKKDIKVVAKPFAVAL

SEQ ID NO: 131818 - protein, 373 aa, Oryza sativa
  Clone ID: PAT_MRT4530_33848C.1.pep
MVKASMKPYFVAIIVQLIYTGMFVISKAAFNHGMNTYIFIFYRQAVGSLILLPAALLQRKSARQVMTLGVLIKLFFCALIGITLGVNLYHVSLKFTSATVASAVDSSLPAITFFLAVLLRTEYVKLRSSSGIAKVTSVALCLAGVFTIAFFTGPSISPINHHRAFASDAGSKNVVPRGVWIKWTFLMVIANMCWSLWIIFQAAVQKEYPDKMIVTLTQCLFSTVQSFVVAVVAERDFSKWKLRFDISLLAILYSGVMVTGVSYYLQTWCLEMRGPMFFASWTPLCFVFTIFCSSFFLGEIVHLGSILGGILLVGSLYTMLWGKSKEGNETDDVTDDDIEKSTHIYPREQQHTTTDQDKESTLTGSAALHVQEL

SEQ ID NO: 131819 - protein, 60 aa, Oryza sativa
  Clone ID: PAT_MRT4530_33849C.1.pep
GLFCATDHRSMLVSFYTYRQRRDSKTINYMDTGRSHASAFFTLSSDPTDARLHRVHNTGR

SEQ ID NO: 131820 - protein, 57 aa, Oryza sativa
  Clone ID: PAT_MRT4530_3384C.1.pep
LQPDLSYQEHPIRILDEIERTTRRHTIKFFKVQWSNHTPDEATWEREDHLRDADHVP

SEQ ID NO: 131821 - protein, 170 aa, Oryza sativa
  Clone ID: PAT_MRT4530_33850C.1.pep
MGVTPRERRRSVARFLDEERMEVRERELMSLSDASSHLGRCVLRPHPVGRARIDGNLSSSSLIQARERRWRDAQTGSSSALTVRRRRRRRGLSHVRGHNQKWMGERRGEEGEQKCGPHSSLGRWSCVSGRLLPQSSCPPSISRGERFPTLQQNIMYINLTVNLACSFYSM

SEQ ID NO: 131822 - protein, 573 aa, Oryza sativa
  unsure (1)..(573): unsure at all Xaa locations
  Clone ID: PAT_MRT4530_33851C.1.pep
MVVADNGKWALEKARALQDLEEEFNQQIARILSCYQLPDHIRLDLHEQHRNDYKVPDDLRLKFVNAVFEGKSGMLDQDEELRVQARKESEKFWVEAAGAAKKAQALQDMEERNRQLFFKHYPGVQDMPDHIREYCFRKFMEDARDEVEVRFGIRNHEMRLRIRAWEESQQFLIKTMADGRAAKKVQTLQDEEKRYVQGVKKTFDSENISEYFQQAFFQQGLLDNIRLLFIDDIEEXFNMPVTKRNLRALQDLEDKFNPQTARILKRYDLPEHIRLDLQEQHYNNYKVPDNLRIKFINAVFNGNPRILDHKRELKVQARKEAEKFWIEAAATAKKAQALQDLEERYKQQFIKPSYDREDISEHMQEYFLRERKITDKAYLEYKNNVEDKFAIRNHEMQLKFLAWEKTQQFRIKMMADERAAKKVKALQDMEERYVQDYINKVERLDVPDYIKQGVIQEYKVPDGTRLRYINYIEEKFRMLDDQEERKVHIWENFKKLKIPLTIKSPITVAIMFSIGIMILFSGFLVPKMPKSLKIMCWATSIVICFAAVLSYDNESSKTTAPTEMHDLENPPSI

SEQ ID NO: 131823 - protein, 75 aa, Oryza sativa
  Clone ID: PAT_MRT4530_33852C.1.pep
AQHFITKGMAVRPLGYPKSSQGRLDYQSRPKNLGGGLPKGVSERERAPQVGPLFRYRSFAIARRKKVLVILGPPG

SEQ ID NO: 131824 - protein, 586 aa, Oryza sativa
  Clone ID: PAT_MRT4530_33853C.1.pep
MVVADNGKWALEKARALQDLEEEFNQQIARILSCYQLPDHIRLDLHEQHRNDYKVPDDLRLKFVNAVFEGKSGMLDQDEELRVQARKESEKFWVEAAGAAKKAQALQDMEERNRQLFFKHYPGVQDMPDHIREYCFRKFMEDARDEVEVRFGIRNHEMRLRIRAWEESQQFLIKTMADGRAAKKVQTLQDEEKRYVQGVKKTFDSENISEYFQQAFLQQGLLDNIRLLFIDDIEEKFNMPDDEEEPKGYISEDYNRLKAQALQDLEYKFNQQTARILKRYDLPEHIRLDLQEQHYNNYKVPDNLRIKFINAVFNGNPRILDHKRELKVQARKEAEKFWIEAAATAKKAQALQDLEERYKQQFIKPSYDREDISEHMQEYFLRERKITDKAYLEYKNNVEDKFAIRNHEMQLKFLAWEKTQQFRIKMMADERAAKKVKALQDMEERYVQDYINKVERLDVPDYIKQGVIQEYKVPDGTRLRYINYIEEKFRMLDDQEERKVHIWENFKKLKIPLTIKSPITVAIMFSIGIMILFSGFLVPKMPKSLKIMCWATSIVICFAAVLSYDNESSKTTAPTEMHDLENPPSI

SEQ ID NO: 131825 - protein, 53 aa, Oryza sativa
  Clone ID: PAT_MRT4530_33854C.1.pep
NLCNWLGTRRSVPSGHKCHHSGRLISHNWSHGGIATFCGLSLGPASTGKHQDM

SEQ ID NO: 131826 - protein, 112 aa, Oryza sativa
  Clone ID: PAT_MRT4530_33855C.1.pep
MALAKAKETVASAPVVVYSKSYCPFCVRVKKLFEQLGATFKAIELDGESDGSELQSALAEWTGQRTVPNVFINGKHIGGCDDTLALNNEGKLVPLLTEAGAIASSAKTTITA

SEQ ID NO: 131827 - protein, 41 aa, Oryza sativa
  unsure (1)..(41): unsure at all Xaa locations
  Clone ID: PAT_MRT4530_33856C.1.pep
MHKWSGVKQALILLVDXTDLTDLVNGLQALGASIIYTGGTL

SEQ ID NO: 131828 - protein, 163 aa, Oryza sativa
  Clone ID: PAT_MRT4530_33857C.1.pep
IIWTSYNAKKPLSWNKSGLTKGGGELIRHKKILSRKRTKLLTIREKHFFSTERWFYVPPKQNQPDQLPNWSLTKAIFPFTGAKKKSKIILLFTSRKKEVLHWHGWVLPQKQKKRPVGDPGRSQAAQGHFLVDLVNVRERGGRRRRPRGNKRGKPAGAAAAADT

SEQ ID NO: 131829 - protein, 78 aa, Oryza sativa
  unsure (1)..(78): unsure at all Xaa locations
  Clone ID: PAT_MRT4530_33858C.1.pep
RPGPPTPQALIHVADPTSVVLPRSIIFRGAMRRGTSIFLPTATFSMFPERGAMNALSPXQGGGWESGTVSVILPPDGS

SEQ ID NO: 131830 - protein, 142 aa, Oryza sativa
  Clone ID: PAT_MRT4530_33859C.1.pep
FYFGFEDDVMYPSYMVLFTTFLGLALVRRLSVDQRVGPKAAWILTCLYSSKLSMLFITSRSVLWVSAVLLLAVTPPLLLYRDKSKGASRMKVWQAYFHASVVAFSAWLCRETIFEALQWRNGRPPSDGLLLRSYILLTGLAC

SEQ ID NO: 131831 - protein, 109 aa, Oryza sativa
  Clone ID: PAT_MRT4530_3385C.1.pep
MATFELYRRSTIGMCLTDTLDDMVSSGALSPELAIQVLVQFDKSMTSALEHQVKSKVTVKGHLHTYRFCDNVWTFILTDAIFKNEEITETINKVKIVACDSKLLETKEE

SEQ ID NO: 131832 - protein, 156 aa, Oryza sativa
  Clone ID: PAT_MRT4530_33860C.1.pep
WTSTTTTRGRRKGRAPPPRRRRGRDHGRTSRWRSPARSSAESRPSPTAPGSAPPAASGASPPPSSTAAPSPRRSRGWSPATRAPSTPSPTATATTSPSTRRPASPATAAGSSSIAAPPPPSPAAAAAAATSSRNPSPKPPWSSRAPCPALPPPRRR

SEQ ID NO: 131833 - protein, 107 aa, Oryza sativa
  unsure (1)..(107): unsure at all Xaa locations
  Clone ID: PAT_MRT4530_33861C.1.pep
RERRPERHYSVPARRHQLRLRPEPSRWSCRXDTAEPPKSMDGEALPANARPRHHQLPAGEGHCQVAKVLVADIRRSLIYHPQAAMGIIGPLLLAPVMMRPCWAGMSD

SEQ ID NO: 131834 - protein, 186 aa, Oryza sativa
  unsure (1)..(186): unsure at all Xaa locations
  Clone ID: PAT_MRT4530_33862C.1.pep
MSSGGPSSPWMSSNFRYGWGGKGCERAAKINLSGGRPRLNTYRXKIGLTASRNGXRRVGANPGATRGGGEGENGRLGGECKNWCDSPWVESKSDSAAAXWMGAHGVERRFLAAVVIPALSSSILVRQWQSEGVGRLAARQGDRARASGPEAYARRHGARLSRMTGGRAXGEEEAKKSTVFEWGVAP

SEQ ID NO: 131835 - protein, 455 aa, Oryza sativa
  Clone ID: PAT_MRT4530_33863C.1.pep
MARHHGNHSLLPEMVQPNNEQLNQPLPLGQKLFVHAGNDAALKIGPSYHGNVAIRSNDLPSSSRVAQYSGHRVKNTGTLHNSYVHYPAGSSGGHVSYNPQTEPVITYPHRSEGEFARGSSQIDNRTAAVKRKNPVIYPEYSINGDGYCAGSSSSTQFSNYPQPAPFSESLHRQMPPSVGPINWNDQSLHMYLNDYVGASGMHSGEMPYTMGSSNSSVPVPTLQGSSSSAIFASGVFAPRHVHGDTVPSYIHLPSVASSSSTAIPHEVIIPSYQPATSATTSTPMRASQPLPVRAVASSRHARNVLIGHANSGRNRRARSSYYGIQPLMIDAQQLIMMQQFALRESREAQDPHRAMRLDIDNMSYEDLLALGESIGNVCTGLVDEKISGCVREVIYCSSDEQQNDQDDGKCAICLEEYKDNSLLGILKCNHDFHTDCVKKWLKEKNSCPICKSAAA

SEQ ID NO: 131836 - protein, 120 aa, Oryza sativa
  Clone ID: PAT_MRT4530_33864C.1.pep
IPDWRSWLRRSAARRKLNSRRRSASPPVPPSPPPMAPCRGRLCCVAPSRWQRPPLAHSRRGTRRGGRPPSVQPERRSRAPPRVRPPPRRASSSTASRYTGGGAEHRRESDIRLAVLRRPP

SEQ ID NO: 131837 - protein, 94 aa, Oryza sativa
  Clone ID: PAT_MRT4530_33865C.1.pep
NGGGLGGVHAPGTRSRARPERSSRFRTVERNRASHHRDGTGHTCRTPPPGEFGAVRPLGIGRGSHHPSTGPTPSGESLVLPFDGRQCAASRQRR

SEQ ID NO: 131838 - protein, 188 aa, Oryza sativa
  unsure (1)..(188): unsure at all Xaa locations
  Clone ID: PAT_MRT4530_33866C.1.pep
MAPCRGRLCCVAPSRWQRPPLAHSRRGTRRGGRPPSVQPERRSRAPPRVRPPPRRASSSTASRYTGGGAEHRREXRHPPRRVPPSTVSRRAAAATAGRIQGRLTGERGLRHPPRASAPEEEPSVAVNPTSASPHSAVHCEPARRRRYHREDSLPPLVSSSLRRQDESRLNRGVAAISIWRAEQGRGSW

SEQ ID NO: 131839 - protein, 217 aa, Oryza sativa
  Clone ID: PAT_MRT4530_33867C.1.pep
MEAVLEEWEQLFSSKEEYVPPQESPKETNDWSDDWDDGWEALPEELESPTKKHGRTSLSVDPLHTCWMEIIRKLVELGEPHKMVEAKMREGTVSTSSNADDHELLALVLSSGVLQRIVTEVEYSKLFSHICHLVGHLARSSQNDLLVKWNDEANAPGTSKTNKSLLFARVLFPSFISELVLRGQYLLAGFVISRWMHTHPSLGLMDVAEASVRRYLN

SEQ ID NO: 131840 - protein, 310 aa, Oryza sativa
  Clone ID: PAT_MRT4530_33868C.1.pep
FSSKEEYVPPQESPKETNDWSDDWDDGWEALPEELESPTKKHGRTSLSVDPLHTCWMEIIRKLVELGEPHKVIELLDRASSRNSMLIEDDEANRLLELISAMEPLMALKIMLLLPYETTRLRCLQMVEAKMREGTVSTSSNADDHELLALVLSSGVLQRIVTEVEYSKLFSHICHLVGHLARSSQNDLLVKWNDEANAPGTSKTNKSLLFARVLFPSFISELVLRGQYLLAGFVISRWMHTHPSLGLMDVAEASVRRYLNGQIVQAQQLGGTDVFLTDNELSVSHALSTLRSNLVSLVQAALATLPNQDL

SEQ ID NO: 131841 - protein, 1317 aa, Oryza sativa
  Clone ID: PAT_MRT4530_33869C.1.pep
MATLSLATGVGWVVSPVIKLMVEKVQSYISTQYKWQSNLEDDLKKLETILTEILLVVGTAERRRTLDCNQQTLLHQLKDAVYDAEDILDEFDYMLLKENAEKRNLRSLGSSSISIAKRLVGHDKFRSKLRKMLKSLIRVKECAEMLVRVIGPENSSSHMLPEPLQWRITSSFSIDEFVVGRQKERDELVNRLLEQADIPKSRTEGAISVSPEVITIVGTGGIGKTTLTQLIYNDKRIENNYDMRAWICVSHVFDKVRITKEILTSIDKTIDLTNFNFSMLQEELKNKVKMKKFLLVLDDVWYDEKVGGPINADRWRELFAPLRHGVKGVKILVTTRMDIVANTLGCTTPFSLSGLESEDSWELFRRCAFSTRDPNEHQEMKSIGECIVQKLNGSALAIKAVAGHLSLNFNYDEWNRVLKNGLSNEKDIMTILRLSYECLPEHLQQCFSFCGLFPKGYYFEPGILVNMWIAHEFIQDHGHTYGSLRSTGRSYFDELFSRSFFQALQYGGTVHYVMHDLMNDLAFHTSNGECYRLDVDEPEEIPPAVRHLSILAERIDLLCTCKLQRLRTLIIWNKDRCFCPRVCVEANFFKEFKSLRLLDLTGCCLRHSPDLNHMIHLRCLILPYTNHPLPESLCSLYHLQMLSVHPHSCFMDTGPVIFPKNLDNLSSIFYIDIHTDLLVDLASAGNIPFLRAVGEFCVEKAKVQGLEILKDMNELQEFLVISSLENVNNKDEAANAQLANKSQISRLKLQWDSSNADSKSDKEYDVFNALRPHPGLKELTVDGYPGYKSPSWLEFNWLSRLEHINIHDCTCWKLLPPLGQLPCLKELHIDTMDALECIDTSFYGIVGFPSLETLQLTQLPELAYWCSVDYAFPVLQVVFIRRCPKLKELPPVFPPPVKMKVLESIICTQHTDHRLDTCVTREISLTGLLDLRLHYLESMESADISFDGAGISNDGLRDRRHNLPKGPYIPGFSDSPSTFLRITGMEFISCPNLTLLPDFGCFPALQNLIINNCPELKELPEDGNLTTLTQVLIEHCNKLVSLRSLKNLSFLTKLEIRNCLKLVVLPEMVDFFSLRVMIIHNCPELVSLPEDGLPLTLNFLYLSGCHPLLEEQFEWQHGIEWEKYAMLPSCFYADKSMEDTEDIAEEVLRENDMIEWSIQTSLLHPTDSAASSSSFLQLPAAKYNAQVNLMIPVILCKLHDMDDFCSLRFLKIDQCRQLRSLPWSGLLVSLETFILFGCHQALEEQFQRKEGPDWDKKRGRDPGAQWHSSQSNRIVRIPGRRSGCGQSFRRAGRKAHTSPGEEGKPRGLSRSAVQQRR

SEQ ID NO: 131842 - protein, 468 aa, Oryza sativa
  unsure (1)..(468): unsure at all Xaa locations
  Clone ID: PAT_MRT4530_3386C.1.pep
MGFISGIDDFVFPSGQMFRFGSLDFVTDNFGKISLFDSDSNKSERDAILDYDDFGYNYDFSNLDDFDKSYEDNYTPLFFGVFMADNETAEQRQAREAEEQRMRQEAERHRLEEERQAQERYRLQRQQQECERAAKEAEDRRQHTLEAGRQARELIEQQDVEGTVLHMLPHGTIRSSAELHKHFITNFQGTFDRPGTQFDLYNVIQKPGESLWDYIRCFSEQRNKISDITDNIIIAAFTMGVRHELLVGKFRRKHPRTVKQMFQKANEYAKADDAVIVSKQSGSNWKPKKDAPAAEGSGSTTIRIASCSHHPNSNHAVKDCIIYQQFTEQYAKKAWKPADGEQSTSKKKDNEDDGPTGFLDSRKELNHIFGGPQAYESKRKQKLTDQEINAVQPDTPQYLQWSETTIKFDRSDHLDRVVHPWRYPLVLDPVIRNVKLRQSLIDGXVVHSIFFLPKLDDMQIPRTELKPS

SEQ ID NO: 131843 - protein, 91 aa, Oryza sativa
  unsure (1)..(91): unsure at all Xaa locations
  Clone ID: PAT_MRT4530_33870C.1.pep
KYSXSXTPETLARPRRRQWPHDRCASAEEPPAPTQQQRRRARRRGXDXSQPPSRPPXSPCCSRPGDDPESPRDPGSACRRRGSYXDVNVLR

SEQ ID NO: 131844 - protein, 308 aa, Oryza sativa
  Clone ID: PAT_MRT4530_33871C.1.pep
MPGQGADLGIKTYPSLAMVIETLKGIDKYSREGGTPGLGKMTPSLVVISASIVGVVLKENRTGPNRLVFKIGVQIIPQIQKLKWGIAANKDTTLTSKKSLTDAELDTLLKAISLPWIDRRKKHCALPGVVEKARAKEGWTTSNGNMLADSYHSYLHNCSREGKADVSETGNNTPSTTGSNYFGSFPREAKITFEGLVMEALPNGMFRVRLENDTIILGYISGKIRSSSIRILMGDRVKIEPILDLAYKPIILSLVLPTSFGSLERKLQTAPLAEADLEADLRVNEIERLISPFMLKSDDFDLSGCRLG

SEQ ID NO: 131845 - protein, 138 aa, Oryza sativa
  Clone ID: PAT_MRT4530_33872C.1.pep
SRIPITNQHNYPSPPPTATYTPSYTTSFHTPNPHHHQRPQTHSHHTLLITPPSFPHNISLPPLDTTYTYYQISPHHPQPKNTSYQSHPYTPPPPPPLPLVLYSTHLPPHYHPNNIHTLSLPIYTLLPHPIHLLYHNPP

SEQ ID NO: 131846 - protein, 161 aa, Oryza sativa
  unsure (1)..(161): unsure at all Xaa locations
  Clone ID: PAT_MRT4530_33873C.1.pep
YQYTLFQPCSRGVRSINEKYSLSPALQMKPXPMKFKLSNIRKLNSNTGANEFLRVYETTIKATGEDGNTNAKVLRTVLKEIVLSXLFTIPTLLLHSWEQLREMFENGFQRTCEELKGAEDLXAMKXLTWQMIREYITIFLRVRCQLHHAHPRHRCLGKGRA

SEQ ID NO: 131847 - protein, 48 aa, Oryza sativa
  Clone ID: PAT_MRT4530_33874C.1.pep
CMHQHLTCDLSSGTFVTYLFLNSQEDSTRLINDFQRFLSGTIPRPLHR

SEQ ID NO: 131848 - protein, 375 aa, Oryza sativa
  Clone ID: PAT_MRT4530_33875C.1.pep
MTTATTTTTLPAAAALLLLLLSAAAQLCSACPPAASQTAENNPRLQRAYVALQALRRRVTDDPKNLTGGWCGPDVCRYFGVYCAAAPDDPCAATVAGIDLNHGDLAATLPDELGLLTDLAVLHLNSNRFSGALPDTLPKLSLLHELDVSNNRLAGGFPDHILCLPNVKYVDLRFNNFCGEVPPAIFDKKIDALFLNDNHFDFELPANLGNSPASVIVLANIKLRGCIPSSVGRMAATLNELVVLNSGVRSCIPPEIGHLGELTVLDVSNNQLQGTLPESMAWMRSLEQLDVARNELAGHIPEGICALPRLRNFTYSYNYFCGEPERCLRLRRVDDRQNCIAGRPDQRPADQCLAFLHRPPVHCDAHGCFAPPGHY

SEQ ID NO: 131849 - protein, 518 aa, Oryza sativa
  Clone ID: PAT_MRT4530_33876C.1.pep
MVGAGEGDRVGGGAAVGGGQQFVDRSKVRILLCDSDPSSSREVLRLLCNCSYQVTCAKSPRQVINVLNCEAGEIDIILAEVDLPVSKCFKMLKYIARNKELRHIPIIMMSNRDEVSVVVKCLRLGAAEYLVKPLRMNELLNLWTHVWRRRRMLGLSEKNFFNDNFELALSEPSDANTNSTTLLSDDTDDKPKENINQETSTSNQHEYESNPSDAEPKQKGTPEGLLVSTEGGDQASSPGVMFSRPIKTNLRVAESSAFLAYVKSSTPTTSSFDSELQKGGNRLDSSDHRGNFSSTTDRSDTGTDVNIRDKEAFEMPVQYPVVCFSSSNLHLERSNEGQNDASGTPPVYHFPFYYPGMMDHGMTHPPVQNFQGNINNAQVHTPQTLLPQYNVYPQCHGVSMMPPFQYNPAGMSIQSNQLPTQNMWPQASSTPMPEETCSRSERRAAALAKFRLKRKERCFDKKVRYVNRKKLAETRPRVRGQFVRQANYTDITSTGDDISEDEDDDPSSREVEMVSSPE

SEQ ID NO: 131850 - protein, 105 aa, Oryza sativa
  Clone ID: PAT_MRT4530_33877C.1.pep
GNHEPEGEWKQKKGWVVNQGHGIPGDNCLKRQKRPWGAFFGGVKNPFNGGEKPGGRGLNDHQTGGDQGFQDRVPTGGKIRAPETTSFVGEKKSLVLAKRGNGVPN

SEQ ID NO: 131851 - protein, 449 aa, Oryza sativa
  Clone ID: PAT_MRT4530_33878C.1.pep
MKNISWTVMESVKNITDSDGIGVYHLYSCTTNSALDVPRMELFRNTMNTKIYYSDQKWQSFTGIMSPGVLCLDQSGLQFPVPPEAEHAAFLGLGPAASPLAIGTDDAGERRRGGGGGPPCLRVAERAAARTKESGAREARGGRTPALRRLGGRRRRRLARAMRLRKWFVMDKNSYMLDLYKHQTHNISDKPTYKPVTVDLFPMTGVEFALVIGESPVMGCNATSQRGIVLPITGLPWQKSYIEKHNSSSLREMHLFWVQGASSSLRELHLFWFKHSSASAVAALQTCSNHVGMRASSEHKEDGSSPGSQAGHDARRSTGKVLCLEAAALRLEGDSVIRIPYVSALIGEGVSVSVHVSDTDTSLDSRIQENILSDPENPTRMIDEQLLVYYLVSTCSMCGQLALCIHDFTFLTPALYRGLEASNSTILDIDDQQPRFTHADWLGFALFRD

SEQ ID NO: 131852 - protein, 266 aa, Oryza sativa
  unsure (1)..(266): unsure at all Xaa locations
  Clone ID: PAT_MRT4530_33879C.1.pep
RKRKPSRLVVFAFVARLRPPKPPLPFPSSSSPRTQIANQPARRAAAPRRGKESSAAHPPPPSCXGEMGLTFTKLFSRLFAKKEMRILMVGLDAAGKTTILYKLKLGEIVTTIPTIGFNVETVEYKNISFTVWDVGGQDKIRPLWRHYFQNTQGLIFVVDSNDRERVVEARDELHRMLNEDELRDAVLLVFANKQDLPNAMNAAEITDKLGLHSLRQRHWYIQSTCATSGEGLYEGLDWLSNNIASKAXRFGSWISEQFTSAGLHII

SEQ ID NO: 131853 - protein, 1543 aa, Oryza sativa
  unsure (1)..(1543): unsure at all Xaa locations
  Clone ID: PAT_MRT4530_3387C.1.pep
MADHPPNHREEGMDDFVAELARMTMVVGYHNAPEYSTVPPLSGELPYRVRLEVHGYVGTCLANMVVEASGGTADHACQEAAYLMMARLRERHNYIFCNTAYRFHPRRASGGGVSTFRPTAGENDTTFGHMCAVMRGMDRMHSDMHKASKALNDGKLVRIIALKDEIARLKKENAQLKGLPIPGGVRIRTTPRKSMTAPVRIQLAPRNPPPPAAPAAPLVPPAVPAAPAAPAPVPAPVPVSAPXASALSFAPASAARGPASGNGGCGSESGSGETFVRLWMVNTRNGSRAVGEGSNGEERTNGGHPNSASGNGPPPLPENPTLAQVRRSLXAEFYRSFRKAQVPDGVVAQKXREFRALHQGNRTVTEYLHEFNRLARYAPEDARTDAEKQEKFLAGLDDELTNQLISGDYADFEKLVDKAIRKEDQRNKMDGKRKAAQFRSNQGTPSAQAKETGAKPGSCFNCGEHGHFADKCPKPRRARPRFSQARVNHASAEEAQAAPEVILGTFPVNLVPATVLFDSGATHCFISKKFVGMHGLRKEELSTPMRVHTPGNSSTSVSYSPSVLIEIHRSQFLANLILLESKDLDVILGMDWLTKFKGVIDCANRTVTLTNEKGETVVYKSLVSPKQRISLNQIEVEIPVTTEEKSSRKLEDIPIVCEYPEVFPEDLTSMPPKREIEFRIDLAPGTAPIYKRPYRMAANELAEVKKQVDEQLQKGYIRPSTSPWGAPVIFVEKKDKTKRICVDYRALNEVTIKNKYSLPRIDDLFHQLKGAKVFSKIDLQSGYHQLRIREENIPKTAFTTRYGLYECTVMSFGLTNAPAFFMNLMNKVFMEFLDKFVVVFIDDILIYSKSEEEHERHLCLVLEKLKEHQLYAKFSKCDFWLSEVKFLGHVITAQGVAVDPSNVESVTKWTPPKTVSQIRSFLGLCDKSFEELKKKLVSAPVLILPDQTKDFQVYCDASRHGLGCVLMQEGRVVAYASRQLRPHEGNYPTHDLELAAVVHALKIWRHYLIGNRCKVYTDYKSLKYIFTQPDLNLRQRRWLELIKDYDMSIHYHPGKANVVADALSRKSYCNALCTEGMCKELQQELEHLNLGLVEYGYVAALEARLTLVDQVGVAQVNDPEIAKLKKNMRVGKARDFHEDEHGTIWLGERWCVPDDKELKDLILIEAHQTQYSIHPGSTKMYQDLKEKFCWVSMRREIAEFVALCDVCQRVKAEHQRPAVHTTYTGKKLAELYLARIMCLHGVPKKIVSDRGSQFTSKFWQKLQEELGTRLNFSTAYHPQTDDQTERVNQILEDMLRACALDFGGAWDKSLPYAEFSYNNSYQASLQMAPFEALFGRKCRTPLFWDQTGERQLFGTEVLMEAEEKVRTVRERLRVAQSQQKSYADNRRRELTFEAGDYVYLRVTPLRGVHSFQTKGKLALRFVGPYKILERRGEVAYQLELPSNMIGNHDVFHVPQLKKCLRVPEEQADSEHIDIQEDLTYVEKPVRILETNERRTRNKVTRFCRVQWSHHSKEEATWEREGELKAAHPHLFTSSSESRGRDSV

SEQ ID NO: 131854 - protein, 51 aa, Oryza sativa
  Clone ID: PAT_MRT4530_33880C.1.pep
MVGTSLDTNSNMFIILDTMVLIFFLNRRAKLLIEGVLAPFGTPYLRHCKLA

SEQ ID NO: 131855 - protein, 185 aa, Oryza sativa
  Clone ID: PAT_MRT4530_33881C.1.pep
MGLTFTKLFSRLFAKKEMRILMVGLDAAGKTTILYKLKLGEIVTTIPTIGFNVETVEYKNISFTVWDVGGQDKIRPLWRHYFQNTQGLIFVVDSNDRERVVEARDELHRMLNELQNWKKDELRDAVLLVFANKQDLPNAMNAAEITDKLGLHSLRQRHWYIQSTCATSGEGLYEGLDWLSNTIAS

SEQ ID NO: 131856 - protein, 244 aa, Oryza sativa
  Clone ID: PAT_MRT4530_33882C.1.pep
PRVRPRHRSPLPLRPFLLSTCDPSAPARRREPDAAAGRAGERRRGGDRRRRRRRRRRSRAGAEMGLTFTKLFSRLFAKKEMRILMVGLDAAGKTTILYKLKLGEIVTTIPTIGFNVETVEYKNISFTVWDVGGQDKIRPLWRHYFQNTQGLIFVVDSNDRERVVEARDELHRMLNEDELRDAVLLVFANKQDLPNAMNAAEITDKLGLHSLRQRHWYIQSTCATSGEGLYEGLDWLSNNIANKA

SEQ ID NO: 131857 - protein, 153 aa, Oryza sativa
  Clone ID: PAT_MRT4530_33883C.1.pep
GPIRGSKTPPFSEPRGPKRPPKPRPPSLLQGNPQEGPTPQTSRAEPPKPRGGGVKKGILGGSGYAPLIHLNFGTGAGIAPAKSGRAPPLKPAQRTPPSKGRERGDPPPRKPPGPRGTPGKGNIPNGLRGGPPPPGRSPPVPGAPKKRGAPRAK

SEQ ID NO: 131858 - protein, 227 aa, Oryza sativa
  unsure (1)..(227): unsure at all Xaa locations
  Clone ID: PAT_MRT4530_33884C.1.pep
GSRGYGPWWRWRLCSRRCLLRRQLATVAEDAVASRAATAGAGDYRLRRRTACGNGRGDHGRGCGGGSEDGDGEAAGPFGSWGCGGGDWHGGLERLAEGVADGCIXSARHRLKEGLETGLAQRGAADGIGGQLGARGAGGGDGGRLGTKGTAEGGRPDWCEGRVRWRRPAWHERRSRRWRRRPRCEEELPMGVARSSAHEDWPAGDACAGVPHVGRAXVVMEHRCVSR

SEQ ID NO: 131859 - protein, 160 aa, Oryza sativa
  unsure (1)..(160): unsure at all Xaa locations
  Clone ID: PAT_MRT4530_33885C.1.pep
PGDPRARRELAGEPGGSQPAXQRPRXRPRRSRKAXKSDRGRXXNGAAAXEXNAEPTEARPXPXXGTHEGXAPENTRGEGHGSAGDGRTXGXXRHEPTHGATPXKGAGNRATXRNXXEQPRRXPPDGGASAXAXDXXRGRXXKEPHKRSARTRGATESKQH

SEQ ID NO: 131860 - protein, 56 aa, Oryza sativa
  Clone ID: PAT_MRT4530_33886C.1.pep
MALDWQLLLTLASLQMSRERTEEKGGSGSVVGRALLEKRLLTTGNLVVKSPNVVVK

SEQ ID NO: 131861 - protein, 323 aa, Oryza sativa
  Clone ID: PAT_MRT4530_33887C.1.pep
MRIRELRDGAGGSEEAEEDEREEARGGGGGGGGGEVVAVVRLRAKRALVGAGARVLFYPTLLYNVLRNRFESEFRWWDRIDQYVLLGAVPFSSDVPHLKQLGVRGVVTLNESYETLVPTSLYQAHGINHLEIPTRDYLFAPSLEDICQAVDFIHRNASQGGSTYVHCKAGRGRSTTIVLCYLIKYRNMTPEAALDHARCHQIQSSNRTHPVRFSEQSSEAIVEAEVDGFTTEFDNEHFVLPLWEGMLAKPSSPSRSIDAVVVTEEDLEGYETYADASSDTVSVEVVIRQKPMIRRLSCFLGSLKLTSNCEPSPPRRLAEVRAC

SEQ ID NO: 131862 - protein, 781 aa, Oryza sativa
  Clone ID: PAT_MRT4530_33888C.1.pep
MRGGGGGGKEVEERGKVMGPLFPRLHVNDAAKGGGPRAPPRNKMALYEQFTVPSHRFSGGGGALASARGSLARSTSAASQSQVYGCDMPLFEPFNVPSNGPGQSVEKMNSNSVNRQINGSRKDSGMLSTQPKGIDKYGSGSRAECAPQQRVEKGIKSSSGRKLADDDEFIVPSVFSARFPQYSTKERAGVQEESTPLVALSPHKSPPAVSKSPTKCYNTVSKNLERINVSDVKSRGSQKDKETGPAQTLKNVEVEHFSSFEASKDMFGSKHAKVCPKTGTINDLDEPHLENSEHQATSRNGSSVKFQNPPVRRNTISAKPSPGIENTNGHCNLPQGGLKEAGTKRKRLEAQDNAEKIDDLSDSSVECITAWEISPDEIVGAIGAKHFWKARRAIINISLMKAKYNDILILLYQQRVFAAQVFELHKLVKVSSWIEFGVEYENNQNLYLTYKQVQKLIAASPHVLIEGDPCLGNALLASKKKMAEENLKAQPVLVATNDDVQPSLQEPELSKENSEENPPSPRDTAPVSGHHDQTAKIGASKSNLRATPVASDNRQNNCGVQLQPPQNQWLIPVMSPSEGLVYKPYSGPCPPAGSILAPFYANCTPLRLPSTTGDFMNSAYGVPIPHQPQHMGAPGTPTMPMNYFPPFSVPVMNPVALASAVEQGRHPSMPQPYGNLEQHSRMSCNMSHPSGIWRFHASRDSEAQASSASSPFDRLQCGGSGPVSAFPTASAQNTQPQPSSGSRDNQTNVIRVIPHNNSQTASESAARIFRSIQMERQQDDS

SEQ ID NO: 131863 - protein, 784 aa, Oryza sativa
  Clone ID: PAT_MRT4530_33889C.1.pep
MEAAAAAASAAPHLLHCGGFGRLPGLAASLPGRRRRRPSRRVLAVATEPKPSASAPAPRSRSRTRTPNDISSTRFGEVSKEIQRVRKQMEEDEQLATLMRGLRGQNLRDSQFADDNVRLRLVEVSSMNNNEALPLVYSPEIISAYWGKRPRAVATRIVQLLSVAGGFISHLISDLINNKLKENEVARAIELREIVTSLGPAYIKLGQALSIRPDILSPAAMTELQKLCDKVPSFSDDLAMTLLEEELGRPWHEIYSELSPSPIAAASLGQVYKGRLKETGELVAVKVQRPFVLETVTIDLFIIRNLGLVLRRFPQVSIDVVGLVDEWAARFFEELDYVNEGENGNRFAEMMKKDLPQVVVPKTYQKYTSRKVLTTQWIDGEKLSQSTEDDVGSLVSVGVICYLKQLLDTGFFHADPHPGNMIRTPDGKLAILDFGLVTKLTDDQKYGMIEAIAHLIHRDYDAIVKDFVKLGFIPEGVNLDPILPVLAKVFDQALEGGGAKNINFQELAADLAQITFDYPFRIPPYFALIIRAIGVLEGIALVGDPEFAIVDEAYPYIAQRLLTDESPRLRSALRYTIYGKTGVFDAERFIDVMQAFENFIRAAKSGGGENLKGSMAELAEIGTLPSTSLVPAFPMAISQPEQPVKARAALSFLLSERGDFFREFILDEIVKAIDAVSREQLIQIAASFGLGNATPVFSMVPVRARALLPTITEEDRVILNNVEKVVKFLTAGNNPTTIDGDVNVVYLVQELLPVLPSISSKILPEVMSRLSSRVFARLIREAFL

SEQ ID NO: 131864 - protein, 791 aa, Oryza sativa
  Clone ID: PAT_MRT4530_3388C.1.pep
MERPKSPLNPFHCICSLQLDFVPGKWGSVLVVQGKNLGRSFKMAGHPPNHRGEGMIDFVAELARMTLVVGYPDAPEYTTIPPLSGELPHRVRLEVHGYVGTCLANMAVEASGGTADHACQEAAYLMMARLRERHDYIFHDTAYRYHPRRAHGDGVSSFRPTAGENDTTFGHMCAVMRGLDQMHSDLHKATKALNDGKLMRIVALKDEIARLKKENAQLKGLPAPGGVRIRTTPRKRTTAPVRIQLAPRNPPPPAAPAAPPVPPAAPAVPAVPPAPAPAFTLSFAPASAARGPASGTGGCLFGMVYTRTGNRTTGEGSNGEERADGVHPNSDSGNGPPPLPENPTLAQVMAHQTQMMAAMMQQMQQQHQQMHQRMMQHAEQQHQQFGPPPPQSKLPEFLRVRPPTFSSTTNTMEANDWLHAIEKKLNLLQCNDQEKVAFATHQLQGPASAWWDNHMATRPPGTEVTWAEFCRSFRKAQVPDGVVAQKKREFRALHQGSRTVTEYLHEFNRLARYAPEDVRTDAEKQEKFMAGLDDELTNQLISGDYADFERLVDKAIRQEDQRNKMDRKRKAAQFRAHQGSHQRPRFTPGQQGGPTTMIVRQHRPFNPSNFHQGSSGSQNHHGSQPNRGTAPRPPMAPAQSGQPAQAKKETGAKPGSCFNCGELGHFADKCPKPRRAGPRFIQARVNHASAEEAQAAPEVVLGTFPVNSIPATVLFDSGATHSFISKKFVGMHGLIREELSTPMRVHTPGNSSTSVQFSPSITIEIQRSPGFAEFSGVIIRKRKRPGKGKMS

SEQ ID NO: 131865 - protein, 112 aa, Oryza sativa
  Clone ID: PAT_MRT4530_33890C.1.pep
MDAIVSLGRRSVLGASFWRFAYFIDGDLRSFVWLGDAAAPAQGGGRKSTTTPLIPVGVDKAPNIDPNLYFVAITGIKVGSGETVNDKAAAIMTTDTIHFTLLNLVHFDHLKK

SEQ ID NO: 131866 - protein, 906 aa, Oryza sativa
  Clone ID: PAT_MRT4530_33891C.1.pep
MGCYRLSQEGGITYTNLIQQVSVLPNAIFPGAQVAGGLPLLQNTCGNFMQLLQAPIESETALYLTSNRFEYDNIFWGFDPHNGYQQNDLQNAQTDTSQMCNSLPQSVAVHPLVASLDMLYDEMQKSSADVDNQAEMCRSTVQLKASSVEVIYNEMQTQTIEADACFDQHFEQATKEDLLSDHAIVTFQQVEEIEQDKSAENPDQNFSEEDINIFLENESVTAVQRGGQEANSAHVPSINKVFADENEAFDFYNGYAYMVGFSTCKASNYHSRKTDIVTRHTFKCNRWRKPSDPKEKDLPEVDEVENCLQTNTTNPLVKNRKQNKVVYTNCKAEMVITLKRGFWYITRLNLEHNHPLSPPEERKFLRSHKHMTDQEKLLIRTLNKINVPTRTIMSVLSYVRGGLSTVPYTKKAMSNYRDCVRRESGKNDMMQCLDFFEKKRSEDPLFYFRFRTDENNVVKSLFWSDGNNRKFYEMFGDIVLTRRITSHGDNCLFGYAFLQDETSETFQWLFNTFLDCMGGKAPATIITDQDLAMKAAIAIVFPDTVHRNCLFHMLSNARDKTGRTFNSEDEEVYKDFHDIVTKSQTEAEFEYLWKDFIRRKNLYNVRYFQLMWVTRKRWAPVYFKSNWCPLIQTTARSEGTNSRNIVPDTWSEYQFEKQAAKLYTRKIFWAFQRILQSYTKYDVTVKVHDSIFEVYKSEIHALQDFRKRKYIVVVDAIAEEYECICSRFKKDGILCVHVLKVLIHLNITKLPEKYFIERWRLKDKNHELFVPNTLMPAAVLESNPLLRFNILSQKMIKLALDASKTKENFVYVMNESDKIEDGLKAMSDTAPNDATVHVQDAAATTYGVASVGAQTGIPMGPSGVGIDAEITKGAVAETETTDMVGIASTSVLLDPKCSNSKGITDC

SEQ ID NO: 131867 - protein, 424 aa, Oryza sativa
  Clone ID: PAT_MRT4530_33892C.1.pep
MEGTKTESNEDYGMLFRLSQEGGITYTNLIQQVSVSPNAILPGAQVAGGLPLLQNTYGSFMQLLQSPIESESALYLTSNRFEYDNTFGGFDPHNGYQQNDLQNAQTDTSQMCNSLPQSVAVHPPVASLDMLYDEMQKSSADVDNQAEMCRWRKPSDPKEKGLPEVDEVENCLQTNTTNPLVKKRKQNKVVYTNCKAEMVITLKRGFWGGLSAVPYTKKVDFRKRNYIVVVDTIAEEYECICSRFKKDGILCVHVLKVLIHLNITKLPEKYFIERWRLKDKNQELFVPNTLMSAAVLESNPLLRFNILSQKMIKLASDTSKTKEKFVYVMNESDKIKDGLKAMSDTAPNEATVHVQDAAAATCGVASVGAQTGILMGPSGVGIDAESTKGAVAETEPTDMVGIASTSVLLDPKCSNSKGRHKSEP

SEQ ID NO: 131868 - protein, 915 aa, Oryza sativa
  Clone ID: PAT_MRT4530_33893C.1.pep
MTVTTTFFSVSGSFSARFSRFGGGGRVAAAVDRTPARPWTTAASASSAECLLFLMHNRVTEFLIVHNSEYLDSLTVKTALVQGTETESNEDYGMLFRLSQEGGITYTNLFQQVSVLPNAILPGAQVAGGLPLLQNTCGSFMQLLQAPIESETALYLTSNRFEYDNTFWSFDSHNGYQQNDLQNAQTDTSQMCNSLPQSVAVHPPVASLDMLYDEMQKSSADVNNQAEMCRSIVQLKASSVEVIYNEMQTQTIEADACFDQHFEQATEEDLLSNHAIVTFQQVEEIEQDKSAENPDQNFSEEDINIFMENESVTAVQRGGQEANSAHVPSINKVFADENEAFDFYNGYVYMVGFSTCKASNYHSRKTDIVTRHTFKCNRGGLSAVPYTKKAVSNYRDCTRRESGKNDMMQCLDFFEKKRSEDPLFYFRFRTDENNVVKSLFWSDGNIRKFYEMFGDIISFDTTYKTNRCDLPFAPFVGITSHGDNCLFGYAFLQDETSETFQWLFNTFLDCMGGKAPATIITDQDLAMKAAIAIVFPDTVHRNCLFHMLSNARDKTGRTFNSEDEEVYKDFHDIVTKSQTEAEFEYLWKDFIRRKNLYNVSVSAFLAQYERIAETIYECFKEQESLTRNTVLDTWSEYQFEKQAAKLYTRKIFWAFQRILQSYTKYDVTVKVRDSIFEVYKSEIHALQDFRKRKYIVVVDTIAEEYECICSRFKKDGILWRLKDKNQELFVPNTLMPAAVLESNPLLRFNILSQKMIKLASDASKTKEKFVYVMNESDKIEDGLKAMSDTAPNDATVHVQDAAATTCGVASVGAQTGIPMGPSGVGIDAESTKGAVAETETTDMVGIASTSVLLDPKCSNSKGRYKSEPRKKRLIDVIRSKGSVTCSGCGSHDHNIRTCPKKREVKCNRSDEGEEI

SEQ ID NO: 131869 - protein, 98 aa, Oryza sativa
  Clone ID: PAT_MRT4530_33894C.1.pep
GTAEKGVVLRNHTGEVIFAAFCHVDRCSSALEAELLARRDGLALALQCTLLPIVIETDCLAMTQLIRDAAGAKSELAFLIREIASLLMGNRDISFSKC

SEQ ID NO: 131870 - protein, 961 aa, Oryza sativa
  Clone ID: PAT_MRT4530_33895C.1.pep
MDRKNLRKFYLMEGTEAESNEDYGMLFRLSQEGGITYTNLIQQVSVSPNANLAGAEVAGGLPLLQNTYGSFMQLLQAPIESESALYLTSNRFEYDNTFWGFDPHNGYQQNDLQNAQTDTSQMCNSLPQSVAVHPPVASLDMLYNEMQKSSADIDNQAEMCRPTVQLKASSVEVIYNEIVAVVQRGGQDANSAHVPSINKVFADENEAFDFYNGYAYMVGFSTCKASNYHSRKTDVVTRHTFKCNRWRKPSDPKEKDLPEVDEAENCLQTNTTNPLVKKRKQNKVVYTNCKAEMVITLKRGFWYITRLNLEHNHPLSPPEERKFLRSHKHMTDQEKLLIRTLNKINVPTRMIMSVLSYVRGGLSAVPYTKKAVSNYRDFVRRESGKNDMMQCLDFFEKKRSEDPLFYFRFRTDENNVVKSLFWSDGNSRKFYEMFGDIVSFDTTYKTNRYDLPFAPFVGITSHGDNCLFGYAFLQDESSETFQWLFNTFLDCMGGKLPATIITDQDLAMKAAIAIVFPDTVHRNCLFHMLSNARDKTGRTFNSEDEEVYKDFHDIVTKSQTEAEFEYLWKDFIRRNNLYNVRYFQLIWVTRKRWALVYFKSNWCPLIQTTARSEGTNSRYKADICSSHSVSAFLAQYERIAETIYECFKEQESLTRNTVPDTWSEYQFEKQAAKLYTRKIFWAFQRILQSYTKYDVTVKVRDSIFEVYKSEIHALQDFRKRKYIVVVDTISEEYECICSRFKKDGILCVHVLRVLIHLNITKLPEKYFIERWRLKDKNQELSVPNTLMSATVLESNPLLRFNILSQKMIKLASDASKTKEKFIYVMNESDKIEDGLKAMSDTAPNKATVHVQDAAATTCGVASVGAQSGILMGPSGVGIDAESTKGAVAETETTDMVGIASTSVLLDPKCSNIKGRHKSEPRKKRLIDVIRSKGLVTCSGCGSHDHNIRTCPKKKRSQMQQK

SEQ ID NO: 131871 - protein, 112 aa, Oryza sativa
  Clone ID: PAT_MRT4530_33896C.1.pep
MPQEDAQLHFVAKSCTSERYLFVHFAEEADAAVVQGRAGVRSTAAATRPPPPKREKRAEKEPETEKKVVVTVMNGEDDGSADTRRRRCVCSAAGQPAGHFRCVRAETDGADE

SEQ ID NO: 131872 - protein, 51 aa, Oryza sativa
  Clone ID: PAT_MRT4530_33897C.1.pep
MAELRVEPGPVPKLLLRRRTQARGRVGEEVEAARSAPWPGAHRVGNCSAKI

SEQ ID NO: 131873 - protein, 820 aa, Oryza sativa
  Clone ID: PAT_MRT4530_33898C.1.pep
MEGTETESNEDYGMLFRLSQEGGITYTKLIQQVSVSSNAILPGAQVAGGLPLLQNSCGSFMQLLQAPIESETALYLTSNRFEYDNTFWGFDPHNGYQQNDLQNAQTDTSQICNSLPQSVDVHPPVASLDMLYDEMQKSSADVDNQAEMCRSTVQLKASSVEVIYNEMQTQNIEADACFDQHFEQATEEDLLSDHAIVTFQQVEEIEQDKSAENPNQNFSEEDINIFLENESVTAVQRGGQEANSAHVPSINKVFADENEAFDFYNGYAYMVGFSTCKASNYHSRKTDIVTRHTFKCNRWRKPSDPKEKDLPEVDEVENCLQTNTTNPLVKNRKQNKVVYTNCKAEMVITLKRGFWYITRLNLEHNHPLSPPEERKFLSFDTTYKTNRYDLPFAPFVGITSHGDNCLFGYAFLQDETSETFQWLFNTFLDCMGGKAPATIITDQDLAMKAAIAIVFPDTVHRNCLFHMLSNARDKTGRTFNSEDEEVYKDFHDIVTKSQTEAEFEYLWKDFIRRKNLYNVRYFQLMWVTRKRWAPVYFKSNWCPLIQTTARSEGTNSRNIVPDTWSEYQFEKQAAKLYTRKIFWAFQRILQSYTKYDVTVKVHDSIFEVYKSEIHALQDFRKRKYIVVVDAIAEEYECICSRFKKDGILCVHVLKVLIHLNITKLPEKYFIERWRLKDKNHELFVPNTLMPAAVLESNPLLRFNILSQKMIKLALDASKTKENFVYVMNESDKIEDGLKAMSDTAPNDATVHVQDAAATTYGVASVGAQTGIPMGPSGVGIDAEITKGAVAETETTDMVGIASTSVLLDPKCSNSKGITDC

SEQ ID NO: 131874 - protein, 172 aa, Oryza sativa
  Clone ID: PAT_MRT4530_33899C.1.pep
LFDAIEILTQSLSRNCSGFTLLVFILHVMALQRLNDLNRQINAFDFLLEDDTDQFDKENSEGTELLKKSSCLEATQLTSFMMSYVRLLSSGETGSFWCYEISSSWDSSLCSLDEFSFPIATWQLLCENIDIWSPHASKKDLKNFFSNLIKFAFVEKRSCKDVENSGSQSSHR

SEQ ID NO: 131875 - protein, 1780 aa, Oryza sativa
  unsure (1)..(1780): unsure at all Xaa locations
  Clone ID: PAT_MRT4530_3389C.1.pep
MAGHPPNHRGEGMIDFVAELARMTLVVGYPNAPEYTTIPPLSGELPHRVRLEVHGYVGTCLANMAVEASGGTADHACQEAAYLMMARLRERHDYIFHDTAYRYHPRRAHGDGVSSFRPTAGENDTTFGHMCAVMRGLDRMHSDLHKATKALNDGKLMRIVALKDEIARLKKENAQLKGLPAPGGVRIRTTPRKRTTAPVRIQLAPRNPPPAAAAPAVPPAPAPAPAPAPAPAPAFTLSFAPASAARGPASGTGGCPLQMVYTRTGSRATGEGSNGEERADGVHPNSESGNGPPPLPENPTLAQVMAHQTQMMAAMMQQMQQQHQQMHQRMMQHAEQQHQQFGPPPPQSKLPEFLRVRLPTFSSTTNPMEANDWLHAIEKKLNLLQCNDQEKVAFATHQLQGPASAWWDNHMATRPPGTEVTWAEFCRSFRKAQVPDGVVAQKKREFRALHQGNRTVTEYLHEFNRLARYAPEDVRTDAEKQEKFMAGLDDELTNQLISGDYVDFERLVDKAIRQEDQRNKMDRKRKAAQFRAPQGSHQRPRFTPGQQGGPTTMIVRQHRPFNPSNFHQGTSGSQNHHGSQPNRGTAPRPPMAPAQSGQPAQAKKETGAKPGSCFNCGELGHFADKCPKPRRAGPRFIQARVNHASAEEAQAAPEVVLGTFPVNSIPATVLFDSGATHSFISKKFVGMHGLIREELSTPMRVHTPGNSSTSVQFSPSITIEIQRSPFLANLILLESKDLDVILGMDWLTKFKGVIDCASRTVTLTNEKGETVVYKSLVSPKKGVSLNQIETEIPVDTVEKNLRKLEDIPIVCEYPEVFPEDLTTMPPKREIEFRIDLAPGTAPIYKRPYRMAANELAEVKKQVDEQLQKGYIRPSTSPWGAPVIFVEKKDKTKRMCVDYRALNEVTIKNKYPLPRIDDLFDQLKGAKVFSKIDLRSGYHQLRIREEDIPKTAFTTRYGLYECTVMSFGLTNAPAFFMNLMNKVFMEFLDKFVVVFIDDILIYSKSGEEHEQHLRLVLEKLKEHQLYAKFSKCDFWLTEVKFLGHVITTQGVAVDPSNVESVTKWTPPKTVSQIRSFLGLAGYYRRFIENFSRIARPMTQLLKKDEKFKWTAECDKSFEELKKKLVSAPVLILPDPTKDFQVYCDASRHGLGCVLMQEGRVVAYASRQLRPHEGNYPTHDLELAAVVHALKIWRHYLIGNRCEVYTDHKSLKYIFTQPDLNLRQRRWLELIKDYDMSIHYHPGKANVVADALSRKSYCTALCIEGMCEELRQEFEHLNVGIVEHGFVAALEARPTLVDQVRAAQVNDPEIAELKKNMRVGKARDFHEDEHGTIWMGERLCVPDDKELKDLILTEAHHTQYSIHPGSTKMYQDLKEKFWWVSMRREIAEFVALCDVCQRVKAEHQRPAGLLQPLQIPEWKWEEIGMDFITGLPRTSSGHDSIWVVVDRLTKVAHFIPVHTTYTGKRLAELYLARIMCLHGVPRKIVSDRGSQFTSKFWQKLQEELGTRLNFSTAYHPQTDGQTERVNQILEDMLRACALDFGGAWDKSLPYAEFSYNNSYQASLQMAPFEALYGRKCRXTPLFWDQTGERQLFGTEVLAEAEEKVRIIRERLRIAQSRQKSYADNRRRELIFEAGDYVYLRVTPLRGVHRFQTKGXLAPRFVGPYKILERRGEVAYQLELPSNMIGIHDVFHVSQLKKCLRVPEEQADSEHIDIQEDLTYVEKPVRILDTSERRTRNKVTRFCRVQWSHHSEEEATWEREDELKAAHPHLFTSSSESRGRDSV

SEQ ID NO: 131876 - protein, 210 aa, Oryza sativa
  Clone ID: PAT_MRT4530_338C.1.pep
MDRSSNPERITDEPIEITSREETLGSDQRPGNLESSIPQREPKPTQAQINLGTPLTPRISMRRWEMNPPQHTTEHAEHAFFTPQRFDLIHRQITNLTNPREARTKKNPEARKNPPYQTKITRATGREGGREEGLEGSGHLLMVEAMATTGDIPLLLLCATPPQEDGDAVWDAANAMSSGSEISGMILPLLAFLSTWTSASNSRGLEKGFV

SEQ ID NO: 131877 - protein, 134 aa, Oryza sativa
  Clone ID: PAT_MRT4530_33900C.1.pep
GLPPPGGAEKGGKRFFLAFMGPAGKPWGGGFFRDSGFFLRGLEMGFPISREGAPPPWGAGFQKTPKAATKGPGGFFFGHPKREPGGGAPETFRAFAFPRNHFKEKRGENLFIASVFFGGTLFFRGGGGGALPLR

SEQ ID NO: 131878 - protein, 69 aa, Oryza sativa
  Clone ID: PAT_MRT4530_33901C.1.pep
LQDQACSEFPVKEALSHGANRAPQPPSAMAVQSLKHSYPELDPNASALTKPYAVPGHGSMGNQKMRCYR

SEQ ID NO: 131879 - protein, 69 aa, Oryza sativa
  Clone ID: PAT_MRT4530_33902C.1.pep
PPPRCKPLRRRQSRSAGAGRRRSPCPARAAAGGGGVQGDSTRGKSEKARGPQNGVSPRSPPLSSRARVA

SEQ ID NO: 131880 - protein, 45 aa, Oryza sativa
  Clone ID: PAT_MRT4530_33903C.1.pep
RTRGQTPAAGATNTMAETSKCVNIGSLGHHPIFQDGGGVTKSGSE

SEQ ID NO: 131881 - protein, 107 aa, Oryza sativa
  unsure (1)..(107): unsure at all Xaa locations
  Clone ID: PAT_MRT4530_33904C.1.pep
IPSTLGYMSCIDMVYLHVYGRFMYTLRKSITESTDGRSPTRIELGRHCIVXDPMSPSSTWRPTDLRYKRDPLXDLRHQISXPRQPPQPXTKPEPTGAKSPGDLVEST

SEQ ID NO: 131882 - protein, 124 aa, Oryza sativa
  unsure (1)..(124): unsure at all Xaa locations
  Clone ID: PAT_MRT4530_33905C.1.pep
MAASALHQTTSLLGTVRRGDELVRRVGDSGGRITMRRTVKSAPQSMWFGPDRRKYLGPVXEQTPSYLTGEFPADYGWDTAALWADPETFARNKWLGAIHSRWAMLRALGSVXPEILAKNGVKFW

SEQ ID NO: 131883 - protein, 197 aa, Oryza sativa
  Clone ID: PAT_MRT4530_33906C.1.pep
MGLGPSNTSLVYQLAKSQKWKKMFAHCLDGKRSGGIFVLGHIVGPKVRKTPLDQTSSRYRTTLLEITVGETSLSLSAGNVEIKSQNMTILETGSLISYLPEKVYQSFLDSIFSDLEDISVINIGGYSCFHYERSIDARFPEVVFHFKELLTLRVYPHEYMFHNMEEHYYCLGFLSSEQRNHREKDLFILGGKLLSLY

SEQ ID NO: 131884 - protein, 103 aa, Oryza sativa
  unsure (1)..(103): unsure at all Xaa locations
  Clone ID: PAT_MRT4530_33907C.1.pep
MDGMSGLKETVLDLAMFRDMGAQVWLTGERTDTGTWEGYDQILNLVLDEEVDSEXEQGEAWDLSWVTGLLDVIACRGTAEMVAWAADGTEQFEHVILIDTRAI

SEQ ID NO: 131885 - protein, 635 aa, Oryza sativa
  Clone ID: PAT_MRT4530_33908C.1.pep
FLYLTNGSNLHSCNHTKIQALVLVVTSNPRSAGMYHYGLPCQIEGRNEKGKAKASSDSVVEDLYMRRQPLPLMDAIYFIQPTKENIRIFMSDMSGKIPLYKKAYVFFSSPVQRELVAQIKKDSNVRARIGALSEMNLEYFAIDSQGFTTDHDKALEELFSENAEGSLKYNSCLNMMATRIATVFASMREFPRVHYRVARTIDASTLTTLRDLAPTKLAAGVWNCLARFKAMIPEFPQTETCELLIVDRSIDQIAPIIHEWTYDAMCHDLLCMDGNKYVQQVPSKSGSGTENKEVLLEDHDPIWLELRHASERLHEKMTNFVSKNKAAQLHQARNIYSGQQMITKVNSGNGGDLSTKELQKMVQALPQYSDQIDKLALHVEIAGKLNSTIKEQQLKDVGQLEQDLVFGDAGTKELINFFRTHLDISRENKLRLLMVYAAINPDKTRSDKGAKLMQLAGLSADDMIAVSNMRCLCGHDSKKSSAGGFTLKFDLRKKRHGIRKERIGEESKWMLSLCLSLSLSLYSPSVAAQCSTAHALVQPGEDAVQRIGSGDGSSGQAPGRRSAQRDGVKVEELIRRRRRRVLTLSFSLSHPARRQGRLLGGTQLGEDAVQRAGGGDGSSDQAPGRRSAQRRWRQG

SEQ ID NO: 131886 - protein, 113 aa, Oryza sativa
  Clone ID: PAT_MRT4530_33909C.1.pep
SCFTPSRHCKHGTPTLLLTYPPPPTMHRQASSSSRRPSPGWLGAAARIQRRAAGRFDPVGISAEEARSRRVGPRGIGSGGGAGFVVGGGGGGEWYGGVDWIGASRRKKKRTLR

SEQ ID NO: 131887 - protein, 678 aa, Oryza sativa
  Clone ID: PAT_MRT4530_3390C.1.pep
MAILPGDCVVLDIDDAAAQSTPVPYALTFTDLSYTVGSRRAGLLPPLPTDAPPAKALLDGISGEARDGEVLAVMGASGSGKSTLLDALAGRIARGSLRGRVELNGEALHGRRVRAISAYVMQDDVLYPMLTVRETLLFAAEFRLPRALSPDKKRARVDALIDQLGLARAADTIIGDEAHRGVSGGERRRVSIGTDIVHDPILLFLDEPTSGLDSASAFMVVQVLRRIAQSGSVVIMTIHQPSARILNILDRLLLLSRGRTVYAGTPVGLKPFFSEFGDPIPDNENPAEFALDTIRELEHQPDGAAPLADFNVKWQSMHAALPAADSKDSKRCTMPLELAITESVSRGKLVAGSGSGTASSTSVPTFANPLSVEVWVLMKRSFTNTGRMPELFVMRLGTIMVTGFILATIFWRLDDTPKGVQERLGFFAMAMSTMFYVCADALPVFVQERHIYLRETAHNAYRRLSYVFANAVVAFPPLVFLSLAFAVTTFFAVGLAGGGGSFLFFVLIILASFWAGSGFVTFLSAVVPHVMLGYTVVVAILAYFLLFSGFFINRDRIPSYWIWFHYLSLVKYPYQAVLQNEFRDAARCFSRGVEMFDGTPIGAMSKAVKLKVLDAIGATLGAPLTAETCVVTGADVLAQQAVTDIGRWKCLLVTVAFGFFFRFLFYIVLHFGSKNKRR

SEQ ID NO: 131888 - protein, 263 aa, Oryza sativa
  Clone ID: PAT_MRT4530_33910C.1.pep
MVEFAASSLGTRDVHAVFTEVDRAAPIMYWVDSSLCQCCVPVRRMIKEAIMALDGNGKAGSSPYAIAKYMGEQHMGVLPANYRKVLAVQLRNFAAKGRLVKVKASFKLSAAEEKKATAAKAARSKAAKGVVGGAKRKRTPRPSGAAAKKPASSAEAKKRVPPARPARAKRARKAALAKPMQPPKSIRSAISKKANKAAPDHLRRLAARPRRALYPLYNLSVVANLVVVRHRRFVCFDRSSALCPVCVLRCRGLGFFLQGEKLL

SEQ ID NO: 131889 - protein, 222 aa, Oryza sativa
  Clone ID: PAT_MRT4530_33911C.1.pep
MRRLLPFTVLCVLVLLCVASLVDVTEGQRGGGGSGGLAGAAGEDSIPFGAGVGPRGLSSGTWAAWSASSLLAARREAPLAPHREDEGAAGKEGAAGSCFHHAGGGKQPPQPPSPCREGGGGKQPPPLPPHSHTGERQQEPPSAPRRGGGRSRCHQDGEGSSRHHAGRKSSSHRQGGSSSRQGLGFEETGEMAREDGDGERRRKERGGWRKGEPARQHVAYDS

SEQ ID NO: 131890 - protein, 57 aa, Oryza sativa
  unsure (1)..(57): unsure at all Xaa locations
  Clone ID: PAT_MRT4530_33912C.1.pep
YCTLRISQGIYXGSSVFQLNSDESWLSFNQEAKLLHNKVSSLFPAYSSMLLPTNSGR

SEQ ID NO: 131891 - protein, 200 aa, Oryza sativa
  unsure (1)..(200): unsure at all Xaa locations
  Clone ID: PAT_MRT4530_33913C.1.pep
MMRRLLPFTVLCVLVLLCVASLVDVTEGQRGGGGSGGLAGAAGEDSIPFGAGVGPRGLSSGTWAAWSASSLLAARREAPLAPHREDEGAAGKEGAAGSCYHHAGGGKQPPQPPSPCREGRVGATQPPPLPPRSHTGERQQEPPSAPRGSRGGGRSRCHQDGEGSNRHHAXGRKSSSRRXGGSSSRRGLGFEETGEMARED

SEQ ID NO: 131892 - protein, 222 aa, Oryza sativa
  Clone ID: PAT_MRT4530_33914C.1.pep
MGSVVDAPTVVAGQEEVTDNMLGDKKVTVVFVLGGPGSGKGTQCANIVEHFGFIHLSAGDLLRAEIKSGSENGTMIENMIKEGKIVPSEVTIKLLQEAMIKSGNDKFLIDGFPRNEENRAAFENVTKITPAFVLFFDCSEEEMERRLLGRNQGRVDDNIETIRKRFKVFVESSLPVIEYYNAKDKVKKIDAAKPIPEVFEDVKAIFAPYAPNALLSGVTTNL

SEQ ID NO: 131893 - protein, 129 aa, Oryza sativa
  Clone ID: PAT_MRT4530_33915C.1.pep
AGTPPGPSSRIHATIHAVSFFISSVPVVLHATALDQGQNQNRFHSFGSNCELQGTGAHRMEHAILVDVIMPFVTFPFMTLILRIYSDLRHRKTRMMMILDSQTLLLADRPITNVLMMNPVQNAPAEAAS

SEQ ID NO: 131894 - protein, 538 aa, Oryza sativa
  Clone ID: PAT_MRT4530_33916C.1.pep
MTPTLIDITMITVLDVTSSANPISLNTKNQFDFRTKSIGGGSGYVAAYMGKGSVTPREHTAFLIMWLKKFLFCGSSCGPTTNWQFLAEALETKRQFLLGKILLGYQYEMLSNASAKIAIGSVVGAGGPWWLLQTWLNLVVMKVVNRPLLIDAQFPRLEPITGDDGEELTHRRCMSYGEAASTPADSRAKLSAELLKDWFCSFYEGFQRDARIWFPYEDSVNFDLPADFRFEDINSEKHQKSREVFSTAISPCILPVGIHQGRNIQTTESSPPRKSNSGRDIEYAAGLLPNGGGLAPLVIGYHAPSTSSLLQGQMREPTDVGRKRKTKASAIDPSALAPKKNVKKHKPKPADDLPTLDPSIEQALDEEEIEEDIDQAAAELSDIGEKTPSASPKQTPPIPAAPAHFSRPPPPSPPVQQTSSDHTPSATGSHNVGEEEQPIAPAIPVLADLFSFDIKDYFDEIEEETTSKALAPLDETVKKTLEDISLRLESSLDNLVADCGLIRARFAEIQALIPDDLANTITLAVFLEQHQFKLEKAK

SEQ ID NO: 131895 - protein, 164 aa, Oryza sativa
  Clone ID: PAT_MRT4530_33917C.1.pep
MAGCPEHAAHHDTKRSNIVIIPLCDEDLPSSSHSSTTATPDPTISNAYKGPITRARAREIQNKVNMFLSTLNYDISEHNLLPNSCSFLVLRFEGMISLETERQEEELSDPIFCLMAQTHTNITEREVWRDGTSDKIEKISTNNKGELLYRKTEDKKEKAQLGLG

SEQ ID NO: 131896 - protein, 596 aa, Oryza sativa
  unsure (1)..(596): unsure at all Xaa locations
  Clone ID: PAT_MRT4530_33918C.1.pep
MPAAESCHSRSLSWLVKSCIPADPARHIAVPVLCPTPQPPPPSSPPAPPISALPDDLLLECLARVPRASLPPLPAVSRRFATLLASDAFLHLRRAHAHLRPSLLALSVSDNGCAAQALLRFDASVPVLEVAALPLPPTLLHCGGSVFAHARAVVLGRDVFLIGRGATLRVDALTGAARACAPTLFPRKKFAAAAVGDRIYVAGGSARTAAVEEYDPEVDAWRVVGEAPRRRXGCAGASAGGVFYVAGGVAVSGEGARALEAHVCAGSVDALHVASGTWARPRALPGGGCVVGACGVGDHLYVVASHAVELSFWRWSGATGRGGDGRGWGGWVALEAPPMPRGSVGLGMAVRVAMAGLGTNRVAAVLRLKFCHAIFNSYAARIAARSCHYPAASSTSLQPQSPSIPFDLPTLLLRMHASISFALAPASSPDAASFAPTAADVGGAVCLGYGIAIAVGVLVFISTVMLASYICVRAKAGAAAVLLADDDGGGAPAASAVVVLGLDGPAIDALYPKLLHVGVGDDDDACAGAQCAICLGEFVAGDALRRGHGCGHRFHAECAERWLRVSATCPVCRDSPLPSPMATPLAEAVPLAAHAR

SEQ ID NO: 131897 - protein, 466 aa, Oryza sativa
  Clone ID: PAT_MRT4530_33919C.1.pep
MAVIALKCPDVEVVVVDISAPRIEGWNSERLPIYEPGLDDVVRQCRGRNLFFSTDVERHVADAGIVFVSVNTPTKTRGLGAGKAADLTYWESAARIIADVSRSDKIVVEKSTVPVKTAEAIEKILAHNSKGGNIRYQILSNPEFLAEGTAIQDLFSPDRVLIGGRETPEGRAAVAALKSIYARWVPDDRIITTNLWSAELSKLAANAFLAQRISSVNAISALCEATGADVTEVANSIGKDSRIGPRFLSASVGFGGSCFQKDILNLVYICECYGLPEVANYWHQVIRINDYQKSRFVNRVVSSMFNTVAGKKVAVLGFAFKKDTGDTRETPAIDVCKGLVGDKAVVSIYDPQVTEEQVQRDLVMNKFDWDHPRHLQPMSPSSAKHVAVSWDAYEAARGAHAVCILTEWDEFRRLDYQRMYDAMHKPAFLFDGRNVVDPDKLRRIGFVVYSIGKPLDHWLRDMPAVA

SEQ ID NO: 131898 - protein, 1753 aa, Oryza sativa
  unsure (1)..(1753): unsure at all Xaa locations
  Clone ID: PAT_MRT4530_3391C.1.pep
MVEVLEVEEAVAFTPTPSGSGDSSGSRGPRHRHRNSPTPPCREPSRREDATRSGGSALSPLPGRGRPRRVGARRRLTYGDGDSPRGALQAASALLRHPPVNSEPETPVQRWLDDVANLVTYAQRQLAAGGRPATTSTSRTPITLSSSATRRARRSATASRRSTAPTSSGASGSRRHLDGLYGEQDAWINIERRRDERRAARMGEGASSSGEPRSSSRGGPPPTFTPGGTGCRAFVASLRNVRWLPKFRPNLTEKYDGSINPSEFLQIYITIIVAAGGDNRVMANYFPMALKGQARGWLMTQPPVSIHSWEDLCQQFVTNFQGTYPRPGEEADLHAVRRKDDESLRSYIQRFCQARNTIPCIPAHAVVYAFRNGVRHNRMLEKIASKEPKTTAELFELADKVARKEEXWAWNSPGTGAAATAAPESAPRSKRRDXGKRKPARSDDEGHVLAADGPARAPRKGKATDDKPSSTAPPSEGRSADKWCSVHNTYRHSLTDCRSVKNLAERFQKADEEKRXGRREGKAPATSTGDRREEAKNKAPADDGAQGTIATLDRXGGACAHTSRRSFKAMRQELLAAVPTHEVARKARWSEVKLTFDQSDHPTAPGMKLQPSLPIIGVTPGHTWPLGHVELPVTFSDSTNFRTEXIDFDVADLNLPYNAVLGRPVLVKFMAATHYVYLQMKMPGHAGPITVFGDVKVALACAEQRADNLAVATEPQAPEASASRVSKKRLTSADEEGALVSXFLRANSDVFAWKPSDMPGVPREVIEHRLAVRPDARPVRQKVRRQAPERQAFIREEVARLLEADFIREVIHPEWLANPVVVPKANGKLRMCIDYTNLNKACPKDPFPLPRIDQIVDXTAGCDLLCFLDAYSGXHQIRMAREDEEKTVFITPVGTFCYTPMPFGLKNAGPTFQRMTRITLSNQIGRNVEAYVDDLVVKTRHQDTLLQDLAETFDSLRSTRVKLNPDKCVFVVEREEGEPEASLTRDDPSSPEGPEPEAPSPREDPEAPVGGREALASGPEAYDPDMTRDPPPPGALEQGQPRSXAPDGTNRPHRKVQRPVYFVSEALRDAKTXIPTGQKMLYAVLMASWKLRHYFQAHRVSVVTYYPLGQILHNREGTGRVVKWAIELAEFDLYFEPRNAIKSQVLADFIAEWTPVDEPVPPKVPSLPGDEEDPNADIRGGHXVMHFDGSLNLQGAGAGVTLTSPSGDVLKYVVRLDFRATNNMAEYEGLLAGLRVAAGMGIRRLLVLGDSQLVVKQVSKEYRCTDPQMDAYVREVQRMELHFDGLELRHVPRRDNTVADELSRIASAQAPLPPGIFEERLAQPSAQPDPSRDPDDTPSAPTLGDPWPSRPEGVNPDPPPPRQVVWMTDIRAYLDGNTLPEDRAEAEKLAHISKRYVLVEGTLYRRAANGILLKCVSREQGIELIADTHXDILGPFKAARGXYQHLYVAIDKFTKWPEAYPVVKIDKHSALKFIRGITSRFGVPNRIITDNGTQFTSELFGDYCDDMGIKLCFASPAHPKSNGQVERANAEILKGLKAKTYNILKKHGDSWLEELPAVLWANRTTPSRATGETPFFLVYGAEAVLPSEISLRSPRVALYNEANQDDLRRDDLDYLEERRRRAALRAARYQQSLRRYHQRHVRARSLQVGDLVLRRVQSRLGLSKLSPMWEGPYKVIGVLRPGSVRLTTEDGTELPNPWNIEHLRRFYPXRRDFLLSRSSAQPSHNPSVCTGLAGGYHCVSXFPLQAMNFSTHC

SEQ ID NO: 131899 - protein, 456 aa, Oryza sativa
  Clone ID: PAT_MRT4530_33920C.1.pep
MAHNDEASSSRSTFFAAAQPSPPPPSRLAPAPASASASPMDAAAPARDFMAEALRLVHNRLTCLVDRRTMARVCHDWRAAVKPLQNAPHLRPLPWILVPRADGPSFSCALRGCGGHGLGVPDGARAARCFGAYDGGWIFLGETCRNTLLSLRDHQLRFNLPFFVRPDKTAAELGRPDGPVPNTGVIMLAATLSSPPEDEDWVAAAIITYWPFQAARRTHAFWRVQSANASQDQVAAMGHGPSAIDEPALEDVIHHKGAFLFLTAEEDLHVFTARDFHEDGDGNMKMAPRVILRFWRGRRDYGGDVVARYLVESRGNLLMVVRRVPAPLAAPPTTSAFKVFEMVQPPPRKRNKALHGWKELESLGERMLFVARGCSRSYDAGDYPGDEFGEGVYFLDDGRLYRESTVFASRAVAGKYPCRDTGKWLPAADAAGVPRVDKFLPEQGPSDYSPPAWLLP

SEQ ID NO: 131900 - protein, 39 aa, Oryza sativa
  Clone ID: PAT_MRT4530_33921C.1.pep
MRFQGRHRNFDYNHPGRQHKQVLERLEVLYSCKNINWVS

SEQ ID NO: 131901 - protein, 99 aa, Oryza sativa
  unsure (1)..(99): unsure at all Xaa locations
  Clone ID: PAT_MRT4530_33922C.1.pep
MAXAQLVLVAVVAALXLAAPHXXVAITCGQVNXXVGPCXTXXRGAPVXSXXXCREVRSLKXXDXRTAXRXXGVTXXKXXXLXXXXINVAXXQYASKXGV

SEQ ID NO: 131902 - protein, 105 aa, Oryza sativa
  Clone ID: PAT_MRT4530_33923C.1.pep
MYHVEPKPIQPLILQGRRTNVRLLNHATNLADVAARNHIAAGNICRPKSHRRRKHLPPQITSPPEATAAPNHIARSNYGALIDPDIVKRHQCLCTKRSRWYRVVP

SEQ ID NO: 131903 - protein, 89 aa, Oryza sativa
  unsure (1)..(89): unsure at all Xaa locations
  Clone ID: PAT_MRT4530_33924C.1.pep
HLVNAAVTRPPSRPSPAAPQHQAFAALGITPPPPXRSTSPPAASYRSAAAVASPPPPPPCLPRSTSPPPRTDQPPPPAFHHSKYSGTTS

SEQ ID NO: 131904 - protein, 478 aa, Oryza sativa
  Clone ID: PAT_MRT4530_33925C.1.pep
MASDGDAAAPLLTPSGDNDDEPRRRRNMFAFGCATLASMTTILMGYNLALMSGAQLFVREDMGLSDAEIEVLAGSMNVFMLASILAAGWAADTLGRRGTIVLANAFLMAGALAMSLGATYAALMAARFVTSVGVGFARVVAPVYNAEISPASTRGVLTSLLDMFINVGILLSYVSNYAFAGLPVHLGWRVMFAIGAVPPVFLAAAVLAMPESPRWLAMRGRHADARVVLARTSDSAEEADLRLEEIKHAVAEPHDAGGGVWRELLFRPSAMVRRILATVIGLQFFQQASGIDAIVLYSPLVFKKAGMASNTSVLGATIAIGVVKTCFILVATLLSDRLGRRPLLLASTGGMAVTLTSLALTLRVASPPSTASSAACVASVVAFVAAFSVGLGPTTATYTAEVMPLRLRAQGTGLGVAVNRLACGAVTMTFISLADGITMAGCFFLYAGVAAAACVFVYVWLPETRGRSLENMDMVFSK

SEQ ID NO: 131905 - protein, 325 aa, Oryza sativa
  unsure (1)..(325): unsure at all Xaa locations
  Clone ID: PAT_MRT4530_33926C.1.pep
MPPPPPPPTEHXRRRPPPTDQPPPSPXPPPPPPCLPRSTSPPPRTDQPPPPATDQPTPPPPTKQVGADRSNSPPPPPSPTKQVPCALLPPPPGFPPLPVPGLADEPVYAAPARHLPPPPGFPPLPVPGLADEPVYAAPARRLPPPPGFPPLPPCRATPRTSSASSPPRPCTRRPSTRTRGPALPRCPPPPPAVAVXPCLSRRGAASPPAPARTAAPAPAPPRPPQPAPAPPRTPAQGAPWHSGAAPRHHRRRHGVDLDAHDPVVGAQRSAYAHLPRERGGRRLQRRPPPPAWPPLHRPRHGSRRRRRRSYGGTSRRRDQPTQRPH

SEQ ID NO: 131906 - protein, 971 aa, Oryza sativa
  unsure (1)..(971): unsure at all Xaa locations
  Clone ID: PAT_MRT4530_33927C.1.pep
PQYTPLLALYTRDEEKTRSDVFRFEMGWFQHPNFHXHLIKVMPTRLQKRVLDYWHVLMPILRRWLRGWGANLNSEQKRRKKALERQLEAIDKRADERDLFEHEWAERYELERELEDIYSHEEIWWQKICGETWLLRGDANTSFFTGXANGRKRKSLIFSLQNEGRXITDKEQINQHIYGYYKKLFGKEDNCNIHLKGDAWGDRLRLSEEDKVRMVRPFSMEEVEKVIKSMKANTAPGPDGFPVGFYKHLWSHFGGLIKEMXDDLHKGELDIDRINYGVITLLPKIKDANKIKQYRPICLQNVILKILTKTVTMRFSEVANKIISWSQTAFIPGRNILEGCVILHEVLHELKRKKMSRIVFKIDFEKAYDRVKCDFLYEVLEKKNFDLIMISWIKKINEGGKVSININGEQGAFFKTFRGLRQGDLLSPLMFNLVGDALAVILDKAKESGVLQGLVXLQYADDTILFAQVSDQNIMCLKFLLFYFEMSGMKINYQKSEMYVLGVSGEEEIRVANMMNCKVGVMPFTYLGLPMSLDKITMKDFCLIIKRVEKRMQPWKSGYLSYGGREIKINSSLSSAPMYAMGFYSLPEGFHSKMDSARSRFYWQGVGGGGKKKYHMIKWEAFLRPKDFGGMGFLDTRIMNICLLSKWIMKLDNRATDMCYEVLRRKYLKGSFFQSLEVGGSQFWKGLHHCKSHLQRXCKKIVHDGGRVDFWGDVWLGDAPLKVTFHKLYEVSLQQKATVREMWANGDCNLIFRRSLNLEREGELHGVKDILQSVQLDGNRDEVIWPYTKNKSFTAKSMYRLLTFGGVKDTEMWSIWKGKIPLKIKHFLYLVGRGKLPCASQLVKRNWKGGXSFCKLCKSRETTNHILYGCPLAVFTWCVVKEVLCLNNRPTSFWECISXFGSTSFVWDRGKKNTWMVLLASACWALWLTQNDWVFKDILVSSPLQVVYRMISFARRWKVFLKEEERKVLEA

SEQ ID NO: 131907 - protein, 237 aa, Oryza sativa
  Clone ID: PAT_MRT4530_33928C.1.pep
MPRNGDAAAKKQPWYMRALGGLIPSARRAAIAAPPPPAAAVAGAVERRPSWWWGSSLKTTSAAFAREVCICAPLCSYDGIMGIQVDAVAPTMMARSSAAISPSPPRRASPARSPTAGAAGGGGRRSPASPRTASSPRSSRARAHPAPVSVAAPAPAAAAVEGPRKRVSFSGGESLWNDELVRRFVRAQEGMPRRGEIDMANRHRRRRWRAPGKSRLRRMSLAHVADDDEDGETNALA

SEQ ID NO: 131908 - protein, 61 aa, Oryza sativa
  Clone ID: PAT_MRT4530_33929C.1.pep
LCVQDHAQERPDIPAVILMLSSDSSSLPMPRPPTLMLHGRSAVGLPGFHLHAALLCQAFAH

SEQ ID NO: 131909 - protein, 1174 aa, Oryza sativa
  unsure (1)..(1174): unsure at all Xaa locations
  Clone ID: PAT_MRT4530_3392C.1.pep
MIMVEVLEEEAVVFTPTSSGSEDASESHGPRHHRRNSPTPPRHDPSRREDPNRSGGLALSPPPGGGRPRRIGAWRRLTYGDGGSPRGTLQAAGALLRHPPVNSEPETPVQRWLDDVAKLVTTAQRQLAAGGRPAVTGGDDWVMANYFPMALKGQACGWLMTQPPDSIHSWEDLYQQFVTNFQGTYPRPREEADLHAVRRKDDESLRSYIQRFCQVRNTIPCIPAHAVVYAFRNGVRHNRMLEKIASKETKITAELFELADKVARKEEGKATGDKPSSTAPSGEGRSADKWCSVHNTYRHNLADCRSVKNLAERFQKADEEKRQGRREGKAPATPTEDLRGEAKKKAPADDGDNSEDLEFQIPQGTVATIDRGEEGACVHTSRRGFKAMRRELLAAVPTHEAARKARWSEVKLTFDQXSDHPTVLARAAFDAFKAPGMKLQPXLPVIGVTPGHTWPLGHVELSVTFGDSTNFRTERIDFDVADLNLPYNAVLGRPALVKFMAATHYAYLQIKMLGPSGPITVFGNVKVALTCAEQRADNLAVATEPQAPEASASRASKKRLTSADEESALVFFLRANSDVFAWKPSDMPGVPREVIEHRLTVRPDARSVRQKVQRQAPEQQAFIREEVARLLEADFIREVIHPEWLANPVVVPKANGKLRMCIDYTDLNKACPKDPCPLPRIDQIVDSTVGAVLVVEREESGPEAPLTHDGPSSPEDPVPEAPNPQEDPEAPVGGGEALASVPEAYGPDMTRDPPGAPRQGRPRSSAPGSTDRLHRKVLADFIAEWTPVDDPVPSNVPSLPGDGEDPNTDIRGGHWVMHFDGSLNLQGAGAGVTLTSPSGDVLKYVVRLDFRATNNMAEYEGLLAGLRAAAGMGIRRLLVLGDSQLVVNQVSKEYQCTDPQMDAYVREVRRMERHFDGLELRHVPRRDNTVADELSRVASARAPLPLGPSWKDSHSHNGTQFTSELFGDYCDDMGIKLCFASPAHPKSNGQVERANAEILKGLKTKTYNVLKKHGDSWLEELPAVLWANRTTPSRATGETPFFLVYGAKAVLPSELSLGSPRVALYDEAKQDDLRRDDLDYFEERRRRAALRAARYQQSLRRYHQRHVRDRSLKVGDVVLCRVQSRLGLSKLSPMWEGPYKVIGVLRLGSVRLTTEDGTELPNPWNIEHLHRFYP

SEQ ID NO: 131910 - protein, 368 aa, Oryza sativa
  Clone ID: PAT_MRT4530_33930C.1.pep
MKHLAANREGDVRAIGAAHHDAELVPQVGRWHCNRFVVVAQNDEATYECNHIARVKFTQLDEAPPGIKAEALGCLAYQQTPLGMLHGWYSTLCSMKLETRSITHGWVGTPKAGVGDREMRIVTGQRRRLGMLLVGERRSRGGGQPCEPPKTREERWGGEISLEMKKRSSGGGGGWGVRMASSARCRRRARGLGDGAAAIHMCRVDHLNGSDVFFFVGGETFHAHRALLAVCSPVFKALLLSSTAEAAACSITLNDIKPAMFEALLHFMYTGDFLPAGAHSSSPDSSDTNTDTLHRLLAAAHEYKLDRLKLMCARKLEESLSVETVARTLGYAKMCGCSELKSKCLDLLLLGEEEHQSIGHTWLLLALA

SEQ ID NO: 131911 - protein, 211 aa, Oryza sativa
  Clone ID: PAT_MRT4530_33931C.1.pep
MRGKGCWSKGEEGQEEKIKIKERMEERKRCSVSRESSFCTSDTHAIGIFLAHFRTTQFYEVDGFNLCLEFWQAEAERLKQQLHNLEGSQRQLLAHDLSGLEWNDLKSLENQLETSLHNVRLKKDKIMVEQIQELRKKENIMHRENMELHREFNMIRQDSVNFQRKVYGKQDVNGGQGSSVTQNTNTQDDADEIRLELSQPQVPDEKPEAAA

SEQ ID NO: 131912 - protein, 133 aa, Oryza sativa
  Clone ID: PAT_MRT4530_33932C.1.pep
MTFKRRNGGRNKHGRGHVKYIRCSNCAKCCPKDKAIKRFQVRNIVEQAAIRDVQEACVHDGYVLPKLYAKVHHCVSCAIHAHIVRVRSRENRRDRRPPERFRRREDRPQGPRPGGGAPAPGGAAAPAPNVART

SEQ ID NO: 131913 - protein, 367 aa, Oryza sativa
  Clone ID: PAT_MRT4530_33933C.1.pep
MGRAMRWFKKVLTGKKEGGDRDRKEHSAAGGANGGVAPPPMERRRWSFAKPRSSFADGSRRPSVTAVVAGELSQVRPCSCGQQREVEAAVMIQKAFRGYLARRALRALKALVKIQALVRGYLVRKQAATTLQRLQALMRLQASSRAIKMASSRKSVEQERIVVQMQGGRVKTLTLPVVHRRRVSDGGDINFDRSPRIVEMDTCQLRCRSSRITSRYAADPPPDGTPGSVPLSSPHLYCYKPPPSRHLQAEEHEHDARAQPKTTHNTPRLAAALPAGYHGPASPAKGRVVSPRYMADTASSVARARCQSAPRQRHGAAGEPRPSLARAGSRKSRPDSAISLKSSEMSRHEDSEFSDDVTRDYYLDQLW

SEQ ID NO: 131914 - protein, 40 aa, Oryza sativa
  Clone ID: PAT_MRT4530_33934C.1.pep
HAYKRVPDRKNRPKSHRPISANRVMPAICPSQCAEEDVAA

SEQ ID NO: 131915 - protein, 183 aa, Oryza sativa
  unsure (1)..(183): unsure at all Xaa locations
  Clone ID: PAT_MRT4530_33935C.1.pep
MKFTVSFAALAAGAFQAVAGQTVYFAGDSTMARSGANDGATDGWGNYIGKYLKVNAVNKAIGGRSARSYTNEGRFQEIVNLVKPGDVVVIEFGHNDGGSPNKNDNLRSACPGAGTEVCTSDKTGEKVYTYVFYISQAAKALVAKGAQVVLSTQTPNNQXETGTFEPGAPRFSWLCVYCAQGSG

SEQ ID NO: 131916 - protein, 456 aa, Oryza sativa
  Clone ID: PAT_MRT4530_33936C.1.pep
MSTKKRARWDPPPEEENGGPTRQSAQVRYYSTARLPVGPSGLRWGAVAAVLQPHPPTPCTRSTVRLPLPADGPYLSVKVLFPVHVSLSLLDSISNFRVLSSSNASKTELVKKYCQTMDGILDHLEVALNRAFPQITPDGELSKVLEELGATINEATELVGGWNQMMSKIYFVIQADSIIAKMQIYVFELCQIVNSLMQIESMHLEDLEHDSCGKISDVIREASRALAGEVMPNSEEFGKIQTTLSLSTNQELLMEYVALVKIKTKGNHEDNKEMDDINDIVELVNHMLDKHVEEKQTRSINGVTIPADFCCPLSLELMSDPVIVASGQTYEHVFIRKWFDLGYNICPKTRQILGHTKLIPNFTVKQLIENWCEMIECHHLGRVVRDGGGLRRGVGPQPQPLPRAGHPDLRHPLPPPPPPHAPVPAPLLLLAAAALRPAHCLLRRAEINLTVISLRS

SEQ ID NO: 131917 - protein, 778 aa, Oryza sativa
  Clone ID: PAT_MRT4530_33937C.1.pep
MTFVCGGGQVMDSVSLSLLDSISNFRVLSSSNASKTELVKKYCQTMDGILDHLEVALNRAFPQITPDGELSKVIQADSIIAKMQIYVFELCQIVNSLMQIESMHLEDLEHDSCGKISDVIREASRALAGEVMPNSEEFGKIQTTLSLSTNQELLMEYVALVKVKTKGNHEDNKEMDDINDIVELVNHMLDKHVEEKQTRSINGVTIPADFCCPLSLELMSDPVIVASGQTYEHVFIRKWFDLGYNICPKTRQILGHTKLIPNFTVKQLIENWCEVHGIMLPDPVKLLSLCFPVSLNITDGSASADKSGSPEHCQLVAALHPKAQCASDDSHHYNLIHENSDSDDRVSSFGDTDDSEPDSLRLSTETTAANKSLLDEKTDRSDGLKQLRDNGFQVSDEEQYLERNGKSHISSHHQLEVDGENVRVQASSDINASEVMQDDPVTTCSKVSDNPPRLGGVRSRNQPNWWRQSNKTIPRIGLSSSTDSKPDFSGNDAKVRNLIEELKSDSAEVQRSATGELRILSRHSLENRIAIANCGAIPFLVSLLHSTDPSTQENAVTILLNLSLDDNNKIAIASAEAIEPLIFVLQVGNPEAKANSAATLFSLSVIEENKIKIGRSGAIEPLVDLLGEGTPQGKKDAATALFNLSIFHEHKTRIVQAGAVNHLVELMDPAAGMVDKAVAVLANLATVHDGRNAIAQAGGIRVLVEVVELGSARSKENAAAALLQLCTNSNRFCTLVLQEGVVPPLVALSQSGTARAREKAQVLLSYFRNQRHVRVGRG

SEQ ID NO: 131918 - protein, 111 aa, Oryza sativa
  Clone ID: PAT_MRT4530_33938C.1.pep
MSRAECGGGEEEERCRYRGVRRRRWGKWVSEIRVPGTRERLWLGSYATPEAAAVAHDTAQMMTLYHLNQSFHVSNYNDDYHPMRTVLLDAMQLPIGSVLVIQTCMHLHFHL

SEQ ID NO: 131919 - protein, 635 aa, Oryza sativa
  unsure (1)..(635): unsure at all Xaa locations
  Clone ID: PAT_MRT4530_33939C.1.pep
FFIYFSFSFSLFFSLFFSLFFPLLLSFFCTSGGNYTAGSTYESNLLRLASTLRANASASPTLFASGVRGVGPDAVYGLLLCRGDMNPSDCFDCGTNVWRDAGPTCNRTKDAILVYNQCYAQFSDRGDFLAATNNSGEVSLLISGTNITSTDVAGYDRAVTELLNATVRYAVENSTKLFACSPDLSPAQCRSCLDGLVGQWWKTFPLNGKGARVAGPRCYLRSELGPFYTAPSARTPPPPPPSSPPASAAPARTPSTASCSAAAKNSASKILLIVLPIVAVAIVAAISVCMWTVRKKSRATKAEHLSEPSEDLESVKSTLLTLGSLQVATDNFDESKKLGEGGFGAVYKGIFXGQEVAVKRMAKDSHQGLQELKNELILVAKLHHKNLVRLIGFCLEKGERLLVYEYMPNKSLDTHLFDTEQRKQLDWATRFKIIEGTARGLQYLHEDSQKKIIHRDMKASNILLDADMNPKIGDFGLAKLFAQDQTREVTSRIAGTFGYISPEYVMCGQYSTKSDVFSFGILVIEIVTGQRRNSGPYFSEQNGVDILSIVWRHWEEGTTAEMIDHSLGRNYNEAEVVKCINIGLLCAQQNPVDRPTMVDVMVLLNSDATCPLPVPAPRPTSSIDGSSGYSTGYST

SEQ ID NO: 131920 - protein, 699 aa, Oryza sativa
  Clone ID: PAT_MRT4530_3393C.1.pep
MATSAHTVLDVDSGGGAATAAAGPPVPYLLSFTDLSYSVRKGGGGVLSCLPSSRRRRHSNRLASADAPAPPDAPTKALLDGISGEARDGELFAVMGASGSGKSTLVDALAGRIARESLRGAVELNGEPLHGRRLRAISAYVMQDDLLYPMLTVRETLLFAAEFRLPRALSPDKKRARVDALIDQLGLARAADTIIGDEAHRGVSGGERRRVSIGTDIVHDPILLFLDEPTSGLDSASAFMVVQVLRRIAQSGSVVIMTIHQPSARILNILDRLLLLSRGRTVYAGTPVGLKPFFSEFGDPIPDNENPAEFALDTIRELEHQPDGAAPLADFNVKWQSMHAALPAADSKDSKRCTMPLELAITESVSRGKLVAGSGSGTASSTSVPTVGHDHAVEVWVLMKRSFTNTGRMPELFVMRLGTIMVTGFILATIFWRLDDTPKGVQERLGFFAMAMSTMFYVCAHALPVFVQERHIYLRETAHNAYRRLSYVFANAVVAFPPLVFLSLAFAVTTFFAVGLAGGGGSFLFFVLIILASFWAGSGFVTFLSAVVPHVMLGYTVVVAILAYFLLFSGFFINRDRIPSYWIWFHYLSLVKYPYQAVLQNEFRDATRCFSRGVEMFDGTPIGAMSRAVKLKVLDAISKTLGTNMTANTCVTTGADVLAQQAVTDIGKWKCLLVTVAWGFFFRALFYVVLLVGSKNKRR

SEQ ID NO: 131921 - protein, 150 aa, Oryza sativa
  unsure (1)..(150): unsure at all Xaa locations
  Clone ID: PAT_MRT4530_33940C.1.pep
PPPATKRSETPPPRASHHEHLDTGVRILLLPPPLEASEVMDSVSLSLLDSISNFRVLSSSNASKTELVKKYCQTMDGILDHLEVALNRAFPQITPDGELSKVIQADSIIAKMQIYVFELCQIVNSLMQIESMHLXDLEHDSCGKISDVIR

SEQ ID NO: 131922 - protein, 77 aa, Oryza sativa
  Clone ID: PAT_MRT4530_33941C.1.pep
MDGWDGRQCTRFVSSGVGAGNVHPLRKGEVRGDPCDIPFIYKRKTLPYESRGRLWKNQIPEKGWPSPSLHIQNLETL

SEQ ID NO: 131923 - protein, 79 aa, Oryza sativa
  Clone ID: PAT_MRT4530_33942C.1.pep
MASAAVRVGGGSLRYGREREEGSRPRQRERGRGGRPPRGSAHGKQRGEIRHMRPYSVGNYCCDGDGTMMTEAKRVHCTE

SEQ ID NO: 131924 - protein, 66 aa, Oryza sativa
  Clone ID: PAT_MRT4530_33943C.1.pep
FFFFFFWYSITISLHFQVTSSSGSQVANKTQKQREQGQKSRSLACAASRTKASGPLLRSAMCKVKK

SEQ ID NO: 131925 - protein, 50 aa, Oryza sativa
  Clone ID: PAT_MRT4530_33944C.1.pep
MSSPQRHLLCCVTRPLSHELSIDRHVSNCSAVKESSCLIEYISLHQTSSI

SEQ ID NO: 131926 - protein, 68 aa, Oryza sativa
  Clone ID: PAT_MRT4530_33945C.1.pep
VPRGGFSHKKCLLGKPGPSPFLPPQVPGDAFFSPGGFYKTPPFFKGVFRGVNTLAPFKGVRGISPSPK

SEQ ID NO: 131927 - protein, 83 aa, Oryza sativa
  Clone ID: PAT_MRT4530_33946C.1.pep
MAPPGSRRWACVRVMTGTILGGALGFYVMHRLETSHKAKMEERLRKYEAHMSMVAKGKEEAQQRLQDEAALQHKDQARLLPDS

SEQ ID NO: 131928 - protein, 287 aa, Oryza sativa
  Clone ID: PAT_MRT4530_33947C.1.pep
MARKCSSCGNNGHNSRTCSGQRVLDHSISSSNSGSTTAAAATACGGLRLFGVQLQVGGGSSPLKKCLSMECLASPAYYGASASPSVSSSSSSLVSIEENTERVSNGYLSDGLMGRVQERKKGVPWTEEEHQMFLAGLDKLGKGDWRGISRHFVTTRTPTQVASHAQKYFLRQNSMTQKKRRSSLFDVVEGIKRAAAMPISGSASELQIPGMSIGVGVVKEEVVLPPCLNLMSNSSSASQHSPSLTLLANPQVQLQMPDLELKMSTSRLSDQSGPSPSTPFFGTIRVT

SEQ ID NO: 131929 - protein, 303 aa, Oryza sativa
  Clone ID: PAT_MRT4530_33948C.1.pep
MDPNQPLSALQDRKRTIWLTSKSQVTIAKRQGEEGHASNWTEEENLRLLSSWLNNSLDSINGNDKKGEYYWRDVAAEFNGNASSNNRKRTVVQCKTHWGGVKKDIAKFCGAYSRARRTWSSGFSDDMIMEKAHALYKSENNDKTFTLEYMWRELKDQPKWRRILEEDSKNKRTKISESGAYTSSSNQETEEETSRKEKRPEGQKKAKAKLKGKGKKPAPSPLGDQPSQDFVLLNEAVKLRAEAVLKSAEATTKSAEAKKEQTRMEKYQTYLKLLDKDTANFSDAKLKRHEAVLEKLATELAEE

SEQ ID NO: 131930 - protein, 193 aa, Oryza sativa
  unsure (1)..(193): unsure at all Xaa locations
  Clone ID: PAT_MRT4530_33949C.1.pep
TPIGRLGSTEPAGIVEMLRTPDLIFLQEVQDNSGAANDGVVSANKTLAALADGIEAASGVVYEWAEVVPDNNVDGGQPGGNIRQAYLYCPDVVQLVKPNEGSASDVNAVLDGPTLKFFXGRIDPANSVWDNSRKPLAAEWKPVKGTKKSFFTVNVHFGSKGGSSSIHGDARTPVNKGAEKRSKKSEVPAVFFA

SEQ ID NO: 131931 - protein, 1709 aa, Oryza sativa
  Clone ID: PAT_MRT4530_3394C.1.pep
MAGHPPNHRGEGMIDFVAELARMTLVVGYPNAPEYTTIPPLSGELPHRVRLEVHGYVGTCLANMAVEASGGTADHACQEAAYLMMARLRERHDYIFHDTAYRYHPRRAHGDGVSSFRPTAGENDTTFGHMCAVMRGLDRMHSDLHKATKALNDGKLMRIVALKDEIARLKKENAQLKGLPAPGGVRIRTTPRKRTTAPVRIQLAPRNPPPAAAAPAVPPAPAPAPAPAPAFTLSFAPASAARGPASGTGGCLFGMVYTRTGNRTTGEGSNGEERADGVHPNSDSGNGPPPLPENPTLAQVMAHQTQMMAAMMQQMQQQHQQMHQRMMQHAEQQHQQFGPPPPQSKLPEFLRVRPPTFSSTTNPMEANDWLHAIEKKLNLLQCNDQEKVAFATHQLQGPASAWWDNHMATRPPGTEVTWAEFCRSFRKAQVPDGVVAQKKREFRALHQGNRTVTEYLHEFNRLARYAPEDVRTDAEKQEKFMAGLDDELTNQLISGDYADFERLVDKAIRQEDQRNKMDRKRKAAQFRAPQGSHQRPRLTPGQQGGPTTMIVRQHRPFNPSNFHQGTSGSQNHHGGQPNRGTAPRPPMAPAQSGQPAQAKKETGAKPGSCFNCGELGHFADKCPKPRRAGPRFIQARVNHASAEEAQAAPEVVLGTFPVNSIPATVLFDSGATHSFISKKFVGMHGLIREELSTPMRVHTPGNSSTSVQFSPSITIEIQRSPFLANLILLESKDLDVILGMDWLTKFKGVIDCASRTVTLTNEKGETVVYKSLVSPKKGVSLNQIETEIPVDTVEKNLRKLEDIPIVCEYPEVFPEDLTTMPPKREIEFRIDLAPGTAPIYKRPYRMAANEVAEVKKQVDEQLQKGYIRPSTSPWGAPVIFVEKKDKTKRMCVDYRALNEVTIKNKYPLPRIDDLFDQLKGARVFSKIDLRSGYHQLRIWEEDIPKTAFTTRYGLYECTVMSFGLTNAPAFFMNLMNKVFMEFLDKFVVVFIDDILIYSKSEEEHEQHLRLVLEKLKEHQLYAKFSKCDFWLTEVKFLGHVITAQGVAVDPSNVESVTKWTPPKTVSQIRSFLGLAGYYRRFIENFSRIARPMTQLLKKDEKFKWTAECDKSFEELKKKLVSAPVLILPDPTKDFQVYCDASRHGLGCVLMQEGRVVAYASRQLRPHEGNYPTHDLELAAVVHALKIWRHYLIGNRCEVYTDHKSLKYIFTQPDLNLRQRRWLELIKDYDMSIHYHPGKANVVADALSRKSYCTALCIEGMCEELRQEFEHLNVGIVEHGFVAALEARPTLVDQVRAAQVNDSEIAELKKNMRVGKARDFHEDEHGTIWMGERLCVPDDKELKDLILTEAHQTQYSIHPGSTKMYQDIKEKFWWVSMRREIAEFVALCDVCQRVKAEHQRPAGLLQPLQIPEWKWEEIGMDFITGLPRTSSGHDSIWVVVDRLTKVAHFIPVHTTYTGKRLAELYLARIMCLHGVPRKIVSDRGSQFTSKFWQKLQEELGTRLNFSTAYHPQTDGERQLFGTEVLTEAEEKVRIIRERLRIAQSRQKSYADNRRRELTFEAGDYVYLRVTPLRGVHRFQTKGKLAPRFVGPYKILERRGEVAYQLELPSNMIGIHDVFHVSQLKKCLRVPEEQADSEHIDIQEDLTYVEKPVRILDTSERRTRNKVTKFCRVQWSHHSEEEATWEREDELKAAHPHLFTSSSESRGRDSV

SEQ ID NO: 131932 - protein, 132 aa, Oryza sativa
  unsure (1)..(132): unsure at all Xaa locations
  Clone ID: PAT_MRT4530_33950C.1.pep
MDSGGDGIGARRRQWTWPPLFSLAAADCSASSSRSAVVASLDDGVAKLDKSSGDXLIGARREDGHGHGFVVAAVVATALPSSPTPASPSPLYHPTSPGRRSLPRPHCRGDRRRRRRPLQPVQLRLLQLGYRL

SEQ ID NO: 131933 - protein, 112 aa, Oryza sativa
  Clone ID: PAT_MRT4530_33951C.1.pep
PSSRRAPMSHHHWICRAWPRRRRDSPPPRCAAPRQATAIRSGEPCQCRAGPDPVSRAAPVGGDLREEDAEEAAAASEKRGGQVHCRRRAPIPSPPLSMFAVVKFHIRHHRGG

SEQ ID NO: 131934 - protein, 104 aa, Oryza sativa
  Clone ID: PAT_MRT4530_33952C.1.pep
ILARRADKFWLTCGLCSFPPTLLRVLPCFALRSTSLLSGRLREPLVHRRAPAGHRGGSGVRREGAYPSNPQAAASIVRAVEQLPSPDIRPNPRSIVQIGAEEEG

SEQ ID NO: 131935 - protein, 212 aa, Oryza sativa
  Clone ID: PAT_MRT4530_33953C.1.pep
MSFSFEGSRRSSPRGDASAPTRVGRRRAFPLPFASPPPEWPAGKLAGRKDGGGGASLEGAAAGASRRRGGGGGQIRGGGSGGGGAEEVAAATRRRWRRLTGRRRRWRRQQQDGGGAGSGDGAGPAARGVTGSGNLLAGSGAPQSGSVLSGVGGRIPSVKATASQHVDDSVQPVGGGVAEGDNEAATGSGCGSRRRWLVAATAVTGGMAALDS

SEQ ID NO: 131936 - protein, 56 aa, Oryza sativa
  Clone ID: PAT_MRT4530_33954C.1.pep
AYLKFCDTSIDIVKLRLRGLKHKCADLLMETSGISLGCHLGREHLGRVLPSSIVQD

SEQ ID NO: 131937 - protein, 212 aa, Oryza sativa
  unsure (1)..(212): unsure at all Xaa locations
  Clone ID: PAT_MRT4530_33955C.1.pep
MADLAPLILKRMMYKWDRGDASAPTRAGRRRAFPLPFASPPPEWPTGKPAGRKDGGGGASRRXRGGGGGQIRGWGGDGGGAEKAAAATGRTRRRWRRPTGRRRRWRRWRQDGGGAGSRDRAGPAARDVTESGNLLAGSGAPQSGSVLSGVGGRIPSVEAATGQHTDDSVQPGLGGGVAEGNSEVAASSGGGSRRRWLVVATAVTRGMAALDG

SEQ ID NO: 131938 - protein, 144 aa, Oryza sativa
  Clone ID: PAT_MRT4530_33956C.1.pep
MPAVASRDSHTQVETNTSQEIETAAAADGRRRQIDVTQRPVAGGVEGQLAVTAEEDGTGWMTGPPAAAVAYWLDELLPRFRLAPHSRLVGDWGLCNGEVGIHKELASGSSAGGFSGGAIGLNNFIAEKPPSPNRPRRMGSLAAE

SEQ ID NO: 131939 - protein, 206 aa, Oryza sativa
  Clone ID: PAT_MRT4530_33957C.1.pep
MVSLKLQKRLASSVLKCGKGKVWLDPNEVNEISMANSRQNIRKLVKDGFIIKKPQKIHSRSRARRAHEAKQKGRHSGYGKRRGTRESRLPTKILWMRRMRVLRRLLRKYREAKKIDKHMYHDMYMKVKGNMFKNKRVLMESIHKSKAEKAREKTLSDQFEAKRAKSKASRERKIARRDERLAQGPREPAAPAVPAQTAAAPKKYKK

SEQ ID NO: 131940 - protein, 208 aa, Oryza sativa
  Clone ID: PAT_MRT4530_33958C.1.pep
MVSLKLQKRLAASVLKCGKGKVWLDPNEVNEISMANSRQNIRKLVKDGFIIKKPQKIHSRSRARRAHEAKQKGRHSGYGKRRGTREARLPTKILWMRRMRVLRRLLRKYREAKKIDKHMYHDMYMKVKGNMFKNKRVLMESIHKSKAEKAREKTLSDQFEAKRAKSKASRERKIARREERLAQGPREPAAPAAAAPAQTAAAPKKAKK

SEQ ID NO: 131941 - protein, 129 aa, Oryza sativa
  unsure (1)..(129): unsure at all Xaa locations
  Clone ID: PAT_MRT4530_33959C.1.pep
MHGRLLFRRELVACACGCVRCIDGEGVNRVGVGLGAWCAAVNSGRESHAIDGGIYSGDAVGNGWMGDDSALGGRSXGRGRHLWLHAPAAEVEEEGWKGXSSAEKFSXSSRTDFSISAFRDSTVRSGKDW

SEQ ID NO: 131942 - protein, 423 aa, Oryza sativa
  Clone ID: PAT_MRT4530_3395C.1.pep
MATSAHTVLDVDSGGGAATAAAGPPVPYLLSFTDLSYSVRKGGGGVLSCLPSSRRRRHSNRLASADAPAPPDAPTKALLDGISGEARDGELFAVMGASGSGKSTLVDALAGRIARESLRGAVELNGEPLHGRRLRAISAYVMQDDLLYPMLTVRETLLFAAEFRLPRALSPDKKRARVDALIDQLGLARAADTIVGDEAHRGVSGGERRRVSIGTDIVHDPILLFLDEPTSGLDSASAFMVVQVLRRIAQSGSVIVMTIHQPSARILNILDRLLLLSRGRTVYAGSPSGLKPFFSVFGYPIPDNENLVEFALDTIRELEHQPDGAAMLVKFSSRWQSSLGALLDTKDDKDRSQRCTMPLELAIAESVSRGKLVAGSGSGTLSSTSVPTYANPWYVEVWVLMKRAFTNTRRMPELFVMRLGTIM

SEQ ID NO: 131943 - protein, 57 aa, Oryza sativa
  Clone ID: PAT_MRT4530_33960C.1.pep
CHARRRQRVRHKEDFCYQEDQKEEARSTASTSFSRLVYTRAFACGFSLEFISCNLVN

SEQ ID NO: 131944 - protein, 103 aa, Oryza sativa
  unsure (1)..(103): unsure at all Xaa locations
  Clone ID: PAT_MRT4530_33961C.1.pep
AHAYAGGHLNPAVTFGLADSGHITILTGLFYWIAQLLGAFIVXLLLKFVTHGTAIPTHGSYGISELEGVVMEIVITFALVYTVHSTAGDPKKGSIEHHRAHRD

SEQ ID NO: 131945 - protein, 129 aa, Oryza sativa
  Clone ID: PAT_MRT4530_33962C.1.pep
SFLSLLCPSFLPRVTNRDTGGGGRSGGEAWRAWGLLPARRGEAARRARRLSPTRRVSSSHMSASDDLPRCCLPSLDLSCGSTLSGKNHQPVIVATSSTCCRRDLVLSLISPGTNSRRKTTLLSTMSQHF

SEQ ID NO: 131946 - protein, 83 aa, Oryza sativa
  Clone ID: PAT_MRT4530_33963C.1.pep
MAVDVLSGGVLGAAARAVDDGRRWLRDEAGLMIRTMATEALDGGVLEVATVTNYGEFNSLRKTVVGWQAASRCSMAVRNAATA

SEQ ID NO: 131947 - protein, 47 aa, Oryza sativa
  unsure (1)..(47): unsure at all Xaa locations
  Clone ID: PAT_MRT4530_33964C.1.pep
VGPCVPRTISPLWVPPLFDGLLGVGVKSTPPVKIRGVSYQFYLXIVF

SEQ ID NO: 131948 - protein, 107 aa, Oryza sativa
  unsure (1)..(107): unsure at all Xaa locations
  Clone ID: PAT_MRT4530_33965C.1.pep
PCVVALFRPPDRDGGHARPPLHRPFPLPXPRGPRRRRRRGAAAALRESQHHRSQRSVGSSRPSSSRSSARSSAMPTPSSPRCARPMSPTRPSSSTPSWRPAATTSGG

SEQ ID NO: 131949 - protein, 422 aa, Oryza sativa
  Clone ID: PAT_MRT4530_33966C.1.pep
STTRMVRGRRRGGDAGPVVVIDVEDDGEDAADDSAGGGGGAAAAVKRRVVVPGAVATRTRSRRMAMAQQAPVTPPAAAEEAPSRRRKRKGAASAEAGGGGPSKRRVRSSGSAGGRGARKRKEAEADEEEAEAEAEEEAEAEAGTPARGESMEVSQVDGGGSSGRADDASHNGNGESRVCNADGIDQASEERPSVAGGDLIEEEHYGNGEASVAGGDRIEEHCGNVEASVANSNRDGGEIIAGEGTEDRGNTELSVVDPVNEELASDEDDYDDEMLEEKLVGDVIRAYSNGADLDTNGVDWEAEDEMEFADLDTNVVDWEAEDEMEFDDDNDNDADDDGDNFGGDADEGYFEVLSDEPKEDDDDTEVELDDEEDDENDDDCNSASCDEEDEEEEEEREEEEEEAQRRKQKKGIDSSDDEMIDD

SEQ ID NO: 131950 - protein, 71 aa, Oryza sativa
  Clone ID: PAT_MRT4530_33967C.1.pep
MRGGALGGGGKPQATAGLGGGSALGDVVSRLRDIIIWGYILRIRGGPLMVTAQYGNSAVRGGFSKYQEGIG

SEQ ID NO: 131951 - protein, 282 aa, Oryza sativa
  Clone ID: PAT_MRT4530_33968C.1.pep
MGRKRRARVSRDGDGEEEEEPAPVAAESKSLYEILGVERTASQQEIKKAYHKLALRLHPDKNPGDEEAKEKFQQLQKVISILGDEEKRALYDETGIADDDALVGEAADNLQEYFRAVYKKVTEADIEEFEAKYRGSDSEKKDLKDLYTKFKGNMNRLFCSMICSDPKLDSHRFKDIIDEAIAEGELKSTKAYDKWAKKISEIEPPTNPLERRVKKNKKKSEENDLILAISQRRAQRKDRFDSVLSSIMSKCDPKGSSSSEPTEEEFEQARQRLEKKRSKNRK

SEQ ID NO: 131952 - protein, 1445 aa, Oryza sativa
  Clone ID: PAT_MRT4530_33969C.1.pep
MDRAARLARRGGGVTVAEYRMVRGRRRGGDAGPVVVIDVEDDGEDAADDSAGGGGGAAAAVKRRVVVPGAVATRTRSRRMAMAQQAPVTPPAAAEEAPSRRRKRKGAASAEAGGGGPSKRRVRSSGSAGGRGARKRKEAEADEEEAEAEAEEEAEAEAGTPARGESMEVSQVDGGGSSGRADDASHNGNGESRVCNADGIDQASEERPSVAGGDLIEEEHYGNGEASVAGGDRIEEHCGNVEASVANSNRDGGEIIAGEGTEDRGNTELSVVDPVNEELASDEDDYDDEMLEEKLVGDVIRAYSNGADLDTNGVDWEAEDEMEFADLDTNVVDWEAEDEMEFDDDNDNDADDDGDNFGGDADEGDKSVQMHDFSKVETQDLVSHNVNVSEVRPHEDEEAIKDEMESKGKGSLSFNEGSSYIEILDSDEEVKVVNDTGNALRRKPLVPAKLPIVPSCVAWRTRSSWGMKEERISYNTYFEVLSDEPKEDDDDTEVELDDEEDDENDDDCNSASCDEEDEEEEEEREEEEEEAQRRKQKKGIDSSDDEMIDDAVDCGIDWEEDYPEVDFTRPLTFQKDGSEAPVGSEAFTEQQKRSRFTWELERRKKLKLGMMTNHRLYERDLESDSNSSDSSQNRKNGCQGSGDHRTGRKRKNPLSKSGKKSSRMLKRQSLMKLLMDKMCSNDDGKSTPFDQKPQIEYSFKDLHPLVFSFGDDDPSPTDRSEQDAALDMLWADLDFTLESENIGTYYDDEGQEDSLLDHALAPITPCSRGKHEFIIDEQIGIRCKYCSLVNLEIRFILPLLASNFAEKPAWRNSSCLKTALMCPDLYEQTGTGDGQSQDFHINGTVWDLIPGVITDMYQHQREAFEFMWTNLVGDIRLNEIKHGAKPDVVGGCVICHAPGTGKTRLAIVFIQTYMKVFPDCRPVIIAPRGMLFAWEQEFKKWNVNVPFHIMNTTDYSGKEDRDICRLIKKEHRTEKLTRLVKLFSWNRGHGVLGISYGLYMKLTSEKVGCTGENKVRTILLENPGLLVLDEGHTPRNERSVIWKTLGKVKTEKRIILSGTPFQNNFLELYNILCLVRPRFGEMFLTKTRVGRRHCVSKKQRDKFSDKYEKGVWASLTSNVTDDNAEKVRSILKPFVHIHNGTILRTLPGLRECVIVLKPLPLQKSIIRKVENVGSGNNFEHEYVISLASTHPSLVNAINMTEEEASLIDKPMLERLRSNPYEGVKTRFVMEVVRLCEALKEKVLIFSQFIQPLELIKEHLRKIFKWREGKEILQMDGKILPRYRQNSIEVFNNPDSDARVLLASTRACCEGISLTGASRVVLLDVVWNPAVGRQAISRAFRIGQKKFVYTYNLITYGTGEGDKYDRQAEKDHLSKLVFSTEDEFSNVRNMLSKAEMEHCSKLISEDKVLEEMTSHDQLKGMFLKIHYPPTESNIVFTYNQIAPELS

SEQ ID NO: 131953 - protein, 153 aa, Oryza sativa
  Clone ID: PAT_MRT4530_3396C.1.pep
ELAVAKRTTVTIATAGSVGQSRRSSKPPARAQKRSGRIRRGGKATAGGSGEEGDGAVARTSSAAWRCRRHRVVQGETSSTLVTAYAQPLFAAGEAGPVHSPPWPICLDPLTPWPDLLGWGWEVGGSGALTCPWGRDHPTIGASFSLGASGALY

SEQ ID NO: 131954 - protein, 89 aa, Oryza sativa
  Clone ID: PAT_MRT4530_33970C.1.pep
RFTEGIPPSIGNLSNMYWLDLGENRLTGSLPVSDGTNTGLDNLTNALHFHFGVNQLSGTIPSQLFKSNMKLIHLLLDNNNFTGGIPPTL

SEQ ID NO: 131955 - protein, 74 aa, Oryza sativa
  Clone ID: PAT_MRT4530_33971C.1.pep
VLKEGVVSIMVVLHKTRQGGKKCKRFIHQIQLQKEAVLLPASAAHPLPSPAADQPPPPRPLLSMGLGWVGGWVC

SEQ ID NO: 131956 - protein, 100 aa, Oryza sativa
  Clone ID: PAT_MRT4530_33972C.1.pep
MRQSITRGRILFLVFAAVVNWRLGWEGRRARVLVGEEDATGEGSDPRWRVAGGRRGHVGGGVGGRGRRHEPSHESSPNWHSSPELPKQKAPDEQETEAMW

SEQ ID NO: 131957 - protein, 85 aa, Oryza sativa
  unsure (1)..(85): unsure at all Xaa locations
  Clone ID: PAT_MRT4530_33973C.1.pep
MAALAAXSTXFXXKPRXXXAPSSPAARFSVSCSASGNNGGXGEXAXXLAASXXTFXAALAXXXVXLFXAATLRPPXXXTLPGLRR

SEQ ID NO: 131958 - protein, 89 aa, Oryza sativa
  Clone ID: PAT_MRT4530_33974C.1.pep
LAPLACNRNSHVILAAEISKPRLVRRQLVVNHQQIICASVTVDIPRDIASQRVKVGHIVAPGRRLGGVILCLSLSCSVWFIFFYIPRVR

SEQ ID NO: 131959 - protein, 454 aa, Oryza sativa
  Clone ID: PAT_MRT4530_33975C.1.pep
MASSCIPTGLRLDLEMVKAAAPPGGSSAAAHSSASSTLSEASNSSSSSVASLSLKRARTPRKRPNQTYNEAAALLASMYPSVFPVIKGAGTAPPRLLGLATALADDPSSSDLLPPVFREFRDAAPSPGTPDADADVTDDDYLGELDFEDEDGFDADSFLAVDDGVAEGIDRIMGKLSMEKNSAAASRADAVLSSAAIHPYIRSLMVLGLGFRQGRLNAGQALKRHDDESDWWMCPAIPVKEIAAPPAPSVAMPVPVPMPLQASDKKKKKSKKKSLKEIERDNAIAVGECKFGDEGTLGFDHGDAGISALKDPKIGLGLNLNTEEVLKAWCNSGSVFAGCDALESPRSSSDLHAKLADIDLFLDNNTSGVIREGSMLKLRHKQKQCTPLLSNKTRYQSRKGKYVSQASLLQQASEKERLSAWKGPKCCRVGEDWVFGLVEIEILCFGHFYGLINI

SEQ ID NO: 131960 - protein, 57 aa, Oryza sativa
  Clone ID: PAT_MRT4530_33976C.1.pep
SYTLQYFLVQKYSVLSLKLFLGILFDFVLTGIETVMFDTIKQCFEELQERSIHSLLP

SEQ ID NO: 131961 - protein, 78 aa, Oryza sativa
  Clone ID: PAT_MRT4530_33977C.1.pep
APPSWPSSRQRTAPPASPSAPPRPSSSSPPSPACRRRRRRPAPRGTPATPSSSPPPPPACLSPEPRASTTPPPPPCCS

SEQ ID NO: 131962 - protein, 67 aa, Oryza sativa
  unsure (1)..(67): unsure at all Xaa locations
  Clone ID: PAT_MRT4530_33978C.1.pep
SSLRSSTPARSSSIHAIGLDEERVREKNXSPLPHTSLPDVTIFCWQRRCRKRTKVWIEARQRTAVPP

SEQ ID NO: 131963 - protein, 365 aa, Oryza sativa
  Clone ID: PAT_MRT4530_33979C.1.pep
MTMKMKQQMMNKLGLLVVAVAVAMAPAGSFASSSGRGAPMVPAVIVFGDSIVDPGNNNNLKTQIKANHAPYGMDFANSEPTGRYSNGLIPTDFIVQGLNVKQLMPPYLGVELSPEDLKTGVSFASGATGYDPLTPVIVSVITLDQQIEYFHEYRKRLVGVVGEEETARIIDGALFVVCAGTDDIANTYFTTPFRSVEYDIPSYVDLLVSGAAKLLDQVAALGARRIGFVGLPPIGCVPSQRTLGGGPHRRCEEKRNYAAKLFNSRMEEVIAAKTNPATTRMVYVDIYTILQELVENGDKYGFTETTRGCCGTGTIEVTGLCDARFVDICDNVSNHVFFDSYHPTQRAYKIIVDYIFDNYLQFLLA

SEQ ID NO: 131964 - protein, 1351 aa, Oryza sativa
  Clone ID: PAT_MRT4530_3397C.1.pep
MVYTRTGTRTTGEGSNGEERADGVHPNSDSGNGPPPLPENPTLAQVMAHQTQMMAAMMQQMQQQHQQMHQRMLQHAEQQHQQFGPPPPQSKLPEFLRVRPPTFSSITNPMEANDWLHAIEKKLNLLQCNDQEKVAFATHQLQGPASAWWDNHMATRPLGTEVTWAEFCRSFRKAQVPDGVVAQKKREFRALHQGNRTVTEYLHEFNRLARYALEDVRTDAEKQEKFMAGLDDELTNQLISGDYADFERLVDKAIRQEDQRNKMDGKRKAAQLRSNQGWTYHHDRPQHRPFNSSNFHQGASGSQHHGGQPNRGAAPRPPMAPTQSAPSAQAKKETGTKPGSCFNCGELGHFADKCPKPRHTGPRFVQARVNHASAEEAQAAPEVVLGTFPVNSIPATVLFDSGATHSFISKKFVGVHGLIREELSTPMRVHTPGNSSTSVQFSPSITIEIQKSPFLANLILLDSKDLDVILGMDWLTKFKGVIDCANRTVTLTNEKGETVVYKSLVSPKQGVSLNQIEAEIPVVTKEKSSRKLEEIPIREIEFRIDLAPGTAPIYKRPYRMAANELAKVKKQVDEQLQKGYIRPSTSPWGAPVIFVEKKDKTKRMCVDYRALNEVTIKNKYPLPRIDDLFDQLKGAKVFSKIDLRSGYHQLRIREEDIPKTAFTTRYGLYECTVMSFGLTNAPAFFMNLMNKVFMEFLDKFVVVFIDDILIYSKSEEEHEHHLRLVLEKLKEHQLYAKFSKCDFWLTEVKFLGHVITAQGVAVDPSNMESVTKWTPPKTVSQIRSFLGLAGYYRRFIENFSRIARPMTQLLKKDEKFKWTAECDKSFEELKKKLVSAPVLILPNQMKDFQVYCDTSRHGLGCVLMQEGRVVAYASRQLRPHEGNYPTHDLELAAVVHALKIWRHYLIGNRCEVYTDHKSLKYIFTQPDLNLLQRRWLELIKDYDMSIHYHPGKANVVADALSRKSYCTALCIEGMCEELRQELEHLNVGIVEHGFVAALEARPTLVDQVRATQVNDPEIAELKKNMRVGKARDFLEDEHGTIWMGERLCVPDNKELKDLVLTEAHQTQYYIHPGSTKMYQDLKEKFWWTDGQTERVNQILEDMLRACALDFGGAWDRCLPYAEFSYNNSYQASLQMAPFEALYGRKCHTPLFWDQTGERQLFGTEVLTEAEEKVRTIRERLRIAQSRQKSYADNRRRELTFEAGDYVYLWVTPLRGVHRFQTKGKLAPCFVGPYKILERRGEVAYQLELPSNMIGIHDVFHVSQLKKCLRVLEEQADSEHIDIQEDLTYVEKLIRILDTSERRTRNKVTRFCRVQWSHHSEEEATWEREDELKAAHPHLFASSSESRGRDSV

SEQ ID NO: 131965 - protein, 1878 aa, Oryza sativa
  unsure (1)..(1878): unsure at all Xaa locations
  Clone ID: PAT_MRT4530_33980C.1.pep
MTTFEDMFEFEFRVATGGEVSYQFRNLDGSPMSWVLLNESGVMQRMVWDRSAMSWSNFWSGPRDQCDNYGRCGAFGVCNVVDATVCGCIRGFTPRSPAEWYMRNTSGGCGQRTPLQCTGSSGGGGEDGFYLLRGVKLPETHGCAVDATVTHEGCRWRCLSNCSCTAYAGADIRGGGSGCIQWFGDLMDTGFVDGGQELYVRLAKSELAPGAPAPAPGAPPPGAGAADMVMQMYGRRRTEDEEQSCGSTPQKPDHPPTQCRSQAKDGDGKQTPDGSAQPSDKGATDGSLGNQGDGAQGLQGGDLNQNSDVAQDFFNNFQDRVDYAVHHALINQSRQQPSQQTPPIQQVVQPIQQQVMQPAQQTAPRQQPLQPIRQTPLRQQVIQPIQHQGSISALAGLRGPTQPQFASQYGQFEPIQQQAQGAAQQRPWADVIADVMREQFGLKPKETGSLYQQPYPEWFERVPLPNQFKVPDFSKFSGQDGVSTYEHISRFLAQCGEASAVDAXSWADLEKQFHSYFYSGXHGMKLSDLTAIKQRYDEPVHEYIQRFREMRNKCFSLSLTDALLADLAFQGMIAPIREKFSSEDFGSLSHLIQKVTLHEHRSAEVRKSSKKVNHVCPYMYGLDDDEDDSEIAAAEWVRSKKVIPCQWVKSSGKEERQQIRVAIEGGKIKFDDSKRPMKVDGNPFPVNMVHTAGQTANRARARGFQRRYDKQQEKHHEQYDDGFDPHWGCEFFKFCWNEGMRLPSIENCPGCSDIVESSSQSYNRGNPLRQTRVSVHQRLGPVNHDHGQEDNVIRKNQWCPSGIFTKNQKRRVQRLRSREHFQEVEQEINHRLKKAKPRQEWRVKSQIPVADDVATDEAKRLAKGKSIVTASVNMVFTLPAEFRIDQADVDEVEEESAKLVLSPEQAAFEKPEGIENRHLKPLYVNGYVNGKPMSKMMVDGGAVVNLMPYATFRKLGRNAEDLIKTNMVLKDLGGNPSETKGVLNVELTVGXMHQCLIQWQGDKIEIVLADRXENPSYYFEGVVEGSNVYTKDAVDDLDDKQGQGFMSADDLEEIDIGPGDRPRPTFISKNLSPEFRTKLIELLKESRDCFAWEYYEMPGLNRSIVEHRLPIKPGVRPHQQPPRRCKADMLEPVKAEIKRLYDAGFIRPCRYVEWVSSIVPVIKKNGKVRVCIDFRDLNKATLKDEYPMPVADQLVDAASGNKILSFMDGNAGYNQIFMAEEDIHKTAFRCPGAIGLFEWVVMTFGLKSAGATYQRAMNYIYHDLIGWLVEVYIDDVVVMSKQIEDHIADLRKVFERTRKYGLKMNLTKCAFGVSAGQFLGFLVHERGIEVTQRSVNAIKKIQPPENKTKLQEIIGKINFVRRFISNLSGSQLAGEYECKNDTLIVYNEKCQELMKEFRLVTLKHVSREQNIEANDLAQGASGYKPMIKDVQIEVATITADDWRYDVYRYLQDPSQSAFRKLRNRVDLHRQDQQPTESYHNSPKDRANNSLECREELRVHHGVLLKCLSADEAKVAIGEVHEGICGTHQSAHKMKWLLRRAGYFWPTMLEDCFRYYKGCQDCQKFGAIQRAPASAMNPIIKPWPFRGWGIDMIGMINPPSSKGHRFILVATDYFTKWVEAIPLRKVDSGDAIQFVQEHIIYRLGIPQTIATDQGSIFVSDEFVQFADSMGIKLLNSSPYYAQANGQVEASNKSLIKLIKRKISDYPRQWHTRLAEALWSYRMACHGSIQFPPYKLVYGHEAVLPWEVRVGSRRIELQDGLTADEYYNLMADEREDLVQSRLRALAKVTRDKERVARHYNKKVVPKTFSEGELVWKLILPIGTRDNKFGKWSPNWEGPFQIYKVVSKGAYMLQGLDGEVYGRALNGKYLKKYYPSVWVNA

SEQ ID NO: 131966 - protein, 134 aa, Oryza sativa
  unsure (1)..(134): unsure at all Xaa locations
  Clone ID: PAT_MRT4530_33981C.1.pep
QYQVVATFLEPPPAVDPIQQQPIQQTLPVQQVVQPIQQQVVHPVQQTPPRQQQPDGTVMPQVVPEHLARNIXPNLHNYXEGNLNYQYQPPSPQAQYQLGGLAQPQFASQYGQFEPMQQQAQGAAQQRPWADVIA

SEQ ID NO: 131967 - protein, 215 aa, Oryza sativa
  unsure (1)..(215): unsure at all Xaa locations
  Clone ID: PAT_MRT4530_33982C.1.pep
TFLEPPPAVDPIQQQPIQQTLPVQQVVQPIQQQVVHPVQQTPPRQQPMEPIQXTPLRQQIVQPIQHQGSISALPGFATLGGQPVQQFLNQVVPEHLVHHIQPDGTVMPQVVPEHLARNIXPNLHNYXEGNLNYQYQPPSPQAQYQLGGLAQPQFASQYGQFEPMQQQAQGAAQQRPWADVIADVIREQFGLKPKESGSLYRQPYLEWFERVPLPN

SEQ ID NO: 131968 - protein, 109 aa, Oryza sativa
  Clone ID: PAT_MRT4530_33983C.1.pep
MARGLKKHLMRLNAPKHWMLDKLGGAFAPKPSSGRVGVIKNREKHKGSFETIHVEDALGHAFATRLGNVFTIGKGNKPWVSLPKGKGIKLSIIEEQRKRDAAAQAAANA

SEQ ID NO: 131969 - protein, 265 aa, Oryza sativa
  Clone ID: PAT_MRT4530_33984C.1.pep
MARGLKKHLKRLNAPKHWMLDKLGGAFAPKPSSGPHKSRECLPLILIIRNRLKYALTYREVISILMQRHVLVDGKVRTDKTYPAGFMDVISIPKTGENYRLLYDTKGRFRLQSVKDEDAKFKLCKVRSVQFGQKGIPYLNTYDGRTIRYPDPLIKANDTIKIDLETNKIVDFIKFDVGNVVMVTGGRNTGRVGVIKNREKHKGSFETIHVEDALGHAFATRLGNVFTIGKGNKPWVSLPKGKGIKLSIIEEQRKRDAAAQAAANA

SEQ ID NO: 131970 - protein, 300 aa, Oryza sativa
  unsure (1)..(300): unsure at all Xaa locations
  Clone ID: PAT_MRT4530_33985C.1.pep
MTPSYYRKSCPNXLEAIVRGTMLSAIKAERRMGASILRLFFHDCFVQGCDASILLDDVPSKGFVGEKTAGPNTNSIRGYEVIDKIKANVEAACPGVVSCADILALAAREGVNLLGGPSWEVPLGRRDSTTASKSEADSDLPGPSSSLADLVAAFGKKGLAPRDMTALSGAHTIGYAQCQFFRGHIYNDTNVDPLFAAERRRRCPAASGSGDSNLAPLDDMTALAFDNAYYRDLVGRRGLLHSDQELFNGGSQDERVKKYSTDPDLFAGDFVAAMIKMGKICPLTGAAGQIRKNCRVVNSS

SEQ ID NO: 131971 - protein, 92 aa, Oryza sativa
  unsure (1)..(92): unsure at all Xaa locations
  Clone ID: PAT_MRT4530_33986C.1.pep
IEHAPLQAASAATAPPSSAPPLALLAPSPAVPXSPASARPPSGGRPLASPAPPPSXPSAVGPSPAPAPRXPPSPAPSPSPGANVGPSPTPSP

SEQ ID NO: 131972 - protein, 98 aa, Oryza sativa
  unsure (1)..(98): unsure at all Xaa locations
  Clone ID: PAT_MRT4530_33987C.1.pep
GVETDITSTLIATILTDYYRPESTYGLALHKQGACRTTXSTETGKVSKSQIDGLVAKVFSNVVVEENNAVQESTISSVSFKTIEGAFSTIPVDSRRQE

SEQ ID NO: 131973 - protein, 51 aa, Oryza sativa
  unsure (1)..(51): unsure at all Xaa locations
  Clone ID: PAT_MRT4530_33988C.1.pep
TRGTITTYVAETLKLQNPVSIXVIVDVSDRTMSLSTNRVYYSSIPSSYRIA

SEQ ID NO: 131974 - protein, 67 aa, Oryza sativa
  Clone ID: PAT_MRT4530_33989C.1.pep
FTPLTPPTTATNLAQLPIPTPAKTRISHQLAEYDPLLLDRFLDIHQDPHRDDPRQPHPPCSEIPARH

SEQ ID NO: 131975 - protein, 680 aa, Oryza sativa
  Clone ID: PAT_MRT4530_3398C.1.pep
MAILPGDCVVLDIDDAAAQSTPVPYALTFTDLSYTVGSRRAGLLPPLPTDAPPAKALLDGISGEARDGEVLAVMGASGSGKSTLLDALAGRIARGSLRGRVELNGEALHGRRVRAISAYVMQDDVLYPMLTVRETLMFAAEFRLPRALSPDKKRARVDALIGQLGLARAADTIVGDEAHRGVSGGERRRVSIGTDIVHDPILLFLDEPTSGLDSASAFMVVQVLRRIAQSGSVIVMTIHQPSARILNILDRLLLLSRGRTVYAGSPSGLKPFFSVFGYPIPDNENLVEFALDTIRELEHQPDGAAMLVKFSSRWQSSLGALLDTKDDKDRSQRCTMPLELAIAESVSRGKLVAGSGSGTLSSTSVPTYANPWYVEVWVLMKRAFTNTRRMPELFVMRLGTIMVTGFILATIFWRLDDTPKGVQERLGFFAMAMSTMFYVCADALPVFVQERHIYLRETAHNAYRRLSYVVANTAVAFPPLVVLSLAFAVTTFFAVRLSGGGASFAFFALTVLASFWAGSGFVTFLSAVVPHVMLGYTVVVAILAYFLLFSGFFINRDRIPSYWIWFHYLSLVKYPYQAVLQNEFRDAARCFSRGVEMFDGTPIGAMSKAVKLKVLDAIGATLGAPLTAETCVVTGADVLAQQAVTDIGRWKCLLVTVAFGFFFRFLFYIVLHFGSKNKRR

SEQ ID NO: 131976 - protein, 173 aa, Oryza sativa
  Clone ID: PAT_MRT4530_33990C.1.pep
SYKQAVDLNQYQLLHTKQNICISESPGRRRPTARAPSPPHGSRRGRRCTASRRKPGAETAAGEVRKRGAGPRSGSAPSPPRRGRGSRPRPRPRPRRHPAHRRRRRRSRGGASRRRGGAWGWRERERGRTRRSPRRWRWRRCCSSLARSGDRRRLTPRGSENAPAAPLSLSFEE

SEQ ID NO: 131977 - protein, 123 aa, Oryza sativa
  Clone ID: PAT_MRT4530_33991C.1.pep
SGAMPLSKKPGAETAAGEVRKRGAGPRMAPLRLLRGAERKSSSSSSRPRRHPLTASPGESVAPHGGWGGLGVAGAGARQDATLSAVAWRWRAAAHRSLAPATGGPHMSRLCRRRRRPPLSLFR

SEQ ID NO: 131978 - protein, 553 aa, Oryza sativa
  Clone ID: PAT_MRT4530_33992C.1.pep
MAARRAASSLLSRGLIARPSAASSTGDSAILGAGSARGFLPGSLHRFSAAPAAAATAAATEEPIQPPVDVKYTKLLINGNFVDAASGKTFATVDPRTGDVIARVAEGDAEDVNRAVAAARRAFDEGPWPRMTAYERCRVLLRFADLIEQHADEIAALETWDGGKTLEQTTGTEVPMVARYMRYYGGWADKIHGLVVPADGPHHVQVLHEPIGVAGQIIPWNFPLLMFAWKVGPALACGNAVVLKTAEQTPLSALFVASLLHEAGLPDGVLNVVSGFGPTAGAALSSHMGVDKLAFTGSTGTGKIVLELAARSNLKPVTLELGGKSPFIVMDDADVDQAVELAHRALFFNQGQCCCAGSRTFVHERVYDEFVEKARARALQRVVGDPFRTGVEQGPQIDGEQFKKILQYVKSGVDSGATLVAGGDRAGSRGFYIQPTVFADVEDEMKIAQEEIFGPVQSILKFSTVEEVVRRANATPYGLAAGVFTQRLDAANTLARALRVGTVWVNTYDVFDAAVPFGGYKMSGVGREKGVYSLRNYLQTKAVVTPIKDAAWL

SEQ ID NO: 131979 - protein, 40 aa, Oryza sativa
  unsure (1)..(40): unsure at all Xaa locations
  Clone ID: PAT_MRT4530_33993C.1.pep
NSSLIQFLFSLHPLNFNLVKKKKKKKKKKKKKRXKDKKDP

SEQ ID NO: 131980 - protein, 80 aa, Oryza sativa
  Clone ID: PAT_MRT4530_33994C.1.pep
YNARERKFFLSSVFFPRQFYGAHISCWLNVQAIPWYTSMSFLCPNKVCASCKSHHAKVKPLVSSIDIFTKNIDAAGSLLF

SEQ ID NO: 131981 - protein, 583 aa, Oryza sativa
  Clone ID: PAT_MRT4530_33995C.1.pep
MAARRAASSLLSRGLIARPSAASSTGDSAILGAGSARGFLPGSLHRFSAAPAAAATAAATEEPIQPPVDVKYTKLLINGNFVDAASGKTFATVDPRTGDVIARVAEGDAEDVNRAVAAARRAFDEGPWPRMTAYERCRVLLRFADLIEQHADEIAALETWDGGKTLEQTTGTEVPMVARYMRYYGGWADKIHGLVVPADGPHHVQVLHEPIGVAGQIIPWNFPLLMFAWKVGPALACGNAVVLKTAEQTPLSALFVASLLHEAGLPDGVLNVVSGFGPTAGAALSSHMGVDKLAFTGSTGTGKIVLELAARSNLKPVTLELGGKSPFIVMDDADVDQAVELAHRALFFNQGQCCCAGSRTFVHERVYDEFVEKARARALQRVVGDPFRTGVEQGPQIDGEQFKKILQYVKSGVDSGATLVAGGDRAGSRGFYIQPTVFADVEDEMKIAQEEIFGPVQSILKFRFATLEFPRIPSDRDRLSTGIYTNTLRAMCSTVEEVVRRANATPYGLAAGVFTQRLDAANTLARALRVGTVWVNTYDVFDAAVPFGGYKMSGVGREKGVYSLRNYLQTKAVVTPIKDAAWL

SEQ ID NO: 131982 - protein, 87 aa, Oryza sativa
  Clone ID: PAT_MRT4530_33996C.1.pep
NCRFHVTTWWHQGGEVQSPNKLPAPAPPLAARVTCSLRRTITRKSLRTLLMARCFAVIIFIAKAICFYAKGSRRSTIGFVLIVANED

SEQ ID NO: 131983 - protein, 119 aa, Oryza sativa
  unsure (1)..(119): unsure at all Xaa locations
  Clone ID: PAT_MRT4530_33997C.1.pep
RRRGRAAAAECRRRGEASGSTDIRRRQRGIASRLVVGSRIQVEIEQSSRSPRVASCSCDATEGEGEGEGRGSRSAHRHRPPQPCVAACRGDSXNPPVSSLAIPSASRAVSLSLSLFFFR

SEQ ID NO: 131984 - protein, 144 aa, Oryza sativa
  unsure (1)..(144): unsure at all Xaa locations
  Clone ID: PAT_MRT4530_33998C.1.pep
MGRRRGRVRDSGGASPPPXAAPLLPPRWCRSPSPPSRDRSGDGGVGDDRGWIQPRWWRPRTDPAAAAPSDSSRLPPATDLTAVVASSPSPVWRRGQERWWARERRRAWEPVTVEGYDADNGGDGXDDGRRRRPRGGWLWEMARV

SEQ ID NO: 131985 - protein, 145 aa, Oryza sativa
  Clone ID: PAT_MRT4530_33999C.1.pep
MGLLKCKGWLSRLVTKEVHSGRDVSFWKDVWCDNVPLKVKFPDLFEISHDQNATVKDTVVGREWSLEFRRNLDEQRVREVRELVELIGEAQLGTENDKVAYKALSFSQKWSVLLREEERVILGGWHEAGLGKLVQLKPQHLPSSI

SEQ ID NO: 131986 - protein, 1113 aa, Oryza sativa
  Clone ID: PAT_MRT4530_3399C.1.pep
MAIRPPGMEVTWAEFCRSFRKAQVPDGVVAQKKREFRALHQGNRTVTEYLHEFNRLARYAPEDVRTDAEKQEKFLAGLDDELTNQLISGGYTDFERLVDKAIRQEDQRNKMDRKRKVAQFWSNQGSHQRPRFTPGQQGGPTTMIVRQHRPFNASNFHQGASSSQNHHGGQPNRGAAPRPPMQPAQSAPSAQAKKETGAKPGSCFNCGELGHFADKCPKPKRAGPSFSPSVLIEIQRSPFLANLILLESKDLDVILGMDWLTKFKGVIDCANRTVTLTNEKGETVVYKSLVSPKQGVSLNQIEVEIPVVTEERNSRKLEEIPIVCEYPEVFPEDLTTKPPKREIEFRIDLAPGTAPIYKRPYRMAANELAEVKKQVDEQLQKRYIRPSTSPWGAPVIFVEKKDKTKRMCVDYRALNEVTIKNKYPLPRIDDLFDQLKGAKLRIREEDIPKTAFTTRYGLYECTVMSFGLTNAPVFFMNLMNKVFMEFLDKFVAVFIDDILIYSKSEEEHEQHLRLVLEKLKEHQLYAKFSKCDFWLSEVKFLGHVITAQGVAVDPANVESVTKWTPPKTVSQIRSFLGLQGYYRRFIENFSRIARPMTQLLKKDEKFKWIAECDKNFEELKKKLVSAPVLVLPNQMKDFQVYCDASRHGLEWNYPTHDLELAAVVHALKIWRHYLIGNRCEVYTDHKSLKYIFTQPDLNLRQRRWLELIKDYDMSIHYHPGKANVVADALSRKSYCNALCIEGMCEELQQELERLKVGIVEHGFVAALEARPTLVDQVRAAQVNDPEIAELKKNMRVGKARDFLEDEHGTIWMGERLCVPDDKELKDLILTEAHQTQYSIHPGSTKMYQDLKEKFWWDSMRREIAEFIALCDVCQRVKAEHQRPAGLLQPLQIPEWKWEEIGMDFIAGLPQTSSGHDSIWVVVDRLTKVAHFIPVHTTYTGKKLAELYLGRIMCLHGVPRKIISDRGSQFTSKFWQKLQKELGTRLNFSTAYHLRTDGQTERVNQILEDMLRACALDFGGAWDKSLPYAEFSYNNSYQVSLQMAPFEALYGRKCRTPLFWDQTGERQLFGTEVLTEAEEKVRTIRERLRIAQSRQKSYTDNRRRELTFEAGDYV

SEQ ID NO: 131987 - protein, 71 aa, Oryza sativa
  Clone ID: PAT_MRT4530_339C.1.pep
ASASGVTAYKMLTNTQGWLSPSGSSDPELRTTVDPPLIAIMNVHPLQLAVQEDTSTVAKFVSKTGTRVGIA

SEQ ID NO: 131988 - protein, 223 aa, Oryza sativa
  Clone ID: PAT_MRT4530_33C.1.pep
GVIQSKGGSVKGLNTPEGGSMRQSHSDGSLDTMARKPADPEEELRWMSQEVRGYVEAVLNSLAANVPKAIVLCQVEKAKEDMLNQLYSKISAQTNAKIEELLQEDHNAKRRREKYQKQSSLLSKLTRQLSIHDNRASVASYTNDSSGAESSPRTSGQSGEDWRSAFDSASNGSVDRSSSHNETRSRSADSRGKRYENGDVNGGNSGSRRTPNRLPPAPPGQKY

SEQ ID NO: 131989 - protein, 81 aa, Oryza sativa
  Clone ID: PAT_MRT4530_34000C.1.pep
MAHRAPVAAESGGGGRGPMYPASADPASAATPATFQRVNDPIALELLSKSGERFHYIMNKKNLAAVLRNCIDWQVDVMEKD

SEQ ID NO: 131990 - protein, 337 aa, Oryza sativa
  Clone ID: PAT_MRT4530_34001C.1.pep
MPSLGIAPLLDAYFRRRFAAAGLVQASVPLDGGATTVQCWRFPPGASEELPVLVLLHGFGPPATWQWRRQVGPLSRRFRLVVPDLLFFGGSGTAAADARSEAHQAEAVAKLVAAVVGAAAARVSVAGTSYGGFVAYHVARLLGPAAVARVVIASSDLLKADADDRALLRRGGAERVEDVMLPRTPERMRRLLGLAYHRPRRFSFTPAFVLRDLAQLTSTEALTLCECNCHLCQANNLPIKYLYTDKIEEKKELIKGITLGDKEKFQLTPLPQEVLVLWGEHDQIFPIEKAFEVARQLGANARLEIIKNTGHMPQEEDPKRFNEALLNFLLPAPNSSL

SEQ ID NO: 131991 - protein, 74 aa, Oryza sativa
  unsure (1)..(74): unsure at all Xaa locations
  Clone ID: PAT_MRT4530_34002C.1.pep
SRVRQRHFMYFGYKYDPRRCKKKDSSIILSAHRHXFFYFHCFGEFLLSSWAAXGSISDEKHISRHRLYIIDICR

SEQ ID NO: 131992 - protein, 53 aa, Oryza sativa
  Clone ID: PAT_MRT4530_34003C.1.pep
ATIGIIHSGFFDPHSFFLKIGVLMGETPSRDEGVCGFFIKLSCWYNLLRGNVF

SEQ ID NO: 131993 - protein, 41 aa, Oryza sativa
  Clone ID: PAT_MRT4530_34004C.1.pep
IPIIPSFIHEGGYFQCALHAHKTKNKCIEFYHKRLCICLLT

SEQ ID NO: 131994 - protein, 214 aa, Oryza sativa
  unsure (1)..(214): unsure at all Xaa locations
  Clone ID: PAT_MRT4530_34005C.1.pep
MAMTRGGGSRWTGSXGPGRSGAPRGAHVAPTRRTRGGHVAATWAAGLNGPDLPPGRSDGGGGSRPGAHEQGPSRPGGSGARRRSATRRXTQGGERPTAESGGDRRRAAARXTGEMLTGVRPTRGGDGERRRGMTGGRRGTADGLRNHLANKMRGVRGRKENGRGRGRRPKAAAMVVLTGARGGGEVDVTTRTTASATTLMARLGTVASGASGYA

SEQ ID NO: 131995 - protein, 81 aa, Oryza sativa
  Clone ID: PAT_MRT4530_34006C.1.pep
IRPRYRKGNQPAKKGGEKKRGEKKEKEDPCEKWETKKKGKKKRNRKEKGKKRGRQKREQKKKKGGEQRDRFKARKPGGPQA

SEQ ID NO: 131996 - protein, 288 aa, Oryza sativa
  unsure (1)..(288): unsure at all Xaa locations
  Clone ID: PAT_MRT4530_34007C.1.pep
MTSPPAAAARRLGRRTLTGERRRFGTNGGHQRVEGDAANSPVTKTTAEEQRTAPATRKKRRRRSGRRRRRCSGDLRRRRRGGRGRRRLGDHDGGLPERRRRPERRRRTAGAAATTAARGLTALERFRRREAKAREAAGRGELGDPYIGVGRWRRRPTATGDEKERSGSEREXADPIRPRIKHFPSRFSRCFQRGKGGGDPGDRFPSINSAGEGKDRPNLEGDGGGLXLGFRAAAAXARRKTGLTNGPHLSAAERERRAAARRIGPDWAEGKREXGFGPAFGPKPKEDF

SEQ ID NO: 131997 - protein, 135 aa, Oryza sativa
  Clone ID: PAT_MRT4530_34008C.1.pep
MALDYCHLLSNSKHGQEKQEGSLAWALIDCALKARKEQLSWINEVLLCPEGDKEDRWRHVGDLRVLSTVRVMRRATYSTVPPSTSPHHAASNSGRPDLVGRRHLQVVAASIPLLVTASLSLFIVTDEAPLHRRIY

SEQ ID NO: 131998 - protein, 130 aa, Oryza sativa
  Clone ID: PAT_MRT4530_34009C.1.pep
VLQNQWQQQPAASHGKKPASRSAASPPVVLAAPPPAVLWYVASSRASNPLVRHDGCALAAGRPPPTRSAKCAAGALCLGLYSGLDAMIMSVSMGDAFPALGSYPQKSCCPARPRSISFLPLPEGKALGGE

SEQ ID NO: 131999 - protein, 213 aa, Oryza sativa
  unsure (1)..(213): unsure at all Xaa locations
  Clone ID: PAT_MRT4530_3400C.1.pep
FFFFFFLGTNSLALFQCGRIILXSVPLHCXLTTFIITHHSPCXSILWSQPQTAYSIRAYHQVXQNPPMPASMPQHXPGGYSRAVYPGSHPVPHHRVCPGPGHSGIIPHVGHSIRHYCEANKARSKXFTPQVAFSQSIYQKPWPNVCAALSNKTRMHPAPTPXFTHNIWQSHHMHVHKLCTSQLVGHAPRGQYPPAPSGTPLXKGVYPKTXIPP

SEQ ID NO: 132000 - protein, 136 aa, Oryza sativa
  unsure (1)..(136): unsure at all Xaa locations
  Clone ID: PAT_MRT4530_34010C.1.pep
MHVLTTEIPWEDLHIGERIGLGSYGELYHADRNGTELALNKILDHHLSXDQLNQSKSEAXIMSRLRHPNVVLLLEYVTQPPNLXISTEYLPRGSLYRPLDMPNSQIDEXRMLEMALHVAKGMNYLHARHPTIXHRD

SEQ ID NO: 132001 - protein, 114 aa, Oryza sativa
  Clone ID: PAT_MRT4530_34011C.1.pep
FLWGVGGFFFVGGTTFFSSVVRVVVVTYFLFVCLLFGPRWFYIFFLRVVCCVVFWADIFFTRVAVILIFTLVFYTPFFREWWFAGGGGPLLGCGPRGPPGCQKRCQKIFKKIPF

SEQ ID NO: 132002 - protein, 104 aa, Oryza sativa
  Clone ID: PAT_MRT4530_34012C.1.pep
HLLTCSRGPSSEDCRATGTDKGGACPLNIQSVKWLLMTVICSKRIPHDQLLWRRKIPSWQIQSAMLDPALQLLIKQSKVNPVKVKKSTGRHLQCCFQRLNQMIF

SEQ ID NO: 132003 - protein, 122 aa, Oryza sativa
  unsure (1)..(122): unsure at all Xaa locations
  Clone ID: PAT_MRT4530_34013C.1.pep
RXIEXFEKYXLGXFQSKXIXXDXXLIQPXIHXPWGKSWQEXGRYFLKLGKECXPGIRGFTAMNILLPGVLFGIXGTFSXXXTIXCXXTARXGLXSXXXPKRVVXTFXXTXXTXXPREEXRXF

SEQ ID NO: 132004 - protein, 375 aa, Oryza sativa
  Clone ID: PAT_MRT4530_34014C.1.pep
IRVRSVAMDMASIECVSYSDSMDDDDDDGVGVGGVSHLPRPILVKPSSAAAAVNVVVVSAGSGGGAGGGGGGVGVVAGAPAVPPATSVHELLECPVCTNSMYPPIHQLGHWEPEELPSMLSVILLECQNGHTLCSTCKTRVHNRCPTCRQELGDIRCLALEKVAESLELPCKYYSLGCPEIFPYYSKLKHESQCNFRPYNCPYAGSECSVVGDIPFLVAHLRDDHKVDMHSGCTFNHRYVKSNPREVENATWMLTVFHCFGQYFCLHFEAFQLGVAPVYMAFLRFMGDENDARNYSYSLEVGANGRKMIWEGTPRSIRDSHRKVRDSHDGLIIQRNMALFFSGGERKELKLRVTGRIWKEQQNPDSGACIPNLFS

SEQ ID NO: 132005 - protein, 350 aa, Oryza sativa
  Clone ID: PAT_MRT4530_34015C.1.pep
MAAPEGQNKFAGVRFLPKDLELLAILDAKLRGSPLGPVEAIFHDTQILDFHPYKLYEMYAEDEEEEGYIYFFSTMQFRCRKIVERAAQGGRWKVNNCETLEVGGVAVGRKFTMNFYEHIGGDNDLIWTNWGMQEFARIIGPNKELADLALYRLYKKKITRGTGEEKPEDIAAASDGDTESSMNKRRRVEASAAAMALPPPPPSPGLPGTMMFMAADQANVASTSQEWHGQFANGAAAAPSPSGCWPWAPPPTPSAVEPFSFWASASAATPPAAANYHPSPQPQPLPPQGGEYYSRHGAFSVAPVPASACSTPSPEAATSCLLATTSPLPAAGTEGSDSQQQEPPCELMEF

SEQ ID NO: 132006 - protein, 82 aa, Oryza sativa
  Clone ID: PAT_MRT4530_34016C.1.pep
LWAFVPKGKVPFFWGKTPDGLVAFPNGIDLFKGSCGKSLAPFPKGCFYSKAFGGLKCFKTPKNKVLAVPPNKKKIFGAPSKV

SEQ ID NO: 132007 - protein, 91 aa, Oryza sativa
  unsure (1)..(91): unsure at all Xaa locations
  Clone ID: PAT_MRT4530_34017C.1.pep
MTFANGSDPSMVINMNMLTXTKASSNMFNTKIRVVKYPENALVDDEALVLPPLMLTFSVPPPPVPXFPPFPVVPSFPPVPVSPVLVEDITM

SEQ ID NO: 132008 - protein, 221 aa, Oryza sativa
  Clone ID: PAT_MRT4530_34018C.1.pep
MATPMRSSASMRQQQQQQQESRFKRTCVFCGSSQGNKTTYRDAAVDLAKELVARGIDLVYGGGSIGLMGLVSQAVYDGGRHVIGVIPKTLMTPEIIGETVGEVRPVSDMHQRKAEMARQSDAFIALPGGYGTLEELLEVITWAQLGIHHKPVGLLNVDGYYNSLLTFIDQAVEEGFISPSARRIIVSAPTAQELMDKLEEYVPYHDRVASGLNWETGHLGF

SEQ ID NO: 132009 - protein, 23 aa, Oryza sativa
  Clone ID: PAT_MRT4530_34019C.1.pep
EVEKSLLYIIEIVFLLLLLLRKL

SEQ ID NO: 132010 - protein, 1649 aa, Oryza sativa
  Clone ID: PAT_MRT4530_3401C.1.pep
MAGHPPNHRGEGMIDFVAELARMTLVVGYPNAPEYTTIPPLSGELPHRVRLEVHGYVGTCLANMAVEASGGTADHACQEAAYLMMARLRERHNYIFHDTAYRYHPRRANGDGVSSFRPTAGENDTTFGHMCAVMRGLDRMHSDLHKATKALNDGKLMRIVALKDEIARLKKENAQLKGLPAPGGVRIRTTPRKTTTAPVRIQLAPRKPPPPAAPAAPPVPPAVPAAPVPAPAFTLSFAPASAARGPASGTGGCLFGMVYTRNGSRATGEGSNGEERADGVHPNSDSGNGPPPLPENPTLAQVMAHQTQMMAAMMQQMQQQHQQMHQRMMQHAEQQHQQFGPPPPQSKLPEFLRVRPPTFSSTTNPMEANDWLHAIEKKLNLLQCNDQEKVAFATHQLQGPASAWWDNHMATRPPGTEVTWAEFCRSFRKAQVPDGVVAQKKREFRALHQGNRTVTEYLHEFNRLARYAPEDVRTDAEKQEKFMAGLDDELTNQLISGDYADFERLVDKAIRQEDQRNKMDRKRKAAQFRAPQGSHQRPRFTPGQQGGPTTMIIRQHRPFNPSNFHQGTSGSQNHHGGQPNRGAAPRPSVAPAQSGQPAQAKKETGAKPGSCFNCGELGHFADKCPKPRRAGPRFIQARVNHASAEEAQAAPEVVLGTFPVNSIPATVLFDSGATHSFISKKFVGRSPFLANLILLESKDLDVILGMDWLTKFKGVIDCASRTVTLTNEKGETVVYKSLVSPKKGVSLNQIETEIPVDTVEKNLRKLEDIPIVCEYPEVFPEDLTTMPPKREIEFRIDLAPGTAPIYKRPYRMAANELAEVKKQVDEQLQKGYIRPSTSPWGAPVIFVEKKDKTKRMCVDYRALNEVTIKNKYPLPRIDDLFDQLKGAKVFSKIDLRSGYHQLRIREEDIPKTAFTTRYGLYECTVMSFGLTNAPAFFMNLMNKVFMEFLDKFVVVFIDDILIYSKSEEEHEQHLRLVLEKLKEHQLYAKFSKCDFWLTEVKFLGHVITAQGVAVDPSNVESVTKWTPPKTVSQIRSFLGLAGYYRRFIENFSRIARPMTQLLKKDEKFKWTAECDKSFEELKKKLVSAPVLILPDPTKDFQVYCDASRHGLGCVLMQEGRVVAYASRQLRPHEGNYPTHDLELAAVVHALKIWRHYLIGNRCEVYTDHKSLKYIFTQPDLNLRQRRWLELIKDYDMSIHYHPGKANVVADALSRKSYCTALCIEGMCEELRQEFEHLNMGIVEHGFVAALEARPTLVDQVRAAQVNDSEIAELKKNMRVGKARDFHEDEHGTIWMGERLCVPDDKESKDLILTEAHQTQYSIHPGSTKMYQDLKEKFWWVSMRREIAEFVALCDVCQRVKAEHQRPAGLLQPLQIPEWKWEEIGMDFITGLPRTSSGHDSIWVVVDRLTKLVDKSLPYAEFSYNNSYQASLQMAPFEALYGRKCRTPLFWDQTGERQLFGTEVLAEAEEKVRIIRERLRIAQSRQKSYADNRRRELTFEAGDYVYLRVTPLRGVHRFQTKGKLAPRFVGPYKILERRGEVAYQLELPSNMIGIHDVFHVSQLKKCLRVPEEQADSEHIDIQEDLTYVEKPVRILDTSERRTRNKVTRFCRVQWSHHSEEEATWEREDELKAAHPHLFTSSSESRGRDSV

SEQ ID NO: 132011 - protein, 77 aa, Oryza sativa
  Clone ID: PAT_MRT4530_34020C.1.pep
MAVMSSSQARRRLGAGVASVVELAGGGCLHRPPTPLLAVLFWLNTMPMADRRLRERALERDPFSVRVMKIVRTLHTA

SEQ ID NO: 132012 - protein, 796 aa, Oryza sativa
  Clone ID: PAT_MRT4530_34021C.1.pep
MAGTSSSSNTSTGRLLTTIIPKLYTLISGQYNLEETIRQDIRSIKNELDMMLSAIQDYSSLLMTTRSGDGRHHHQLGAGAVQATWIEKVRTLAHQMEDCIDSYIYDQMAPHGSRRQGPARFASEVRELRSRSAELSQLNQHTLSSAAPLSTSPDELVGMEARRGELLELVNGEGQPEQQRKVISIVSFGGLGKTVLANQVYCDTDELNFSPRAWVSAAEKTAGEVLMEILQRFEVRVRDMPYFDQLSKRLREHLRNKSASYCEMFSARVNRYLIVIDDIRVEQWCNMEPAFPADHGISSRIVVTTSIQSIANACSIPKGYIYKMEKLDAECSKNLFFRSASIEECSPDIERDGRSNVWHGNQGLSFFGTEGVGYYLENDNNALARMQGLLARSYACLPCHDAKACLLYLGMFPSNYPIRRRRLLMRWLAEGLVRKRPHPRLGDAAVNNFRTFMDRNIVHPVGVSTNDEVKTCQLPGMMLEFILHRSISEGFITLVSDENVMPRYAPRRLAVQLSTAAVKDRLGPRSDLSFVRSLMVSGIASQCVLDFSRYKLLKVLDLEQCDGLTDQHLEGVSNLLLLKYLSLGGEVTMLPKKIGTLSFLETLDVRRAKVDVMVFPVEAIVLPKLIHLFGKFKLFGKIEDGDDLNDARSLSVHFNECSEDIMNFSLQGACNLSTLKLQGDLHQIPPFVPSLVALTELSLTSTTLRQELLTSLTELRCLVYLKLVAQNLEGFVIKVGAFQSLQRLCMVVQNPSFLEIQDGALPQLVSLQLMYENLANLPLINIGGIKRLREVVLDSA

SEQ ID NO: 132013 - protein, 61 aa, Oryza sativa
  Clone ID: PAT_MRT4530_34022C.1.pep
TMDRQHLSSFLLAAASATSSLPSHGSDTVPCCSVRELALFSSVLVQNLDIRASSLACWIQK

SEQ ID NO: 132014 - protein, 217 aa, Oryza sativa
  Clone ID: PAT_MRT4530_34023C.1.pep
MDRLQQQRRRHEALTGRRRGGGGGMSRRHGRFRFATGGGDGDGDEECAGVAVVDQADCTAQSCRSCVAVSLADCIALGCCPCAVVSLLGLAFVKLPLAVARRCARRLRRRQGRLRQKKRVRDLDAAKNAAGGGHQEPLPGGAAAASKGEDGDVVVVAAAAAASPGSDDAENVWLELYQVGRWGFGRLSVSAANPPVRPSYVVATARNADCAADGDVS

SEQ ID NO: 132015 - protein, 621 aa, Oryza sativa
  unsure (1)..(621): unsure at all Xaa locations
  Clone ID: PAT_MRT4530_34024C.1.pep
MSADSAAAGRDALLDELRALMAAHSPSLHAPVGPSEDAHQSEYVSERDERRQLVSGFTGSGRLALITMKEALLWTDGHYFLQAEQQLSDRWILMCMGEDPAIEVXIAVHLADEAVIGIKPWCNSVETAHRYENAFSKKNWTLYLFSYDLVDELWKDRPTVIALHVFVQHLEYAGCSVTEKLKELREKLQHEKARGIIIAALDEVAWLYNIRGNDVHYSPVVHSYSIVTLHSAFFYVDKRKVSVEVQNYMTENGIDIKDYNMVQSDASLLASGQLKGSAVNGSSHGENDMNENSKVWIDSNSCCLALYSKLDQYQVLMLQSPIALPKAVKNPVELDGLRKAHIRDGAAVVQYLAWLDKQMQENYGASGYFTEAKGSQKKEHMNVKLTEVSVSDKLEGFRASKENTLWMTLYVLLLSRKHMYLDGTTDITRTVHFGKPSEHEKSCYTAVLKGHIALDTAVFPNGTTGHAIDILARTPLWRSGLDYRHGTGHGIGSYLNVHEGPHLISFRPSARNVPLQASMTVTDEPGYYEDGSFGIRLENVLIVKEANTKYNFGDKGYLAFEHITWAPYQTKLIDTTLLTPAEIEWVNAYHADCRKILQPYLNEQEKEWLRKATEPIAVSCC

SEQ ID NO: 132016 - protein, 360 aa, Oryza sativa
  Clone ID: PAT_MRT4530_34025C.1.pep
MNENSKVWIDSNSCCLALYSKLDQDQVLMLQSPIALPKAVKNPVELDGLRKAHIRDGAAVVQYLAWLDKQMQENYGASGYFTEAKGSQKKEHMNVKLTEVSVSDKLEGFRASKEHFKGLSFPTISSVGPNAAVIHYKPEASSCAELDADKIYLCDSGAQYLDGTTDITRTVHFGKPSEHEKSCYTAVLKGHIALDTAVFPNGTTGHAIDILARTPLWKSGLDYRHGTGHGIGSYLNVHEGPHLISFRPSARNVPLQASMTVTDEPGYYEDGSFGIRLENVLIVKEANTKFNFGDKGYLAFEHITWTPYQTKLIDTTLLTPAEIEWVNAYHSDCRKILQPYLNEQEKEWLRKATEPIAASC

SEQ ID NO: 132017 - protein, 68 aa, Oryza sativa
  Clone ID: PAT_MRT4530_34026C.1.pep
SGSECRGIAIPRMTISKSATTLEGGGWPCCHPPYRARRPLMLEAHHYPSCPWASSRLHLVGDLAYLQS

SEQ ID NO: 132018 - protein, 51 aa, Oryza sativa
  Clone ID: PAT_MRT4530_34027C.1.pep
GYRFFFFYPKLLVKETFQGFHGKKKISPKGQGNKILNHEMVVREPGLSFFS

SEQ ID NO: 132019 - protein, 96 aa, Oryza sativa
  Clone ID: PAT_MRT4530_34028C.1.pep
MAARGGRRRRPWWWSSSCRCSPLLQLALIISSCLLLWPHQGVALAPSRAAATDTLAVGRPLSGGRRLVSKGGRFAVGFFQPDENATMALEEGSGKV

SEQ ID NO: 132020 - protein, 87 aa, Oryza sativa
  Clone ID: PAT_MRT4530_34029C.1.pep
MGSVSGIDDFVFPPGQAFRFGSLDFITNDFGKISPLDSDPNQSGKNQVSAPFGIPNKAEIYSKLISTESASNHTNEIPSTPTPLDQD

SEQ ID NO: 132021 - protein, 1764 aa, Oryza sativa
  unsure (1)..(1764): unsure at all Xaa locations
  Clone ID: PAT_MRT4530_3402C.1.pep
MADHPPNHRGEGMDDFVAELARMTLVVGYPNAPEYSTVPPLNGELPHRVRLEVHGYVGTCLANMVVEASGGTADHACXEAAYLMMARLRERHNYIFCNTAYHFHPRRASGDDVNTFRPTAGENDTTFGHMCAVMRGMDRMHSDLHKASKALNDRKLVRIIALKDEIARLKKENAXLKGLSALGGVRIRTTPRKSTTAPVRIQLAPRNPPPPAAPPAAPPAVPVAPVSAPASALSFAPASAARGLASGSHDRSSSMVNTRNGSRAAGEDSNSEERTDGGHPNSASGNGPPLLPENPTLAQVMTHQTQMMAAMMQQQHQQMHQRMQQQTEQQQQXQFGPPLPQFKLPEFLRVRLPTFSSTTNPMEANDXLHAIEKKLNLLQCNDQEKVAFATHQLQGPTSAWWDNHMATRSLGTEVTWAEFCRSFRKAQVPDGVVVQKKREFRALHQGNRTVTEYLYEFNRLARYAPEDVRTDAEKQEKFLAGLDDELTNQLISGDYADFEKLVDKAIHQEDQRNKMDRKRKAAQFRSNQGSHQRPRFFPGQQGGPTTMIVRQHRPFNSSSFHQGANGSQNHQGGQPNRSAAPRPPMAPAXSAPSAQAKKETGTKPGSCFNCGEHGHFADKCPKPRRAGPRFVQARVNNATVLFDSAPEVVLGTFPVNSIPATVLFDSGATHSFISKKFVGIHGLIREELSTPMRVHTPGNSSTSVQFSPSIRIEIQRSPFLANLILLESKDLDVILGMDWLTKFKGVIDCANRTVTLTSEKGETLVYKSPVSPKQGASLNQIEVEIPAVTEEKSSRKLEDIPIVCEYPEVFPEDLTTMPPKREIEFRIDLTPRTAPIXKRPYRMAANELAEVKKQVDEQLQKGYIRPSTSPWGAPVIFVEEKDKTKRMCVDYRALNEVTIKNKYLLPRIDDLFDQLKGAKVFSKIDLRSGYHQLRIQEENIPKTAFTTRYGLYECTVMSFGLTNAPAFFMNLMNKVFMEFLDKFVVVFIDDILIYSKSEEEHEKLKEHQLYAKFSKCDFXLSEVKFLGHVITAQGVAVNPLNVESVTKWTPPKTVSQIRSFLGLAGYYCRFIENFSRIARPMTQLLKKDEKFKWTAECDKSFEELKERLVSAPVLILPDQTKDFQVYCNTSRHGPGCVLMQEGRVVVYASWQLCPHEGNYPTHDLELAAVVHDLKIWRRYLIGNRCEVYTDHKSLKYIFTQPDLNLRQRRWLELIKDYDMSIHYHPGKANVVADALSRTSYCNALCTEGMCKELQQELEHFNLELVEHGYVAALEARPTLVDQVRAAQVNDPEIAELKKNTRVGKARDFLEDEHGTIWMGERLCVPDDKELKDLILTEAHQTQYSIHPGSTKMYQDLKEKFXXASMRREIAEFVALCDVCQLVKAEHQRLVGLLQPLQIPEWKWEEIGMDFITGLPRTSSGHNSIWVVVDRLTKVAHFIPVHTTYTGKRLAELYLSRIMCLHGVPKKIXSDRGSQFTSNFWQKLQEELGTRLNFSTTYHPQTDGQTERVNQILEDMLKACALDFGGAWDKNLPYVEFSYNNSYQASLQMAPFEALYGRKCRTPLFWDQTGERQLFGTEVLTEAEEKVRTVRERLRIAQSRXKSYTENRRRELTFEAGDYVYLRVTPLRGVHRFQSKGKLAPRFVGPYKILERRGEVAYQLELPSNMIGIHDVFHVSQLKKCLRVPEEQADSEHIDIQEDLTYVEKPVRILETSERRTRNKVTRFCRVQWSHHSEEETTWEREDELKAAHPHLFASSSESRGRDSV

SEQ ID NO: 132022 - protein, 107 aa, Oryza sativa
  unsure (1)..(107): unsure at all Xaa locations
  Clone ID: PAT_MRT4530_34030C.1.pep
KCTPSSPXLPAGTDLARAREALRPFPFLSRWSAHGAQSDSASPPRSYISPAGAPAGMHRCCYRMARAVSTKDSAAILETARKDLPLVLATFWTPCLKYTTYDRNRIA

SEQ ID NO: 132023 - protein, 294 aa, Oryza sativa
  unsure (1)..(294): unsure at all Xaa locations
  Clone ID: PAT_MRT4530_34031C.1.pep
ASPTWQWLGVAVRGGPGPQIGXGGSAPRIADVAPTQRPRGSHAGGHTDGPXGRSEGGGXHAAGAHGRLKPARWPWRTAALPRGGGGERRRATANGXGERRRTASDGDAAPSGKGGDAKRERGKMTGRXLTEGSAGMEGRRRTAASDGERQLRTTDGPRNHQANKMRGVRGIQENGRGXEDASRRRRPWRCXTGARRGSARRLVAASGNRSGGGGGGEEGDGARAVEGTGELGEMEKKREGRAVMRGRGREREGVGAGNVGEGGDVGDVAREVRERAGRRLRDAAAPARGRGRAR

SEQ ID NO: 132024 - protein, 86 aa, Oryza sativa
  Clone ID: PAT_MRT4530_34032C.1.pep
RTPHASGASASVRGRARRGGDLPPLPPGPGEPEPEPPPPPPPPLPPRPARPFQPTTRLFAAATRRPSGATSRPLGAMRPLAAPSWW

SEQ ID NO: 132025 - protein, 46 aa, Oryza sativa
  Clone ID: PAT_MRT4530_34033C.1.pep
PCGRWVATIELKQRSLYEEASEASAWKLLDELSLSDERWEEVNAFI

SEQ ID NO: 132026 - protein, 182 aa, Oryza sativa
  unsure (1)..(182): unsure at all Xaa locations
  Clone ID: PAT_MRT4530_34034C.1.pep
PKREPIIPRLPSSAPHRGACCHPLLHTAKKVTTLGVFDSYSVMNNWHIRLLVLIFGDYWQSXFAGDEQILLDCRVRSNWAGATGQTGQPTIIEVIKLXSTLRVLRFVFAQAQRSNWQDRXASDWLDRQVNGGQTGGGYRRWRLIXSGQTAGVTTTVRPMVSRRLDQRIYPSQTTCHRFEGNF

SEQ ID NO: 132027 - protein, 147 aa, Oryza sativa
  unsure (1)..(147): unsure at all Xaa locations
  Clone ID: PAT_MRT4530_34035C.1.pep
DSLYQYPVVLEGYSDSNWISNGHEINATSGYXVVVHAVLLRSCKQTTLTRLAMEAGWQHDLMMDPLVVKKLVLTILINYDNHTIIDKVKRFKDNMKLSRYMKRXLKSVRTLRNSKVIMFDKIQILENXDPFKKGLSRNVTIHQRIWV

SEQ ID NO: 132028 - protein, 151 aa, Oryza sativa
  Clone ID: PAT_MRT4530_34036C.1.pep
MAGEVGERGGAGRRYGAGPTGGAHLSVTRKERARAVGLLGLGLGPAQLRRTGERGREQDVTVHTLEGEGRGALAPRSAIWSKVAPPPSGVVVAPNPEAHTGGSPSQPLPCKLSVVFLAQRASPVAQRDGSGDLSFLSFDWFLTKLIDECSM

SEQ ID NO: 132029 - protein, 91 aa, Oryza sativa
  Clone ID: PAT_MRT4530_34037C.1.pep
LGSLDGGRRGVQRHDELLRARACHSFPTRARTIQIETSRRGRRRGLGFFRLAPNHRETTSGIHFGKAEAKAKGRRGVSGKFPLLPLIGRKA

SEQ ID NO: 132030 - protein, 82 aa, Oryza sativa
  Clone ID: PAT_MRT4530_34038C.1.pep
YNMIIQHAHTCALAYRGHYLIFWLGDMDIHHLISSTSIIKQETSSPSRFLDEGMLMAPLQGRKASKRSITHTGHQLQSEQHG

SEQ ID NO: 132031 - protein, 156 aa, Oryza sativa
  Clone ID: PAT_MRT4530_34039C.1.pep
ARPRAVHRRPGLPRPWPWPPPPRRPPPLPRPPPPLLRGPSAPRPPATRVPRPSAARAHACPPCGVARVDAFRPRRAAVGFPSSPAPEPRAVPRPTREVPPRGYIHDRPVLSIASTNRLVFHRQPGQPRRYIWSSPSPLFLSLFVSSRFLLGVLFDS

SEQ ID NO: 132032 - protein, 67 aa, Oryza sativa
  Clone ID: PAT_MRT4530_3403C.1.pep
MARGRHGDDTADGELFEVPLPYLVLNMPEEEFGFAGDDGRITLPSYAWVMEHVMCLLRRDVSEEVES

SEQ ID NO: 132033 - protein, 139 aa, Oryza sativa
  unsure (1)..(139): unsure at all Xaa locations
  Clone ID: PAT_MRT4530_34040C.1.pep
LHGWPVMPPLLGIYDFTAGLRLXAADWCLCLHGWCTPPPLLXGIHVFTDRLAFAAADWCFRRCWASTSSPTGLPSPPPTGVSACTAGLXYAAVVGRLQLHXPAASSAADWCFRWCFRLHGWPMLSSSRLATLPPRLIGV

SEQ ID NO: 132034 - protein, 133 aa, Oryza sativa
  unsure (1)..(133): unsure at all Xaa locations
  Clone ID: PAT_MRT4530_34041C.1.pep
KLITFISYKQKVRVPKIQILRKCKSRRHYCKAISSSITCLPWGEEKAAPRSCTVGGREEAPAPGNKGXGARRSGETXTCRSDVRRRRRRLLRRQEAAATSAARGGGGAGGCGERRRRRRRATGRGEAAPAPHT

SEQ ID NO: 132035 - protein, 341 aa, Oryza sativa
  Clone ID: PAT_MRT4530_34042C.1.pep
MAKNACKLCYRRFASPRALAGHMRSHSVAAANAAAAAAAAAAAKLQISSASSASTSFTAADEEEEEEEEEEDVGFKKPLSIYALRENPKRSLRVSEYAFSDRESEAESTPTPAAKGLRAGGGGGGGDGEPMSSLSYAGTPEEEVALALMMLSRDTWPSVERGGGGGEYSDDGSDDGYALPPPSPAPAPAPVPEKRTRFQCPACKKVFRSYQALGGHRASHVRGGRGGCCAPPVAPPPQPHPQPPLPEHDAGEEDMDGKAPPHECPYCYRVFASGQALGGHKKSHVCSAAAAAAHAQTPGGGAPPPQPKILGMIDLNFAPPVDEVELSAVSDPHFPSNPPGP

SEQ ID NO: 132036 - protein, 391 aa, Oryza sativa
  Clone ID: PAT_MRT4530_34043C.1.pep
MDAAMEDAAAQSEREWDGGGGGGGADAVLGLAGAGASLSLCYHEAFGPHDELILLEAADDLLPDLLQGRVTVRGRPEEEAVLCTPSATYAMKFVGNSNSVFLIPPGESAAPTLRPNGADGDDNVASATDAVASIIKVASGNIELVRTAPRLDKLRKLLNERPYVLDEDLGSDLQQKGLYTWQDLCELVQASDGELTEQLSSISAVEIDGFWRMVDDSSANTILDMILHNSDVMESDGFMRKIVTHCLNRFGTKVDKEARGCWSLDERRVCLQFARRALGAGKMKLENFMGKWERSIPSGMRADLQMLEGEVLCEKLGAETWVHAFSVADLPLAPADRFAALFQERPKWEWKDLQPYIRDLRVPGVSSEGLLIKYTRKTQPSADAEPIFTAR

SEQ ID NO: 132037 - protein, 143 aa, Oryza sativa
  unsure (1)..(143): unsure at all Xaa locations
  Clone ID: PAT_MRT4530_34044C.1.pep
RPWARRGPQVTILSHHXVGGFLTHCGWNSLLEAIARGVPVATWPHFADQFLNERLAVDVLGVGVPIGVTAPVSMLNEEYLTVDRGDVARVVSVLMDGGGEEAEERRRKAKEYGEQARRAMAKGGSSYENVMRLIARFTQTGVE

SEQ ID NO: 132038 - protein, 115 aa, Oryza sativa
  Clone ID: PAT_MRT4530_34045C.1.pep
MTVVRCTTRQRLLEGERIQCDIRGKKILGSKGPFDSQNRKNTGIEIEVGLLDACVIVYTVEKPENERRIKKHGRLRGLSRLCDRLGPKLVWDPSPTKVVTPYVQFPRGHTLFHRG

SEQ ID NO: 132039 - protein, 55 aa, Oryza sativa
  Clone ID: PAT_MRT4530_34046C.1.pep
TRDGWNGSPKDPINRKWEFSLQVGDNRTRSSTNELPTDSQFYLGQSLNWGWAMYP

SEQ ID NO: 132040 - protein, 673 aa, Oryza sativa
  Clone ID: PAT_MRT4530_34047C.1.pep
MAPWSGFWAASRPALAAAAAGGTPVVVKMDNPNWSISEIDADGGEFLAGGRRRGRGKNAKQITWGLLLKAHRANEAAARRRVAAGRTDDADAETPAPRSRLYAFIRASLLLSVFLLAVELAAHANGRGRVLAASVDSFHSSWVRFRAAYVAPPLQLLADACVVLFLVQSADRLVQCLGCLYIHLNRIKPKPISSPAAAAAALPDLEDPDAGDYYPMVLVQIPMCNEKEVYQQSIAAVCNLDWPRSNILVQVLDDSDDPITQSLIKEEVEKWRQNGARIVYRHRVLREGYKAGNLKSAMSCSYVKDYEYVAIFDADFQPYPDFLKRTVPHFKDNEELGLVQARWSFVNKDENLLTRLQNINLCFHFEVEQQVNGIFINFFGFNGTAGVWRIKALEDSGGWMERTTVEDMDIAVRAHLNGWKFVFLNDVECQCELPESYEAYRKQQHRWHSGPMQLFRLCLPDIIRCKIAFWKKANLIFLFFLLRKLILPFYSFTLFCIILPMTMFIPEAELPDWVVCYIPALMSFLNILPAPKSFPFIIPYLLFENTMSVTKFNAMISGLFQLGSAYEWVVTKKSGRSSEGDLIALAPKELKQQKILDLTAIKEQSMLKQSSPRNEAKKKYNRIYKKELALSLLLLTAAARSLLSKQGIHFYFLMFQGLSFLLVGLDLIGEDVK

SEQ ID NO: 132041 - protein, 89 aa, Oryza sativa
  unsure (1)..(89): unsure at all Xaa locations
  Clone ID: PAT_MRT4530_34048C.1.pep
RTRWFAAHXFIFDIAQVQTMKESGWKKRYLFSSFLQNSMLQPIGSIAKLSSPCCHVGDILNDTGRCSTWASSHSEDLLILMFSFMFRYQ

SEQ ID NO: 132042 - protein, 123 aa, Oryza sativa
  Clone ID: PAT_MRT4530_34049C.1.pep
RGGQWPAGVTALHAPPVAAEGGEVEGGGGRPSASSPRRPPPSPPPRPSSSSSSSSSTWGRRSLSLTPLSRAVGRSTRGSTWPWPPPLPPPRPTSPSSSSVTSAPAARLALPTAPAEARGLRRR

SEQ ID NO: 132043 - protein, 73 aa, Oryza sativa
  Clone ID: PAT_MRT4530_3404C.1.pep
HLALASRDNRHRPRQPGLHLGHTLFRCILLIKQVQSKVMLVKRIPRSLIFFYTGVSGFMSSNWLLWLINVVLF

SEQ ID NO: 132044 - protein, 113 aa, Oryza sativa
  unsure (1)..(113): unsure at all Xaa locations
  Clone ID: PAT_MRT4530_34050C.1.pep
TAGPVHNFGDPKKSDTPKFGRFYRGMLXKGVYLAPSQFXAGFPSLAHPSQGIEKTVEAAAKVFPRKKSFRQFSLTTACESPAIFHLCWTLLVLHPPKFVLCSNGTFPLAPISL

SEQ ID NO: 132045 - protein, 588 aa, Oryza sativa
  Clone ID: PAT_MRT4530_34051C.1.pep
MAAAGHGPAGRRRSGPAGRRRNGRAGEEEGEGRGGGELCGSRISCPLVSSEERVFRAQSSLSSVRVNSVANFSFSLSCAHRRRWWRLPPSSPRCLAMDKHMLDLARIYCLAGDHILAPPRYPLPPLALPLPPSPLCSPFLSPLPPPPSPLYCGRAAATERGGGDGARRLRGGGWWGRDCAAAAERGGRAAAAVLALDYTRSLSSISFWGHSKVKYYSGISCACGFICGQREGISRCSLGQVLTVNSIWPRLVFTRPCVAATFRYGLDKESATNLDISVGGSFAYKITAEGRELLDLILENDSFGRSEVVPEVEIIHEEPLHVESEPDSIAESSSQSQELEEEEIHPSEIPFEFEENLFKFCWNTSNYSCEKRPPTKVNSDEPLDKAMLKETVKKLTTIMSNKWLREGELSSEATQIRCPSSTVTYLIGCNLVRALYYPSVGANVMSATFPFDCLGYRPLEPTVKTVRISTNSTTEGHPIEKLLDMPETSVLDLKVGRNGTFVSVLQSTNSLTEPLPIPKSIEEVMAISPFEPLDSNLDESIKEFNEGDDEYEETIDLPKMDQQSRAPIELKPLPPGLRYAFLNGDSEP

SEQ ID NO: 132046 - protein, 153 aa, Oryza sativa
  unsure (1)..(153): unsure at all Xaa locations
  Clone ID: PAT_MRT4530_34052C.1.pep
RRTRTMRKYHHQRNQVFYTPGARSVKPGMGYPMYPLPRXRALVKXQCGRQWHASTAAEQVRRDCCQASFCQPSDDSWCRCPRQISHNCWEASYRELXGSTPDVGHPMSXEVFXGCRRGDLEQXGGEHSPAFCNVDIXHNGGGGVCYWLARSGY

SEQ ID NO: 132047 - protein, 60 aa, Oryza sativa
  Clone ID: PAT_MRT4530_34053C.1.pep
GAPHGPSVFRRLPGEGTWSARAGEHITRRSCKRWTSPQRRRWCHATGWRDHGITSIGYCS

SEQ ID NO: 132048 - protein, 214 aa, Oryza sativa
  Clone ID: PAT_MRT4530_34054C.1.pep
MAMGGGSPAVCGGSGGRRGDGAVAEAAGSKAGDGRRGGRRLVGAVARLAREASGGGGMREERNGRKKLGLRMCTNLKAYLTVQNLKDWRIKRPYVYMDVRVFEAMLRYIYKDSLSEMNDNEVAAMAQRTATSTPAQHHCDGLMEACLEFLESCPVDLDLIFDVSMIRASENTSSFIPDKTRILFLLIKPAKYRQQNERGPDRGSLVLIEHKTEI

SEQ ID NO: 132049 - protein, 111 aa, Oryza sativa
  Clone ID: PAT_MRT4530_34055C.1.pep
LDGGDGGFGVPCFLPNGRSHVWFWFCHVSAPLVAAGEDEGKYGKREARGGMGAGGARRSGAPRRWLRSSRSLCHAATRPLLALQWRDGRRARRDRACRLRRLLLILVFPLL

SEQ ID NO: 132050 - protein, 114 aa, Oryza sativa
  unsure (1)..(114): unsure at all Xaa locations
  Clone ID: PAT_MRT4530_34056C.1.pep
PRFRGALVESAKCRSGPGTAPPPTGHRRDCCRKLPHSRQTAGRRCEAIXHMLGGIYRELGAPDVGHXMSEVFQRLPGEGTWSSSRRQSLHGVLQRGHHHNGGGGVCYWLARSGY

SEQ ID NO: 132051 - protein, 126 aa, Oryza sativa
  unsure (1)..(126): unsure at all Xaa locations
  Clone ID: PAT_MRT4530_34057C.1.pep
MASNKVVFSVLLLAVVSVLAATATMAEYHHQDQVVYTPGPLCQPGMGYPMYPLPRCRALVKRQCVGRGTAXAAEQVRRDLLAGSFAAVDDKLGARCEAIKPQCLGGIYKGSFGXPRLSGTPCSEVF

SEQ ID NO: 132052 - protein, 167 aa, Oryza sativa
  unsure (1)..(167): unsure at all Xaa locations
  Clone ID: PAT_MRT4530_34058C.1.pep
MASNKVVFSVLLLAVVSVLAATATMAEYHHQDQVVYTPGPLCQPGMGYPMYPLPRCRALVKRQCVGRGTAAAAEQVRRDCCRQLAAXVDDSWCRCEAISHMLGGIYRELGAPDVGHPMSEVFRGCRRGDLERARGXSLPAFCNVDIPNGGGGVCYWLGYPRTPRTGH

SEQ ID NO: 132053 - protein, 201 aa, Oryza sativa
  Clone ID: PAT_MRT4530_34059C.1.pep
PEKNRSLPLLMEPPHHSKIKSCAARPTPRLRELRADAIFSQARGVRLLGPSAYTTTLGTPPATYFRSTPPCAPPPFARSDRCTAATTRSEGSVELVLSRQASEDGAALQGIGGAGRGGARRVRLRSDTGARELRPISAVAVRDRTAPEPLARTLEGDFYEQNKLQPLNQEHAKLESIPLGGVNGTGVGYGARGTGIAVPAA

SEQ ID NO: 132054 - protein, 98 aa, Oryza sativa
  Clone ID: PAT_MRT4530_3405C.1.pep
MRKSKQPQPQPSPEIRYRGVRKRPSGRYAAEIRDPAKKTPIWLGTFDSAEVAARAYDDAARSLRGPTARTNFPLAAPSAPPPRPPAAAAAAATSSHSS

SEQ ID NO: 132055 - protein, 156 aa, Oryza sativa
  unsure (1)..(156): unsure at all Xaa locations
  Clone ID: PAT_MRT4530_34060C.1.pep
CSQVLLLAVVSVLAATATMAEXYHHQDQVVYTPGPLCQPGMGYPMYPLPRCRALVKRQCVGRGTAAAAEQVRRDCCRQLAAVDDSWCRCEAISHMLGGIYRELGAPDVGHPXMSEVFRGCRRGDLERAAASLPAFCNVDIPNGGGGVCYWLARSGY

SEQ ID NO: 132056 - protein, 365 aa, Oryza sativa
  Clone ID: PAT_MRT4530_34061C.1.pep
MAGVARMLAAVVCAIMPAAAMAAGGVGALEPSGWVRAHATFYGGADASGTMGGACGYGNLYAQGYGTRTAALSTALFNDGLACGQCYKLVCDRKTDRTWCKPGVSVTITATNFCPPNWDLPSDSGGWCNPPRPHFDMAQPAWEKIGIYRGGIIPVIYQRVPCMKKGGVRFTINGHDYFQLVLLTNVGAAGSIKAMDVKGSKSPDWMAMAHNWGAQWHSLAYLTGQGLSFRVTITDGQTLVFPNVVRPGWRFGQTFASNIQFKGFMRALMVLAPVQLHVDAWRQWRHVTLVDMLPAEWNDKRCTWFFAEPDINAKKKKKKKKKKKKKKKKLQQAGNAETCGSTLSIYPRRWIRKAQNKFPKRLGLP

SEQ ID NO: 132057 - protein, 224 aa, Oryza sativa
  unsure (1)..(224): unsure at all Xaa locations
  Clone ID: PAT_MRT4530_34062C.1.pep
LPLLGYCIAGKEKLLLYEYMEKGDLHRWLHELPAGRPDMEDDTGGDIWEVAEDKRSISDWPTRHRXIALGIARGLAFLHQGWAGSGRPVVHGHLVPTNILLGEDLEPRISDFGPXSDTTPEGDVYSFGVLVLELITGQAGWDEASVSWARGIIRDQKGLDIVDPRVRDEAGGGPETSTVEREMVECLRVGYXCTAQSPEKRPTMQQVVGVLKDIRVAPASSSST

SEQ ID NO: 132058 - protein, 72 aa, Oryza sativa
  Clone ID: PAT_MRT4530_34063C.1.pep
MGVNFFFSSSPVTPPHCGSLPPGPKAPWFFGGVSAKKGGFFFFFSRFGPFGSRLSCEFGPPYLCLPLFPCPP

SEQ ID NO: 132059 - protein, 89 aa, Oryza sativa
  Clone ID: PAT_MRT4530_34064C.1.pep
QQQNQYLGSFCCIPHGWLRVVDLYSVLVSTTSECIGLFPADEETAIFWRLTSILIPFHQNDPKIEYSLYHEYRRVCPDLTQMKLTAMSE

SEQ ID NO: 132060 - protein, 115 aa, Oryza sativa
  Clone ID: PAT_MRT4530_34065C.1.pep
VLIDITDGSTAITISNSHFTKHDHVMLFGARDDSPKDKIMQVTLAFNHFGKGLVQRMPRCRFGFFHMVNNDYTHWLMYAIGGNMNPTIISQGNRFRASDDMKLKEVTKRESTSYD

SEQ ID NO: 132061 - protein, 36 aa, Oryza sativa
  Clone ID: PAT_MRT4530_34066C.1.pep
PNHTVRKSSSHCSMIIYDCLTDEHRHYCQGVWVEKY

SEQ ID NO: 132062 - protein, 240 aa, Oryza sativa
  Clone ID: PAT_MRT4530_34067C.1.pep
MALQLKKQDGSVTAEAGQEERKRRGNCCKLDQEATVAAPLPPTRGPLSAAPPRAPPLLSRPPARRLRLRTTSPLPHSSVACGSGTHVDEGVSGDTTEGGARVDPRPAAKKPAEEEPVAEKAPAAEAVLGASTWRLSARQRWRSKLGSERADGGGNCSACWCVVLRLAGVVACWCVEVLRLACYECPMAAASPPGISSALRPSSSSYWPADDLVILLSGAALCHRRPPCPLASLTERRSCH

SEQ ID NO: 132063 - protein, 129 aa, Oryza sativa
  unsure (1)..(129): unsure at all Xaa locations
  Clone ID: PAT_MRT4530_34068C.1.pep
TTTTTTSRRCRRRRKGWTARGAAXSFPIRVVSRDMPESCFDLGXARSTTSSAATPRDHSRPGARGSVTGHVTRPRIRMDHAVCHGRSTVRRDDTCQESDGSRTVVVTYTYNPHYSHTFFIIIGLSCSIN

SEQ ID NO: 132064 - protein, 111 aa, Oryza sativa
  Clone ID: PAT_MRT4530_34069C.1.pep
MRAKLASVLEESEATMVGEPSEATRRMGSPRGGGEGEVGEDDNKGRPVGGGWGDKRQQRGGAEVLYRLLIGVPYWRVALMIDEKIQFLGVGTWNVYWRLLTTFSVLYIIPD

SEQ ID NO: 132065 - protein, 45 aa, Oryza sativa
  Clone ID: PAT_MRT4530_3406C.1.pep
MACSGAVQRGFFNSLARSGRYSYTQFVENLRAAKKERENYLMGLI

SEQ ID NO: 132066 - protein, 151 aa, Oryza sativa
  unsure (1)..(151): unsure at all Xaa locations
  Clone ID: PAT_MRT4530_34070C.1.pep
RRRDASLRVAGAEEDDGERRRRATGGQRRRADEVRNALREEMREVRGREMNHGDRKPXAEGGGHGGSHRRTVGTALWRRTSTEQGWTGWISVTRTRRRXRRGAAASLAAASGGRSSGSGGGGWVHGAGAMRSTREFGEMGKKREGVAAELK

SEQ ID NO: 132067 - protein, 85 aa, Oryza sativa
  unsure (1)..(85): unsure at all Xaa locations
  Clone ID: PAT_MRT4530_34071C.1.pep
TSVTLIISYSEAAATNNHPHIAYTAHQANNQQGQQHNHMAAIHIGSATNQQHCSRFEPPSAFQQGPQIANLSELNVXPSXFTKID

SEQ ID NO: 132068 - protein, 769 aa, Oryza sativa
  Clone ID: PAT_MRT4530_34072C.1.pep
MMSPCDCFLHATAPPLNPPSSLAAAAPGARWRDSNLSFQSSAVSAPARNVETSPNLVVPCTVHTQAAERKKSGRWVKYGGSIPAMLEALERNEDIGEALRPWRDTMSNRERTIILKEQKDWRRAVEIFNWFRRRRRHEVNVIHYNVVLCAVGRARRWDLVARLWHEMHSGGVAPDNSTYGTLIDVHCKGGRERMALLWLGDMIKRGLLPDEITMSIVLQVHKKAGEYEKAELFFKRWSLESDVKMKGHPCYSLYTYNTLIDTYGKAGQLEKVSDTFNQMLREGVSPNVVTFNTMIHVWGKHRRMEQVASLMRTMEEFQCLPDTRTYNILISLYREINDIDVAEYYFRKMKAENLLPDVVSCRTLLYGYSIKGMVTEAQALLKEMYERNMVIDEYTQSAVTRMYVDAGMLEQAWCWFEKFNYQLNSECFSANIDAFGERGHILLAEKAFMCCIKRKMLSTCVCNVMIKAYGLVEKLDEACEIADGMERYGILPDYLTYSSLIHLMSTAKLPEKALYYLRKMQAAKLLIDCVPYSVVISCFAKNGNLHMVDCLFREMITSGIQADTYVYSILIDAYAEVGDVQKAEAYFGLLKKAGLCESATIYNSLIKLYTKVVYLAEAQKTYKLLKSLNADTNLYASNCMIDLYSDHCMVKEAREIFENLKVTGKANEFSHAMMVCLYKKIARFDEAHRISKKMQASGFLTQALSYNSVIQMYVSGGRMEDALKIFQKMLASNTPPNDATFKALKIILVKRGVSNNDIRRLDYRRDAAS

SEQ ID NO: 132069 - protein, 57 aa, Oryza sativa
  Clone ID: PAT_MRT4530_34073C.1.pep
MDPTWERMGRWVTEQASRARAAPSTAAAARHGRLRQRAVSCSVSGEPPTSSFNTCKY

SEQ ID NO: 132070 - protein, 385 aa, Oryza sativa
  Clone ID: PAT_MRT4530_34074C.1.pep
MDTGYQYIDSYYLEIKAAGLSLGMEQLRWKAKKAPFRGVIVIAVVGHPSASNGMLFLSASLRFRDSAILLYPVILSLLKSGSIPPQNDLHESEKSSSYQNRIFSQMIVFRWVLGFKSKFLIKWALKSQYALPHPRVTSLIYYPTAMEAPLKTGFSDLPPDPGRSRIDKPTSNDVEERAYLESAYHWNYAYATPSPLLKILRHDLLPFESKYQNRGRVGKQKMQESLFPGRKGRAEWRNGDIVIPGGGGPVISSPLDQFFIDPLFGLDMGNFYLSFTNESLSMAVTVVLVPSLFGVVTKKGGGKSVPNAWQSLVELIYDFVLNLVNEQIGGNVKQKFFPRISVTFTFSLFCNPQGMIPFSFTVTSHFLITLALAGVRIFLMRIIQA

SEQ ID NO: 132071 - protein, 90 aa, Oryza sativa
  Clone ID: PAT_MRT4530_34075C.1.pep
MARQLCNVGLVLADRCCMHACVALLYTLVENYIRFETPNSSKDQKRPETRLMLKAMKNNLLEGPGHWPSFCLSHRPRKNYTLDDIGWDYL

SEQ ID NO: 132072 - protein, 110 aa, Oryza sativa
  Clone ID: PAT_MRT4530_34076C.1.pep
FFALDVESMKGGFFRVMRKNNIPNLIMLSHTRISLLKLQPELHICSAGDQPVLLRERQLTSTMPATEQAALPLRRLLRVDGLVHPYTCSHRLKPWDLYPHLLSSCERHPI

SEQ ID NO: 132073 - protein, 153 aa, Oryza sativa
  Clone ID: PAT_MRT4530_34077C.1.pep
MVIKFHHPRPVNHNGATFLQSRSPRGEFIPVVTADDVAADGVLASGDGGRWWLPAARRQPQALRGATPALSAVLSAASRRRDGTTPVPVPRKRRRRRARFEQWCSWWLGSGSARRCAWWLAEWRTGDARRCSAATESRRTGGETGSEDLDYGV

SEQ ID NO: 132074 - protein, 52 aa, Oryza sativa
  Clone ID: PAT_MRT4530_34078C.1.pep
SVRPVSMPYSMPCASHSAHIAHAPYARTLNRTRNPEGRALIHFVTAPSSRSA

SEQ ID NO: 132075 - protein, 215 aa, Oryza sativa
  unsure (1)..(215): unsure at all Xaa locations
  Clone ID: PAT_MRT4530_34079C.1.pep
PPPQPPIKPKPCXPGPQNVILDGCQETTWILHDASLGKENLQAMDKVETSTLEDERKHSTNEYESFSFKTPQDSCSHKESPKSCMISAAFLCGDHNHLTVLISNMFRRVVVDAYVYHKYCKYHICMXVLILQHNVSMVELVTINKALLGGSSYYHVGTCTFVQKRSILRIYSIALADHVSKAXGSCSXGNRMTTKGQCTITSHRRSPASMRARAA

SEQ ID NO: 132076 - protein, 105 aa, Oryza sativa
  Clone ID: PAT_MRT4530_3407C.1.pep
TKTGERDPKEKALALQTETGYLEKQKKRPFPQKIQKKIQCHPPGKNPTGAGAKNIGGKTKKNRYGQQKNHRNGQKTPAISTPSKKTKLKNMARSLKKKASPTAFI

SEQ ID NO: 132077 - protein, 278 aa, Oryza sativa
  unsure (1)..(278): unsure at all Xaa locations
  Clone ID: PAT_MRT4530_34080C.1.pep
AGSSRSWCSTPPTTGCTSPAWAGSSTTWWSTPARAGSSRSWCSTPPTTGCTSPAWAGRSTTWCLTPPPTDCTSPAWAGSSTTWCSTPARAGSSRSWCSRTTGCTTPAQAGSSRSWCSTPPTTGCTSPAWAGSSTTWCSTPPTTGCTSPVXAGSSTTWWSTPARARSSRSWCSTPPTTGCTSPAWAGSSTTWCSTPAQAGSSRSWCSTPPTTGCTSPVWAGSSTTWCSTPARAGSSRSWCSTPPSTCRSTPSGARSRTCCSTALMTGCTTPAQAGSRTW

SEQ ID NO: 132078 - protein, 183 aa, Oryza sativa
  unsure (1)..(183): unsure at all Xaa locations
  Clone ID: PAT_MRT4530_34081C.1.pep
NVCACIYVQPGKSCLRSLGLSFPQCCELVFFFPCRPPPRRSPPSSSSSSSSSSRHPPRPPRRRRRRRGRSVSSSPCTPPPXPEPGPPPRLPTDNHLVDVAGSRGSLPAAALHGRSRRLAAGRRLLAAAIILAHAVRAPALRLAPAAVAAAATAQLDELLRRLHVQLRRAGHDINLHEHARYRR

SEQ ID NO: 132079 - protein, 437 aa, Oryza sativa
  Clone ID: PAT_MRT4530_34082C.1.pep
WSAATSAPSSPCCSTPAWPGSRSWCSTPTPTTTGCTTPAQAGSSRSWCSTPPPTGCTSPAWAGSSTTWCSTPARAGSSRNWCSTPPTTGCTSPAWAGSSTTWCSTLARAGSSRSWCSTPTTTGCTSPAWAESSTTWCSTPPTTGCTSPAWAGSSTTWWSTLARAGSSRNWCSTTPTMGCTSPAWAGSSTTWWSTPARAGSSRSWCSTPPTTGCTSPAWARSSTTWCLTPPPTDCTSPAWAGSSTTWCSTPARAGSSRSWRSTPTTMGCTTPAQAGSSRSWCSTPPTTGCTSPAWAGSSTTWCSMPPTTGCTSPAWAGSSTTWCSTPARTGSSRNWCSTPPTTGCTSPAWAGSSTTWWSTPARAGSSRSWCSTPPTTGCTSPAWARSSTTWCLTPPPTDCSSPARAGSSTTWCSTPARAGKQQKLVLDADDDGLHHTG

SEQ ID NO: 132080 - protein, 369 aa, Oryza sativa
  Clone ID: PAT_MRT4530_34083C.1.pep
MVCDNVGTIVSGLHDTIARWERNLVFDDVGTAVPWLRHTGVDGKQNLVYHLATATVQSVWRENCMEQFKLVLEALHQPHRHLYIAVDMEFAADAATNVSHRPVTSISCYQHMRRYVNGGGIFQMGLTFAFVGEGEQAPSPLIALEINFDFNVNSPKYHGKSIDFLSSQGHDLTQHSKRGVAPEFVYEGLLRHLPFGDGSVTWVAFHGDYDLAFLLRLLQGGDHGGNCLLPPKLATFLQKVREKFPVVYDVRVLGKLVKDGFNGSLTALAEYLGIPRNGDEHHAGSDALLTLSCFFKIVSLSGHQMHRMDARRGLLAGLEEWNMAIKCARHIDNHTGSIYVVKMLPHKLDEEARRIEELVASNFNIVGVE

SEQ ID NO: 132081 - protein, 186 aa, Oryza sativa
  Clone ID: PAT_MRT4530_34084C.1.pep
MGRGKIEIKRIENATNRQVTYSKRRTGIMKKARELTVLCDAQVAIIMFSSTGNIKGIFDRYQQAIGTSLWIEQQRMGEDLDGLEFDELRGLEQNVDAALKEYHVITTQTETYKKKVKHSYEAYETLQQELGLREEPAFGFVDNTGGGWDGGAGAGAAADMFAFRVVPSQPNLHGMAYGGNHDLRLG

SEQ ID NO: 132082 - protein, 503 aa, Oryza sativa
  unsure (1)..(503): unsure at all Xaa locations
  Clone ID: PAT_MRT4530_34085C.1.pep
MKLVQLVCCSGSLASLVLQVPCVLVNRFGDIDTYGCRILLGGVVLIGYVEDNKGYVEEESAHAQPVAMYANKKMASSTSNPISISISLASLLAARLRLRPHLAGAPPRSDPDPPEEAGSDRGSREYRKKKPDPFLNSPRCRCPTMQPPMGNDRPPQGVPGRPVSAFVPGAATAAPPPSSFGAASAPRAPFVPPPQAAASPAAPFAAAPPAAMAGYRGPPPPQRPFGAGPPQQGPFAAAAPPPQGPFTSAPSSQGPFAAAPQPPSQGPFGTAPPPSQGPFGTAPPPSQGPFGTAPPPSQGPFAASVPPSQGPFASAQPPFRPPPSLVQSPTASGMAPPSAYVRPPPPVQSQPPPMQGFYGGPPPANQQFPMSRPTFQQPVQTMPPPPMAGFGNQAAYATGGPPTGGTLQSLVEDFQSLSVSSAPGSLDPGVDVKGLPRPLDGDEEPTKGLEAYPLNCHPRYFRLTTHAIPASQSLVSKWHLPLGAVKVPGINFGSAGXIRCPRC

SEQ ID NO: 132083 - protein, 68 aa, Oryza sativa
  Clone ID: PAT_MRT4530_34087C.1.pep
LVQERVLPRGAHMVFSMSSRRGCTHQQRSRAVASVYGRLHHLREPIKHPLGPLHGWTECPVQDRAWQS

SEQ ID NO: 132084 - protein, 377 aa, Oryza sativa
  unsure (1)..(377): unsure at all Xaa locations
  Clone ID: PAT_MRT4530_34088C.1.pep
MRHHRVQQPRVQTLCVAKEQDAATTSDRFVGYVGTNPNESSVLHLLEDYESSSESPRDVNMVGNTETSTSAAARTPAQQLRTLHAILSESPFDPVINPDVDQWAARLRETVTNLNACGIHDAAVEPSPGDPPXGDGEPSVDNAEGENPTGGRPSGNRSPRPRRDPTPPRHEKCDLREHLDNRWRDRRDRDNNDRHRHRSPSLSRDNTTHXRHRHRSPSRRGRNDGRGGAPNEDRDRWAPSDRRNDINNDNQRDQGANRRDRNSQSPDPGRDRGHNRRSRSRAPEPSDSSSSSSSSSSSDRPPRRRHDRGLPSIPGSQCRAFTPALRDVRWPEKFQPGAIEKYDGSTDPEEFPQVYSTILYTADADDNALANYLPAAL

SEQ ID NO: 132085 - protein, 83 aa, Oryza sativa
  Clone ID: PAT_MRT4530_34089C.1.pep
GTPPKENNPPPPVKPPRGPKTPGTGGGGGRGTGAPSPGEKNPKGQTPGGLQPPWGGGGKNPLGGEPNPPLGGGERTPVSGGGG

SEQ ID NO: 132086 - protein, 512 aa, Oryza sativa
  Clone ID: PAT_MRT4530_3408C.1.pep
MASRSRWSALAASALIQCFAGSSYCFAVYSPALKASQSYDQSALDKVAFFKDVGANAGILSGLLAAWAPAGRRRPWLVLLAGAALCAVGYLPIWLAVTGVAPAPLPLLCLYMLLAAQAQTFLNTADVVTAVENFPDRRGTVIGIMKGFLGLSGAILVQVYRTIHIAPSTFILMLAILPTAITLLLMYFVDVHRSDHQRYNKKFMDAFSLIAITVAGYLMIIIICDQVLKIISSAVQTVCFVILLLLVLSPVAIAVKAQKTESMKQEEETRDQAERIGLLQEQISTNASSSSDERCQELSTGKENMNLVQAMCKLNFWLLFLAMSCGMGSGLATVNNISQIGGSLGYSTKETSTLVSLWSIWNFSGRFGAGYISDHFLRSRGVGRPFFIGVTLLVMSLGHAIIASGILASLYVGSVLVGLCYGCQWALMPSITSEIFGLNHFGTIFNVVAVASPVGSYILSMTCKQREDVPLRDENSHLPRPCNRARLSGEAKSGDGGGGTTDVWNYRRHPNL

SEQ ID NO: 132087 - protein, 64 aa, Oryza sativa
  Clone ID: PAT_MRT4530_34090C.1.pep
FSYPRSKRLEWGQINYMGPHLQGTTYYNAFCVHSYPIDVHNSLDRILENLHDCYFLLHLYDYLE

SEQ ID NO: 132088 - protein, 51 aa, Oryza sativa
  Clone ID: PAT_MRT4530_34091C.1.pep
NRETRYVCYFCRKLPRPHRPYKLQDRPNTYIIHVNCVQNDSKSLDLFFIPK

SEQ ID NO: 132089 - protein, 101 aa, Oryza sativa
  unsure (1)..(101): unsure at all Xaa locations
  Clone ID: PAT_MRT4530_34092C.1.pep
NDVYNLQVVVAATFMVAMVRLPVSLSKPEMVELSLARRGTPTPTRQRRTRALARRRAARGASRGARACCSYPSTARRRPLWRRHRASRHWRRCCSGAATSX

SEQ ID NO: 132090 - protein, 108 aa, Oryza sativa
  Clone ID: PAT_MRT4530_34093C.1.pep
LLRPLIVPVRAALSTRTAQACSVYLFGIRAYLKCSCRLVIVTSRMFTISLLVRSLSSSGVWQSVYSIQTPSFFVTFQTAAISAYLGREGLNELSILASQPRYAYVNGH

SEQ ID NO: 132091 - protein, 460 aa, Oryza sativa
  Clone ID: PAT_MRT4530_34094C.1.pep
MVEASNPTQDMIDITGHVVHDDVSYDKDVLEIKLPDTVITSDYGGNFVKDVCIDEGVLPHRKISAEKKLDEKSPPNFDFLMIDTNSDLTYGGKGDAKKYAHGQKPKTVLLPVGFAADDNTEKQCDLESRDTASDISEKKISLHELLKLESAEESKERLKLESAEESQTQHQSTTSAINEKNMPPVHEEAIAQVSTNDCNDVATASKTDELITSNVSSINNTNGSSATISDRHDATAALDKPMSTAETTDGLIGSKQFNEVGTAEAMPDALTSSSSSEVQPSEKSNDHPESFTSEPIADPQDENAVATSSSPHVVESSDANRQMNNKNSDNDGATDVHDFNQTDSESCADATNDGRISTSSTDAQKDSTHVDELDVPDNNAKGKSLIGNGYPLEPCSLGPSIMCNPVSTSGHIGNISIRSDSSTTSTRSFAFPVWEWDWNSSPVRMARAERRRNKRRRGWN

SEQ ID NO: 132092 - protein, 223 aa, Oryza sativa
  Clone ID: PAT_MRT4530_34095C.1.pep
MASVSGGGSWGESACVHGSRFRTKRMHACGLLDFRMLTVGRARVVEVLAAAVTCGTARRRRSSSGERRRLERDNELLQASMHEGCEVKEMVYAQGIEQWLTEAAVIDDDGGGNSRSAPVKKRCVLQVLHISGWGRCQRGLRSQRCTAREGFRSKEEMLGIVWRDGNAKEMEVTLTQTEMAKVVVTMTGGEVEDDGEAEDLSLDFFSSRVMCGVGRLGLEEMEA

SEQ ID NO: 132093 - protein, 186 aa, Oryza sativa
  unsure (1)..(186): unsure at all Xaa locations
  Clone ID: PAT_MRT4530_34096C.1.pep
LLLDASPFSIHHSEPKKPREEVLCLSIAPNLAAGRGDDDHRHRXLGKVPNHFSFDHLPFCVSQPPERDHADDALEHAPERRRFNHRCRPAILIHLRESRCAIVITSTSSSKRLKNPSRKHQEHGEHILFFTGANLGSPLPSSSITAASQLIVPFEPSSFTRGGAPSPSRSTSHRCRQDLDNPSSTH

SEQ ID NO: 132094 - protein, 312 aa, Oryza sativa
  unsure (1)..(312): unsure at all Xaa locations
  Clone ID: PAT_MRT4530_34097C.1.pep
MQKSRGDVTESVITSARAHTHALLRRRIRQGGFWGVEGRAYPEKMSGREGWKQTSLTAARWPRSTATGSGAGRRRRGGFSASARAMARAARLELSGSFGXGGAAHRCIGWATPGVDDRQRLEQASGKKGAKGREPLSSSSSSVAGGEMSVADSTVAASPRRILSGRRRRHQMTQRKGSSPPPPRRQRYPPGPPPPLALSPLLSHRTLATPTFGDNVDDNGGVVSIARGGVKRDDFTVLGSPPRAVVEEATMEMRSTTVSEGGARIEMRSTIVTEGNARIEMCRAPLLFCRPPAACHSNPAVPPLATPLPRRG

SEQ ID NO: 132095 - protein, 138 aa, Oryza sativa
  unsure (1)..(138): unsure at all Xaa locations
  Clone ID: PAT_MRT4530_34098C.1.pep
MPTTPWSMHRSTAASTIVVVRPFSTTSEQAAAPLSSPQPPLQYASRTPAGDVNDLENASFLHRRRSXCLGEPLFDSLRIHHLLDLTTLVHACLKQLIVPFEPSSFTRGGAPSPSRSTSHRCRQDLDNPSSTHSEHPEG

SEQ ID NO: 132096 - protein, 135 aa, Oryza sativa
  Clone ID: PAT_MRT4530_34099C.1.pep
MAAAPRQPLPATAPSTVTRARSDATLSDLPAWGGAAARSAQKEGSGGGGPPEVAEPAKPTTAALALCPIPPSLVKHPNLRYVNLSGNIPTGTIPPGLLHGRAHIPSAAARHSPAAHDTRGERRKKTEKEEDAWKT

SEQ ID NO: 132097 - protein, 240 aa, Oryza sativa
  Clone ID: PAT_MRT4530_3409C.1.pep
WHRTRGRWAAAALSWAGSYLESSSAEGGKDACGARGWTTTAPRPTLPRRRATSARPRPHAPWPSPPPTPCARSRCKPMPWQPCPCPARRTAPRRLGPAAASARRSPRTSASGSRRQGRSRCPPTRRRPPRTTHHRRRRRRAEAASSTTSSTTRPPTLPPSRTPRRRTGTGTAGTRTRRRRWRGGRCWARRARRGGTSTSPASTGGATRRRCARASTASPRTPTASPPSSARRIPTPVPSS

SEQ ID NO: 132098 - protein, 590 aa, Oryza sativa
  Clone ID: PAT_MRT4530_340C.1.pep
MARYGGRHTCPPADRLIASAVRLLSSTVDSSPAACRPISDSSYPDCAMEEEEPSNNRRRRLRPISEATQIGKKIKEGIDRILGRLKSTNFVSIACCCCNTVFINFQLTADQCFFGLMAKRMNPCHGKLVPKNKRAILQFDDIPEDVVFLIIRLLSLTNAARVSMVSQKWLQSWRLYPNLEFTSKALGLNKRVHKQGRRAKFVRCVNTIIRHHAGTGINSFTLKRNLNNHKYAHYIDRWIYFAVRSGANELTIDLSPRWYAHPRDVKYSFPSSNVAAPEPTSIEHLKLCFMNLRPLPTFSGLRSLKTLDLALVCITTEDLESLLSYTPALQQLKLRQCPMLEYLKITDVLAKLVYIDIVPCLWLKILEIHAQNLVAINTYNICHLKIVLSEALVLKGAHIELVLSSDVIEYAFTDLAPLMPDLESLFLSGCTEMIISRRPPSNRFHCLKQLELKLQDISTKYDLLFLAKFVDAAPVLEALVFHLEDIEEPFCYMEKEAELRSLEKHCPHKNLKLVKMTGFSAGRSSLELALYFVENSPALELLILDHRLDRSVCRITFGGDLDAKCSKGYEHTISKYVSNAIPRRVRLSYS

SEQ ID NO: 132099 - protein, 186 aa, Oryza sativa
  Clone ID: PAT_MRT4530_34100C.1.pep
MASVSGSGSWGESACVHGSRFRMKRMHACGLLAFRMLTVGQARIVAVLAAAVTCGTARRQCSSSGERRRLERDNELLQARMHEGCEVKEMVYTEGIEQWLTEAAVIDDDGGGDSRSVPEMLGIVWRDGNAKEMEVTLTQTEMAKVVVTTPGGEVEDDEEAEDLSLGFFSSRVMCGVGRLGLEEMEA

SEQ ID NO: 132100 - protein, 59 aa, Oryza sativa
  Clone ID: PAT_MRT4530_34101C.1.pep
GRPVEAWPYAYHDVTQIQSYSGEEDERRATSNKDKQSRVGIMPSPECFFGLMDYLWANG

SEQ ID NO: 132101 - protein, 214 aa, Oryza sativa
  unsure (1)..(214): unsure at all Xaa locations
  Clone ID: PAT_MRT4530_34102C.1.pep
PDASPFSIHHSEPKKPREEXSASPSPQTLPPAVETTTIAIADWXRSSPGNVTTPTTPWSTHRSAAASTIVVVRPFLTTSEQAAAPSSSPQPPLQYASRTPAGDVKDSENASFLHRRRSRIASAVIVDYRCLGEPLFDSSRIHHLLDLTNLVHACLXQLIVPFEPSSFTRGGAPSPSRSTSHRCRQDLDNPSSTHEPPPLTLAIGATPMSSNQEN

SEQ ID NO: 132102 - protein, 156 aa, Oryza sativa
  unsure (1)..(156): unsure at all Xaa locations
  Clone ID: PAT_MRT4530_34103C.1.pep
RSSPGNATTPTTPWSTHRSAAASTIVVVRPFLTTSEQAAAPSSSPQPPLQYASRTPAGDVKDSENASFLHRRRSRIAFAIIVDYRCLGEPLFDFSRIHHLLDLTNLVHACLXQLIVPFEPSSFTRGGAPSPSRSTSHRCRQDLDNPSSTHGEHPEG

SEQ ID NO: 132103 - protein, 160 aa, Oryza sativa
  unsure (1)..(160): unsure at all Xaa locations
  Clone ID: PAT_MRT4530_34104C.1.pep
TPLVQCIAGNATTPTTSWSTHRSAAASTIVVVRPFSSTSEKAAAPSSSPQPPLQYASRTPAGDVKDLENATFLHRHRSRIASAVIIDYCCLGEPLFDSSRIHHLLDLTTLVHACLXQLIVPFEPSSFTQGGAPSPSRSTSHRCRQDLDNLNSTHGKHPEG

SEQ ID NO: 132104 - protein, 218 aa, Oryza sativa
  unsure (1)..(218): unsure at all Xaa locations
  Clone ID: PAT_MRT4530_34105C.1.pep
SRPSRPTPHITLELKKPRERSSASPSSSTSPLVVVTTTFAISVXESSASPGTQATPTTPWSTHRSAAASTIVAVXRPFSSTSEKAAAPLSSPRPPLQNASRTPAGNIKNTENTSXFLHRRQSRIASAVIVVYRCLGEPLFDSLRIHHLLDLTTLVHACLKQLIVPFEPSSFTRGGAPSPSRSTSHRCRQDLDNPSSTHEPPPLTLAIGATPMSSNQEN

SEQ ID NO: 132105 - protein, 424 aa, Oryza sativa
  Clone ID: PAT_MRT4530_34106C.1.pep
PKPLSCSASLGTQATLTTPWSTHRSAATSTIVVVRPFSTTSEQATAPSSSPHPPLQYASRTPAGDVKDLENTSFLHRRRSRIASAVIIDYRCLGEPLFDSLRIHHLLDLTTLVHACLKQLIVPFEPSSFTRGGAPSPSRSTSHRCRQDLDNPSSTHDTRGPEHRCTQYTAFQCVRTPVANGNNTGSTRFIQKKSNEDLCECDCIIDDIAVPRMCPGQEKKLNYPAVAVSATLNAIKTSRSEDTVLLLKQSATNPPANRGIAPIPSPILQIRFPEMESCPSVKNILVLDSEGKRVAVKYYSDDWPSLSSKQAFEKSVFAKTQKTSARTEAEIVMFDSYFVVYKFIQDLHFFVTGGDEENELILASVLQGFSEAIDYLLRNKVHRRAALENLDLIFLCLDEVVDGGIVLETDAKAILEKYKSWIGR

SEQ ID NO: 132106 - protein, 65 aa, Oryza sativa
  Clone ID: PAT_MRT4530_34107C.1.pep
STQHGKTSQRDLISQKHHHANPDTTILTSHTTPFKAANPLNDPRNEHQATTSTVNYLVQFNNTTP

SEQ ID NO: 132107 - protein, 87 aa, Oryza sativa
  Clone ID: PAT_MRT4530_34108C.1.pep
REENVSMAQLDEHGERCKEMDEFIANVALTTDVRELTLVDRNLLFVSYKNDIGAQDALHKSISSIDQKEDSTWNEAYVASINDLQLR

SEQ ID NO: 132108 - protein, 249 aa, Oryza sativa
  Clone ID: PAT_MRT4530_34109C.1.pep
MTVTSMRIVHSAPELSIRSDPGRPHGGPARAGATRVRRNPRFSRTWAGPEASPLRGAAKKRRKRVRDGGGLVGGGEEEEERWEDKHGGRGASTSGSRDRAGKPLPPPQPQSLFVRSALLYYPHTPSIFVADLPLPCGLPVAVALDMCLRPVNHSRRSGVVPPDVSAEAEGDDLCDVFLEQQAHLPWRRPHLPVSPLASSSPHPLPSSSILYRHPLLFSSSSPSRKEAVESGTGRAGTASLISLAGRRQR

SEQ ID NO: 132109 - protein, 539 aa, Oryza sativa
  Clone ID: PAT_MRT4530_3410C.1.pep
MCEALVDRQLLPPCGCNGGGDVVVVVVPKTSAAPVLEDRPKTSAAAVSKGGEAASILRLSLPMIMTGLILYIRPMISMLFLGRLGELALAGGSLAIGFANITGYSVLSGLAMGMEPVCGQAVGAGNLPLVGATMQRMVLLLLAVSVPVAFLWAWMEPLLLLCGQDAAIAAAAQRYILFCLPDLLFLSLLHPLRIYLRVQSINLPLTACAALAVAAHLPINHLLVSVLGLGIEGVALASAWANLNLVIFLLAFVYVSGVHRDTGGFSLPRKMFKDVDGWVRLVRLAAESCASVCLEWWWYEIMILLCGLLANPRATVASMGILIQTTSLLYIFPSSLSFGVSTRVSNELGANRPSAARAAARAGLALSAVQGLASLAFAVSVRGAWARMFTPDADILALTASVLPILGLCELGNCPQTTGCGVLRGSARPRDGAHINLGAFYGVGTPVAVGLAFWAGMDFRGLWLGLLAAQAACVAVMLVVIQRTDWDVQAKLAQVLAGAAASGGDHGVNEAGGNDAVAHVKVAAPHGDEDSSLLITVST

SEQ ID NO: 132110 - protein, 283 aa, Oryza sativa
  Clone ID: PAT_MRT4530_34110C.1.pep
MAVCKMFDERPVWPRQSLYECLIDDGLQISQSQFKRLLFRAGYYFSTGPFGKFWIRRGYDPRKDPDSRMFQRIDFRMPPELRNLPRKERRPEKWTEMCKLEVMPSKSFIFLQLFELKDDFIQAEIRKPSHQPTCSHLTGWFCKPMIKTLRLQLSIRLFSLCPNEDAKNFLRNAYELIERSKKQEALCRSQQLKENKEASDRHNGTEDQAGGNNSDSEDAEDDEEEDKESDGYESPPMADDVPDFTLDDPCILDMNLDRLCLIVGIYYFQTDPRFLLVFSWSVK

SEQ ID NO: 132111 - protein, 100 aa, Oryza sativa
  Clone ID: PAT_MRT4530_34111C.1.pep
CRGFSIDVVIYSTTSYHLCRRRRTIDLIRNSEFKNTSTTLSSSSDLPCRRCLWFVVGYGGLVWGLFSSSLYSGNTPRFRYAPIRRRRCCCCCFPGSKATD

SEQ ID NO: 132112 - protein, 76 aa, Oryza sativa
  Clone ID: PAT_MRT4530_34112C.1.pep
GSAWCGGVEARWRAGGGRGGLLMGGSGANPEVGEGGRWRLTGGALGKKELKQQRRTHTESHKPRAQPAARLDPAQH

SEQ ID NO: 132113 - protein, 68 aa, Oryza sativa
  Clone ID: PAT_MRT4530_34113C.1.pep
SVLGMPRSYKMPLFFGGVVYPLIWSSSIPEEQIAAAPYVHDKTDQISKPQKTGRPPPHWATPSAPLSL

SEQ ID NO: 132114 - protein, 146 aa, Oryza sativa
  Clone ID: PAT_MRT4530_34114C.1.pep
MPGVFEEEGIEEIGEIGKIRKTEIGEIGKIRKTRDLKVLVPSKQGLSKEGDSFTVLLKYGNYLLPPATRRCPLISGKSSASGTIRGDLAMTAYTRYSSVIVTAISTRGSGLGWIPDNLNRGHLDYFFWLLTVLNAVNFVVYLWIAN

SEQ ID NO: 132115 - protein, 70 aa, Oryza sativa
  Clone ID: PAT_MRT4530_34115C.1.pep
IEPFSFLILFESIPFGYLYIKSDFYNIPVCRKKRPLIYLVQKSKIYWTRQKRRGIGSVEAPQLGGLKPPV

SEQ ID NO: 132116 - protein, 180 aa, Oryza sativa
  Clone ID: PAT_MRT4530_34116C.1.pep
MDISEANEGYASCGSGQRPPLRGIQREGKQRRRGVPTAAPLPLRRGGAAPPPPPAAASFPLPLTRWRADAVSSPLPDPAGGEAPLPPQAAAPFPLPLPRWRVCAASSPSPDPAGGEAPPSPPAAAPFPLPLPLPRWCAGTALSPRPDPAGGEAAAAQRPYDNGGTLPFQRLCFCACDVLV

SEQ ID NO: 132117 - protein, 144 aa, Oryza sativa
  unsure (1)..(144): unsure at all Xaa locations
  Clone ID: PAT_MRT4530_34117C.1.pep
MEALRRPEVVVNRRWSRSRLLPLLLPVARPSAPAPALGKTGQGERRGGIQAAAAPAGAWGAPRRGWPARARRRHRRSTAAAASTGSGGRRRAPGSATSSRRRXCSLLRCRCRRRRRRPRPAGTAPGPAPRTCRSTTWGSPAPSP

SEQ ID NO: 132118 - protein, 844 aa, Oryza sativa
  Clone ID: PAT_MRT4530_34118C.1.pep
MEEDAEGMDRFDMDGDFEGGRFGRDGEFYYERRRERAPQTRDDALYGVFAEGDSDYDSDDGHRRSRRKRRRDEAEPDLSRPVHFQSAGKFMPSKEPEPELEERPGLGAAASASASASAAGEDDAAEEEEDLDLPTAFGQRIAEGARARREERARERETAARRRQASGVASGKPAPALGSLGSNTKVAKMMAMMGYKDGMGLGKNEQGIVAPVETTLRPKNAGLGSVEGFKEPKPFFTKENLPPPPPPAPAKKEQQRWSKKAGAKKGPVLTKNELLAMRSEQEQDEQPTVVQKVIDMRGPQARVLTDLKGLNVEQEMEANDVPMPELQYNVRLLVDEAKADIVRLDGQLRREQEKVASLVREKEKVAKQEALQKRQLQVMEKIAGVLEQVRVDDTAGILSLEGLLKTFQELKACYVEEFKMCSVAWIACRFAHPLLIRVFQGWQPLQNPLFGLEIMSSWKDLLQGDQAYDFSGDVESMAPYAQLVCEVILPAVRISGTNSWEARDPEPMLRFLESWERLLPPIVLQSILEHVIMPKLSAAVDSWDPRREKVPIHVWVHPWLPMLGQRIDTLCHSIRYKLSSVLHVWQAHDASAYAVLSPWKDVFDAASWEDLIVRYIVPKLKMALQEFQINPANQKLDQFNWVMIWASAIPVHHMVHMLEVDFFSKWQQVLYHWLCSPNPDFNEIMNWYKGWKGLFPPELLANERIRMLLTAGLDMMNRAAEGLEVVQPGARENVGYLRATEKRQFDAAQQASQYMTHHAVPGAAMADMSFKESIQAYAMDQGLLFMPRVGKFYNGMPVYEFGTVSICIDSVKRLLYAQLQEGIERWSAVSLTQLIEMNRKARQR

SEQ ID NO: 132119 - protein, 268 aa, Oryza sativa
  Clone ID: PAT_MRT4530_34119C.1.pep
MEISSSSKKHFILVHGLCHGAWCWYRVVAALRAAGHRATALDMAASGAHPARVDEVGTFEEYSRPLLDAVAAAAAPGERLVLVGHSHGGLSVALAMERFPDKVAAAVFVAAAMPCVGKHMGVPTEEFMRRTAPEGLLMDCEMVAINNSQGSGVAINLGPTFLAQKYYQQSPAEDLALAKMLVRPGNQFMDDPVMKDESLLTNGNYGSVKKVYVIAKADSSSTEEMQRWMVAMSPGTDVEEIAGADHAVMNSKPRELCDILIKIANKYE

SEQ ID NO: 132120 - protein, 114 aa, Oryza sativa
  unsure (1)..(114): unsure at all Xaa locations
  Clone ID: PAT_MRT4530_3411C.1.pep
MECFFFLVPTTTTVTMAGNGPINKEDPLNWGTEVLKMAVSHLYEVKSMLAQFREPLVTIQGATLRVSQGAGPNQAKDAASIVXQLVEEARPPIKATRVWILICIAHGGDIYGVT

SEQ ID NO: 132121 - protein, 128 aa, Oryza sativa
  Clone ID: PAT_MRT4530_34120C.1.pep
ICPSKRTQKKKIKNVGMHVFSPNLNKIWSRFFPTRQKKKETKKKKGDLTHNSHNYFLCAKSQTREFSNQIKKPRDFNTCSAGRRTLVAHDHYYSIVVNPPKSKKRCKPRTRMQDNGDEKSKLSSVYLT

SEQ ID NO: 132122 - protein, 54 aa, Oryza sativa
  unsure (1)..(54): unsure at all Xaa locations
  Clone ID: PAT_MRT4530_34121C.1.pep
IKIPSILCVHACLTPPETSMVSMNNSHPFVTVFSIIYCSNPVCYKQLSIIIXNS

SEQ ID NO: 132123 - protein, 89 aa, Oryza sativa
  Clone ID: PAT_MRT4530_34122C.1.pep
MAGRVGGSSGAAIAGGVLGVEGATVTGAAGGDGGGVGGVEEESVELFVWQEVAIVDKVTVIKDKASQGADPTSRSGLVTLCSCIVCFGV

SEQ ID NO: 132124 - protein, 65 aa, Oryza sativa
  Clone ID: PAT_MRT4530_34123C.1.pep
FYDRASTVGGRDISFDMDKILTLKPTLDKNWPSFYCSSSFTWSRGMGPFRAHECQKHGTCIKPSP

SEQ ID NO: 132125 - protein, 63 aa, Oryza sativa
  Clone ID: PAT_MRT4530_34124C.1.pep
MGALIKTPEVDGWMDGWREWWDGFVFACNTPCALELLYRRWDGEAVGMSSFEVPNGGGRRFIA

SEQ ID NO: 132126 - protein, 310 aa, Oryza sativa
  Clone ID: PAT_MRT4530_34125C.1.pep
MVALEEVKKGVGRGCDGSGGGGGDGAGGGEGGDKGGRGGGRGDKGGQGGSRGYKGGQGGVGTSKEVVGKITEETSVTGGKPKQATGWKRTERDVLKLLKDPSVLTQPWSGVAVSNYNFKYDGLDDKWYSGRIFLNTKVEAGDSLTQTNGREARFWTFVEEDNGNHPVVNADYIPPHWNETICYVLSAIREVVKKKCKIVDLNKTSKFRDAGQQGSRSSPATSRSVIEENLSWTDFRNIPFDPRSRLGFIDQDELHELCCTSIHSDILTDHWIGGALVCTRMPFERLITDMFDAQLVSGYFISCKPVTAAA

SEQ ID NO: 132127 - protein, 87 aa, Oryza sativa
  Clone ID: PAT_MRT4530_34126C.1.pep
STRIQEQGMTITGGYCGKGKVLHSAGTHIDDTEHTLPERVHVRWCTHCSRTPSVRNQYSFTHRMMMTIVVFYPTSVLETGLDILFCW

SEQ ID NO: 132128 - protein, 77 aa, Oryza sativa
  Clone ID: PAT_MRT4530_34127C.1.pep
MQSSAAAVEMRRNPEGIIAPLSPIWMPLGKNGLAATTSDKESKHRKGGSTTPALSSSMRLGVRYRDLSYAAFCRSYA

SEQ ID NO: 132129 - protein, 84 aa, Oryza sativa
  Clone ID: PAT_MRT4530_34128C.1.pep
MAPGPENRHAVGRAPTNAPERQATSTSSAAVTVERLCSSSPMETVGSSSGRGANGGRDARAAGSSASREPLTATSSSHCRFKKG

SEQ ID NO: 132130 - protein, 114 aa, Oryza sativa
  Clone ID: PAT_MRT4530_34129C.1.pep
MTKVKLAAVAEMMPVSVKKAMVPTPSDVARGGEVGDDGGIEPAAGGEDGTRLRGWHMAPAGDGPPPPPAKEACVAGAIGVSSASATADGDELHLRSAPPPAMDKTVTHFSSLLA

SEQ ID NO: 132131 - protein, 111 aa, Oryza sativa
  Clone ID: PAT_MRT4530_3412C.1.pep
MQYRVSERVVRGLPLNCRWARWFGFGTNGSYSNACARLKEPGTVQILRPCESKCTNRVLVVGGSLANINGHHLIYSLPFMIRCRQLPSAPLMLNHDAVCRCILRSCLNTET

SEQ ID NO: 132132 - protein, 34 aa, Oryza sativa
  Clone ID: PAT_MRT4530_34130C.1.pep
MIYKKGLQFLVTVKDFSMHIFSSKATLNGHNLGL

SEQ ID NO: 132133 - protein, 86 aa, Oryza sativa
  Clone ID: PAT_MRT4530_34131C.1.pep
CAQPNMIFQLTRNGNSQGTWQKVLKQLSKSMICHVHSTTSRDCARFTIQQYQPQQNDHSTAPYQQFRDMNPTYHAWLTSHNLTSYC

SEQ ID NO: 132134 - protein, 236 aa, Oryza sativa
  Clone ID: PAT_MRT4530_34132C.1.pep
MAGSGELKLLGVWSSPYAIRVRVVLNLKSLPYEYVEENLGDKSDLLLASNPVHKSVPVLLHAGRPVNESQVIVQYIDEVWPGGAGGRPSVMPSDPYERAVARFWAAYVDDKVRPAWLAILFGSKTEEERAAAVAQAVAALETLEGAFGECSKGKPFFGGDGVGFVDVVLGGYLGWFTAIDKLIGRRLIDPARTPALAAWEERFRATDAAKGVVPDDADKLLEFRQTLLRWSASKAK

SEQ ID NO: 132135 - protein, 249 aa, Oryza sativa
  Clone ID: PAT_MRT4530_34133C.1.pep
MLVRRRSQADNAVPGCDGDVGSAGAGRGVVTRGQRDLTIAVPAPVSTVLRAALRPRRHPLPPAPPHTAPSLSRRRERRGERMQSGGRRPSIGDTATREKGRRGSAATWEKRLHGSGGLGGLGGAEVDSHLENKFYASDLANNLQLDKDDDDDVLVDGSDNALADQVDWDWEATYFVQHRHKNNAADFPDIPPAARESLDAYITQAVSLAELLAGCISTNLGLGDTDRVRDAFAPPFVGTRDGARRRGTR

SEQ ID NO: 132136 - protein, 94 aa, Oryza sativa
  Clone ID: PAT_MRT4530_34134C.1.pep
FFFFFLKHVNIKVHSIHCISSPVNKPTNLTSPLWFVISVLSKEKQNEKMHIRQFAREASWIESLEANSKTTAYEDDSPAVSAGGPGHPLRGEDP

SEQ ID NO: 132137 - protein, 242 aa, Oryza sativa
  Clone ID: PAT_MRT4530_34135C.1.pep
MGKDLVFSIRLRGGSRRGDVPTCGEGEAPRLTLSLRKRRNTGNGEVHWQAGQGFHLGVSSKQSNRNGSHQMPPTHQRYLFYAHNHLYTVDDLLSHHARPVELVGATRTPLPSVRTGLTLESAEPLERRRIWAYVARSGCPRAALATGPRRGGRRCQVGRRQDTGCPRSGGKEGWREERDEEGERKREGGAGATGTAFAGGGNKSGTRLGSPAHSGSRLRVAQGKRHGSHGRRKSPCDLKYSR

SEQ ID NO: 132138 - protein, 415 aa, Oryza sativa
  Clone ID: PAT_MRT4530_34136C.1.pep
MGDESEGETEEYLFKVVIIGDSAVGKSNLLSRYARNEFNLHSKATIGVEFQTQSMDINGKDVKAQIWDTAGQERFRAVTSAYYRGAFGALLVYDISRRSTFDNVGRWLQELNRCMTLIWKAHSDTTVAKMLVGNKCDLDNIREVPVEEGKALAEAEGLFFMETSALDSTNVRTAFEIVIKEIYSNVSRKILNSDSYKAELSLNRDWSKWAEKCVGRRFTGLERMDCCCCVAGLGHIPGMRNIACIVVSSSGDRRIDQMQKGGGGASSSAVVVRMGPCGGDGGGARDMDMRGVGRVVRVAVRHGAAVDAMSVLYERNGHEEWTDLWGGPGGTLSEISLQPGEYLTSVAGHYGRLDGDLVVRSLTFVSNMRAYGPFGHEDGVAFDLPAGGGGGGKILGFHARSSRRLDAVGTYVKIG

SEQ ID NO: 132139 - protein, 110 aa, Oryza sativa
  Clone ID: PAT_MRT4530_34137C.1.pep
HFVSRHRRADAGVPHRAGRGGKGFHGLPPPLVPPRPDMALLILILVSPTRQWRDLHKMLHPQLKRLCQHGLYVLRDNREDARGERRSHQLRRLTRECDRACTGLLSPRLP

SEQ ID NO: 132140 - protein, 66 aa, Oryza sativa
  Clone ID: PAT_MRT4530_34138C.1.pep
GKLVQPSTYSHLNFRFDPRIQPFLSEVQAGEEAHPRRGGNGGAGEGDEHLKGRPPYVIRTRCRRTC

SEQ ID NO: 132141 - protein, 343 aa, Oryza sativa
  Clone ID: PAT_MRT4530_34139C.1.pep
CQTPTLGFCVQRYQQITTFKPEKFWSLKTYVIKDGNEIQLEWDRKKLFDFDVTVMFQKMVASDGILKVTDISVKEECKARPPGLNTVNLLKVASSALGIGPQTAMHLAERLYTQGFISYPRTESTAYPSSFDFRSALAALAHNPLWSNDVRTLLDTGFVKPKQGHDAGDHPPITPMRLATEEALGTDAWRLYQYICQHFIGTVSPDCRYTRTSIEFTSGGETFHCVGNRVTSKGFTSIMPWLAVRENNIPAYKKGDAVSIHKVDIYEGSTTPPDYLSESELISLMEKNGIGTDASIPVHVNNICERNYVQVNSGRRLVPTPLGTTLIRGYQCIDADLCLPDIR

SEQ ID NO: 132142 - protein, 157 aa, Oryza sativa
  Clone ID: PAT_MRT4530_3413C.1.pep
MKILESFGHSDCQVVINMIEHQKALMVELRGMVMPLLPSDNEQAKLALQLLGDILSCSDKAISMLELGGDTKKLTNLVGGNAAVLVAAAFFFTERAHRGVLVGGELDQPLWAALRPRLVVSSGGFTFPVAVGAAKVVSTIGDELPRESLEVFRPIDE

SEQ ID NO: 132143 - protein, 95 aa, Oryza sativa
  unsure (1)..(95): unsure at all Xaa locations
  Clone ID: PAT_MRT4530_34140C.1.pep
PIRVLTYIGDTYMTCVIVENLXSKPSKWDASPCPLESFCSETNAGSEILPPLCHRMTSXQGGHHGYPRESYLGKHKLMHCAYLYCVVKIHDPDVT

SEQ ID NO: 132144 - protein, 60 aa, Oryza sativa
  unsure (1)..(60): unsure at all Xaa locations
  Clone ID: PAT_MRT4530_34141C.1.pep
XNCLASLPIIILYLAALNGKAVAAVMEVAPEMEAAVAPETRSPSESTAPTDYTSEHPKGL

SEQ ID NO: 132145 - protein, 405 aa, Oryza sativa
  Clone ID: PAT_MRT4530_34142C.1.pep
MTARKPVRRRCTWETTTTTGIVHKEVRGGTNHAHIIKEKIHINVPLLDAMQEPTYARYLKDILNSKRPLPTTEVVKLTEQCSNVILHKLPEKKKDAGCPMITCLIGAQQFDQALCDLGASVSVMPKDVFDKLNFTVLLPTTMRLQLADSLVRYPAGIAEDVSVKTRDFFIPVDFAVLDMDTGKETPLILGRPFLSTMGANIDVGTGSIRFHINDKEEKFEFQPRTEQCSMVKIKYGPNPQNIQEVEVEPPKMDSLPAQKKPLSAPKPKKVWREKPKTPAPSSPETDVLMEDAEAPRRLLNDTDLDLVSDRERQAYYMLSDRECMRQVGSQLRTHPDGPKLHVIVSESQPGQAPVRTGGVRLMTSNGGTTNPPDQVFANFNNMMQQQHDDLQAYFRFQGFNPYQGP

SEQ ID NO: 132146 - protein, 46 aa, Oryza sativa
  Clone ID: PAT_MRT4530_34143C.1.pep
CKGISRFIFYRRIVFFCPFCNFCYQGGGGECFLKNFQRGVVYFSSI

SEQ ID NO: 132147 - protein, 581 aa, Oryza sativa
  Clone ID: PAT_MRT4530_34144C.1.pep
MAGRSELVVSFGEMLIDFVPTVAGVSLAEAPAFVKAPGGAPANVAIAVARLGGGAAFVGKLGDDEFGRMLAAILRDNGVDDGGVVFDAGARTALAFVTLRADGEREFMFYRNPSADMLLTHAELNVELIKRAAVFHYGSISLIAEPCRSAHLRAMEIAKEAGALLSYDPNLREALWPSREEARTKILSIWDQADIVKVSEVELEFLTGIDSVEDDVVMKLWRPTMKLLLVTLGDQGCKYYARDQKKLEEAIKFANACGAITATKKGAIPSLPTEVEVLKLMEMLEAWKYCDAVMLLLLYMMQKLPWCLVWYEVDATSHVFGWKPEAAWPREPARVPEPRHSIRRASRCKPRARAVVADRPVAAAVSLCTRLSPVSPLRSKPPRRHRRRHRPAPPLRAQAAKGQRQHPSSLCRVAPAHLLLFPESAKGQAPFLPLLFPFFLLAGVILPVAALAATAERQLAPLTAQVGSQTDIAAHLNPSLPFPSSSIRLRAIAAAPVLCLASAVLRRAPGEPVRSRTRKGTSAALSSSSSPARGRRDYSRAVGLSSQRPVPHGATSAPAQPRSGRADPGQSLPVRAFHREP

SEQ ID NO: 132148 - protein, 523 aa, Oryza sativa
  unsure (1)..(523): unsure at all Xaa locations
  Clone ID: PAT_MRT4530_34145C.1.pep
MHTVKETELLAAKLDLLMKRLDDHKKRPQGTVKALDSHIKCEVCGVTGHSGNDCPETREEAMPLCDHGASVSVMSKDVFDKLNFTVLAPTPMRLQLADSSVRYPVGIVEDVPVKIRDFFIAFDFVVLDMDTRKETPLILGSPFLSTAGANIDVGTGSIRFHINGKEAPWSESSTGQTRRTFKRSKWSHPRRIACMRRRLSHLFKGSGSPSSRHDESSTRSSADASMEDADAPRQLLSDADLDLVSDRERQAYYMLSDREYAHTREYSPELLKKIGMDVKFRSIWKAVGWQRFAMKGISRFEKNRFWEDISGAPICKKSRTNDIHNPTLRLMHKWIALTLFPRSDLRPIRRDELIIMFAMVRKIKISPVKCMIRQWLESIKFSALVECTSLITXIYEAGWAPTRDAPGRTQAPRHNIGVSTWSSASEDRWHAPHDIHWXDNQPPRSSGVPPSPSEWRSSSSRWDLGEITRRMDTLDMQTGEIQYNLTEHTAQTQEWQQSADAQFPNINNMMQQQHDDLQAYFRF

SEQ ID NO: 132149 - protein, 336 aa, Oryza sativa
  Clone ID: PAT_MRT4530_34146C.1.pep
MASGPHSDRERQAYYMLSDREYAHTREYSPELLKKIGMDVEFRSIWKVVGWQRFAVKGISGFEKNRFWEDISGAPICKKPMTNDIHNPTLRLMHKWIAMTLFPRGDLRPIRRDELIIMFAMVRKIKIAPVKSARPCIDETYLVQGHILKHGVDGSLIYFFPGCTNEIPLPNAGYHLYNCHELTISLQTIEEFRVGGAYRETRNMTRNERESSSSSTPVQMYEAGWAPAGDAPGWTQALRHSIGVLTWASASEDRWRAPHDIQWGDNQPSRSSGVPPFLDMQMGEIQYNLMEHIAQTQEWQQSADAQFANFNNMMLQQHDDLQAYFRFQGFNPYQGS

SEQ ID NO: 132150 - protein, 283 aa, Oryza sativa
  Clone ID: PAT_MRT4530_34147C.1.pep
MTPVGISHVGRPPSFHDKAFSKPIQGAAQGKRSEPAELNGPAGPRRPKCARAGGEEREGRWTGLTVRGPGWDPLVSGSAHRAEGARGARARAGEGRGARARSAEERRRRAHAQPHGSRWNARTGGADRGRPVPTSAELAPTWRLRGCHAGRREVDDDAGRNGRRTTAASGGANHGDTGESEHTGWLHETRGDEPTARIRRRKLDGGESRRRQPAGREEGNSDEVTRGRFPAVRASTRPRESDASVGLGGATPSEAGDERVLRSSSGDGGEHTAGDGNGRGGAG

SEQ ID NO: 132151 - protein, 597 aa, Oryza sativa
  Clone ID: PAT_MRT4530_34148C.1.pep
MVGGEPLRRRRHLADDGFFRFLLPSPKPATTTTTTPPPAALFVPPHRLIAPPVPLPQPPRPEERLFIVPPTRPSWLPPLSIPPPATATAPPPTRCPPRRMGNGGGGCFGGRSGVVGWRYGGFVGNGGRRGFERRRVGGGFIGAANAGEATGGERRAVVRKREKKVWVAVEKKGEDCGGGDEDQAAMGAGYAGGDERDEQVDVDDDEQDDGDGDDPFDVAADHDLLAVVADGAGSEKPMEQLGSPPDQPPPPPPRQRVGTRRWRVERRHDIDAFTPGLLSLYESLNPSEEHKAKQRQLIESLTNSVSKEWPNAQLHLYGSCANSFGNSHSDVDVCLQIDTAAEENIAELLLALAETLRKDDFDNVEAITSARVPIVKIADPGSGLSCDICVNNLFAVANTKLLKDYAQIDERLLQLAFIVKHWAKLRGVNETYRGTLSSYAYVLMCISFLQQREPKILPCLQAMEPTYTVVVDGTECAYFDQVDQLKDFGAENKESIAELLWAFFHYWAFHHDYRNDVISVRMGNTISKQEKNWTTRVGNDRHLICIEDPFETSHDLGRVVDRQTIRVLREEFERAATILQYDDDPCVALFEPYDYES

SEQ ID NO: 132152 - protein, 512 aa, Oryza sativa
  unsure (1)..(512): unsure at all Xaa locations
  Clone ID: PAT_MRT4530_34149C.1.pep
MARPAQKAAQSARGREEKRXRWTGLTARGPGWDPLVSGSAHRAEGARGARARAGKERGACARSAVDAGAAGPRAASRLAVDRAHAEGPTGVGPTRXAELAPTWRLRGCHVGWREVDDDPAAKGRRAAAASGGANHGDTGKXEHTGRLFVTRGDEPTARIRRRLLDGGGLRRRQPAAGEGENGDEATRGRFPAVRASTRRRELDASVGLDGTTPSEAGDERVLRSSGGDGGEHTASDGNEEEGGAPGVPFRVHERTGSPGAWRWTAEARQSTGAATTGGQAGELALRLASKAATGGDAGERGKRGEKEEKEGEKGARPFADSGKGGGSGATRQRERGSLPPPLGGXRAEWRGPGDDDGDDGGXRFGAARRHGRQARAGXQRVTAAATGRSATRHARAGNNGRRPRGRAXSDGARRRLCERGARARGGGARRGSRTREQRAGGGGKRAGESERERERGREGALGAAAHAHARAACGRGXSGGGERERERESARGEGAGGEMGRAEIGPSNPEEA

SEQ ID NO: 132153 - protein, 176 aa, Oryza sativa
  Clone ID: PAT_MRT4530_3414C.1.pep
VGSVGAWDSELGTDLATGRSKSRLTTRAVFSGVDLANASSTRAAVSPSSLSFSIYASLLSLLHRSERLMRSDRVTIVIAIPFLIAKAAQAAASAAHPPTATGHANLARYGLHTPFSSTTGRGFALAPVQAKVGAPQDIFFFPKSRTRLRQLRWPEQLPGRRVAVSVPGTRARRFIR

SEQ ID NO: 132154 - protein, 213 aa, Oryza sativa
  unsure (1)..(213): unsure at all Xaa locations
  Clone ID: PAT_MRT4530_34150C.1.pep
TNGISKEASSNDSADKEIQPEKTVPQEYCDTRLLLFPQRIRKPSVDEQFARFVEVIQKIHINMPLLDAMQMPTYTRYLKDILNNKRPLPTTEVVKLTEQCSNVVLHKLPEKKKDPRCPMITCSIRAQQFDQALCDLGASVSVMPKAVFDKLXLHGNNNAXEPLLEDVGKITCTGQEVRAAGSEEAIFRTKIKEGVEGKAENARSITSRDGRGV

SEQ ID NO: 132155 - protein, 113 aa, Oryza sativa
  Clone ID: PAT_MRT4530_34151C.1.pep
MKKKDAGVVDDGGNGVRLQDRVAMAEFCWIVLGFFRCTAEGALVRVVAVFYVVVLLPMLCLEVFPRAPPPVSLLNAAMGVLLMYRLYLVLRFEYFEEKKKQEEEDQAAAAAAS

SEQ ID NO: 132156 - protein, 746 aa, Oryza sativa
  Clone ID: PAT_MRT4530_34152C.1.pep
MTGFNLPENFKENPEAFFRSVRPRVAAPQKTLPTEKSAVPAPPTFKTMANKTLREFTAPSADNVAIGPQINMGDVDFDLKSSLIMMAQASPFCGKPNEDANAHLQYTYTIKGVSPDAVRLRLFPFSLLGRAKQWFYANRAAVNTWDKYSTAFLSKFFPMGKTNALRRRILSFQQTRDESIPEVWERLQEYMAACPHHGMDDWLILQNFYNGLTPMSRDHLDAAAGGAFFSKTVQGTIDLIEKMVSNMGWSEERLQTHQRGMHAVKETELLAAKLDLLMKRLDDHEKRPQGTVKALDSHVMCELAQLASLVPANETGRIPGQPDSSIENVKAITMRGGPTYARYLKDILNNKRRLLTTEVVKLIEQCSNLILHKLLEKKKDPGCPTIICSIGAQQFDQALCDLGASVSVMPKDVFDKLNFTVLAPTPMRLQLADSSVRYPVGIAEDVPVKIRDFFITVDFVVLDMDTGKETPVILGRPFLSTAVANIDVGTGSIRFHINGKEEKFEFQPRTEQCSVNFLEKEITMPKHRYWKTPVKPPIPAKKLEQPAQKKPSSAPKPKKVWKEKPKTPAPSPPKMGGTKSEGGNSSNESFKANQNKIFNVNLLCHDHTDRWNPTAKSGAGWAHQGFGRTSDWPGQRSAASLFEAMVSGPHRMRRRLSRLFKGSGSSSSHHDESSTRSSADVSMEDAEALRRLLNDTDLELVSDRERQTYYMLSDQEYAHTREYSPELLKKIGMDVEFHSIWKAVDW

SEQ ID NO: 132157 - protein, 648 aa, Oryza sativa
  Clone ID: PAT_MRT4530_34153C.1.pep
MAQASPFCGKPNEDANAHLQQFLEICSTYTIKGLSFNKMIETQLAQLASLVPANETGRIPGEPDSSIENVKAITTRGGTNGISKEALSNDSVDKEVQPEKTVPQEYCDTRLLPFPQRSRKPSVDEQFARFVEVIQKIHINVPLLDAIVMPKDVFDKLNFTVLAPTPMRLQLPSTPLILGRPFLSTARANIDVGTGSIRFHINGKEEKFEFQPRTKQCSMVRIKYGLNPQNIQEVEVEPPKTDSLVKFMQNFLELETTMPRNCYWKTPGSGSSSSHHDESSTRSSADVSMEDAEALRRLLNETDLDLVNDRERQAYYMLSDREYAHTREYSPELLKNIGMDVECRSIWKAVSWQRFAVVDEPGSRLLTLQFLCSLKEIEDGISFRFFRKKYTVTWKGLSTVTTGINPTGIPFVRVLFLVLGGKTEPQTKPYPLDMWKYGRALQQRPEDRSLWWPRCYYQNHAPRVQPKTILRVLNRGGAEGRGHAGRVHRSGGPNAAASRSTVDRVHPRAHQPMPWVPCVSRTRRNGWLMARPHAAATRRARRRPRWRGRREAAPAPLWSPTAAIGAAERRPREGKGRGKEAAVHGSPRVKGATEEVAGEEGGGGAAQVDGDGGVSAVGELGEAVDGVAAGAKNPEGTTPRRGTVPASG

SEQ ID NO: 132158 - protein, 86 aa, Oryza sativa
  Clone ID: PAT_MRT4530_34154C.1.pep
IPPGGKQPNFIINSQHHISLSGSKPSQKYTLPVQISPFFQYSYIHPLCPHQYLHLYCTLTYIYFTSYTHPHFSSKTLIVVNLTILT

SEQ ID NO: 132159 - protein, 178 aa, Oryza sativa
  unsure (1)..(178): unsure at all Xaa locations
  Clone ID: PAT_MRT4530_34155C.1.pep
MTGFNLPENFKENPEAFFRSVRPRVVAQQKTLPTEKPTVPAPPTFKIMANKTLREFAADNVVVGPQVNIGDVDFDLKFCGKANEDAHAHLQQFLEICSMYNIKGVSPNAVRLRLFPFSLLGFQQTRDDPFRKHGYDCRSTWPPASLWDGRLADPAELLQXLTPMSRDHLDAAAGGAFF

SEQ ID NO: 132160 - protein, 75 aa, Oryza sativa
  Clone ID: PAT_MRT4530_34156C.1.pep
MEEVQIDRELRQCRDDATFGLLWRADCLTNLLHRAQPEFTMEFAVESEELELNPNNKPCMEAATKRNYENEGTQI

SEQ ID NO: 132161 - protein, 113 aa, Oryza sativa
  unsure (1)..(113): unsure at all Xaa locations
  Clone ID: PAT_MRT4530_34157C.1.pep
DIYAVNIHASREYTSITQFDAVTHRYRQLSLLPHLMLQQQMLSPCGEFLRQQCGAGATPFLQTPVCQLRNCQVMQQQXCQQLTMIAQHSDWQAISSVHAIVHELLLQQLASVY

SEQ ID NO: 132162 - protein, 92 aa, Oryza sativa
  Clone ID: PAT_MRT4530_34158C.1.pep
NRSNNFRNIFHGRFAVSCMGHHLDELSRDVIAGYVGIYAFSLTEDPLWLEQPSSKPRPDDVTVHPFILHLVISMTMKVSKPSEKSLVIVLTY

SEQ ID NO: 132163 - protein, 65 aa, Oryza sativa
  Clone ID: PAT_MRT4530_34159C.1.pep
YEQNCTCFYIPSYILLQINRLVSMAQSTHTTCGGYLEDSATRSSGIQELSYTGMIKSSKHLSEQV

SEQ ID NO: 132164 - protein, 573 aa, Oryza sativa
  Clone ID: PAT_MRT4530_3415C.1.pep
MRLTVGQVHRHVLALASSRSCFVLGDNLPLRMLSLPRAVRFHQTAWLGTETVQDKSASLTLASLEGQNKVEYGKKEKATRIGGPKPSSRASALKVKPKVSSFNSKPAKSTLPKSAVVKKTLKIDESLFSAKSFEELGLPPLLIDRLNKEGLSTPTEVQSAAIPIISQKHDAVIQSYTGSGKTLAYLLPILSEIGPLKRPTEQDGSDKRSGVEAVIVAPSRELGMQIVREVEKILGPNDKRLVQQLVGGANRSRQEEALKKNKPLIVVGTPGRISEISAGGKLHTHGCRFLVLDEVDQLLSFNYREDMHRILEHVGRKSGTSSRDILGPLARRSERQTILVSATIPFSVIRAARSWGHDPVLVRAMSVVPLDSITVPRPVLSQTDANPNSPSNSVNQAAVNSLPPSLEHYYCISKAQHKVDTLRRCIHALEAQTVIAFMNNTKPLKDVVFKLEARGMKATELHGDLGKLARSTVLKKFKDGEFRVLVTNELSARGLDVPECDLVINLDLPTDSTHYAHRAGRTGRLGRKGTVVTICEETETFVVRKMRKQLAVPIKPCEFTEGKLLVHNEEDVE

SEQ ID NO: 132165 - protein, 58 aa, Oryza sativa
  Clone ID: PAT_MRT4530_34160C.1.pep
LDEAGGVGEHNGSGDARGSTGGGPLRSLAGGEVSGGNKGRAGGERDSGGQRAHGEGRH

SEQ ID NO: 132166 - protein, 90 aa, Oryza sativa
  Clone ID: PAT_MRT4530_34161C.1.pep
MRWPGDLGVPRHTPRAREACRPEALTQPPRGGADAQHRPIDACGVGACMPRPIGTLPSVPPDESTKISIHLRGNDRDVPRVRRRTALGPT

SEQ ID NO: 132167 - protein, 1071 aa, Oryza sativa
  Clone ID: PAT_MRT4530_34162C.1.pep
MGAITSAELNFLIFRYLQESGFIHAAFTLGYEAGIHKGGIDGNLVPPGALITIVQKGLQYIELEANTDENDEDLAKDFALLEPLEIITKNVEELQQIVKKRKREKTQSDRDKDKGKEKERMEEHERRPGGERERERHDQEKELEKEKDRAERDRDQDKEKEKLHTERIDKVKAEEDSLAGGVVWSFEWRRGWIPWEARRASKSAWSQSSTGTRKWMQYRPAGETSLTLPCQGVLNLIATGPTPMDVFACAWSPAGSLLASGWGGFHAGFSWKPNVSKRVQFPCMSGWSGDSTARIWTIPDGPCGSITQSSPPGVHVLKHFKGRTNEKSKDVTTLDWNGEGTLLATGSYDGQARIWNSDGELKQTLFKHKGPIFSLKWNKKGDFLLSGSVDKTAIVWDTKTWECKQQFEFHSAPTLDVDWRNNNSFATCSTDNMIYVCKIGDQRPVKSFSGHQHSSPAFSKKNSEVNAIKWDPTGSLLASCSDDWTAKTVSVMTFYTNPIPSVVQSYFILSLGGVTRTSHKRCGNQSRVEFCLWNGSDFVSSWLLKHFALYLAWYYAFLADSRNKASRINLIYYFPFPRLLPIAFISALGRRSTKLPKRRLPTSHSYPIRSLPGARDNFVSDHGRNLHCQTTASGTLVPSTSCRTMVDVLASISLLASKIDMVDLSRSVAVATSRITALEQFQVASSTSTSNNAPWLPTRQPTPATIELWRTAGLQHGDAGGNVPRFYKLEFPKFDGKDDSLKTIASSSSRAKRPTTVTVSGWQLTISSVRRKTGTSTTSSSRDRRIGTRSRSSVMVNSVLPYAIILSGLRFVMANGDRLVSPGLCRNLALNIDGEAFSVDCFALDLCAVDIILGMQWLQTLGPILWDFKNMRMAIWRSTREHLLAELEDLFAEPQGLLSARAIDYRIHLKPGATSVAVRPYRYRYPSRHTMIWSMKQDKCVYDFKEHTKEIYTIRWSPTGPGTNNPNQQLLLASASFDSTIKLWEVEQGRLLYSLAGHRQPVYSVAFSPGGEYLASGSLDQCLHIWSVKEGRILKTYRGSGGIFEVCWNKEGSKIAACFSNNTVCLMDFRM

SEQ ID NO: 132168 - protein, 1201 aa, Oryza sativa
  Clone ID: PAT_MRT4530_34163C.1.pep
MGAITSAELNFLIFRYLQESGFIHAAFTLGYEAGIHKGGIDGNLVPPGALITIVQKGLQYIELEANTDENDEDLAKDFALLEPLEIITKNVEELQQIVKKRKREKTQSDRDKDKGKEKERMEEHERRPGGERERERHDQEKELEKEKDRAERDRDQDKEKEKLHTERIDKVKAEEDSLAGGVVWSFEWRRGWIPWEARRASKSAWSQSSTGTRKWMQYRPAGETSLTLPCQGVLNLIATGPTPMDVFACAWSPAGSLLASGWGGFHAGFSWKPNVSKRVQFPCMSGWSGDSTARIWTIPDGPCGSITQSSPPGVHVLKHFKGRTNEKSKDVTTLDWNGEGTLLATGSYDGQARIWNSDGELKQTLFKHKGPIFSLKWNKKGDFLLSGSVDKTAIVWDTKTWECKQQFEFHSAPTLDVDWRNNNSFATCSTDNMIYVCKIGDQRPVKSFSGHQHSSPAFSKKNSEVNAIKWDPTGSLLASCSDDWTAKTVSVMTFYTNPIPSVVQSYFILSLGGVTRTSHKRCGNQSRVEFCLWNGSDFVSSWLLKHFALYLAWYYAFLADSRNKASRINLIYYFPFPRLLPIAFISALGRRSTKLPKRRLPTSHSYPIRSLPGARDNFVSDHGRNLHCQTTASGTLVPSTSCRTMVDVLASISLLASKIDMVDLSRSVAVATSRITALEQFQVASSTSTSNNAPWLPTRQPTPATIELWRTAGLQHGDAGGNVPRFYKLEFPKFDGKDDSLKTIASSSSRAKRPTTVTVSGWQLTISSVRRKTGTSTTSSSRDPPDRDTFKELCHGQFGPPIRNNPLGGHESCSCMSARWSSTMGRHKVLSSALLLRRGASSVTCARTSNQGSASRNPSRCAPQQQFRRLSPAELVERCLQGLYYHCDEKFVCGHKCARLFYIEYDDSTDDDGANDDAVPQVNTLSGIDGASTMRLPGLRFVMANGDRLVSPGLCRNLALNIDGEAFSVDCFALDLCAVDIILGMQWLQTLGPILWDFKNMRMAIWRSTREHLLAELEDLFAEPQGLLSARAIDYRIHLKPGATSVAVRPYRYRYPSRHTMIWSMKQDKCVYDFKEHTKEIYTIRWSPTGPGTNNPNQQLLLASASFDSTIKLWEVEQGRLLYSLAGHRQPVYSVAFSPGGEYLASGSLDQCLHIWSVKEGRILKTYRGSGGIFEVCWNKEGSKIAACFSNNTVCLMDFRM

SEQ ID NO: 132169 - protein, 343 aa, Oryza sativa
  Clone ID: PAT_MRT4530_34164C.1.pep
MAGSKAAGRGGRPLLGGGGGKRGGGGGGGGGGGGKSSSYTTTVILAALLLASVALLLLVALGALSLPSGGGVGVGHAGIGLPRPRPRFRRSAAFESGLEMRGGEKGEPWTEVLSWEPRAFLYHNFLSKEECEYLISLAKPHMKKSTVVDASTGGSKDSRVRTSSGMFLGRGQDKIIRTIEKRISDYTFIPVENGEGLQVLHYEVGQKYEPHFDYFHDEFNTKNGGQRIATLLMYLSDVEEGGETIFPSSKANSSSSPFYNELSECAKKGLAVKPKMGDALLFWSMRPDGSLDATSLHGEIPILWLLTNSNLSMLLLKERKEKRSFLAHVEDFNFSIEKHYNFF

SEQ ID NO: 132170 - protein, 151 aa, Oryza sativa
  unsure (1)..(151): unsure at all Xaa locations
  Clone ID: PAT_MRT4530_34165C.1.pep
KKKTENXKIGXSPRXXLRXXRXWSXXSGLXMXXVXGGXGFXAGLQXXDPXRGQGGRPPNLXGDGGVRXXPAXXXDXASPRXSXRHPGKGGEEQWPARXFRQIXRPCDSXXPQGRGGAAGRXSXMCXGRRXPQHRACLPPSXTTXPAXGEGG

SEQ ID NO: 132171 - protein, 117 aa, Oryza sativa
  Clone ID: PAT_MRT4530_34166C.1.pep
RIATLLMYLSDVEEGGETIFPSSKANSSSSPFYNELSECAKKGLAVKPKMGDALLFWSMRPDGSLDATSLHGGCPIQRLLTNSNLSMLLLKERKEKRSFLAHVEDFNFSIEKHYNFF

SEQ ID NO: 132172 - protein, 337 aa, Oryza sativa
  Clone ID: PAT_MRT4530_34167C.1.pep
MAPPTLRKPPATFAPPPSVLRNSRPAPKAPAAQPPPPPTLPIETTTSTSFQPALVAVQSTVMEEYDPARPNDYEDYRKDKLKRAKEAEVRKELERRRREEEERERERELREREGRDALNISGEEAWKRRAAMSGSAAPRPSSSPPHGDGFAIGNSSSSGLGLGAGGQMTAAQRMMARMGWKEGQGLGKQEQGITAPLVAKKTDRRGGVIVDENSSKQEKKPKSVNFDGPPTRVLLLRNMVGPGEVDDELEEEVASECSKYGTVLRVLIFEITQADFPAEEAVRIFILFERAEEATKAMIDLEGRFFGGRVVRATFFDEERFGKNQLAPMPGEVAGFD

SEQ ID NO: 132173 - protein, 100 aa, Oryza sativa
  unsure (1)..(100): unsure at all Xaa locations
  Clone ID: PAT_MRT4530_34168C.1.pep
MMVVAVGMVGIALQPSLGSDPSHPPETLHPTVLGXFGRTPWFGRTKGWPNQPRFWLAASSVVSLCRLVNFGPIHRVISEFLAHSYISLILNIVRLIYRLI

SEQ ID NO: 132174 - protein, 63 aa, Oryza sativa
  unsure (1)..(63): unsure at all Xaa locations
  Clone ID: PAT_MRT4530_34169C.1.pep
ALRQKPFMSVSSILRHSRYGIWPFRPSIWRGDWQETIILLRRQLHIRMVPFMMLETAPXLMLG

SEQ ID NO: 132175 - protein, 275 aa, Oryza sativa
  unsure (1)..(275): unsure at all Xaa locations
  Clone ID: PAT_MRT4530_3416C.1.pep
MRILTSQEHELKNSVKQALAKLLREEEFKWYQRAKTKKIMEGDNNTKYYHMIANGKHRKTKIFQLDLEEGVIKGDEELRKYITKFYKNLFGAPERNNFSMFEDQKDDIPQVTVTENEMLTREFSEEVKIAIFQMEHNKAPGPDGFPGKFYQVFWDVIKDDLTAVFRDFHGGNLSLESLNFGIITLLPKNKEARKIQQYIPICLLNVSFKVFTKVMTNRVSLVAQNVIKPSQTAFLKGRNIMEGAIILLETLHEMHRKKLDGVILKLXFEKAYDKI

SEQ ID NO: 132176 - protein, 165 aa, Oryza sativa
  unsure (1)..(165): unsure at all Xaa locations
  Clone ID: PAT_MRT4530_34170C.1.pep
MFLTGTKMFKKHKNMIFGHIXCIGCVRSKNPLRDSRCELLSINAIIGTRGCDIFDRNDKVQKTPKHDFWTYWSVLGAFVAKTHFVILSANFCQLMPILAYIGTEGCDVFDRIEKVQKAPKQDFWTYWSVFGAFVAKTHFAIRAVNFCQLMPILAYIGPRGCDVFE

SEQ ID NO: 132177 - protein, 45 aa, Oryza sativa
  Clone ID: PAT_MRT4530_34171C.1.pep
MAPSYRPYSGEYQYGNGNAVVPYGGGGERRMKAVCRWVPGAWWLS

SEQ ID NO: 132178 - protein, 111 aa, Oryza sativa
  unsure (1)..(111): unsure at all Xaa locations
  Clone ID: PAT_MRT4530_34172C.1.pep
MLYTNMVYLCIYGQFLYTLRKSIAWQKXESIHGRTPTRTRLGRYHIVWGPISPSSTXRSIDPRYKRDPPGGPKASNLTANTSTTAYEVGAYRSQIAGXSSRTNSTMVSSAS

SEQ ID NO: 132179 - protein, 131 aa, Oryza sativa
  Clone ID: PAT_MRT4530_34173C.1.pep
MAVVVLSEMGHAYAGAMGGLWALPCGSTDDIERLAENCRDDTFLGSARHDYSLFVNVYFVFTNMSNTGDNGNTRDKEKEASVNTNGGNTVSNSSGGPFLGTRVLGGGAAAGCESKGEWQRGCNACRRGSPA

SEQ ID NO: 132180 - protein, 526 aa, Oryza sativa
  Clone ID: PAT_MRT4530_34174C.1.pep
MDVVPLPLLLGSLAVSAAVWYLVYFLRGGSGGDAARKRRPLPPGPRGWPVLGNLPQLGDKPHHTMCALARQYGPLFRLRFGCAEVVVAASAPVAAQFLRGHDANFSNRPPNSGAEHVAYNYQDLVFAPYGARWRALRKLCALHLFSAKALDDLRAVREGEVALMVRNLARQQAASVALGQEANVCATNTLARATIGHRVFAVDGGEGAREFKEMVVELMQLAGVFNVGDFVPALRWLDPQGVVAKMKRLHRRYDNMMNGFINERKAGAQPDGVAAGEHGNDLLSVLLARMQEEQKLDGDGEKITETDIKALLLNLFTAGTDTTSSTVEWALAELIRHPDVLKEAQHELDTVVGRGRLVSESDLPRLPYLTAVIKETFRLHPSTPLSLPREAAEECEVDGYRIPKGATLLVNVWAIARDPTQWPDPLQYQPSRFLPGRMHADVDVKGADFGLIPFGAGRRICAGLSWGLRMVTLMTATLVHGFDWTLANGATPDKLNMEEAYGLTLQRAVPLMVQPVPRLLPSAYGV

SEQ ID NO: 132181 - protein, 100 aa, Oryza sativa
  unsure (1)..(100): unsure at all Xaa locations
  Clone ID: PAT_MRT4530_34175C.1.pep
MRTGRGARRWVAGATTRMVTALXTDPQQISKDYDYCKDRKDLHRPELEGHFRKNPLGGESTILRGLEECLRFIANYKLTETEITGLGPVQHTREDRFFEY

SEQ ID NO: 132182 - protein, 239 aa, Oryza sativa
  unsure (1)..(239): unsure at all Xaa locations
  Clone ID: PAT_MRT4530_34176C.1.pep
KGISWFEKNRFGEDISCAPICKKPRTNDIHNPTLRLMHKWIAMTLFPRSDLRPIRGDELIIMFAMVRKIKIAPMKCIIRQWLESIKFPIPVECTSLITRIAKGLGVVSNQIAFISATRPCIDENYLVQGHILKHGVDGSLIYIFPGCTNEIPLPNAGYHLYNCHKLTIPLQTIEESRTGGAYRETRNMTRNERENSSSSIPVQMYEADWAPTXDAPGWTQAPRHSIGVSTWGFNSYQGP

SEQ ID NO: 132183 - protein, 689 aa, Oryza sativa
  Clone ID: PAT_MRT4530_34177C.1.pep
MLGPFRWCSIDGLAAAVAARRAPCQASSPRARRPPRRAAPLPATRGGRNMEGRRVARCRPSAVWCCGGGSGARRLGGGAAASWAAADPRARWVREWNRAYLLACAAGLMVDPLFLYAVSLSGPLMCVFLDGWLAAAVTALRCMVDAMHAWNIVTQLRVSRAGRERACAAGPDEEQPEDNTPFINRLKSVHVKNEVVVWVAAPAMIRAGSTTAVMTVMLVAFMLEYLPKIYHSVVFLRRMQNQSGHIFGTIWWGIALNLIAYFVAAHAVGACWYLLGVQRATKCLKEQCLLAGLPACASSTAAVACVDPLYYGAAVASVGGDRLAWGGNATARNVCLSSGDNYQYGAYKWTVMLVSNPSRLEKMLLPIFWGLMTLSTFGNLESTTEWVEIVFNIMTITGGLILVTMLIGNIKVFLNATTSKKQAMQTRLRGLEWWMEHKGVPHGFRQRVRQFERQRWAATRGVDECQIVRDLPEGLRRDIKYHLCLDLVRQVPLFHHMDDLVLENICDRVKSLISPKGEIIVREGDPVQRMLFIVRGHLQCSQVMRNGATSWCTLGPGNFSGDELLSWCMRRPFMERLPASSSTLVTAESTEAFGLEAGDVKYVTQHFRYTFTSDKVRRSARYYSHGWRTWAAVAVQLAWRRYKHRKTLASLSFIRPRRPLSRCSSLGEEKLRLYTAILTSPKPNQDDDF

SEQ ID NO: 132184 - protein, 114 aa, Oryza sativa
  Clone ID: PAT_MRT4530_34178C.1.pep
GVTVSYDFYHVSYDTREVSCDTYQVSDDFYHVSCDTREVSCDTCKVSDDFYHVSRDTREVSCQVPTISAMYHVILTRYRMIPTRYQVIPARYNWTSRWGEEHPDARPATCSRPL

SEQ ID NO: 132185 - protein, 647 aa, Oryza sativa
  unsure (1)..(647): unsure at all Xaa locations
  Clone ID: PAT_MRT4530_34179C.1.pep
MATIDTTITHIMDEQDDIKIKSSKCWNPIRPPATLLTSNGYRICIRPPFSAHEYLMESSRSPLSNRSGLISRLHLVWPQIQKQGAASPVMGQWTCNFVWDPGPXWGPCGVRPNQVEDDLEVLPPPXIARNRVDLHRQDQQPTERCIDRXGATQRLVRSTHRKIGPTTALSDEWNSGFIRWYQSFRCSRLVRLEFRVLVTFCTTVIIVVVCFGKQDGHAQCQHLHHQRDIATSSRMILTYNHIGQLFMLACIVERKILENPTEQQDMLVPPITDVLQEVQKSLQNEKNDMFEMSLPSLANEEKADAATLSEEGIKGKLNGAEITQGEYASNELHFSTFHADLEQTLVEPTSELPLSQVDLHSVPCDKEELCDSTSLISMPXLVNKHTISSVSLCANFKHVVHIDDEVEESELRSSFNILGYVHFDDFCELDNLKEKLFAKSDLPCPTNAIFHIFGEYNDRGIYLVHRVFICSDLEKHVIANHTTSSFSSFDWMKQVILNGLCGEHHMEKPRTVFREEGEDDVTMATTDTTIAHIMDEQDDIKIKSSKCWNPIRPPATLLTSHGYRICIRPPFLSHEYLMESSRSPLSNRSGLISRLHLVWPQIQKQGAASPVMGQWTCNFVWDPGPXWGPCGVRPNQVEDDLEVLPPP

SEQ ID NO: 132186 - protein, 402 aa, Oryza sativa
  unsure (1)..(402): unsure at all Xaa locations
  Clone ID: PAT_MRT4530_3417C.1.pep
NSKDRWLPDQVSLFQSLPREKTGRXAAAPAAAASPPAGYDGGEGATXAXXXXXXPPLPQSGLQIWRREGAPTIXAVXRHHASLPAPPLSPLPDLTGWRRRPCQAGAGAAALSAPRPHHGTNLEAPPCAARHLAEAAAAAVAAVAADHDPAAAAARSRDALRRLRRRSPPLRRPRHRRREPPLVRAPPLLRRRRLWPLRLRRLLLLAHLPHDHGTPPPLDLRELLFAHRRRSSSVTRSVVLPIAGSTAAVLLIARSATTVLPTTGFAIAESPTIVVAVAEPAAAAAGTARGGRHRRRIHPRTKPTPPSPSTPTGRGRGGGTAVAAVSAAPRRRCAMPARREGEPPPLAWGRAPPPLAWGKPPPPPQPSATAALRRRRRSPPSPRRAGEKGKGSGPRGGKAGMR

SEQ ID NO: 132187 - protein, 971 aa, Oryza sativa
  unsure (1)..(971): unsure at all Xaa locations
  Clone ID: PAT_MRT4530_34180C.1.pep
MSIGNMLADLSSVNGYHEGLPMVFAHIATYAALALPPTVDVRHHSRRGQEDLDHLVIFGAMNPATSANGAAAIIDPPSRTSRNCEYILVAVDYVSKWVEAKLCSAADAKHDKNMFLEIIFPRFGTPRLVISDGGLHFIDETFRHLLRDMGAKHNVATPYYPQTSGQAETSNKQIKNILQKTVNKMGIGWKDKLPDALWSYRTAFMTPIGMSPYHIVYGEWRKMQLAELEEWREKVYHNSKIYTERTKRWHDKQIKIKKFKPRDKASPFCGKPNEDANAHLLQFLEICSMYTIKGVSPDAVRLRLFPFSLLRRAKQWFYANCAAINTWDKCSTSFLSKFFPIGKTNALRGRISRFQQTRDESIPEAWERLQEYVAACPHHGMDDWLILQNFYNGLTLMSRDHLDAAAGGAFFSKTVQGAVELIEKMVSNTGWSKERLQTRQRGMHTVKETELLAAKLDLLMKCLDDHEKRPQGTVKALDSHVTCEVCGGTGHSGNDCLETHEEAMYMGKNNEYRPQGGEGWNQPRPYYPGGNNNGNFSNQPSLMDLVFAQAKTTDALRKKLAANDKILENINVKLDGFASAFQNQLSFNKMIETQLAQLASLVPANESGRIPGQPDSSIENVKAITTRGGKSTRDPPYPNPAGTNGMSKETPSTDSDDKEIQPDKTVPQEYCDTRLLPFPQQSRKPSVDKQFACFVEVIQKIHINVPLLDAMQVPTYARYLKDILNNKRPLPTTEVVKLTEHCSNLILHKLPEKKKDPGCPTITCSIGAQQFDQALCDLGASVSVMPKDVFDKLNFTVLAPTPMRLQLADSSVHYPVGIAEDVPAKIRDFFIPVDFVVLDMDTGKETPLILGRPFLSTAGANIDVGTGSIRFHTNGKEEKFEFQPRMEQCTMVRIKYRPNPQNIQVVDVEPPKTDSLXRYWRTLVKSPAPAKKLEQPAQTKPSSAPKSKKVWRKKPKTPAPSPPEMGGKSTN

SEQ ID NO: 132188 - protein, 542 aa, Oryza sativa
  unsure (1)..(542): unsure at all Xaa locations
  Clone ID: PAT_MRT4530_34181C.1.pep
MTTMDTTITYIMDEQEDIKIKSSKCCNPIWPPATLLISNSRXIYIRPPFSARXGTIIISCLKNGRKXKKKRKAASKIKKEKERKEKKRVRKKKKKRENELLSLIELPLPYFEGNYDPRAYIDWELAVDSEFKKHGLSEKQNVKYASSVLLKNASYDWKHLCRHCKIPQPXKDLKQYLGDADIVFNKPQCLKHDNRTVSSYYNDVHTCLLHCGLDECEEATELRFSRRLNKXIQDMLACQRYKSLSHLLQLSCNVEKQIEDMNKQQVVPVPPVTNILQEVNNRNKEERIMTELLFSSLQLKSNAPPSSKKSIKGKLNDVEINKGECPIKQPLVEIPLSQVDLIIVLCDKEELCDNSSPISMPQLVNEHAIPIVNSYCADFKHVIHIANEEEEHDLLSSLNTLGYVXFDDFXEFDNLKEKLFAKFDLPCPTNIISHIFGEYNDRRIYLVHRVYIYLDLEPPVDVDKICNLESHFVANQFTSSFSSFDWMKQIILNGLCEEHHMEKPRTVFHEEGEDDVTMATMDTTITHIMDEQEDIKIKSSKC

SEQ ID NO: 132189 - protein, 624 aa, Oryza sativa
  unsure (1)..(624): unsure at all Xaa locations
  Clone ID: PAT_MRT4530_34182C.1.pep
MASKTLREFAAPFADNVAIGPQVNIGDADFDLKSSHITMAQASPFCGKPNEDANAHLQQFLEICSTYTIKGVSPDVVKLRLFPFSLLGRAKQWFYANRTAVNTWDKCSTAFLSKFFPMEAWERLQEYVAACPHLGMDDWLILQNFYNGLTPMSRDHLDAAARGAFFSKTVQGAVELIEKMVSNMGWSEERLQTRQRGMHTVKETELLAAKLDLLMKRLDDHEKGPQRTVKALDSHVMCEVCGNTGHSGNDCLETCEEAMYMGNNNGYCPQGGQGWNQPRPYYQGVPANETGRIPGQPDPSIENVKAITMRRGKSTRDPPYPNPVGTNEISKGAPSNDSADKEVQPENTVPQEYCDTRLLSFPQRMRKPSVDEQFARFVEVIQKIHINVPLLDAMQVPTYARYLKDILNNKRPLPTTEVVKLTEQCSNLILHKLPEKKKDPGCPTITCSIGAQQFDQVSCNLGASVSVVLKDVFDKLNFTVLAPTPMRLQLADSSVRYPAGIAEDVPVKIRDFFIPVDFVVLDMDTGKETPLILGRPFLSTAGANIDVGTGSIRFHINGKKEKFEFQPRTEQCSMVRIKHXFLEKETTMPRNHYWKMPVKSPVPAKRLEQPAQKKPPSAPKSKKV

SEQ ID NO: 132190 - protein, 61 aa, Oryza sativa
  Clone ID: PAT_MRT4530_34183C.1.pep
MARRSSGAISSVVNPLLALEEWGPGTEGAKGMIKVSGYETMVGYDYDTRVAVPLVRKRMMR

SEQ ID NO: 132191 - protein, 73 aa, Oryza sativa
  Clone ID: PAT_MRT4530_34184C.1.pep
MAGLLPNHTFPIAMGHAFPLLPLLRQDQLSPERGEDGNAAGEGIIVDVDNKMEAPMYLDDVMAPGGQLLQSAI

SEQ ID NO: 132192 - protein, 108 aa, Oryza sativa
  Clone ID: PAT_MRT4530_34185C.1.pep
MARTRNGEDWGGKEEGRAPGALRAAMSEEGSGASRQREEGLCLRPLAACARSGGAEAMTTAMTAGRFGAERRHGRQVRAGAAEGDGDGDQAVGHHGTRARDATGGAAD

SEQ ID NO: 132193 - protein, 939 aa, Oryza sativa
  unsure (1)..(939): unsure at all Xaa locations
  Clone ID: PAT_MRT4530_34186C.1.pep
MGKVDQRGRWAPPGYQMTAMGRNRVSKGNRSLGTSSSADWLLLKRVVSFSHQLPSVPYNAFNPPLAELILQLPNVDLHGVLKAKLPGARRSNPSSELAANSETAREKTGSAAATRTEPFKEDHPIGSQSATGEAETSDEPPTGNQSASAETSTNQEPLTGNQPGEDTENPEQPNKDIPETEGQASSPPLNQDADAGPEASTFDKVEGPARPPPRIITGPMISDEEEILRIRSAEDSRPPILVKWWDDEMQPQGIVINKPLEDEEVSLLTKTLNQATRLANRIHLWNEAKTATLEKLVPHLGTLEETRDKLHETKKEARRTEHTLRDRIAELQEANFELSGSSKVQAAKIVELERQVSIWVVHDWFQPAGKLQRKSRSFLPERQATSRCSAESSTDRETSRTSATNLQDYGQQDSASSLLPLLTMWPLGRRLTPMSRNHLDAASGGAFFSKMVQGAVELIERMVSNMGWSEERLQTRQRGMHIVKEMELLAAKLDLLMKRLDNHEKRPQGTVKALDSHVTCEXTREEAMYMGTTTGXPQGSQGWNQPRPYYKGGNNNGNISNQPSLKDLVFAQAKTTDSLSKKLAANDKLSFNKMIETQLAQLASLVPANETGKIPGQPDSSIENVKAITTRGVKSTRDLPYPNPAGSERMSKEAPSSDSADKEVQPEKTVPQEYCDTRLKPFPQWSRKPSVDEQFACFVEVIQKIHINVPLLDAMQVPTYARYLKDILNNKRPLPTTEVVKLMEQCCNLILHKLPEKKKDPGCPTITCSIGAQQFDQALCDLGASVSVMPKDVFDKLNITMLSPTPMRLQLADSSVRYPAGIAQDVPVKIKDFFIPVDFVVLDMDTGKETPLILVRPFLSTTGANIDVGTGSIRFHINGKEERFEFQPRTEQCSMVRIKYGPNPQNIQVVEVERPKTDSLVEFMQNFLEKETTMTRNRY

SEQ ID NO: 132194 - protein, 625 aa, Oryza sativa
  Clone ID: PAT_MRT4530_34187C.1.pep
MRREYVAHARGRGRDAAHARGSRWTRAELAPTWRLRGCHAGRREVDDDPAANGRRAAAASGGANHGDTGKSEHTGRLLETRGDEPTARIRQREFDGGESRRRQPAGREEGNADEVTRDRFPAVRASTRLRELDASVGLDGATPSEAGDVRVLQSSSSDGGEDTASDGNGSSDATVVDELALLSFKSMLSGPSDGLLASWNTSIHYCDWTGVVCSGRRQPERVVALLMNSSSLSGRISPFLGNLSFLNRLDLHGNGFIGQIPSELGHLSRLRVLNLSTNSLDGSIPVALGRCTNLTVLDLSSNKLRDKIPTEVGALENLVDLRLHKNGLSGEIPLHISNLLSVEYLYLRDNWFSGEIPPALGNLTKLRYLDLASNKLSGSIPSSLVLSVQVNMLSGTIPPNAFDSLPRLQSISMDTNKFEGYIPASLANASNLSFVQLSGNSLRGIVPPKIGRLSNINWLQLSNNLLQAKETKDWNFISALTNCSQLEMLDLGANNLEGWLHPDKNDQTDQRYLSLLERVCVLLDVAYGLDYLHCHGPTPVVHCDLKSSNVLLDADMVAHVGDFGLAKILVEGSSMFQQSTSSMGFRGTIGYAAPEYGAGNMVSTNGDIYSYGILVLETVTGKKPA

SEQ ID NO: 132195 - protein, 904 aa, Oryza sativa
  Clone ID: PAT_MRT4530_34188C.1.pep
MAEFSSAKCCMKSRRTPEATWCDFGVMNEEKRARVGDTAETPRKSPRLDRPAAAAAAAAPLTSNGVMGEKKKKNATRDVSDWCWWGKAAALLSGGDRRTRRCRHVLCEQADIDVAITLIKTRVDTPVCCVNKCDDTEGREISVCLDCQLSFCTAHGKPHVFMNDHWIALVYKRPNVAHCFACEECYFIRTDSLGEGMAVGENGFSIGTHKKDEKGMTTVNNEAGVHASMVSDYESALMVALLSDVGTPRCRHDMYNKDEVDLVQRRIMFCDITRMCSDCDNISVLMIFVCLGCEKPFCTVHSSLHAESTKHLVGLVYHNPYVACCFLCSETFVLIGEGDKRMPVDKAAGGYASESVIGHAHAIKGIPNLGNTCYLNSLMQCLLVLGKLRARMLGPDAPSGTLGTALHDLFEQTYSVNNATGLLETSLLLDCVCNLDPQFVGGFMHDNHELLCCLRKNLDEEERMRTPPNMQDSSAGAVPPTVFNSIFGGQLFVTRSCKCCSFCSVSHAVFYDLSVPVPPKKPPAKSVESTPWIEGHRSQPKICINQFEAIHKRNTEKTHRIVEDADSDPASELKDMVMVKTSEPLEVDYTEVEQISQSKDYVQDPQNVLADVKTAGMDATTTDTRIPEYIGPHPPVSQLREENAQLESCNDVGKDGNAILEMIEWTCENCSKGARKSDVTEGTYSEQMLSSTNEDTAVGGYQREQSEKITCQSEQSNKKPECPEGVQDAVPHCVPAERQDNLLSSQDQNATTLDEGRGKQKLHHSAHQVEECQNEQKDRNKGATQTRISKLPLVLTIHLMRSLLGPDKVMGHVSFKEILDMGLFMDPSSEDKDNSIYRLAGVIEHHGRGKDSGHFVAYVRPSPRQQTNGSSSWFCASDTDIREVSLEEVLKCEAYLLFYERMEG

SEQ ID NO: 132196 - protein, 503 aa, Oryza sativa
  Clone ID: PAT_MRT4530_34189C.1.pep
MTWCNSFNDVRAVENNLATAAAVAAAKKQQQQQQVSQHVNLIKTCPSCGHRAQYEQAAAAATIQDLPGLPAGVKFDPTDQELLEHLEGKARPDARKLHPLIDEFIPTIEGENGICYTHPERLPGTRQDIGTGVGKDGLIRHFFHRPSKAYTTGTRKRRKVHTDEQGGETRWHKTGKTRPVFTGGKLKGYKKILVLYTNYGKQRKPEKTNWVMHQYHLGSDEEEKDGELVVSKVFYQTQPRQCGGGSAATAKDLSVDLVAGNNIKASNAAAEHHHNDGVGGGGHGGNNSSMLKEAAGIVDFYNPAAALIGYSQAAPNNRAAASAHLTMPNFEAQDVQRWLALLEIWSLILEILALRAELAPTWRLRGCHAGRREVDDDPAANGRRVAAASSGANHGDTGKSEHTGRLHVTRGDEPTARIRRRLLDGGGLRRRQPAAGEEGNGDEVTRGRFPAVRASTRRRELDASVGLGGTTPSEAGDERVLRSSGGDGGEHTASDGNSRGGAG

SEQ ID NO: 132197 - protein, 157 aa, Oryza sativa
  unsure (1)..(157): unsure at all Xaa locations
  Clone ID: PAT_MRT4530_3418C.1.pep
TAPPPPPAASPAGAASGPCASSSPATTSVAPPPPPPPTXHGTPPPXRPSRAPLRTPPPXPPPSPDPXSPPXSLDPPLQSSSSLDPPPPSSPPLDLPSPSPPPSSSPLLSPPLSPSPESSRGPRTKPTPPSPSTPTGRGRGGGTAVAAVSAAPRRRCA

SEQ ID NO: 132198 - protein, 35 aa, Oryza sativa
  Clone ID: PAT_MRT4530_34190C.1.pep
PPQHGHSGAPALSFGINCQGSPDLLCSLYQMKEKG

SEQ ID NO: 132199 - protein, 180 aa, Oryza sativa
  unsure (1)..(180): unsure at all Xaa locations
  Clone ID: PAT_MRT4530_34191C.1.pep
MDVEFCSIWKAVGWQRFAVVDEPGSRLLTLQFLCTLKEIEDGYHLYNCHELTIPLQTIEESCAGGTYRETHNMTRNKQGSSSSSTPVQIYEAGWALSGDAPGWTQAPRHSIGVSTWASASEDRWHAPHDIHWXDNQPSRSSGVPPSPSEWRSSSSRWDLGEITRRMDTLDAQTGEIHPRQ

SEQ ID NO: 132200 - protein, 278 aa, Oryza sativa
  unsure (1)..(278): unsure at all Xaa locations
  Clone ID: PAT_MRT4530_34192C.1.pep
MGRPAQKAAQXHARGRGGEREPVDRVHPAWSRVGPVCRRLTSPRAXGSGRETRCMRAVRGGXRCGGPTSSLTAHRGPCARGRGRKRRERLAGSADPVAAEVAPTWRLRGSDTGRREVGDNADRNGRRTTAASGGANHGDTGESEHTGWLHETRGDEPTARIRWREXRRRQPAGREEGNGDEVTRGRFPAARTSTRLRESVRPMRGKQRAARRFERRGLGTCAGSRGRAAARQGSGAGRRRRRRRGTGGDHAGAREAAAREWRGRARLGAAHAHARAAR

SEQ ID NO: 132201 - protein, 698 aa, Oryza sativa
  unsure (1)..(698): unsure at all Xaa locations
  Clone ID: PAT_MRT4530_34193C.1.pep
MAQASPFCGKPDEDANAHLQQFLEICSTYTIKGVSPDAVRLRLFPFSFSGERSSGSMPTLLLSIPGTNALRHSSRNSSRWAKPMPFVEGFQVSSRQGMSLFRKHGNDCKSHSGNDCPGTHEEAMYMGNNNNGYHPQGGQGWNQPCPYYQGVIQKIHINVPLLDTIQMPTYARYLKDKLNNKRPLPTEVVKLTEQCSNIILHKLPKKKEDPGCPTITCSIGAQQFDQALCDLGANVSVMPKDVFDKLNFTVWAPTPMHLQLANSSVRYPVGIAEDVPVKIRDFFIPVGFVVLDTDTGKETPLILGALSLAPISWRRKQRCPGTLVKPPIRAKKLEQLAQKKPPSAPKPKKVWREKPKTPAPSPPETIENPQTELDGEIEDGISFHFFREEFTLTWKGLSTLLGFHDSCKIDLQKGISGFEKNRFREDISGAPICKKPRMNDIHNPTLRLMHKWIAMTQFPRGDMRPIMGDELIIMFAMVRKIKIAPVKCMIRQWLESIKFSAPVECTSLNTRIAKGLGVVSDQIAFISAARPCINEAYPVQGHILKHGVDGSLIYFFLGCTNEIPLPNVVYHLYNCRELTIPLQTIEESRVGGAYRETRNMTRNELECSSSSTPXQMYEAGWEPTGDAPGWTQARRHSIGVSTWASASEDRWHAPHDIXWGDNQPSRSSGVPPSPSEWRSSSSRSDLGEITWRMDTLAL

SEQ ID NO: 132202 - protein, 71 aa, Oryza sativa
  Clone ID: PAT_MRT4530_34194C.1.pep
LPLSPPPHHLTLPTQLRPLALLQSTTIPESHGVGARRKSHPRSLTPYSPRARNFLAGSPKHPEFRDRRFRV

SEQ ID NO: 132203 - protein, 90 aa, Oryza sativa
  Clone ID: PAT_MRT4530_34195C.1.pep
PSALFPPASEEFSSVEHTVYPPICHKEVAKHTIQYGLQFVASFFFVSFETMQHVTWMSRDFRDKLGDDLEDTNGDEFTSPLCSRFVAHHS

SEQ ID NO: 132204 - protein, 50 aa, Oryza sativa
  Clone ID: PAT_MRT4530_34196C.1.pep
MALWPRTSPAIGGFKLVDDDDPEGDEQPRNPGKWKLEKELTFIQLGTAGG

SEQ ID NO: 132205 - protein, 156 aa, Oryza sativa
  Clone ID: PAT_MRT4530_34197C.1.pep
ASGGCNDLMYSGHMLVAVLTAMAWTEAYGGWISVAIWLLVLHSAQREIRERHHYTVDCVVAIYVGILLWRMTRFIWSARDASRARRLAKLDEVHNRLIHAAKDSDVDEIRGLLKEVELAGQEKQGVSQRAILAFAAATIIFTLTCVVLALTLTSDG

SEQ ID NO: 132206 - protein, 52 aa, Oryza sativa
  unsure (1)..(52): unsure at all Xaa locations
  Clone ID: PAT_MRT4530_34198C.1.pep
RSVPLPPFGDLYFDRNLAPAPALLAFNVPSRYGISPRYYGAPXPLPTLGGVL

SEQ ID NO: 132207 - protein, 257 aa, Oryza sativa
  unsure (1)..(257): unsure at all Xaa locations
  Clone ID: PAT_MRT4530_34199C.1.pep
MAAGRHSRLRFDLPRGRLPPLIYKMEPPRRTSRHDRAPSGCAVATLGLAXGVATTAPPPAAPSVVPEHRPTSPPPPSTSQRRPLLWLLLCFAQKTAASRRQPLHPPRRSPFGRPFLLARATVGRTSTTFSITAARSSSASPPLHPNPAGLCRRPLVVPGCARRRPSLRQAVLVRRLRPSSKPLQPRRRLRPRLRVVKPCAGLVSSSSKDRRRSSPLAVRLRRPRAVSTAPARRRRFAPRCMVLCLCASCSFCCSGGS

SEQ ID NO: 132208 - protein, 501 aa, Oryza sativa
  unsure (1)..(501): unsure at all Xaa locations
  Clone ID: PAT_MRT4530_3419C.1.pep
MAIDLNILAEEEEDGGALPDLNEAQANLEEEVPGRYVIQVDDLARVACHGNDQVVHSFDLNLGAFDLNLEATEEQEQLHPDNDNELQHELEALEDDLRDYGVYTDTVNVVFDREELSDSEEEEDANANPNPDANGNEENSSRELTNTQRQRIYELLLAKSKDGKLEKDTTRAVAQVFNVSIRTVQRIWKRAKLCIAHGVQVNVDSRKCYNCGRKKVVIDLSVVSAIPLRQRSTIRSLAEALGVSKSTLHRLFKEGHLRRHSNSLKPYLKEANKKXRLQWCVVARPRYDAEGNCTFDGKIGIWPFVRKEPAQRRSRNRERGTLVTKTIKVDRDTMRSFIISKVLPAIRACWPLEDARRTIFIQQDNARTHVPIDDEQFSVAVAQMGLDIRLVNQPPNSPDMNCLDLGFFASLQSLTANRVSKNMEELIENVQKEYNDYDPKTLNRVFVTLQSCCIEVMEANGGNKYKIPHMNKARLEALGILPKALRCDRQLYEKVIQLLGN

SEQ ID NO: 132209 - protein, 99 aa, Oryza sativa
  unsure (1)..(99): unsure at all Xaa locations
  Clone ID: PAT_MRT4530_341C.1.pep
GPGPGSSGRPICATTHIARATSATWWRKSRHLWGRKLSEAVDRRTYLGARDKRPLLVRAVATSRGEATCNLAELIXNLTKKRIFRAAIGTRDGXGHDEF

SEQ ID NO: 132210 - protein, 164 aa, Oryza sativa
  Clone ID: PAT_MRT4530_34200C.1.pep
RTRGRTRGFLQEHCKAYELRCSPLLKKKKKKKKKKKKKKKKKKKKKKKKKKKKKKKKKKKKKKKKKKGGAPLKKPKLTPPGKAMKKLLKRATKKKSLARVLKTWKRKKPWGNQKKCPGKKTPFTQLGKNQKAPNKSPFKKIATLKWKRDPPLNGTINRGGGGGT

SEQ ID NO: 132211 - protein, 404 aa, Oryza sativa
  Clone ID: PAT_MRT4530_34201C.1.pep
MAQPILAPLDAGFGVDVQDCIPMTVGGHFEQFPFHNHHNYLYMDFTFSLHSHTSSKISLISHKFSLVVSSWWNRNRVEIRSTKVFGRVRPHPALSRGRPASPRLLLLSLRRRPTSSRTSCHDRAPSGCAVATLGLAGASSSPASPPFHGETIGDASSPVNSGVAATASPPAAPSAVPEHRPTSPSPPSTSQRRPFLWLLLCFARKTAASRRQPIRPLASPFGRPFLLALATVGRPFLLALATVGRTSTTFGITAARSSSASPPLHPNPAGLCRRPLIVPGCACCRPSLRQAVLVRRPRPSREPLQPRRRLRPRLRVVKPCAGLVSPSSKDRRQSRSLAVRLRRPRAISAAPIRRRRSHALLRGGKGLSSRCPRPRPFGVARDNCAVVDPGTRVPVSVVVCVCVW

SEQ ID NO: 132212 - protein, 317 aa, Oryza sativa
  Clone ID: PAT_MRT4530_34202C.1.pep
MEGRRGRGRPCRCDAEGGGGAADCCTGEEEGAAEGTSARRVEGLAATCSGFLGETEEQPEKRTTLRRRRRRRRRRSVLGHDGRGCRRWCSGSNATVYRGCTCEAEGGDGATGRRTVVAGGAAGGRPAPEREKEKAGRGGAATGERGRGLKLENGPRGFHFIDEGRESATGEVETEAGMAAGGHGKRPGLAPGLNGVDLEEESALGFTGERGGRAGGRRRPGGWDPPVRRAVSARAARVRGAGGRQPLGLGRGRPRREEERTEWAGREGGTEGKEREGGETLGISSPRFEEASKKIGWAVFSSCLTSSASSSITNLSN

SEQ ID NO: 132213 - protein, 125 aa, Oryza sativa
  Clone ID: PAT_MRT4530_34203C.1.pep
MPLGPLVEVKLEGIFVKLDGRPPGLLPEAQFAAFVRRHWREYSGPEEYAWRLRVFAANLTRTAAHQHHPFSDLIREEFEARFTGLAANGDDEAADAGHGGASIWRDRGAVTDVKMQGTCASCWAF

SEQ ID NO: 132214 - protein, 102 aa, Oryza sativa
  unsure (1)..(102): unsure at all Xaa locations
  Clone ID: PAT_MRT4530_34204C.1.pep
MMPPAISLARSPTSSASASPLYPVRRSAAVAVRHHRCPSFATKPAAGVCCXSPAVELLPSLSPXILVRDARLEDXWEVADTHCSXFFPDYXFPLDLVLRIDR

SEQ ID NO: 132215 - protein, 32 aa, Oryza sativa
  Clone ID: PAT_MRT4530_34205C.1.pep
FYLHLYGPKFQQSHIIMYDFIFNLRTKYNVTI

SEQ ID NO: 132216 - protein, 87 aa, Oryza sativa
  Clone ID: PAT_MRT4530_34206C.1.pep
MGLKLPWLHTVALCMVRVYQTVLGGVSAIPRFNDHHEVYRNFKTEKGVFDYGRSSPNKFNSVCVSLVEPVRCVCKDRALFRGGSGLH

SEQ ID NO: 132217 - protein, 63 aa, Oryza sativa
  Clone ID: PAT_MRT4530_34207C.1.pep
NTLIHCYVFFEHILMGLMFVEFMRPNGRFNNVRQELMLVSNVPETWSGGSALPMNSLSHRCRS

SEQ ID NO: 132218 - protein, 139 aa, Oryza sativa
  unsure (1)..(139): unsure at all Xaa locations
  Clone ID: PAT_MRT4530_34208C.1.pep
MELYADLVPLTAENFRALYTKKPLHYKGLXFHSIIPGYMWKGGDFVKDHGTGGEFICGDTFPXENFLLPHDRPWLPNGSAENNISQFFTRVPWFDGNYVVFGCIISGFHNLKAIEAEVEVKIANRGEVVIVPPPSLTTN

SEQ ID NO: 132219 - protein, 278 aa, Oryza sativa
  Clone ID: PAT_MRT4530_34209C.1.pep
DMDTNNGKGVVASWTSSMSSLMLSNLANLVASGTRTSAGFKQVHLNACARVVNEKFSTTLTGDQIRNHLKTWHKKFQKISRLRKVSGAIWDEENFIISLDEEHYNDYMQHNNKSDAEFFNRPITNYGEMLTIFGSTMAIGNFAKDSSSVLGTEDVEGTENEVNEDAPTIDHDERSSASKPKRQKTYAHDDDGLVGAFDRASDKLANAIIRSSTVGNELPDDLWDNLNSLPGFEQHHISFYYHYLVANPHIARAFNGLPFANKLDWVAMYISEKFPGAM

SEQ ID NO: 132220 - protein, 260 aa, Oryza sativa
  unsure (1)..(260): unsure at all Xaa locations
  Clone ID: PAT_MRT4530_3420C.1.pep
GPPGRGAATGPDRRSGRRATRRRGAASGGGWEVQVDEPPGAGEAVLLCRWRLRGRACSPAGKAXSFGHPYVECLLERFLQESLSSPATRVRRGVNGGGMVGEQEKAYGDLCAMVEAHKARREREEKIEMERAAGRWPPIDADVGRMSPEELMAFGMGLMAVQAAVRSRRPPDPVGPTILGYTYSPIPFGPTYMGLTYSAASLRPKEAFLRNSIPPSPKGYGKHCLSLVLHLPSPTRRRGGGWRRLRRRTAARTLSSPVLA

SEQ ID NO: 132221 - protein, 141 aa, Oryza sativa
  Clone ID: PAT_MRT4530_34210C.1.pep
MRLRELDASVGLDGATPSEAGDVRVLRSSSGDGGEHTASDGNAKDGGGETEHGGDGNGTEANGRGRERGGWGLNGRQCRAGPKAMTTPMTAGRFGAERRHWRQARAEADGGGDRAVAGIVRGWGGRVRWFVIVVDVRREPE

SEQ ID NO: 132222 - protein, 187 aa, Oryza sativa
  Clone ID: PAT_MRT4530_34211C.1.pep
MGIDLVAGGRNKKTKRTAPKSDDVYLKLIVKLYRFLVRRTKSPFNAVILRRLFMSKTNRPPLSLRRLVRFMEGKENQIAVIVGTVTDDKRVYEVPAMKVAALRFTETARARIVNTGGECLTFDQLALRAPLGQNTVLLRGPKNAREAVKHFGPAPGVPHSNTKPYVRSKGRKFEKARGRRNSKGFKV

SEQ ID NO: 132223 - protein, 219 aa, Oryza sativa
  Clone ID: PAT_MRT4530_34212C.1.pep
MTSKQKGKKRGEGGNIDFPRAARARPERKGGSAELNGPAGPRRRPRAAQDARAREGGEREPVDRAHHARSRAELAPTWRLRGCHAGRREVDDDPAANGRRVAAPSGGANHGDTDKSEHTGRLLVMRGDEPTARICRRKLDGGESRRRQPAGREEGNGGEATRGRFPAVRASTRFRELDASVGLDGATPSEAGDVWVLRSSSGDGGEHAASDGNGRGDAG

SEQ ID NO: 132224 - protein, 452 aa, Oryza sativa
  unsure (1)..(452): unsure at all Xaa locations
  Clone ID: PAT_MRT4530_34213C.1.pep
MASKTLREFTAPSADNVAIRQQVNIGDVDFDLKSSLIMMAQASPFCGRPNKDANAHLQQFLKICSTYTIKGVSPNAVRDKCSTAFLSKFFPMGKTNALRGRISSFQQTRDESIPEAWERLQEYVAACPHHGMDDWLILQNFYNGLTPMSRDHLDAFVGGAFFSKTVQGAVELIGKMVSNDLVFAQAKTTDVLSKKLAANDKILENINVKLDGFASAFQNQLSFNKMIXPANESGRISGQPDASTENVKAITTRGGXLCDLGANVSVMPKDVFDKLNFTVLAPTPMRLQLADSSVRYPVGIAEDVPVKIRDFFIPVDFVVLNMDTGKETPLILGRPFLSTTGANIDVGTESIRFHINGKEEKFEFQPRMDNAXHGQVVEVEPPKTDSLVKFMQNFLEKETTMPRNRYWRMPAKKLEQPTQKKPSSAPKPRKAWKEKPKRPAPSPPETGGKSVN

SEQ ID NO: 132225 - protein, 134 aa, Oryza sativa
  Clone ID: PAT_MRT4530_34214C.1.pep
MRCRGPTRSLTAHRGPSARGEKRRERLAGRKRAHRVVARDEGRRANGSDSPEGVRRRRIAVAATGGEGRGKRRRGHEGPIPGGESIYAATGIRCKRWIGRKRIEGGRRREALPSSGGDGGEHTASDGSSRGGAG

SEQ ID NO: 132226 - protein, 160 aa, Oryza sativa
  unsure (1)..(160): unsure at all Xaa locations
  Clone ID: PAT_MRT4530_34215C.1.pep
MVVQRELAAVGRLPRCRSAPSPFLELLPFXCGEFLGWIEAAACQRGKPRLLKQCHPVQGSPLARFGEETGGWWIGRFVEVSRWRGVGAVWWQSCRWQDWKLAGGGASVNDFAFRRGNPPEGTVEVPILPQQGALGENLVQFLGRMTTASFGVATLVRASF

SEQ ID NO: 132227 - protein, 795 aa, Oryza sativa
  unsure (1)..(795): unsure at all Xaa locations
  Clone ID: PAT_MRT4530_34216C.1.pep
MASKTLREFAAPSADNVAIGLQVNIGDVDFDLKSNLITMAQASPLCGKPNEDANAHLQQFLEICSTYTIKGVNPNAVRLRLFPFSLLGRAKQWFYANRAAVNTWDKCSTAFLSKFFPMGKTNALCGRISSFQQTRDESIPEAWESLQEKXPQGTVKALDSHVTCEVCGVMGHSGNDCPETREEAXYMGNNNGYRPQGGQGWNQPRPYYQGGNNNGNFSNQPSLKDLVFAQAKTTDSLSKKFAANDKILENINVKLDGLASAFQNQLSFNKMIETQLAQLASLVPANETGRILGQPDSTIENVKAIMTRGVIRKIHINVPLLDAMQVPTYARYLKDILNNKRPLPTMEVVKLMEQCSNKLPEKKKDPGCPTITCSIGAQLFNQVLCDLGASISVMSKDVFDKLNFTVLAPTPMCLQQADSSIRYPAGIAEDVLVKIRDFFISVDFVVLDMDTGKETPLILGRPFLSTAGANIDMGTGSIYFHINGKEKKFEFQPRTEQCSMNFLEKETTMPRNRYWRTPVKSPIPAKKLEQPAQKKLSSAPKPKKRFAVVDEPGSRLLTLQFLCTLKEIEDGISFRFFRKEFALTWKGLSTLLGFHDSCKIDLQKGISRFEKNRFWEDISSAPICKKPRTNDIHNTTLRLMHKWIAMTLFPRGDLRPIRGDELTIMFAMVRKIKIAPVKCMIKQWLKSIKFSAAVECTSLITRIAKGLGVVSDQIACISAARPRIDEAYLVQGHILKHGADGSLIYFFPGCTNEIPLPNAGYHLYNGHELTIPLQTIEESRAGGTYRETRNMTRNE

SEQ ID NO: 132228 - protein, 273 aa, Oryza sativa
  unsure (1)..(273): unsure at all Xaa locations
  Clone ID: PAT_MRT4530_34217C.1.pep
DRKKNVTRKVLHRQLAVEEGCAPEHTPRTICQPXQTHATEREAKHRTGHRYARPIATGPTTPPRHEYSKTTPSRGLRRRKTPSSSVQGIGQGFHPELLAEGGWVPQQCPQEGYHXEGEVTVGPKXIGLSFRSEPPTAVVRRPIRNHHLNIGGTWLPPHLTDAPPLASFQSCQQQDCHHTAPTPHHRLXFNEPPSLRTGPGPFRSTTRLPPQSNLETPHKEGEELQEGRGCRPATRKTTHCRQLPLHYHLGLRRRRKRCRSVSGATFVQPPCLT

SEQ ID NO: 132229 - protein, 454 aa, Oryza sativa
  unsure (1)..(454): unsure at all Xaa locations
  Clone ID: PAT_MRT4530_34218C.1.pep
TVRREHAAHARGRGWDAVHARGSRRNGCGGPTRSLTAHRGPCAREEKRRERLAGSADPVVAEVAPTWRLRGSHAGRREVDDNAGRNGRRTTAASGGANHGDTGESEHTGWLHRTRGDEPTARIRWRELDGDELRRRQAAAEEGGKGDEVTRGQFPAARASTRPRESVASVGLGGATPSEAGDERVLRSTGGDGGEHTASDGNGRGGAGLLRGGYSSXYRKLRGRDGTRKENGEMHYRARRGAVTXADGAGVISPASGRGRGTKRGGGGGIDGRAPWFIGAAMSVWERGTDIGRSSRRAGAPASGQNGDRXGDAGEREKGKKEGERGERGRRGRGRGGALPPSLGGLRAEXRGPGDDDGDDGGXGLERSGDTGGRRGXRLTAAATRRSATTARARSGGGALGAAHALARTRRAGGAERSGGRERERERESERGRRGGEGKMGRERFGPSNPGEAK

SEQ ID NO: 132230 - protein, 69 aa, Oryza sativa
  Clone ID: PAT_MRT4530_34219C.1.pep
LKPFKQLCKCDICHKMVIILSFAAIVCSFQFSISDTANIYQTTYLYRNKPTLMLDKDKYIKMHKQNSPC

SEQ ID NO: 132231 - protein, 550 aa, Oryza sativa
  unsure (1)..(550): unsure at all Xaa locations
  Clone ID: PAT_MRT4530_3421C.1.pep
MAIDLNILAEEEEDGGALPDLNEAQANLEEEVPGRHVIQVDDLARVACHGNDQVVHSFDLNLGAFDLNLEATEEQEQLHPDNDNELQHELEALEDDLRDYGVYIDTVNVVFDREELSDSEEEEDANPNPNPNPDANGNEENSSTELTNPQRQRIYELLLAKSKDGKLEKDTTRAVAQVFIVSIRTVQRIWKRAKLCIAHGVQVNVDSRKRYNCGRKKVVIDLSVVSAIPLRQRSTIRSLAEALGMFKEGHLRRHSNSLKPSLKEANKKERLQWCVGMLDHRTLPNDPKFIEMENIVHIDEKWFNATKKNRTFYLHPLEEEHYRPVQNKNAIEKVMFLSAVARPRYDAEGNCTFDGKIGIWPFVRKEPAQRRSHNRERGTLVTKTIKVDRDTMRSFMISKVLPAIRAGWPLEDARRTIFIQQDNARTHVPIDDEQFSVAVAQMGLDIRLVNQPPNSPDMNCLDLGFFASLQSLTANRVSKNMEELIENVQKEYNDYDPKTLNRVFVTLQSYCIEVMEANGGNKYKIPHMNKARLEAXRCDRQLYEKVIQLL

SEQ ID NO: 132232 - protein, 143 aa, Oryza sativa
  Clone ID: PAT_MRT4530_34220C.1.pep
MRLSSLVTVVAYAWLGGARRSDKGGAGAGAAAFPASALSTGEAQVAEAMPPNPGFSFGQIWRGDWRVVDRKGPGPALRDEGSLKSVDGGASVRCGGSPVVGRTGSWPGVPSESLAQFLWANIDFAFGRGNPPEGTVEVSLLPR

SEQ ID NO: 132233 - protein, 111 aa, Oryza sativa
  Clone ID: PAT_MRT4530_34221C.1.pep
MTLLTRITQPVGISHVGRPPSFHDKAFRKPTQVYHMPTRGVPDQQQFASTDPGVGFSKSLVKLQFYPSCYSDFKFEGDRRYSHRVHEYRGATGWLQGDMTGQQIKCDPINA

SEQ ID NO: 132234 - protein, 436 aa, Oryza sativa
  Clone ID: PAT_MRT4530_34222C.1.pep
MASATLDRRPSAGQLPVLPTTGLPPHSTDAPPSTDFNEPPSLRTGPGPFRSTTRQSPRQFCPKENPGLGGIASATWASPVDKLPPQSNLETPHKEGEELQEGRGSYFDLQIMYSKLKSEDNITSIVLSAPYSSGWVGIGFSNDGKMVGSSAMVGWIDNQGRAYIKQYYLSNQTSSGVKVDEGKLLTTDVPSAAVLYGDNIYLVFQVKFPLHIARQSVILAFSKISPNKFHLAEHDDKTTLSFDFSSGDSVSTYYPYQLKRNHGAFAIFGWGVLVPLGAIAARYLRHKDPLWYYLHVLVQFLGYIIGFAGVVSGIALYNRTYSNFTTHRSLGISVLALGSLQVIAFFLHPNKDSQVRKCWNQYHHWLGRICIFLAAINIVLGIELSDTNISWKVIYGAIISVMIISTTFLEVMMCTKLPKEGTCNGGLQMPTHHPNS

SEQ ID NO: 132235 - protein, 252 aa, Oryza sativa
  unsure (1)..(252): unsure at all Xaa locations
  Clone ID: PAT_MRT4530_34223C.1.pep
SSKSSHCGSSGSETLSVPLDRSRDLRNFGRRGPREKARLGRANGPAGPKGFGPVGRAGGEERGSRWTGLTVRGPVWDPLVSGSAHRAEGARGSRARAGEGRSARARFAEERMRRAHAQPHGSPRTMRTGEKRRELLAGSDDPVAAEVAPTWRLRGSHAGRREVDDDAGRNGRRTTAASGGANHGDTGESEHTGMTRKXRGSEPTAWIRRREPVYGGFRRRQPAESKGGNGDEATRDQLPAVRASTRLRESVA

SEQ ID NO: 132236 - protein, 236 aa, Oryza sativa
  unsure (1)..(236): unsure at all Xaa locations
  Clone ID: PAT_MRT4530_34224C.1.pep
AWRVVVVVVRAVQCRARARAVGSGFSARQLAVAVPAAWQATGTMVLTTKFGNLSIGDGDXSKQNSRWRSFRKQSKNGLKSXRLRPGSTESKLDKVSXLSRIRXYDMFGQKSAAKTYGILEFVRNASRVRHGRILIKSTGTLIHLKASXWTCTGVKQISQASCFYINRWLVVVKRXRQQWRQQKARYIQQPAISTSFNVFILPPTKTSRWGRNPPTQCSASLTGVLILEYCSQESVE

SEQ ID NO: 132237 - protein, 43 aa, Oryza sativa
  Clone ID: PAT_MRT4530_34225C.1.pep
FIRLAQTRSQQSSKEFTVHWTSKNHRTRVKHREQLTVNMPDTP

SEQ ID NO: 132238 - protein, 235 aa, Oryza sativa
  unsure (1)..(235): unsure at all Xaa locations
  Clone ID: PAT_MRT4530_34226C.1.pep
FFFFFNLNILFFFNVIKIGRKVLHRQLAVEERCALEHTPRTICQPXQTHATEREAKHRTGHRYARPIATGPTTPPRHEYSKTTPSRGLRRRKTPSSSVQGIGQGFHPELLAEGGWVPQQCPQEGYHXEGEVTVGPKXIGLSFRSEPSTAVVRRPIRNHHLNIGGTWLPPHLTDAPPPASFQSCQRQDCHHTAPTPRHRLTSTNLPIHHPPVSSPNLAKGEPWTGWHCFSNLGFPR

SEQ ID NO: 132239 - protein, 419 aa, Oryza sativa
  unsure (1)..(419): unsure at all Xaa locations
  Clone ID: PAT_MRT4530_34227C.1.pep
QTSSSSHRTLRCNRRTRRPRSWEEYQPSPPRASPPTTPSAPPSYAASARSYRSRTPAGDPPRRGRRRGSGGGRGCTSRCRARRRRTAXFRARIQSTFSCDSRSFAVAVAGTSSWEPVAAAAIYTYFLSSIFYLLLLFGNXAETLKLIVAGLLLEELLISRIRFIFFSNWGGXIYTEQGLLTSAEGVHFTHTTLLTRITQPVGISHVGRPPSFHGKAFRKPIQVYHMPTRGVPDQQQFYLGCYSDFKFEGDRRYSHRVHEYRGATGWLQGDMAELAPTWRLHGRHAGRREVDDDPAANGRRAAAASGGANHGDTGKSEHTGRLHETRGDEPTARICRGLLDGGGLRRWQPAAGEEGNGDEATRGRFPAVRASTRLRELDASVGLGGTTPSEAGDKRVIRSSGGDGGEHAASDGNGRGGAG

SEQ ID NO: 132240 - protein, 746 aa, Oryza sativa
  Clone ID: PAT_MRT4530_34228C.1.pep
MVSNMGWSEERLQTCLRGMHTIKETELLAAKLDLLMKRLDNHGKRPQGTVKALDSHVMCEPSLKDLVFPQAKTTDALRKKLAANDKILENINVKLDGFASAFQNQLSFNKMIETQLAQLASLVLANETGRIPGQPDSSVENVKAITTRGVIQKIHINVLLLDAMQVRTYARYLKDILNNKRPLPTTDVVKLTEQCSNVILHKLPEKKKDPGCPMITCSIRAHQFDQALCNLGVSVNVMPKDVFDKLNFTVLAPTPMCLQLADSSVRYLAGIVEDVPVKIRDFFILVEFVVLDMDTGKETPLILVRPFLSTAGANIDVGTGSICFHINGKEEKFEFQPRTEQCSMVRIKYRPNPQNIQVVKVEPPKTDSLVKFMQNFLEKETTMPRNRYSRTPVKQTTPARKLEQPAQRKPPSAPKPRKVWREKPKTPTPSPPETAKSGAGWTHKGFGRTHCIGPNRPGQRSAASLFEAMASGPHRMRRRLSRLFKGSGPSSSPHDESSTRSSADVSMEDVEAPRQLLNDTDLDLVGDRERQAYYMLSDRDYAHTREYSPELLKKICMDVEFRAIWKAVEWQRFVVTIEESRAGGAYKETRNMARNERESSSSSTPVQMYEVGWEPTRDAPGWTQAPRHSIRVSSWACASEDRWRAPQDIHWGDDQPSRSSGMPPSPSEWCSSSSRWDLGEITRRMDTLDMQTGEIQYNLAERIAQMQEWQQSADAQFANFNNMMQQQHDNLQAYFRFQGFNPYQGP

SEQ ID NO: 132241 - protein, 60 aa, Oryza sativa
  unsure (1)..(60): unsure at all Xaa locations
  Clone ID: PAT_MRT4530_34229C.1.pep
LRAEFGTRLKSPKLXWXWVLXXFHELVQRRLXXCXXEXCPSHEGXDGXSGTXLKNATXPW

SEQ ID NO: 132242 - protein, 94 aa, Oryza sativa
  Clone ID: PAT_MRT4530_3422C.1.pep
SLSSELFSSVGGSCKDHGARLSSVLCSALVLVWWCIALLVLCCANLELNKAWGFRVCSSFSHPRCCIYSGSGLLDSSNCWLLPQLSASRSKKDQ

SEQ ID NO: 132243 - protein, 80 aa, Oryza sativa
  Clone ID: PAT_MRT4530_34230C.1.pep
MVPGMHARVARRSQPRPRTFALLTACLALPLYFVVLAGQAQAHSLLAHLSISRSELYERGSEVTYVPLDSTIEMENLGDA

SEQ ID NO: 132244 - protein, 65 aa, Oryza sativa
  Clone ID: PAT_MRT4530_34231C.1.pep
GDFICKQTQLITTISTSIKGIFGGSRINSRGNIASSGTGRSCGVGGTRASVAGVMAYVEFTGMIV

SEQ ID NO: 132245 - protein, 50 aa, Oryza sativa
  Clone ID: PAT_MRT4530_34232C.1.pep
MAVTAKPAPFRPDLAGWLATGKAVGTGDGGGRGTLDVHMTFGGSCHGCYG

SEQ ID NO: 132246 - protein, 168 aa, Oryza sativa
  Clone ID: PAT_MRT4530_34233C.1.pep
MQIRSLGGFYGEDHVRSTVPRLGKADGVQEADLAVDAAACSVHCHTYVAKDTSKNRLDQAGAADVRLPMKPRLHARVHVPQHHPSLPAVRDQVAVLVGEKGDIDRERLLPGLHRTVILPGMVAAGSEELLCDEDGFTTEDVVAIESPNIVTLADGQDIAAAADLLKAI

SEQ ID NO: 132247 - protein, 42 aa, Oryza sativa
  Clone ID: PAT_MRT4530_34234C.1.pep
DKKILQASKFNIRQRERNKKNQKQERQERLENLYKEDLDINS

SEQ ID NO: 132248 - protein, 43 aa, Oryza sativa
  Clone ID: PAT_MRT4530_34235C.1.pep
MAVPLCVYRFLGYFYKQGTKMTGLGGSKYNPYEPFVRWNKQKY

SEQ ID NO: 132249 - protein, 1216 aa, Oryza sativa
  Clone ID: PAT_MRT4530_34236C.1.pep
MAEAKVEAKSPRGGGGWQGEASIERAVGASSFNDAPWCTPNPPELRRSGDGGAKKAAAVEDVGVALELAEDGLKELAVSPAVDTLGLMKASSRRFLSGKEGASFLLVSKGTKRLFGYCRELQATGLRFLQVIESSKAEREREAKVERRFWRWMMIGGRRRETSGDWRVEPTWVERRYDFFRLEVDEQHSEFQIVQVASNHQDGDYFFSCLELKIFSTPHWSITPSRQQQAQLRKRRGETKKSVLATAPNASCILTPLAQEGERFFSSWEMLFLAGCVLEVATNMEFIVVAFYGSKIRDDATAPTFSFTDEGIISTFLLLSISFCIPASSLLPQFLLVLSMGNRSRQRVAKEAMQSINEEADSPSREVQPGRHHMLKCPDGKPELHLEQIPNFHCKSLPSSRREAYQDDSIMHKRGSMYQSSSDVSRLRKLQEGRRKIDSALSRDSFMSFEIVDSSSQPSTNTSKSVHTRQIEGTCSKDARSNCQHSVDVYSDGSKHGEGDLVNKLPKSLSTKVGVFDATCPPESTHGANSTTKARSSPFKKILDPIMKSKSLRNPSLMEKEDAKHSSLLVEGKGRVLRKSLLSGISRTEQSLTPNCQQSKEAQVLTVTSSPTHLHAVLKLDPTNDSFGFEFCTKGPEESIYANIWKAGNELNWIYTFHSTGKRTSTVGKTPKDRRGCLPPIVGQMHVSSYLYSEVGQNGVLNNSAISEFVLYDIAHARRSSAVERIQCTDSSKPKFCSAVNNSISRGSLERNNLMERQNNTRNNSDASTSSLWSREDLHPHLEVAAIVIQVPFHKTQSKELKDGSSSGTIKVAAAGGAHGLPRDDESSPSPLLDRLKTGGGCDCGGWDMSCPIVVLDNAYDSHWVDSVMTESKHPMELPFQVRLIIFLLVILLLQTQLRRSFEPEAGVGIWQETAPFGAVSASITALVVVGLVHLLLTLVALSLILILKNIIGPDTVLSIMAKWAAWHGRAGPSNTTTDSAAAPATATSLAAASPPSSPLASQRSSPPWEAVAGGSRSGRPSPPQPPRHRGSPGGTPGLHGLPMEMTTGEMEAAIVALLAKKEALREAPSSSPRRLPLQPRAAVEPTRLIILPFQYSMEASLICKSEVKLSRAEQSIQLAQMALRRSAAAAMSWPSARVTMLGDSMATTSSVVNPSSSQRSSSLPAATIPGRITVLCSPGRRRSLSVSPFSPTSTATLDRSMPHCIDRYVEESLAT

SEQ ID NO: 132250 - protein, 653 aa, Oryza sativa
  Clone ID: PAT_MRT4530_34237C.1.pep
MLLFLLFLLAAGEAAAAAAATTLTATPAKLTQSDREITIRWSGLPDPDGLDYVGIYSPPTSSDRDFLGYLFLNGSATWRTGTGELTLPRLPNLRAPYQFRLFRWPAREYSYHHIDHDGNPLPHGRHRVAASGEVAFDSPSRPDQVHLSFADGVDEMRVMFVCGDGGRRVVRYGPAKEEGEGWKEVAAEVRTYEQKHMCDSPANSSVGWRDPGFVFDGLMKGLEPGRRYFYKVGSNSSGWSDTYSFISRDNEANETIAFLFGDMGTYIPYNTYVRTQDESLSTVKWILRDIQALGDKPAFISHIGDISYARGYAWVWDHFFNQIEPIAANTPYHVCIGNHEYDWPLQPWKPWWATGIYGTDGGGECGIPYSVKFRMPGNSFVPTGNGAPDTRNLYYSFDSGVVHFVYMSTETNFVQGSDQYNFIKADLEKVNRSRTPFIVFQGHRPMYTSSNEARDFAHRQQMLQNLEPLLVTYKVTLALWGHVHRYERFCPMKNFQCVNMSSSFVYPGAPVHLVIGMGGQDYQPFWQPRKDHPDVPVYPQPERSMYRGGEFGYTKLVATKEKLTLTYIGNHDGQVHDMVEIFSGQVSNNNGVPEVIDDTKLSTGVSTKLKIPLFSLEIVGSVMFALVLGFSLGFLIRRKKEAAQWTPVKNEET

SEQ ID NO: 132251 - protein, 56 aa, Oryza sativa
  Clone ID: PAT_MRT4530_34238C.1.pep
VAMFLLLSLVLQVESFYGSNGYWLFFFTARTKMEAFLNLNFQNASKIHVWSNAHCL

SEQ ID NO: 132252 - protein, 91 aa, Oryza sativa
  Clone ID: PAT_MRT4530_34239C.1.pep
GKLKVCKIRPHENPAEIMTKPVPVVKFELCSSLIGKGVYPKRLFGAERVFLSLLGSGGRIFSCSKKKFVSRWSLLSCDPNSFALKKGQLFP

SEQ ID NO: 132253 - protein, 247 aa, Oryza sativa
  Clone ID: PAT_MRT4530_3423C.1.pep
MASAKLLLLVATSLLSCGVILADYAPMTLTIVNNCPYPVWPGIQANSGHDVLEGGGFFLPALSHRSFAAPAHPWSGRIWARTGCTGAGAQLHCATGDCGGRLQCAGLGGAAPATLAQVSLHHGNDQTSYGVSVVDGFNVGLSVTPHEGRGNCPVLACRKNLTETCPSELQLRTPAGSVVACKSGCEAFRTDELCCRNMYNSPRTCRSSKYSEFFKRECPQAFTYAHDSPSLTHECAAPRELKVIFCH

SEQ ID NO: 132254 - protein, 271 aa, Oryza sativa
  Clone ID: PAT_MRT4530_34240C.1.pep
MGIVEEAHNLRVVGEGKRGVIVLAHGFGTDQSVWKHLVPHLVADYRVVLFDTMGAGPTNPDYFDFSRYATLEGYALDLLAILQELRVASCIYVGHSVSAVIGAIASISRPDLFSKLVLLSASPRYLNDVDYYGGFEQEDLDELFEAMGSNYKAWCSGFAPLCVGGDMESVAVQEFSRTLFNIRPDIALSVAQTIFQSDVRSLLPLVTVPCHIVQSTKDLAVPVVVSEYLHKHLGGDSIVEVMPSEGHLPQLSSPDIVIPVLLRHIQHDIAV

SEQ ID NO: 132255 - protein, 446 aa, Oryza sativa
  Clone ID: PAT_MRT4530_34241C.1.pep
MRSPVGRREVVVSGVFTALLVLSILSLPSLLLTGPAYKSWPFLAAARDDSTTGSGGGAGYYPVSFAYLISASTGDAARAARLLAALYHPANCYLLHLDREAPAEEHRRLAELVSGQPVYARAGNVWIVGRPNLVTYRGPTMLSTTLHAVAMLLRLGRRWDWFVNLSASDYPLVTQDDLMDVFSRLPRDLNFIQHTSHLGWKIKKRARPVILDTALYEADRSELIRPANLTTNRRNLPTAFKLFTGTGSTHLGIWHTKRKSYLKPYLVNGAGSAWTMMSRQFAEYFTVGYDDNLPRTLLLYYTNFVSSPEFYFQTLACNSRRFRNTTVNHDLHFIRWDSPPKQHPLYLGPRDYRRMLLSAAPFARKFREDDPVLDRIDRDILRRDGAAPGRAFAYGGWCSEGGVRLCSNPQEAGRKGMIKAGAGSRRLRAMLNKMMNARNFRRQQCR

SEQ ID NO: 132256 - protein, 166 aa, Oryza sativa
  unsure (1)..(166): unsure at all Xaa locations
  Clone ID: PAT_MRT4530_34242C.1.pep
ARVAXCIYVGHSVSAVIGAIASISRPDLFSKLVLLSASPRVRIGDLASKGYLNDVDYYGGFEQEDLDELFEAMGSNYKAWCSGFAPLCVGGDMESVAVQEFSRTLFNIRPDIALSVAQTIFQSDVRSLLPLVTVPCHIVQSTKDLAVPVVVSEYLHKHLGGDSIVE

SEQ ID NO: 132257 - protein, 156 aa, Oryza sativa
  Clone ID: PAT_MRT4530_34243C.1.pep
MMMTEVANHSKRNHNESYFTGKAAVTSSSEEFGSMTSKKPRNTSPRDAPVSPKEKKDKIGERVAALQQLVSPFGKTDTASVLQEASGYIKFLHQQLEVLSSPYMRAPPVPGAAPEDPDHYSLRNRGLCLVPVDQTLQLTQSNGADLWAPANTTRRR

SEQ ID NO: 132258 - protein, 79 aa, Oryza sativa
  Clone ID: PAT_MRT4530_34244C.1.pep
PPLFFFFFCVKTSNIIMNIIRAVVYKHHRLLLHRHQFTTYGESYYNNSRWILSRVIQWSTDAEIIQLLMNSSRRNGVPT

SEQ ID NO: 132259 - protein, 428 aa, Oryza sativa
  unsure (1)..(428): unsure at all Xaa locations
  Clone ID: PAT_MRT4530_34245C.1.pep
MGRNSYCYNQRLTXGLWSPEEDEDLMNDITQHDHCFWCTVPELARLERCCKSCRLRWINYLRPDLKRGAFSQEEEDLIVELHAVLGNRWSQIATRLPGRTDNEIKNLWNSCIKKKLRQKGIDPNTHKPLAEVDRSKATPTISNDRTSESSDVDPSSGVALHNLSHLLSETAQSSELLPVKVTKPRTQAPGLARLKVPPKELFLDQLTSGHENLPSCRSSGPIPNFPFQQLLCYNNDFNSMDVGNRNSLWYNQNESSSSTISTVMPPVSPSTLSTSTGLNPSPDNANSRGTGIHNSQFYWDTNNPSSSSSTGSSGNNGLGFELQSTSSLLETNIFPWSDLAPEKDSQAQLEEELKWPDLLHGTFSEMPAPMQNLSQSLYEDVVKAESQFNMEGLCAAWSQNLLPQQHLPVVSDMYDKDLQRMSLSFENI

SEQ ID NO: 132260 - protein, 318 aa, Oryza sativa
  Clone ID: PAT_MRT4530_34246C.1.pep
MVVVVVGALLFHLVVTALAAPVALPGCPETCGNVTVPYPFGIGHGCFRDGFELACDETHPAAPPKLRFARNGVEVIDISLPSGTVRVATRMLGTDSSSSLPRQLNGSWPAGLPANGSLAVSTRHNRFVAMGCNLLANLVANDDDDYISVCAALCVVRSALPRDAAAASSCSGFGCCQTPVARGLPSYGVHLNDLTQRSVTVGSYGAAFIADGEWFAGEQRSLQLGFVADPRKLADSTAVPTVLEWSLDMDRDQDMFWYDTRVSQWTRCVSVHSAIDDAVDGNLYGRARCNCSKGYEGNPYLANGCQDCGPCVDGPDCE

SEQ ID NO: 132261 - protein, 130 aa, Oryza sativa
  Clone ID: PAT_MRT4530_34247C.1.pep
MEEFQEADVLWPDHHQHLRRDDDARRRRHQEQQHGGVDDADDSRGGTGTPSAPVGIPVTRAPTTRRISHGSTAPAAAFVPPHELVAARARRCSEERAAFSVCVGNGRTLKGRDLRDVRTAVLRMTGFLET

SEQ ID NO: 132262 - protein, 59 aa, Oryza sativa
  Clone ID: PAT_MRT4530_34248C.1.pep
PWKLLGGCNRQLHPSGASMNSVCVSLVQGNQYKFQESFQGFSEVEKKKKKLFHTWVRSI

SEQ ID NO: 132263 - protein, 128 aa, Oryza sativa
  unsure (1)..(128): unsure at all Xaa locations
  Clone ID: PAT_MRT4530_34249C.1.pep
PCCFPYAFLFFFFFFLLSFFSVFFFFFLPKNATFFRGPKTPAPHPRMPFAGPGLRGGPYAALTPQXPNCCDTFNNPGPPTSPNPSPGPPLATPKLYPGPMGPKPGPKTTPLNRGPPPGTPPPGKPPFH

SEQ ID NO: 132264 - protein, 62 aa, Oryza sativa
  unsure (1)..(62): unsure at all Xaa locations
  Clone ID: PAT_MRT4530_3424C.1.pep
VKFRSVSXRRNQRIDSFYCYSFLFXTLNFRFXIFFGRXGFWVGKTRSGSLLKKKKKKKKKKK

SEQ ID NO: 132265 - protein, 169 aa, Oryza sativa
  Clone ID: PAT_MRT4530_34250C.1.pep
MCNPGTLHITVHLISRIPIPGLRGSEFSIDFEDSDSWIARIRVYITSVTSLTTGYSNKKPTGRGNPGPDGLGNLAGMLQSAILGTFQCSTCLDDSKIRQFVRHNDATSSKKARKDMLNGTHLPDRIGLQGNDMTQLKRQCPIDLSCNHKSRIMNHLQQQPQQDGLVDLP

SEQ ID NO: 132266 - protein, 117 aa, Oryza sativa
  Clone ID: PAT_MRT4530_34251C.1.pep
SPGRTAATAGWAAAAAAGWGSSSRRPSPAPAPAASGTVPGSAAAGSSVASLLDSTPSFPSSSHHRPSPTSASPAAARPAAMSIPRPLQQRRCGSPRRRMRGAATLLLLLPAPCPCAP

SEQ ID NO: 132267 - protein, 78 aa, Oryza sativa
  Clone ID: PAT_MRT4530_34252C.1.pep
TAPAGPAPPRLHCCPYTEKERSGRNRELEKREPAGLISSSGCLTDDGIPYDPSKVTVITIIVGNERVVAMFLGPHGCL

SEQ ID NO: 132268 - protein, 1005 aa, Oryza sativa
  Clone ID: PAT_MRT4530_34253C.1.pep
MMVPKNPEVGVWKENRSEASSSKAPSKTKVTFDMLLDKYEKQSGEKARNKGKRPRSPPGERFGHSPSVEIVDTPYPHGILKPLGRDLIYFDTTKSRRCGYPPILMKLPDDLAVVFTTKASSSHRSRWDLASASMQSCFREVGVILQPLGTVSTEELDSYLSSPGVDSQPTEILDYDDFSVNSMKQKNNVHDKKPSGVDWKKSDKCKSETGCSDVEGTAFFLTPQQNAIAAITLWDTLLQEDAPNHVLNIINQMKTMIAASDPVNLASVCTPTGSQVPPLRSQDYHQPSLSMTASGSNHRSRDYAERSVHSPADRYRERCVEQPRSPRRRQPVDLRETLNRHLAERGYQPYRSPNRYDDDEDGVASFTSDLCRVDWSASFKLTGIEKYDGKTNGESWLTVYGLAIHAAGGDSKAMANYLPLDLVDSARSWLYGLPRGTIGSWAELHEHFITNFQGTFERPGTHFDLYNFAEKYAKQAKKAIDGDQSTSKKKDDKDDGPTGFQDSRKELNHIFGGPQAYESKRKQKLIDREINAVQPDTPQYLRWSETTIKFDHSDHPNRVVHPGWYPLVLDPVVHNFKLRRSLIDGGRLSSTPLGQITLLVTFGTQENFRTENICFDVADFETVYHAILGRLALAKFMVVPHYTYMIMKMPGPRGVISLRSNIKQAITCDKESCEMAQTSLGGRDLGIFLFIHDVSNGCIHGSHGHITGEDDAKTKKIPFDLSDPSKTTVIGGFIKEVLHPDWLANPVLVWKKTGQCRMCVDYTDLNKSCPKDPFGLPRIDQVVDSTAGCELLSFLDCYSGYHQINLKEFDCLKTSFITPFGAYFYITMPFGLKNDGATYQRMIQRCFSTQIGRNVEAYVDDVVVKTKQKDDIIADLEETFASIRAFRMKLNPEKCTFGVPSGKLLGFMVSHFVAEWTECQEDTPVEKLEYWTIHFDGSKRLSAVDKFSKWIEAKPVVTITTDKARDFFINIVHRFGVECANGMVVQGIKARVFDRLRPYAGKWVD

SEQ ID NO: 132269 - protein, 737 aa, Oryza sativa
  Clone ID: PAT_MRT4530_34254C.1.pep
MQSCFREVGVILQPLGTVSTEELDSYLSSPGVDSQPTEILDYDDFSVNSMKQKNNVHDKKPSGVDWKKSDKCKSETGCSDVEGTAFFLTPQQNAIAAITLWDTLLQEDAPNHVLNIINQMKTMIAASDPVNLASVCTPTGSQVPPLRSQDYHQPSLSMTASGSNHRSRDYAERSVHSPADRYRERCVEQPRSPRRRQPVDLRETLNRHLAERGYQPYRSPNRYDDDEDGVASFTSDLCRVDWSASFKLTGIEKYDGKTNGESWLTVYGLAIHAAGGDSKAMANYLPLDLVDSARSWLYGLPRGTIGSWAELHEHFITNFQGTFERPGTHFDLYNVIQKPETTIKFDHSDHPNRVVHPGWYPLVLDPVVHNFKLRRSLIDGGRLSSTPLGQITLLVTFGTQENFRTENICFDVADFETVYHAILGRLALAKFMVVPHYTYMIMKMPGPRGVISLRSNIKQAITCDKESCEMAQTSLGGRDLGIFLFIHDVSNGCIHGSHGHITGEDDAKTKKIPFDLSDPSKTTVIGGFIKEVLHPDWLANPVLVWKKTGQCRMCVDYTDLNKSCPKDPFGLPRIDQVVDSTAGCELLSFLDCYSGYHQINLKEFDCLKTSFITPFGAYFYITMPFGLKNDGATYQRMIQRCFSTQIGRNVEAYVDDVVVKTKQKDDIIADLEETFASIRAFRMKLNPEKCTFGVPSGKLLGFMVSHFVAEWTECQEDTPVEKLEYWTIHFDGSKRLS

SEQ ID NO: 132270 - protein, 913 aa, Oryza sativa
  Clone ID: PAT_MRT4530_34255C.1.pep
MQSCFREVGVILQPLGTVSTEELDSYLSSPGVDSQPTEILDYDDFSVNSMKQKNNVHDKKPSGVDWKKSDKCKSETGCSDVEGTAFFLTPQQNAIAAITLWDTLLQEDAPNHVLNIINQMKTMIAASDPVNLASVCTPTGSQVPPLRSQDYHQPSLSMTASGSNHRSRDYAERSVHSPADRYRERCVEQPRSPRRRQPVDLRETLNRHLAERGYQPYRSPNRYDDDEDGVASFTSDLCRVDWSASFKLTGIEKYDGKTNGESWLTVYGLAIHAAGGDSKAMANYLPLDLVDSARSWLYGLPRGTIGSWAELHEHFITNFQGTFERPGTHFDLYNFAEKYAKQAKKAIDGDQSTSKKKDDKDDGPTGFQDSRKELNHIFGGPQAYESKRKQKLIDREINAVQPDTPQYLRWSETTIKFDHSDHPNRVVHPGWYPLVLDPVVHNFKLRRSLIDGGRLSSTPLGQITLLVTFGTQENFRTENICFDVADFETVYHAILGRLALAKFMVVPHYTYMIMKMPGPRGVISLRSNIKQAITCDKESCEMAQTSLGGRDLGIFLFIHDVSNGCIHGSHGHITGEDDAKTKKIPFDLSDPSKTTVIGGFIKEVLHPDWLANPVLVWKKTGQCRMCVDYTDLNKSCPKDPFGLPRIDQVVDSTAGCELLSFLDCYSGYHQINLKEFDCLKTSFITPFGAYFYITMPFGLKNDGATYQRMIQRCFSTQIGRNVEAYVDDVVVKTKQKDDIIADLEETFASIRAFRMKLNPEKCTFGVPSGKLLGFMVSHFVAEWTECQEDTPVEKLEYWTIHFDGSKRLSAVDKFSKWIEAKPVVTITTDKARDFFINIVHRFGVPNRIIIDGTQFTSDVFKDFCEDFGIKICYASVAHSMTNRQVECANGMVVQGIKARVFDRLRPYAGKWVD

SEQ ID NO: 132271 - protein, 48 aa, Oryza sativa
  Clone ID: PAT_MRT4530_34256C.1.pep
KSDVWVAADLDRVAAIDWSKAVFQANILDVRIRWVEVINVRWWRWAWS

SEQ ID NO: 132272 - protein, 88 aa, Oryza sativa
  Clone ID: PAT_MRT4530_34257C.1.pep
MAEPEKAMGSPAAKELEKTPPPPATDGPSGDIMQRQYKKDADATHGTLVGDDADEARRLFLADVVERLDAVKRLEARIREIAEEIFPV

SEQ ID NO: 132273 - protein, 344 aa, Oryza sativa
  unsure (1)..(344): unsure at all Xaa locations
  Clone ID: PAT_MRT4530_34258C.1.pep
DCRRLSGGFVRGAVHDDDGGGNYCRHRRHDVQLRHKRLLQLHAGCRHQLVQRQRFQLDGVHRLLDQILQGKPVLQQVSGATSSSMAGDEATHRKPKRKRRAKSADEDASGDEPPESKGPNLTCCSATLASEACRVLSNTHHEKLGEIGLDAVACMTLESLKKTNPDTMCPSIDGERKIQITPRTVKLVMGTPLGGHDIVIPPNKVVRSVHDRITQELGIARNGRISAKMLIEVIKNQKDNPSAVRFLVMVLMSKLLXQTTDFYIPKSDVWVAADLDRVAAIDWSKAVFQALSDTIRCWRQKPTSSITSCVVFLVXSVLYLDNILDVRIRWVEVINVRWWRWAWS

SEQ ID NO: 132274 - protein, 378 aa, Oryza sativa
  Clone ID: PAT_MRT4530_34259C.1.pep
MASFLLIEPLSWSRIDRRRRDAGGSGFGRDRGMGGGSGRWIATGGALQFDQALCDLGASVSVMPKYVFDKLNFTVLAPTPMRLQLADSSVRYPAGIAEDVPVKIRDFFILVDFVVLDMDTGKEMSIILGRPFLGTAGANIHNIQEVEVEPPKTDSLVKFMHNFLEKETTMPRNRYWKTPGSGSSPSHHDESSTRSSADVSMENTEAPRQLLRDIDLDLVSDQERQAYYMLRDREYPHTQEYSPELLKKIGMDAEFGSIWKAVGWQPFAVVGSQLRMHPDGPKLHVTVLESQPGQVPVRTGGVRLMTSAGGTTNPPDQVAAARREGRWRLARLGSKPAGHGGAAARAELAAVAGGDRRHAATRRRDGEAPDGDGGAARR

SEQ ID NO: 132275 - protein, 98 aa, Oryza sativa
  Clone ID: PAT_MRT4530_3425C.1.pep
TSATRTRPAPSTAHGPPPAAASKRWPRQTTTTTASSRGPARHRRRSFPAWTARSLPTSASTTSPRRCTSSFRRRRRRRRRRRMPPPRRPRRAGWTSAT

SEQ ID NO: 132276 - protein, 260 aa, Oryza sativa
  unsure (1)..(260): unsure at all Xaa locations
  Clone ID: PAT_MRT4530_34260C.1.pep
AQDVQRWLALLEIWSLILEILALRVFGLTRGPGWDPLVSGSAHRAEGARGARARAGRXRGARARSAADAGAAGPCAASRLAVERAHAEGPTGVGPTRSGLSWRRRXAHETRGDEPTARICRGLLDGGGLRRWQPAAGEEGNGDEATRGRFPAVRASTRLRELDASVGLGGTTPSEAGDERVIRSSGGDGGEHAASDGNEEGEGAAGVLFRVLARAGRGRRGAAPSLGGLRAEWRGPGDDDGDDGGAAWSGAATPATQSPT

SEQ ID NO: 132277 - protein, 328 aa, Oryza sativa
  Clone ID: PAT_MRT4530_34261C.1.pep
MEDTEAPRQLLNNTDLDLVSDRERQAYYMLSDREYAHTFAVVDEPGSRLLTLQFLCTLKEIEDGISFRFFREEFTLTWKGLSTLLGFHDSCKIDLQKGISGFEKNRFCEDISGAPICKKPRMNDIHNPTLRLMHKWIAMTLFPRESIKFCAPVECTSLITRIAKGLGVVSDQMAFISAARPRIDEAYLVQGHILKHGVDGSLIYFFPGCTNEIPLPNAGYHLYNCHELTIPLQTIEESRVGGTYRETRNMTRNERESSSSSTPVQMYEAGWAPTRDAPGWTQAPCHSIGVSGWASASEDRWRAPHDIHWGNNQPSRSSGVPPSPSEWR

SEQ ID NO: 132278 - protein, 417 aa, Oryza sativa
  Clone ID: PAT_MRT4530_34262C.1.pep
MAEEAGLEAGAMEEGEGVTNDDDDMEAERKGAVTAMGVSRRGEVEGGAAVAASGSNDGGEGGCHRACELGVEEAWEAGEGGWRHASSAAVTQEKGRASLRGRARGRRPRQRGQVPRLLVPGIEEAPLPPTRARFCARELVNGHMDFMLLARDKVLAVEATGRTTIYDDSFRVVRSGPVLKAPLYWPISVPVDDSGVYVLDSKHCFQKLVHGNSSFEDWTCEALPAAPREVRGGSRRAYAVVGGNSIWISNDGDGTYAYDISRLAWAKHAEWALPFSGRAEYVSEHKLWFGLARNSTGNPMCACDLAAAAEQGSPPVQRNIWQQDVRPRKGWVPRYSNLLHLGSARFCIVRIFAKPSPETEYKSEWDGPKREEVFAVLTAVEVVRSGELGKGLRMVKHKSVRYSLGDGYCKVQPLMVY

SEQ ID NO: 132279 - protein, 333 aa, Oryza sativa
  Clone ID: PAT_MRT4530_34263C.1.pep
RRRERADVSDVAKRRLRPARRQRPASRRHHIARRRCRRPSSPAAPVPPAPAPTAARPGPAAACSRSRSHRRPPPLSPDPSGTRPATAGSGRDEARRRRIREGRGPRRRPVAAQSSLSSGSSLGSSSRRSRPPPPTGSGHPLVVGVVVVVAPLSAASARQIRAPSRRRRPVVVGVVRIEVVVVVAQLSAASTRHAPRRSHPTPPRAFHRRSPARARAAPLHPPRLPLRPARACRGGRPPGRRRRQPLHGPVARVVAPLQTAPPSSPSSSPRPRHSRASRQGTEAEPPSSLCRDAPAPSSFSRRGKGTSPFLPLLFPLFPPAGVILPPSCRRFGR

SEQ ID NO: 132280 - protein, 73 aa, Oryza sativa
  unsure (1)..(73): unsure at all Xaa locations
  Clone ID: PAT_MRT4530_34264C.1.pep
GVHFTHTTLLTRITQPVGISHVGRPPSFHDKAFPKPTQAXRRYSHWVHEYRDATGWLQGDMGAAREEERLGQA

SEQ ID NO: 132281 - protein, 209 aa, Oryza sativa
  Clone ID: PAT_MRT4530_34265C.1.pep
MNGTDLGLVGDRERQAYYMPSDREYAHTREYSPELLKKIGIDVEFRAIWKVVGWQRFVVVDEPGSRLLTLQFLCTLKEIEDVISFRFFHKEYTLTWKGLSTHLGFHDSCKIDLQKGISGFEKNRFWEDISGALICKKPRTNDIHNATLRLMHKWIAMTLFSRGDLRPIRGDELIMMFAMFANFNNIMQQQHDDLQAYFRFQGFNPYQGP

SEQ ID NO: 132282 - protein, 316 aa, Oryza sativa
  unsure (1)..(316): unsure at all Xaa locations
  Clone ID: PAT_MRT4530_34266C.1.pep
RSPELALHLHAAYASPPSPGSAPPPPPPALLLRPRPRPRPPPLLPSRHGLLLRXAAAAAAQAGGAVAAAEYEDVMGRLSSLITQKVRAHSGNRGNQWDLMAHYLQILELEEPIARMKVIHVAGTKGKNLNATNLHINVYLCNSLLLFAPNCESIRVDISEEKFLKYFWWCWNKLKEKTDDDIPMPTYFRFLALLAFKIFSAEQVDVAVLEVGLGGKFDATNVVYNFAHMQVEAPVVCGIASLGYDHMEILGKVVSCFCHVPCEQETHLEKLLKGVPAYTAPQPEEAMIALKQRASELGVSLQVAHASKSVPEITSW

SEQ ID NO: 132283 - protein, 310 aa, Oryza sativa
  unsure (1)..(310): unsure at all Xaa locations
  Clone ID: PAT_MRT4530_34267C.1.pep
MHARGRGRDAVHARGRGRPVPTSAELAPTWRLRGCHAGRREVDDDAGRNGRRTTAASGGANHGDTGESEHTGXLHETRGDEPTARIRRRLLDGGGLRRRQPAAGEEGNGDEVTRGRFPAVRASTRREEEGRCXREADGAGVISPASGRGRGRRRVPGVPFHVHERTGSPXLGDGRRRRDRARERRQWRGGEWERKGREGEAXGFKGAAMSVWEPTXGGQGRELALGGRGQSGDREDDAGXKKKGKRREKKGLAPLPIREKGGGSGATRQREEGCCLRPLAACARSGGGRAVTTAXRFGAARRHGRQARAG

SEQ ID NO: 132284 - protein, 538 aa, Oryza sativa
  unsure (1)..(538): unsure at all Xaa locations
  Clone ID: PAT_MRT4530_34268C.1.pep
MASKTLCEFAAPSAANVAVGPQVNIGDVDFDLKSSLITMAQASPFCGKPNEDANAHLQQFQEICTTYTIKGVSPDAVRLRLFPLSLLGRAKQWFYANRAAINTRDKCSTAFLSKFFPMGKTNALHGRISSFQQTRDESVPEAWERLQEHMAACPHHGMDDWLILQNFYNGLTPMSRDHLDAAAGGAFFSKTVQGAVELIEKMVSNMGWSEERLQTCQRGMHTVKETELLAAKLDLLMKRLDDHEKRPQGTVKALDSHVTCEVCGSTGHSGNDCPETREEAMYMGNNNGYRPQGVPANESGRIPGQPDPSIENVKAITTRREDPHXNVPLLDAMQVPTYARYLKEILNNKRPLPTTEVVKLMEQCSNVILHKLPEKEKDPGCPTITCSIRAQQLDQALCDLGASVSVVPKDVFDKLNFTVLAPKPMRLQLADSSVCYPARIAEDVPVKIRDFFIPVDFVEVKFEFQPWTEQCSMVRIKYGPNPQNIQVVEVEPPKTDSLVKAASLEXKPSSAPKSKKVRKEKPKTPAPSPPETGGKSVN

SEQ ID NO: 132285 - protein, 728 aa, Oryza sativa
  unsure (1)..(728): unsure at all Xaa locations
  Clone ID: PAT_MRT4530_34269C.1.pep
MHTVKETELLAAKLDLLMKRLDDQEKRPQGTVKALDSHVTCEVYGGTGHSGNDCPETREEAMYMGNNNGYRPQGGQGRNQPRPYYQGAQLASLVLANETGRIPGQPDSSIENVKAITTRGGTDRMSKEASSSDSADKEVQPEKTVPHEYCDTRLLPFPQRSRKPSVDEQFARFVECXTYARCLKDILNXNKRPLPTTEVVKLTEQCSDLILHKLAEKKKDPGCPTITCSIGAQQFDQALCDLGANVSIMPKDVSNKLNFTVLSLTPICLQLADSSVCYLAGIAEDVPVKIRDFFIPVDFVVLDMHTGKETLLILGHPFLSTVGANIDVGTGSIXSISTGRRKGEGNNDXQEPLLKDTGKITCTGQEVRAAGSKEAVFRTEIKEGVEGKAKDARSITSGDGWKIRALNRKKVRSYTSDLKRRDLRQQWGRLGPPGVRPNTLVRRNRPGNGSLPLFARMRRRLSRLFKGSGSSSSHHDRSSTRSSADVSMEDGEAPRRLLNDTDLDLVSDRERQAYYMLSDREYAHTREYSPELLKKIEIEDGISFRFFHEEFTLTWKGLSTLLSFLDSCKIDIQKGISGFEKNRFWEDISSAPICKKPRTDDIHNPTLRLMHKWIAMTLFPRGDLRPIRGDELIIMFAMTIEEYRAGRTYRETRNMTRNERESSSSSTPVQMYEAGEIQYNLTEHIAQTQEWQQSADAQFTNINNMMQQQHDDLQAYFRFQGFNPYQGP

SEQ ID NO: 132286 - protein, 1784 aa, Oryza sativa
  unsure (1)..(1784): unsure at all Xaa locations
  Clone ID: PAT_MRT4530_3426C.1.pep
MAGHPPNHRGEGMIDFVAELARMTLVVGYPNAPEYTTIPPLSGELPHRVRLEVHGYVGTCLANMAVEACGGTADHACQEAAYLMMARLRERHNYIFHDTAYRYHPRRANGDGVSSFRPTAGENDTTFGHMCAVMRGLDRMHSDLHKATKALNDGKLMRIVALKDEIARLKKENAQLKGLPAPGGVRIRTTPRKTTTAPVRIQLAPRNPPPPAAPAAPPVPPAAPAVPAAPAPAPAPAPAFALSFAPASAARGPASGTGGCSLQMVYTRTGSRATGEDSNGEERADGVHPSSDSGNGPPPLPENPTLAQVMAHQTQMMAAMMQQMQQQHQQMHQRMLQHAEQQHQQLGPPPPQSKLPEFLRVRPPTFSSTTNPMEANDWLHAIEKKLNLLQCNDQEKVAFATHQLQGPASAWWDNHMATRPPGTEVTWAEFCRSFRKAQVPDGVVAQKKREFRALHQGNRTVTEYLHEFNRLARYAPEDVRTDAEKQEKFMAGLDDELTNQLISGDYADFERLVDKAIRQEDQRNKMDRKRKAAQFRAHQGSHQRPRFTSGQQGGPTTMIVRQHRPFNPSNFPQGASGSQNHHGGQPNRGAAPRPPMAPAQSGQPAQAKKETGAKPGSCFNCGELGHFADKCPKPRRAGPRFIQARVNHASAEEAQAAPEVVLGTFPVNSIPATVLFDSGATHSFISKKFVGMHGLIREELSTPMRVHTPGNSSTSVQFSPSITIEIQRSLFLANLILLESKDLDVILGMDWLTKFKGVIDCANRTVTLTNEKRETVVYKSLVSPKKGVSLNQIETEIPVDTVEKNLRKLEDIPIICEYPEVFPEDLTTMPPKREIEFRIDLAPGTAPIYKRPYRMAANELAEVKKQVDEQLQKGYIRPSTSPWGAPVIFVEKKDKTKRMCVDYCALNEVTIKNKYPLPRIDDLFDQLKGARVFSKIDLRSGYHQLRIREEDIPKTAFTTRYGLYECTVMSFGLTNAPAFFMNLMNKVFMEFLDKFVVVFIDDILIYSKSEEEHEQHLRLVLEKLKEHQLYAKFSKCDFWLTEVKFLGHVITAQGVAVDPSNVESVTKWTPPKTVSQIRSFLGLAGYYRRFIENFSRIARPMTQLLKKDEKFKWTAECDKSFEELKQKLVSAPVLILPDPMKDFQVYCDASHHGLGCVLMQEGRVVAYASRQLRPHEGNYPTHDLELAAVVHALKIWRHYLIGNRCEVYTDHKSLKYIFTQPDLNLRQRRWLELIKDYDMSIHYHPGKANVVADALSRKSYCTALCVEGMCEELRQEFEHLNVGIVEHGFVAALEARPTLVDQVRAAQVNDPEIAELKKNMRVGKARDFLEDEHGTIWIGERLCVPDDKELKDLILTEAHXTQYSIHPGSTKMYQDLKEKFWWVSMRREIAEFVALCDVCQRVKAEHQRPAGLLQPLQIPEWKWEEIGMDFITGLPRTSSGHDSIWVVVDRLTKVAHFIPVHTTYTGKRLAELYLARIMCLHGVPKKIVSDRGSQFTSKFWQKLQEEMGTRLNFSTAYHPQTDGQTERVNQILEDMLRACALDFVGAWDKSLPYAEFSYNNSYQASLQMAPFEALYGRKCRTPLFWDQTGERQLFGTEVLAEAEEKVRIIRERLRIAQSRQKSYADNRRRELTFEAGDYVYLRVTPLRGVHHFQTKGKLAPRFVGPYKILERRGEVAYQLELPSNMIGIHDVFHVSQLKKCLRVPEEQADSEHIDIQEDLTYVEKPVRILDTSERRTRNKVTRFCRVQWSHHSEEEATWEREDELKAAHPHLFTSSSESRGRDSV

SEQ ID NO: 132287 - protein, 71 aa, Oryza sativa
  Clone ID: PAT_MRT4530_34270C.1.pep
SDQSISIELRILCLACLPIKGLWICYLQSSKQRISLSLSLSLSRITVPTHLRPPVNHNYCGTASILLTTLE

SEQ ID NO: 132288 - protein, 125 aa, Oryza sativa
  Clone ID: PAT_MRT4530_34271C.1.pep
MAQLAQIVWASIWSPEDWPYANISRAHNCITKGKRKPGLGPFITEGVHFTHTTLLTRITQPVGISHVGRPPSFHDKAFRKPIQVYHMPTRGVPDQQQAQDVQRWLALLEIWSLILEILALRVFGL

SEQ ID NO: 132289 - protein, 84 aa, Oryza sativa
  Clone ID: PAT_MRT4530_34272C.1.pep
SGAQAVPVLCVVIRQGITRTLIQCFVIYVSEVMLELNALLAGSVANAVDACPWSASDRHMEHQRQVISLWKKAVLANKKTNGVF

SEQ ID NO: 132290 - protein, 69 aa, Oryza sativa
  Clone ID: PAT_MRT4530_34273C.1.pep
RPSQQLLSSCSWIVSCSHSPWSSHVTYVYPCMYSFLMWPCIMDNCVDNLSCCKKYEKTIKKKTPQTLKN

SEQ ID NO: 132291 - protein, 132 aa, Oryza sativa
  Clone ID: PAT_MRT4530_34274C.1.pep
GGKPPFHKRKGRVQHPRTNSFIHWERKRKRDAKGKTINFTYNYWVTASLEAHEFAQKGRSFTKCFSLKKNPMSRGNRAMKATFCLREIKLSAIQALSPYLPGLWPFAPHRPMGTRQLFLWIPLQTTHWEPPG

SEQ ID NO: 132292 - protein, 340 aa, Oryza sativa
  Clone ID: PAT_MRT4530_34275C.1.pep
MASESLQCKVLALRVSIHCEGCKKKVKKVLQRVEGVYRCDVDGRSNKATVTVTGKVSADTLVRKLRRAGKHAEQWPEEQQQQQPNGGQCQEETKNQAAEPGMSGEPAEPEKPASGDAAEPSDPKVTHEEPKKVAGEGAAAVAPAEDGGTEITDANVSESAGDGGGGGGGVETVKAQQPSEPKRRRKQQPPQQQKEEKAGEATMATAAAAAASTQGNHTSHHFPAAPLQQQPVHVMSYNVARPSSSAAYYAAARPASAARPPPPLPPAPPQEHSYAYSPYYSQSQPSPYRYGGYYSYYYYGGGGGGGGGGQRTPQRSAASPARNSYGDLFSDDNANSCSVM

SEQ ID NO: 132293 - protein, 96 aa, Oryza sativa
  unsure (1)..(96): unsure at all Xaa locations
  Clone ID: PAT_MRT4530_34276C.1.pep
PRRRGDNIDETTEDTTYKPTYAKTRRRISTSEIGTASPLRYLRIPIGETXALSLISPGTDSRRKTTLLSITSQTFRPPCRQQLDRLPQILYWCDYD

SEQ ID NO: 132294 - protein, 396 aa, Oryza sativa
  Clone ID: PAT_MRT4530_34277C.1.pep
MASLVSTLLLMCLIPLTRAHELRRGLELADDATTARPGGVTVPVHFSQAFYVVNLTIGTPPQPVSAIIDIGGELVWTQCAQHCRRCFKQDLPLFDTNASSTFRPEPCGAAVCESIPTRSCAGDGGGACGYEASTSFGRTVGRIGTDAVAIGTAATARLAFGCAVASEMDTMWGSSGSVGLGRTNLSLAAQMNATAFSYCLAPPDTGKSSALFLGASAKLAGAGKGAGTTPFVKTSTPPNSGLSRSYLLRLEAIRAGNATIAMPQSGNTITVSTATPVTALVDSVYRDLRKAVADAVGAAPVPPPVQNYDLCFPKASASGGAPDLVLAFQGGAEMTVPVSSYLFDAGNDTACVAILGSPALGGVSILGSLQQVNIHLLFDLDKETLSFEPADCSALS

SEQ ID NO: 132295 - protein, 2001 aa, Oryza sativa
  Clone ID: PAT_MRT4530_34278C.1.pep
MDAAMAPTSVPLPSPPIRWLLLLLDPGEHGKMGQSEDRAMYEDGGGRLDDYCSITIDGSGGLSEDIIQQRLQSVVHQREELQRLEMELRAQVIAHPQIIEAQRSFEAAAKEHVTAAAKLKEQLHEREKYILELEMKLDDKDRELDALKIDHQTVWANQDLLREQTKELATFRRERDNSEAERAQHLKQIHDLQEHLREKESQMLALEEQHRAAQDNIIYKDEQLREAHAWMARVQEMDTLQSQTMQAELRDRTEQFNQYWISFQQQYVEMQRGFLHTIQQLQLELNELRDRTGAPKDGSQTAQESSAESTLGQNKGNNMAANGSGTTDSSQSVKSNGVPDCSTKGNSNASPVPVVPSSLLGIGGFVPSAQIAGMHSYMMHPQGVPPSLASPNSAVPQFGSFQSQSTIQPNMQWPNQQEAQNASQTPDETNYHTSPPDQKALQQAAGNNDELSLKQNQATRAEHLTATAHGKQQQQQRFPSVVSESTHEQKLQVVESNVTEHLVYNEQQKAQDSSSIVSPIRKFEHQEQTNEFKHLISKLYVHQDEKVASGNQSEEQVARHQHKASDFDASTTQIHLKGGAAEFTANVGNQTDTHTSAGGGLGSLLPRIPKEPSLLDERSLLACIVRAVPAGPDGRIKISTTLPNRLGKMLAPLHWHDYKKHYGKLDDFVASHPELFVIEGDFIHLREGAQQIISATTAAAKIAAVASSAPYSLLPSVAVTPVAQSTRQKRGPVVDSRSSNVMPSRNGSTTASFGDQFDKGGHIPKPNDSVGYNIVQGIGDVTIASKVKDIQENGFSDEVRPGQSSMHAVSANGVRQERSGLPAGLRGLHTFPEDEQVACRSDHSYSKPEGIADYRASLFQQKCVFADKNKTARAEELSTKLQPNWWIPRHECTRQKIVELSVLHRKTENASCCDCNAVQRNMAESLLLPVVRGVAGKAADALVQSVTRMCGIDGDRRKLERQLLAVQCKLADAEAKSETNPAVKRWMKDLKAVAYEADDVLDDFEYEALRREVKIGDSTTRKVLGFFTPHSPLLFRVTMSRKLGDVLKKINELVEEMNKFGLMEHVEVPQLPYRLTHSGLDESADIFGREHDKEVLVKLTLDQHDQQNLQVLPIVGMGGLGKTTLAKLIYNDPSVQEHFQLKMWHCVSENFEVGSLLKSIVELATNRRCQLINTIELLRRQLEEAFGRRRFLLVLDDVWNDEENKWADDLKPLLNSVGGAGSVIVVTTRSQRVASIMGTLEPYELRCLNEDDSWEVFSKRAFGKQVQEQAKLVSIGTRIVKKCRGVPLALKTMGGLMSSKQSVSEWEVIAESNIGARVQGKNDVMDILKLSYRHLSPEMKQCFAFCAIFPQDYEMVKDELIQLWMANGFIQEEENMDLTHKGEMIFHDLVWRSFLQDVKEEFIIGYHCDSIVCKMHDLMHDLAKDVTDECASTTKELDQLKGSIKDVRHLRIPEEMEETMTELFKGTSSLHTLIDRSWRSTLWNVSVEFNLASVRALRCSVINSAITNAKHIRFLDLSETSIVRLPDSICMLYNLQSLRLNSCDELEYLPKGCGIEELKDLQHLTNRLELYNLHKVKSEEKAKQANMYQKKNLSEVLFFWGRQKRCMPNDNAYNEERVLESLAPYCSNLKVLELHGYGGVEIPEWMRDPHTFQRISKLNISNCPRCKDLPPVWLLVSLEELSLSCMDNLTTLCTNDDVEAEGCGTSLQIFPKLKKMFLRNLPNLERWAVNISGDPSSFITLPQLEILRISDCPKLAGIPDCPVLRDLNIDRCSNIAVSSLAHVTSLSYLSYDAEGFDSMTMPLGSWSSLMRLKVRSLANMVISLEDQQNQGESNLVNLRRLNLHGPKCFTTVSGFSELHHGIWVHFAFVEHLVIGDCHDIVRWPTEELRCLIRLRSLHIFKFTSLGINFSLSEEILYLSCLEELNITSCSGIVEIPKLPASLEELFIQSCQNLVVPLPPNLGNLASLRNFIVIKCESLKLLPDGMDGLTSLRKLHLDGCRG

SEQ ID NO: 132296 - protein, 62 aa, Oryza sativa
  Clone ID: PAT_MRT4530_34279C.1.pep
SASGYAPPTARPPCPARRARSPTSCPTTEPKIRVGFLDPIEQWSVAAIFFLASDAHLIAVNN

SEQ ID NO: 132297 - protein, 717 aa, Oryza sativa
  unsure (1)..(717): unsure at all Xaa locations
  Clone ID: PAT_MRT4530_3427C.1.pep
GPSSPEGLVPEAPNPREXPEDPVGGGEALASNPKAYGPDMTRDPPRALGQGRPRSSAPDSTDRPHQKVQRPVYFVSEALRDAKTRYPQAQKMLYAILMASRKFRHYFQAHRVSVVTSYPLGQILHNREGTGRVVKWALELAEFDLHFEPRHAIKSQVLADFIVEWTLVDDPVPSNVPSLPGDGEDPNADIRGAGVTLTSSRGDVLKYVIRLDFQATNNMAEYEGLLAGLRAAAGMGIRRLLVLGDSQLVVNQVSKEYQCTDPQMDAYVREVRRIERHFDGLKLRHVPRRDNTVADELSRVVSAQAPLPLGTFEEKLAQPSARPNPPRDPDTTPSTPTLGDLRASGPERVGPDPPRQVVWMTDIRAYLDKNTLPEDRAEAEKLARISKRYVLVEGTLYRCAANGILLKCVSREQGIKLIADTHQGEYGAHSASRTLVGKAFRQGFYWPTALQDAQEWVRRCKACQFHAKQAHQPAQALQVIPLSWPFAVWGLDILGPFKAARGGYQHLYVAIDKFTKWPEAYPVVKIDKHSALKFIRGITSRFRVPNRIITDNGTQFTSELFGDYCDNMGIKLCFASPAHPKSNGQVKRANAEILKGLKTKTYNVLKKHGDSWLEELPAVLWANRTTPSRATGETPFFLVYGAEAVLPSELSLGSPRVALYDEANQDDLRRDDLDYLEERRRRAALRAARYQQSLRRYHQRHVRARSLQVGDLILHHV

SEQ ID NO: 132298 - protein, 199 aa, Oryza sativa
  unsure (1)..(199): unsure at all Xaa locations
  Clone ID: PAT_MRT4530_34280C.1.pep
PTRPPTRPVRLPDSICMLYNLQSLRLNSCDELEYLPKGMRTMRKLIHIYLYWCDSLRRMPPNIGLLNNLRTLTTYVVDTEAGCGIEELKDLQHLTNRLELYNLHKVKSEEKAKQANMYQKKNLSEVLFFWGRQKRCMPNDNAYNEERVLESLAPYCSNLKVLELHGYXGVGIPEWMRDPHTFQRISKLNISNCPRCKDL

SEQ ID NO: 132299 - protein, 210 aa, Oryza sativa
  Clone ID: PAT_MRT4530_34281C.1.pep
MGRVIRNQRKGRGSIFTANTRLNKAPAKFRNLDYAERHGYLRGVVREIVHDAGRGAPLAKVVFRHPYRFKQVTETFIANEGMYTGQFIYAGKKAALTVGNVLPLGEMPEGTVVSNVEEKIGDRGTLGRTSGNYITIVGHNPDEGKTRIKLPSGAKKVVHSGSRGMIGIVAGGGRTDKPLLKASRAKHKFAVKRNSWPKTRGVAMNPVDHP

SEQ ID NO: 132300 - protein, 932 aa, Oryza sativa
  Clone ID: PAT_MRT4530_34282C.1.pep
MKKKPFKDGAENATWRNRFPVVRGVAGKAANALVQSVTRVCGVDGDRRKLERQLLAVQCKLADAKAKSETKGPLTTLSETNPAVKRWMKDLKAVAYEADDVLDDFEYEALRREVKIGDSTTRKVLGYFTPHSPLLFRVTMSRKLGDVLKKINDLVEEMNKFGLMEHTEAPQLPYRLTHSGLDESADIFGREHDKEVLVKLMLDQHDQQNLQVLPIVGMGGLGKTTLAKMVYNDPIVQKHFQLKMWHCVSENFEPISIVKSIIELATNRKCDLPDSIELLRRRLEGVIDRKRFLLVLDDVWNEDDNKWNEHLRPLLNSVGGPGSIIVITTRNRRVASIMETLQPYKPACLSEDESWELFSKRAFGRDVQEQEDLVTIGKCIVHKCKGLPLALKTMGGLMSSKHQVKEWEAIARSNIGDSVKGKDEILSILKLSYKHLPSEMKQCFTFCAIFCKDYEMEKDMLIQLWIANGFIQEEGTIELSQKGEFVFNELVWRSFLQDVKTILFRSLDYDFVVCKMHDLMHDLAKDVSSECATTEELIQQKAPSEDVWHVQISEGELKQISGSFKGTTSLRTLLMELPLYRGLEVLELRSFFLERSNIHRLPDSICALYNLQSLRLNGCSYLECLPEGMANLRKLNHLYLLGCDRLKRMPPNFSLLNNLLTLTTFVVDTDAGRGIEELKQLRYLTNMLGLYNLRKIKSTSNAKEANLHQKQELSILRLFWGCMSSYMPGDKDNNEEEMLESLKPHSKLKILDLYGYGGSKASVWMRDPQMFRCLKRLIIERCPRCKDIPTVWLSASLEYLSLSYMTSLISLCKNIDGNTPVQLFPKLKELILFVLPNLERWAENSEGENNDVIIFPELESLELKSCMKISSVPESPALKRLEALGCHSLSIFSLSHLTSLSDLYYKAGDIDSMRMPLDPCWASPWPMEEHRC

SEQ ID NO: 132301 - protein, 101 aa, Oryza sativa
  Clone ID: PAT_MRT4530_34283C.1.pep
PLFVSMFSPMMLLVVVIVGCTILCEKIHVSSAIGCALIVALLYMVLCMKAREMGSPSDLDCDLDGGGVVELNGKVNDTGTTLPMIWTTTNKHETTRNGCSN

SEQ ID NO: 132302 - protein, 93 aa, Oryza sativa
  Clone ID: PAT_MRT4530_34284C.1.pep
TRSKYRPLVSSGNGQKDGSPGGQHHHRFQGELLVVWVGPDQIPGIGSLKIPRGGGTEYHGTGASSSKSRDNWAGPILGPHPSTSFTPPHRSMV

SEQ ID NO: 132303 - protein, 151 aa, Oryza sativa
  unsure (1)..(151): unsure at all Xaa locations
  Clone ID: PAT_MRT4530_34285C.1.pep
LGWWSTVDWVHGPGKXGAPRGAHVAPTWRTRGGHGVSHAGXRDWMGPDLPPGRSDGGGGXAGTAQAGPTPMARGGAARRSGGDRPAAEGSGVAVTRTAVAAAKRLEEGSPAHSAEWVPVAESDGRGVDGVARTMANAMASTAWLGAAASDG

SEQ ID NO: 132304 - protein, 433 aa, Oryza sativa
  Clone ID: PAT_MRT4530_34286C.1.pep
RFLLLRSDRIPLPPIAGAAMAEGDAYAASAAASAASPRTPAPPETPSTQKRRQRGLVSRVWKGIFGRREDVEKLLQALSKEEEAVRSRLRRRARASRQSAHNVLAIAAALEIAAVGYAIMTTRSPDLSWQMRATRVLPMFLIPALAALIYSTITSVTKMLDNRDQHTLENLRAERQAKIDELKERTNYYTTQQLIQRYDLDPAAKAAAATVLASKLGADSGLRVFLGDESNRDATLSKSNDAQTTGPRQRKPGHLSNSTGRTYGPESLGGSYAYDGNEGVTTPNQRTVDHFRGPAGLARKEDFAFITYYCPHCNALNGPRQHDEHEMVSPGKETPISHSDGSIGHAGANLANSGAGSPIVKDLPTVEELPAESSVATNLPSAEELPAESPIANNLPAVEELAAESPVASSTPAIEELPAEGTVEKASIDHPAS

SEQ ID NO: 132305 - protein, 125 aa, Oryza sativa
  Clone ID: PAT_MRT4530_34287C.1.pep
MLKTPTQHKRLKKRAFQSPYHFRATLTDEPTPPLGTVTTSSSSAAAASTLGFSSTFCATAARCINLRFLRVLESSRFAAIATFLLRRRLCRCRCFAHRFRVRVYAARGSRRRGEEAHDEKRESPA

SEQ ID NO: 132306 - protein, 56 aa, Oryza sativa
  unsure (1)..(56): unsure at all Xaa locations
  Clone ID: PAT_MRT4530_34288C.1.pep
SKSTHTSIIQIFLHIDLXHNLNTSYLYQTLYKTFISSNTLLTTYFLNLNIINSLYF

SEQ ID NO: 132307 - protein, 900 aa, Oryza sativa
  Clone ID: PAT_MRT4530_34289C.1.pep
MLEDFFTLTEMKDGISTVARIGELVSEIKKLKSAAELNTADLIRQCATAANTLASTKNEECLQHFVQLNGVGFLHQWLQDAQNCGEDISNAAEDLIVAVLSALECLPVENAQITSCGVLHTVEHLLSHSNTDINKKAGVLCHKWRSVPKCTSDVHDMVAKERNPDQLKLPEPKPESGGANEAAIAGDKSKSEVMVCSSVPLPNHSQTNDNCDIVKQSLVMIPPNSDGNAIIGDGNPSVPSLACRNGLENVPVTEESSANNDAKSGAAQVSLPDGTAEAKSSGTNNPENPFVSNKMDVQDQNVSISVDIKKGESFLEDMPHSEKNTVGGWDLAPLDMQDSSDDESTRKEEGPTSSSDTDVKGAVNELRLKRCMTSFGDSSKAADKKSKAEKGDTSTPLAEYDDTDALEVARLVAIEVEREVIDYRGPFCGSPDINSRRSDSPDLEARRQPEPPMDEPDNDNKSSTTGEDSGSSSSMKEDGSGITDDSGTFSRKHTRSMKLGGIDLNENQCTEEVDCHTKSTLSNSINLSTPIAVAASRTSSVFPARLHFEGELGWKGSAATSAFRPASPRCTPDGEKSVSASSQRTGNALFDLNVSESDNATAGEPLSAAILPLSSDIVRKDASATVGLNSLELDLNCPCDDEEAAITTSNVPSFWNRQQCNGDWSHPSSSSSSRQPAVRNFDLNDNTPIVDGFLRGADESSVKTSGRDVSDHSAVTILGKRIVLGQKEHSHQNEHNFLGPSVESRDPARSMQSYGHTPPDYSVVSYSSHSALSFPSPFYAPGTVPYMVDAKGTPVIPPLPGFGVPTVPNLGVGTSHPSLGSRAIPPSSELSYFHPSMDLNYGRSYEGARREGASYWPVSFQGQTMFVDERMGNMSQGGSSGVPVLKRKEPDLGWDLYPRR

SEQ ID NO: 132308 - protein, 127 aa, Oryza sativa
  unsure (1)..(127): unsure at all Xaa locations
  Clone ID: PAT_MRT4530_3428C.1.pep
DARAAPRGPILXLEDYHLVEKLVNFDRKRIPERVEHAQMGSSKGFFQVTHDITHLNWAEFLRAPGVQTPVIVRFFTRIHDRGRPETLPKHCGLNIKVYTREGKLDLVGNNFPVLFIHDGMKFPDMVH

SEQ ID NO: 132309 - protein, 39 aa, Oryza sativa
  Clone ID: PAT_MRT4530_34290C.1.pep
SVIKNHCNTFISKNHIKTFLVSFVSICIVSNVNKLLSGT

SEQ ID NO: 132310 - protein, 87 aa, Oryza sativa
  unsure (1)..(87): unsure at all Xaa locations
  Clone ID: PAT_MRT4530_34291C.1.pep
PPPPSPLCRCQPPPXPNPATAAAVTPSPPASPPSPPSSSPPCPRPTIVVPAVAGDGSSLPVVAGDGFGLPTVAGDGSAPPQPPPPGG

SEQ ID NO: 132311 - protein, 110 aa, Oryza sativa
  Clone ID: PAT_MRT4530_34292C.1.pep
PALLRTAVRKPQFLKHRRMERGDGAIPFRATNIAAAAGTPTSASTAGRPQQGDRENAVSAEIERVNKLPANSSYAIHRLKVLNKLRHLLSIKRTTSQDEELELLFASLSI

SEQ ID NO: 132312 - protein, 205 aa, Oryza sativa
  Clone ID: PAT_MRT4530_34293C.1.pep
MEAELEDDDDGTVGGDGSIELEGCGSTSTSDRHSFASDGRNSFFVVRSIIALGSAHLETKTRGRNSVDLFAIAAGRSSARHGHRLLVASMSLAPTSSEPSALSIVVVAASSSTFDAAKPSGSGLCIAKQWEKAQELKAALPRPPTLQVGGSRAPAREGRRDKGWAGAEEGGDRGGCLQYLLHLCPHHGRRQAADDHGGQAAAMSK

SEQ ID NO: 132313 - protein, 487 aa, Oryza sativa
  unsure (1)..(487): unsure at all Xaa locations
  Clone ID: PAT_MRT4530_34294C.1.pep
TGRPAQEGGPERPKTRARGREERESRWTGLTMRGPGWDPLVSGSVHRAEGVPASCPQPGEGPGARARFAVDADAAGPRAASRLAVERAHXEGLTXAELAPTWRLRGCHAGRREVDDDPAANGRRAAAASGGANHGDTGKSXHTGRLFVMRGDEPTVRIRQREFDGGESRRRQPAGREEGNADEVTRDRFPAVRASTRFRELDASVGLDGATPSKAGDVWVLRSSSGDGGEHTASDGNGRGGGAPGVPFRVLVRTGSSGTHATAAVGERDGNGAGEKQGRSLRLAAKTATGGREDDAGXEEKGKKEGEKGGLAPFFFGKRGXGSGGVEAEGGGXRPPSLGGLRAEWRGRGDDDGDDGGXRFGAARRHGRXARAGAVEGDGGRDQIGAYSARARGLNGRATTWARARTTARGGRLCEPGARQGEEKEXARGGGARRGDSRARARTERRRRSARRGSRSXGRGERERAGKGRGRERARERERERERAGGE

SEQ ID NO: 132314 - protein, 811 aa, Oryza sativa
  Clone ID: PAT_MRT4530_34295C.1.pep
MPSSRRTTARGGGGGGGGGDGDGGGGGRAVPPFAGNNADHNPRELRSWARRTGFHPSTFFSGESAVSTSSFASSVMPQPPPPPPPPATSRRPPRAPERELDTEEDGDEESDLPARPRLDLERGVRGGRGARGGRPPPPRRRIDLRGELELEIPDAAPAAEEDPAPAPARGGRADARRANGVERVAAVNGGARNGNGGGAHAAAGAEARKKAEEAEAKRKAEEAEARRKKEEEERDAELAAYYQEQWANEEDGGGEGGAPAVTSETAPLYGESGLRCGVTENPGWVPLIFYGIQHYLSIAGSLVFVPLILVPTMGGSDEDTATVISTILLVSGLTTILHTFFGSRLPLIQGSSFVYLAPALVISNSEEFRNLSENKFKHIMRELQGAILVGSVFQIILGYSGLMSLFLRLINPVVVAPTIAAVGLAFFSYGFPQAGSCVEISMPLILLVLLCTLYLRKVSLFGNRIFLIYAVPFSVAVVWAYAFFLTAGGAYNFKGCNSNIPSSNILMDSCKRHLETMRRCRTDASNAWRTAAWVRVPYPFQWGPPTFHFKTSIIMVIVSLVASVDSLSSYHATSLLVNLSPPTRGVVSRGIGFEGISTLIAGVWGTGTGSTTLTENIHTLENTKMASRRALQFGAVLLVIFSFFGKIGALLASIPVALAASVLCFTWALIVALGLSTLRYTQAASSRNMIIVGFTLFISMSVPAYFQQYEPSTNLILPSYLLPYAAASSGPVRSGSNGLNFAVNALLSINVVVALLVALILDNTVPGSRQERGVYIWSDPNSLEMDPASLEPYRLPEKISCWFRWAKCVGI

SEQ ID NO: 132315 - protein, 204 aa, Oryza sativa
  Clone ID: PAT_MRT4530_34296C.1.pep
MMRARWAAGMLRRASSGEASLAARAVFARGFLGLNMKASKETIEKKEKDKARLMDEMSRGYFADIAEIRKNGGKLATANKIIIPEIAAVKFPDLSVKSPDGRTVNLPLVAPPRNDDPQTGNTVDTQNDDCKAGDMVVPDASLVCLSFRASSQKMAETWSLPFLDAFSSAGNIQVYEVSFIDSWLLSSSPVRQVFLKVMTKSNNP

SEQ ID NO: 132316 - protein, 260 aa, Oryza sativa
  Clone ID: PAT_MRT4530_34297C.1.pep
MANKSTLFLPLVFVSRWAEPSAIMDRTTKNELRPSDANEWRSEVDVYVRGASSPEYGLGVAVTPVIVNLTSQLLSFYAATTFKLNASIAANSAVVVVLELSFHLHQQALCYSSHCLTGDLSFPLHRIAVQASRAVIFFFASEKSYDLFASGIGMCTFVHVHINTIRDESKAWTGGRRKEHHAHEIDRHQCNLVGDVVKAMTEPDSNNGSPCIRRVRGDGNGGSTGIWIVGSGGNGGTAEIYSWKHEPKDFDSRWNLKVVV

SEQ ID NO: 132317 - protein, 79 aa, Oryza sativa
  Clone ID: PAT_MRT4530_34298C.1.pep
TNNRNRSLSARAGNRTPGDRRYSHRVHEYRGATGWCSKVACLARDLELDPRNPRTAGLRAPELHAKRNNSTNGENKALL

SEQ ID NO: 132318 - protein, 111 aa, Oryza sativa
  Clone ID: PAT_MRT4530_34299C.1.pep
MSVWERGTDIGRSRRELALGACGQNGREEGLCLRPLEASAWSGGAEAMTTAMTAGRFGAARRHGRQARAEADGGGDRAVGHHGTRAREATGSVRAGARTRTRRAGSGSEGA

SEQ ID NO: 132319 - protein, 134 aa, Oryza sativa
  Clone ID: PAT_MRT4530_3429C.1.pep
MARARLRVAAGSFLEREGETRRTRLVGSISFVVDELKSVDEQSFLDGTYDRKFQRALLVTVLIVKGSKFEPSPFHARSVPVANPGCIAACSWRRQQQQLVQGMESHTGINGVALKISHYLLNYAAMSRGVNDSI

SEQ ID NO: 132320 - protein, 140 aa, Oryza sativa
  Clone ID: PAT_MRT4530_342C.1.pep
MALQSTEAGARKLKRKSGLDPSTWRMVLMRHAVARYHHDYDRFDRISPCASESAAAKAPPHLIKRLQICHLPYRTQRHMTSTSVLTNRCRFSSRTSIVGEFRAAAEPSKANQSWFRFNRIAIGLGRYGQFPISLVTLSGR

SEQ ID NO: 132321 - protein, 315 aa, Oryza sativa
  unsure (1)..(315): unsure at all Xaa locations
  Clone ID: PAT_MRT4530_34300C.1.pep
MRRRLSRLFKGSGSSSSHHDESSTHSSADVLMEDAEAPRRLLNDTELNLVSDRERQAYYMLSDREYAHTREYSPENAHTKYKFSAPIECTSLITRIAKGLGVVSDQIAFISAARPCIDEAYLVQGHILKHGVDRSLIYFFPGCTNEILLPNAGYHLYNCRELTIPLQTIEESRTGGAYRETRNMTRNERESSSSSTPVQLYEAGWEPTGDAPGWTQAPHHNIVVSTRASASEDRWRAPHDIQWGDNQPSRSSGVPPSPSEWRSSSSHWDLGEITRRMDTPDIQTGEIQYNLTEHIFXTQEWQQSADAQFTNLNNM

SEQ ID NO: 132322 - protein, 303 aa, Oryza sativa
  Clone ID: PAT_MRT4530_34301C.1.pep
MAMWRAPSAAGQLLGRALASTAAQTSAGSKKVVGVFYKGGEYADKNPNFVGCVDSALGIRGWLESKGHRYIVTDDKEGINCELEKHIEDAHVLITTPFHPAYITAERIKKAKNLELLLTAGVGSDHIDLPAAAAAGLTVAEITGSNTVSVAEDQLMRILLLLRNFLPGHHQIVNGEWNVAGIAHRTYDLEGKTVGTVGAGRIGRLLLQRLKPFNCNLMYHDRVKIDPELEKEIGAKYEEDLDAMLPKCDVVVINMPLTEKTRGMFNKERIAKMKKGVTIVNNARGAIMDTQAVADACASGHVA

SEQ ID NO: 132323 - protein, 461 aa, Oryza sativa
  unsure (1)..(461): unsure at all Xaa locations
  Clone ID: PAT_MRT4530_34302C.1.pep
APDHTVPGSPGVLPDTTPANPHVSRHQGKFRRGRGGTRCMRAVRGGRRCDGPTRSLTACGGTRARGGTDRGRLDPVXAELAPTWHLRGCHAGRREVDDDPAANGRRAAAASGGANHGDTGKSEHTGQLFVTGGGEPTARIRRRSLDGGGLRRRQPAAEEEGNGDEATRGRFPAVRASTRLRELDASVGLGGTTPSEAGDERXYGARAATAASTRRAKATXEGEGAAEVPFRVLECTGSPGARRRTAEVRQSTGRRLWRGDGRELALRLAAKLATGRMTPAGRXGEKGLAPLSIWERGGGXAGATRQREGGRCLRPLAACARSGGGRAMTTAMTTAVWSGAATLATGAGRXLTTAATERSAARVGKQREARWFERRGSGDRRGLAGPGGSAGAREQRHAGSGSEGERRSGRLSHARAARGXRLSRGEGARRGGEEREKKRAREREREMGRAEFGPSNPGGGK

SEQ ID NO: 132324 - protein, 422 aa, Oryza sativa
  unsure (1)..(422): unsure at all Xaa locations
  Clone ID: PAT_MRT4530_34303C.1.pep
PPPLRPAPRPPPPATPAPASPRPPDGVLLVGGGALDGGAPPPRQLHQDPRHLPPASPAEGEEAGRRRLVGEAAAGREPGGGHGAGGRGVEEDGGGGGRLXSCCGRRRWWRRPPTAAARGRRGGRXGDAVDWGLLLGDAYHRCGEVCAEYAKTFYLGTQLMTPERRKAVWAIYVWCRRTDELVDGPNSSYITPKALDRWEKRLEDLFEGRPYDMYDAALSDTVSKFPVDIQPFKDMIEGMRLDLWKSRYRSFDELYLYCYYVAGTVGLMTVPVMGIAPDSKASTESVYNAALALGIANQLTNILRDVGEDSRRGRIYLPLDELAEAGLTEEDIFRGKVTDKWRKFMKGQILRARLFFDEAEKGVAHLDSASRWPVLASLWLYRQILDAIEANDYNNFTKRAYVNKAKKLLSLPVAYARAAVAS

SEQ ID NO: 132325 - protein, 195 aa, Oryza sativa
  unsure (1)..(195): unsure at all Xaa locations
  Clone ID: PAT_MRT4530_34304C.1.pep
MRRAHAQPHGLRWNARTGGADRGRPDPISAKLAPTWRLHGAYMXCHAGWREEDEGXPAANGRRAAAVSPGRLATMKGDGAYTGMTMEKERERANSLDSPEGARRRRISAVATGGEKRGKRRRGHEGPIPGATNGDGETEGRQQWSGGDGTTRGEEREGARGFKGRQCRFGTDFGRSRRELSLGARGQIGDRAEGG

SEQ ID NO: 132326 - protein, 357 aa, Oryza sativa
  Clone ID: PAT_MRT4530_34305C.1.pep
MPRLRRPCRACAAQPRCPAAPVAALSLGPASQRTASAMAEGQPRRASPSSAPFDRARDAPFLPLEAPSRAHKIRPPPLVRFPFARPSSLQAAAPLSPCPARRRRSSSRVSEEPARARTRDVDSGRTVSLLFPGPRPERSRPAPSTIVTAPLHPARRDRVKLTPVRRSPLPRSRARSIANREAAPSRLTADHTHGEKRRERLAGSAYPVAAEVAPTWRLRGSHAGRREVDDEPAANGRRATAASGVASHGDTGESEHTGWLHRTRGDEPTARIRWRLLDGGGLRRRQPAAREEGNGDEATRGRFPAVRASTRLRELDASVGLGGTTPSEAGDERVLRSSGGDGGEHTASDGNGRGGAS

SEQ ID NO: 132327 - protein, 57 aa, Oryza sativa
  unsure (1)..(57): unsure at all Xaa locations
  Clone ID: PAT_MRT4530_34306C.1.pep
KARPXRPSLQSLTLTGXWDAPSLWPLITPGVCVSFTVTVPFASDLPTALFFCFPSFL

SEQ ID NO: 132328 - protein, 451 aa, Oryza sativa
  unsure (1)..(451): unsure at all Xaa locations
  Clone ID: PAT_MRT4530_34307C.1.pep
MRNGHKAPSRPWTHTSRVKSAAARVIQGTTARKPVRRRCTWATTTVIQKIHINVPLLDAMQVPTYAXFLKDILNNKRPLPTTEVVKLTEHCSNLILHKLLEKKKDPGCPTITCSIGAQQFDQALCDLEASVSVMPKDVFDKLNFTVLAPTPMRLQLTDLSVRYPAEIAEDVPVKIRDFFIPVDFVVLDMDTGKETPLILGRPFLSTAGTNIDVGTGSIRFHINGKEEKFEFQPKTEQCSMVRIKYGPNPQNIQVVKVEPPKTDSLVRFMQNFLERETTMLRNRYWRTPVKAPVPAKKSEQPAQKKPSSAPKSKKTIEESRAGGTYRETRNMTRNEQGSSSSSTPVQMYEVGWAPTGMHLDGPKLHAIASESQPGQAPVRTGGMRLMTSTGGTTNPPDQVTGEIQYDLTEHIAQTQEWQQSADAQFTNINNMMQQQHDDLQAYFRFKGFNPP

SEQ ID NO: 132329 - protein, 83 aa, Oryza sativa
  Clone ID: PAT_MRT4530_34308C.1.pep
EAPRLYARYARCYSQRVQDRPGQHIRVADRILQGFRQTLRRPSNACRTQRFGGRYRETALRGGAILSDFSGCYMTVSVPPHFQ

SEQ ID NO: 132330 - protein, 151 aa, Oryza sativa
  Clone ID: PAT_MRT4530_34309C.1.pep
MAQLVDKAKGFVADKVARVEKPEAELAELSFQSVGRGGATLAGRVDVRNPYSHSIPICEVSYSLKSAGREVASGTMPDPGSLTAGDTTRLDIPVKVPYDFLVSLARDAGRDWDIDYEMRVGLTVDLPILGNFTLPLTKSGELKLPTLSDVF

SEQ ID NO: 132331 - protein, 1816 aa, Oryza sativa
  unsure (1)..(1816): unsure at all Xaa locations
  Clone ID: PAT_MRT4530_3430C.1.pep
MAGHPPNHRGEGMIDFVAELARMTLVVGYPDAPEYTTIPPLSGELPHRVRLEVHGYVGTCLANMAVEASGGTADHACQEAAYLMMARLRERHNYIFHDTAYRYHPSRANGDGVSSFRPTAGENDTTFGHMCAVMRGLDRMHSDLHKATKALNDGKLMRIVALKDEIARLKKENAQLKGLPAPGGVRIRTTPRKTTTAPVRIQLAPRNPPPAAAPAAPPVLPAVPAAPAPAPAPAPASALSFAPASAARGPASGTGGWLSATPSGSSDLSSSSSSGSQSGSGETYLPGSRSRSEGPXVYTRTGNRTTGEGSNGEERVDGVHPNSDSGNGPPPLPENPTLAQVMAHQTQMMAAMMQQMQQQHQQMHQRMMQHVEQQHQHFGPPPPQSKLPEFLGVRPPTFSSTTNPMEANDWLHAIEKKLNLLQCNDQEKVAFATHQLQGPASAWWDNHMATRPPGTEVTWAEFCRSFRKAQVPDGVVAQKKREFRALHQGNRTVTEYLHEFNRLXRYAPXDVRTDPDKQEKFMAGLDDELTNQLISGYYADFERLVDKAIRQEDQRNKMDRKRKAAQFRAHQGSHQRPRFTPGQQGGPTTMIVRQHRPFNPSNFYQGTSDSQNHHGGQPNRGAAPRPPVASAQSGQPAQAKKETEAKPGSCFNCGELGHFADKCPKPRRAGPRFIQARVNHASAEEAQAAPEVVLGTFPVNSIPATVLFDSGATHSFISKKFVGMHGLIREELSTPMRVHTPGNSSTSVQFSPSITIEIQRSPVLANLILLESKDLDVILGMDWLTKFKGVIDCANRTVTLTNEKGETVVYKSLVSPKKGVSLNQIETEIPVDTVEKNLRKLDDIPIVCEYPEVFPEDLTTMPPKREIEFRIDLAPGTAPIYKRPYRMAANELTEVKKQVDEQLQKGYIRPSTSPWGAPVIFVEKKDKTKRMCVDYRALNEVTIKNKYPLPRIDDLFDQLKGAKVFSKIDLRSGYHQLRIREEDIPKTAFTTRYGLYECTVMSFGLTNAPAFFMNLMNKVFIEFLDKFVVVFIDDILIYSKSEEEHEQHLRLVLEKLKEHQLYAKFSKCDFWLTEVKFLGHVITAQGVAVDPSNVESVTKWTPPKTVSQIRSFLGLAGYYRRFIGNFSRIARPMTQLLKKDEKFKWTAECDKSFEELKKKLVSAPVLILPDQMKDFQVYCDASRHGLGCVLMQEGRVVAYASRQLRPHEGNYPTHDLELAAVVHALKIWRHYLIGNRCEVYTDHKSLKYIFTQPDLNFRQRRWLELIKDYDMSIHYHPGKANVVADALSRKSYCTALCIESMCEELRQEFEHLNIGIVEHGFVAALEARPTLVDQVRAAQVNDPEIAELKKNMRVGKARDFLKDEHGTIWMGERLCVPDDKELKDLILTEAHQTQYSIHPGSTKMYQDLKEKFWWVSMRREIAEFVALCDVCQRVKAEHQRPTGLLQPLQIPEWKWEEIGMDFITGLPRTSSGHDSIXVVVDRLTKVAHFIPVHTTYTGKRLAELYLSRIMCLHGVLKKIVSDRGSQFTSKFWQKLQEELGTRLNFSTAYHPQTDGQTERVNQILEDMLRACALDFGGAWDKSLPYAEFSYNNSYQASLQMAPFEALYGRKCRTPLFWDQTGERQLFGTEVLAEAEEKVRIIRERLRIAQSRQKSYADNRRRELTFEAGDHVYLRVTPLRGVHRFQTKGKLAPRFVGPYKILERRGEVAYQLELPSNMIGIHDVFHVSQLKKCLRVPEEQADSEHIDIQEDLTYVEKPVRILDTSERRTRNKVTRFCRVQWSHHSEEEATWEREDELKAAHPHLFTSSSESRGRDSV

SEQ ID NO: 132332 - protein, 388 aa, Oryza sativa
  unsure (1)..(388): unsure at all Xaa locations
  Clone ID: PAT_MRT4530_34310C.1.pep
AVRLRLFPFSLLERAKQWFYANRAAVNTWDKCFTAFLSKFFPMGKTNALXGRISSFQHTRDESIPEAWERLQXNFYNGLTPKSRDHLDAAARGAFFSKTVQGAVELIEKMVSNMGWSEERLQTRQRGXKRPQGTVKALDSHITCEVCGGTDHSGNDCPETCEEAMYMGNNTGYRPQGVPATETGRILGQPDSSIENVKAITTRGGTNGISKEASSNDSADKEIQPEKTVPQEYCDTRLLLFPQRIRKPSVDEQFARFVEVIQKIHINMPLPLPTTEVVKLTEQCSNVVLHKLPEKKKDPRCPMITCSIRAQQFDQALCDLGASVSVMPKAVFDKLNFMVLSPTPMRLQLADSLVRYPAKYSCGRSGATQDGQPGEIHAKLPGEGNNNA

SEQ ID NO: 132333 - protein, 1824 aa, Oryza sativa
  Clone ID: PAT_MRT4530_34311C.1.pep
MKRILQMRSSSRSKPATMAVNASFSSHGFGEGHHIAQLRDLARFLGFSCPEYTGYSVDRVPPRCELSVYLYPRGGIHGAGLRPHHFTVARPPLQIEYQDLSWTALRRLAHDYSHRLGGSAFRQLPRLPSGHVVARYPCPYSESQPVLTRMVELSEAQATQHDLLLEAYRSLARRYAALEARLAEEGVTSVDTVSWDSGRLCHAIHLSSHSSRGSARTPSGPLSPSSRAPYSPVYSPYPNPVSPSYTPGHTPVASSRRGPRFIRTARKRVVGSSTVFRFDYPAPPPPVALAAVGPRQMASRPRRAARAPARFVFEEGRVEPEENHESANERSHHSNRSHRTASRNAEVEQPRRINRSHRTASRNAEMEQSHRSHRTASHNSGEERLPSPPHVENNMQHLMAVQTQILQGLAAAVAGFQHNAHGNGHPHMSNNRSKLTDFLRSRPPEFSQTIEPVEADDWLKDVDRKLNLVQCTPVEKTLYTSHQLRGPAADWWENYCNAHPEPTNIAWDEFATAFRAAHVPESTIDMKKEEFNRLKQGNSSVNEYLSMFNKLARYAPEEVDTDKKKIRKFLKGIAVGMRLQLLAHDFPTFQHMINKALLLEDARKEATEEYKKRKSNHQGNSSRGAPRPRYGQPMQYHQSVTQANRQPGYAPRPQMNRPAPQPQQRAPSGNTAPNSVTSFKSPQGPSAVQCFRCNQMGHYARQCPQNPTNTSSGHANGSTARTPTPAAAQSRPSSQASGQGSRASNNFGRGRMNHIQAETAQDAPDVVMGMFSVNSVPAIVLFDSGASHSFISQAFVKRNGWKTQNLRVPMIVHSPRSNIRATQICPEVNLRIEEVDFLAKPIVLDSQSLDIILGMDWLAKHKGQIDCAEKSITLQGPGGKQARFTSNTPTASRSILTCLQVTSLESVPIVCEYPDVEFAIELAPSTAPIAKRPYRMAANELAEVKRQIEELESKGYVRPSSSPWGAPVLLVKKKDGSERMVIDYRALNEVTIKNKYPLPRIDDLFDQLKGARVFSKIDLRSGYHQLKIRSEDIPKTAFSTRYGLYEFTVMSFGLTNAPAFFMNLMNKIFMEYLDQFVVVFIDDILIYSKNEEEHAEHMRLIMEKLRDHRLFAKFSKCEFWLDRVAFLGHVISSNGVEVDPSKVEAVLAWNPPKNVSEIRSFLGLAGYYRRFIEGFSKLARPMTELLKKEKKFQWSAACEDSFQEMKKRLTTAPVLTLPDIRKHFEIFCDASRQGLGCVLMQERKVVAYASRQLRPHEVNYPTHDLELAAVVHALKIWRHYLIGNRCEDYDLGIHYHPSKANVVADALSRKVYCNVAQIWPDQDRLCRELEKLRLTVVQSGVPASLTVQPTLESQIREAQKDDEGIKELIKRIQEKKDTDFSIDDQGTVWCGPCICVPAKKELRDLILKEAHESAYSIHPGSTKMYQDIKAYFWWAGMKRDVAEYVALCDICQRVKAEHQRPAGLLQPLPIPEWKWEEIGMDFITGLPRTPGGYDSIWVIVDRLTKSAHFVPVKTTFDGKKLAELYMTHVVCRFGCPKKIVSDRGTQFTSRFWKQLHEALGTDLNFSTAYHPQTDGQTERVNQILEDMLRACALDFEGTWDHCLPYAEFSYNNSYQASIQMSPNEAMFGRKCRTPLCWNEVGEALVFGPDILKSAEEQVKLIRERLKTAQNRQKNYADNRRRDLEFEKGDHVYLRVSPLRGMRFGMSGKLAPRYIGPYLVTARRGEVAYQLELPEGLADVHNVFHVSQLKKCLRVLEEQVPLGNIELEKNLTYKERPIKVLEEAERQTRRKTVKFYKVQWSNHSEDEATWEREDLLRAEFPELLP

SEQ ID NO: 132334 - protein, 128 aa, Oryza sativa
  unsure (1)..(128): unsure at all Xaa locations
  Clone ID: PAT_MRT4530_34312C.1.pep
PVARPARWPHAAYFHARRERSLPCDDVNHGGELGKLVGRINASASAAGGGGREVTWMVADVNMAWAFPVAAKXEKLGLRVAVGCFCPSSVAMSVTRIRIPELVRXGVLDESGLTRWRRAFRLAPAGSC

SEQ ID NO: 132335 - protein, 517 aa, Oryza sativa
  Clone ID: PAT_MRT4530_34313C.1.pep
SVVLDRASDKLATIRKERGKNIDMLESLLRDTSTKIFQGGGIDSPVVTKRRSRMCVGVKASHKHLVPGGIVLSSSGSGATYFMEPRDAIRLNNMEVKLSGDERAEELAILGLLTSSIADSEMKIKHLMGKILELDLACARGSYALWINAVRPAFTDRDSDTQLNPNSECSVFIEGIQHPLLLEQSLSMVKESTRVGKGQLSDEHLVSPMPIPLDMQSLEHSLSTFSGHISRLRKIVQVVSKDSLVLIDEIGSGTDPSDGVALSTSILKYLASRLNLAIVTTHYADLSRLKAVDDRFENAAMEFCLETLQPTYQILWGSTGNSNALSIAKSIGFDQKVLARAQEWVEKLLPDKQKERQGLLYGSLLDERKLLESQANEAASVLSDVERLYNEIRSEDDDLDSRVAALRATESEKVPQELQFVKSQMDQIIKNFESQLKNSELEQYNSLMRKAEAATASLAATHQPTDFTFGDEENESSYVPEIGDKVYVEGLGGGSMASVVETLGEDGSCMVQYGKIK

SEQ ID NO: 132336 - protein, 889 aa, Oryza sativa
  Clone ID: PAT_MRT4530_34314C.1.pep
MAAAAAAAKPNLLLPVSVAIPSSRVSLPTGLVCSARTPPPRLRAAAAASQALTSPVAAETPEAKQMRVETEAALEWGGVCARLAGFPSTAAGRAACGEGRVPVGRSREESERLLEQTAAAALLPAPLDFGGVEDVSSAIAAAAGARLLAVREICGVGRSIRAARRVFDQLKTLSEETPDGRSYTPLLDIMQDCDFLTELVQRIEFCLDYTLSVVLDRASDKLATIRKERRKNIDMLESLLRDTSTKIFQGGGIDSPVVTKRRSRMCVGVKASHKHLVPGGIVLSSSGSGATYFMEPRDAIRLNNMEVKLSGDERAEELAILGLLTSSIADSEMKIRHLMGKILELDLACARGSYALWINAVRPAFTDRDSDTQLNPNSECSVFIEGIQHPLLLEQSLSMVKESTGVGKGQLSDEHLVSPMPIPLDMQVRNDTRIIVISGPNTGGKTATMKTLGLASLMSKAGMFFPAKGTPRLPWFDQVLADIGDHQSLEHSLSTFSGHISRLRKIVQVVSKDSLVLIDEIGSGTDPSDGVALSTSILKYLASRLNLAIVTTHYADLSRLKAVDDRFENAAMEFCLETLQPTYQILWGSTGNSNALSIAKSIGFDQKVLARAQEWVEKLLPDKQKERQGLLYGSLLDERKLLESQANEAASVVSDVERLYNEIRSEADDLDSRVAALRATESEKVQQELKFVKSQMDQIIKNFESQLKNSELEQYNSLMRKAEAATASLAATHQPTDFTFGDEENESSYVPEIGDKVYVEGLGGGSMASVVETLGEDGSCMVQYGKIKGRTPKRSAAEANQDGNVSFGPVVQTSKNTVDLRGMRVAEASHELQMAIDGCRSYQVLFVVHGMGTGAVKECALGILRNHPRVAKFEDESPLNYGCTVAYIE

SEQ ID NO: 132337 - protein, 921 aa, Oryza sativa
  Clone ID: PAT_MRT4530_34315C.1.pep
MAAAAAAAAAKPNLLLPVSVAIPSSRVSLPTGLVCSARSPPPRLRAAAAAAAASQALTSPVAAETPEAKQMRVETEAALEWGGVCARLAGFASTAAGRAACGEGRVPVGRSREESERLLEQTAAAALLPAPLDFGGVEDVSAAIAAAAGARLLAVREICGVGRSIRAARRVFDQLKTLSEETPDGRSYTPLLDIMQDCDFLTELVQRIEFCLDYTLSVVLDRASDKLATIRKERRKNIDMLESLLRDTSTKIFQGGGIDSPVVTKRRSRMCVGVKASHKHLVPGGIVLSSSGSGATYFMEPRDAIRLNNMEVKLSGDERAEELAILGLLTSSIADSEMKIRHLMGKILELDLACARGSYALWINAVRPAFTDRDSDTQLNPNSECSVFIEGIQHPLLLEQSLSMVKESTRVGKGQLSDEHLVSPMPIPLDMQVRNDTRIIVISGPNTGGKTATMKTLGLASLMSKAGMFFPAKGTPRLPWFDQVLADIGDHQSLEHSLSTFSGHISRLRKIVQVVSKDSLVLIDEIGSGTDPSDGVALSTSILKYLASRLNLAIVTTHYADLSRLKAVDDRFENAAMEFCLETLQPTYQILWGSTGNSNALSIAKSIGFDQKVLARAQEWVEKLLPDKQKERQGLLYGSLLDERKLLESQANEAASVLSDVERLYNEIRSEADDLDSRVAALRATESEKVQQELKFVKSQMDQIIKNFESQLKNSELEQYNSLMRKAEAATASLAATHQPTDFTFGDEENESSYVPEIGDKVYVEGLGGGSMASVVETLGEDGSCMVQYGKIKVRVKGNKIKLVQRGTKDTSASSPVKGKGRTPKRSAAEANQDGNVSFGPVVQTSKNTVDLRGMRVAEASHELQMAIDGCRSYQVLFVVHGMGTGAVKECALGILRNHPRVAKFEDESPLNYGCTVAYIE

SEQ ID NO: 132338 - protein, 484 aa, Oryza sativa
  Clone ID: PAT_MRT4530_34316C.1.pep
MALRVQLVLAVAVVVPALGVAAGGATLGVNYGQVADNLPPPQAAAMLLRSLNATKVKLYDADARVLSAFAGSGADFTVGLPDRLVPRLAADPSAAAAWVRANILPHIPATSITAVTVGNEVLTGNDSAMLRSLLPAMQSLHAALAACNLTSRVVVTTAHSLAVLSSSFPPSSAAFRRELLPYMAPLLAFLAKTGSPFLINAYPYFAYKGDPEHVDLNYVLFEANAGVGDPATGLRYDNMLHAQVDAVRAAICRANYGKAVEIRVSETGWPSRGDDDEAGATPENAARYNGNLMRLVAQGKGTPAAPGEALQVYVFALFNEDMKPGPASERHYGLFKPDGTPAYDVGVKAPTIGGSWKGRANGTSGGGAGGLVVAEGPGGADGAGQGTGFYTVSAAAHKFIGGLDSPSESEALVGLCKDGPQKRGLFCSLFSLAVKMKRNRLTAGDIREEGERERSVAMDPSSRTPTSRPPPPKLDFRPYCWSPR

SEQ ID NO: 132339 - protein, 599 aa, Oryza sativa
  unsure (1)..(599): unsure at all Xaa locations
  Clone ID: PAT_MRT4530_34317C.1.pep
MEEYLKEITQEALMRACTRTRQGVIIKPGPRPKLAPDLVSIEEVTQSIQQQVASTIDSSMTVFKDKLDATFEGKFDEFLRFKFGPLMADYMSKDKASTTANQPPIDQTGSGTDGAAHTAGPTRPDGRSDRDFTVGPTGTQAGPTAPLHADQTGPWAGQTGAIIPVQGIDPTTNASYLYHLRTFDPPVSTAANSPQVPPHVPNAYNDVARGYPPDTRQGQYNHIAPQTQPIWPPNPPPNQHRPDNMEDIFSEIIRDKFGIETRNRARVYKKPYPDYYDNVTFPRNYRVPEFTKFSAKDEKQIRLPKGHVIPSQEELKRRAYCKWHDSHSHYTNDCNVFRRQVQSAIDEGLDHDPFPVNTINFNYKKVLIRPEQAESSKRKGVVIGEPRPKMIVPKKPEVGVWKENKSRALTSKAPRKTKVTFDMLLEKYEKQGGEKIRNKXHMPPIQLNQGWGGPRRPIHARLSSPNNGRFYXRFDMRFAKGDVRASSSSNKTNRGHYLPPGTELIPKWMPKDLTATQKRRLQRLRAQELREKKAEEQGDKRFIELRPPPVWRHKSIEKEKPVVVEEKEEQSVDKGESSPXRRRGYQHGHVDGKPVSRML

SEQ ID NO: 132340 - protein, 88 aa, Oryza sativa
  Clone ID: PAT_MRT4530_34318C.1.pep
MAASFMARVVLILVLSLWLLPSLLPGSLAAGASSAGNELLPLSGGSSRRMAMVRSRERKDGYGLSIAKSARRSLRLTPGYEHRTSHKQ

SEQ ID NO: 132341 - protein, 73 aa, Oryza sativa
  unsure (1)..(73): unsure at all Xaa locations
  Clone ID: PAT_MRT4530_34319C.1.pep
PKGWPPVLEILLFWRYRIKKLPYAWEDACYLTRMSLKIPANTWENXDDYXRKENLVMKRLWEKNNMERYICQR

SEQ ID NO: 132342 - protein, 778 aa, Oryza sativa
  Clone ID: PAT_MRT4530_3431C.1.pep
MVYTRNGSRATGEGSNGEERTDGVHPNSDSGNGPPPLPENPTLAQVMAHQTQMMAAMMQQMQHQHQQMHQRMLQHAEQQHQQFGPPPPQSKLPEFLRVRPPTFSSTTNPMEANDWLHAIEKKLNLLQCNDQEKVAFATHQLQGPASAWWDNHMATRPPGTEVTWAEFCRSFRKAQVPDGVVAQKKREFRALHQGNRTATVYLHEFNRLARYAPEDVRTDAEKQEKFMAGLDDELTNQLISGDYADFERLVDKAIRQEDQRNKMDRKRKAAQFRADQGSHQRPRFTPGQQGGPTTMIVRQHRPFNPSNFPQGASGSQNHHGGQSNRGAAPRPPMAPAQSGPPAQAKKETGAKPGSCFNCGELGHFADKCPKPRRAGPRFIQARVNHASAEEAQAAPEVVLVTLTNEKGETVVYKSPDSPKRGVSLNQIETEIPVDTVEKNLRKLEDIPIVCEYPEVFPEDLTTMPPKREIEFRIDLAPGTAPIYKRPYRMAANELAEVKKQVDEQLQKGYIRPSTSPWGAPVIFVEKKDKTKRMCVDYRALNEVTIKNKYPLPRIDDLFDQLKGAKVFSKVDLRSGYHQLRIQEEDIPKTAFTTRYRLYECTVMSFGLTNAPAFFMNLMNKVFMEFLDKFVVVFIDDILIYSKSEEEHEQHLRLVLEKLKEHQLYAKFSKCDFWLTEVKFLGHVITAQGVAVDPLNVESVTKWTPPKTVSQIRSFLGLAGYYRRFIENFSRIARPMTQLLKKDEKFKWTAECDKSFEELKKKLVSAPVLILPDQMKDFQ

SEQ ID NO: 132343 - protein, 519 aa, Oryza sativa
  unsure (1)..(519): unsure at all Xaa locations
  Clone ID: PAT_MRT4530_34320C.1.pep
MAGLRKEKQDGHAQHRLLHHQRDIATSSSIASKVHDNDLARVESNLPVFDGKYDSAAYVNWELAVDKQFDEYDFSNAQMIKAASNKCTGSASFWWYTVGNKLETWDECKTMMRKNFVFSYYKRTLLEKLEHLKQGDKTVREYFHNFKICITYSGLKESNENTMTRFFRGLNYDIQAGLINVTYNHIGHLFMLACSVESNILKNPREKRAMLVPPITDILQGAQNIHHEEKSNMLEMSSPSLTKEEEKTEAPILSEEGIKGKLNGADITQELCDNASPISLPQLVNEHAISSVSLCADFKHVIHIVNEVEERELTSSLNILGYVQCDDFFELDSLKEKLFDKYDLPCPTNVIFHIFGEYNDRQIYLVHRIYICLDLQPPIDVDKTCKLERPIIANHIISSLSCFDWKKKVVLNGPCDEHHMEKPRTVFREEGEDDVTIATTDTTVAHIMDEQDAIKIKXSSNCWNPIRPPATLLTSNGHRIFIRHPFLTRIRLVCTDKINNPRRELLHQVLIIYIFHHCR

SEQ ID NO: 132344 - protein, 600 aa, Oryza sativa
  unsure (1)..(600): unsure at all Xaa locations
  Clone ID: PAT_MRT4530_34321C.1.pep
MARLRKEIGAAHAKRGYFHLRQQMVGDPHGAYKVHDNDLARVESNLPVFDGKYDFAAYINWELAVDKQFDEYDFSNAXMIKAASNKCTGSASFWWYTVGNKLETWDECXTMMRKNFVFSYYKRTLLEKLXHLKQGDKTVWEYFHNFKFCITYSGLKESNENTMTRFFKGLNSDIQAWLINMTYNHIGHLFMLACSVKSNILKNPKEKQTMLVPPITDILQEAQKIHHEEKSNMIEMPSLSLMKEEEKTDAPTLSKEGIKDKLNCADITQVEQILVETTSDLPLSQVDLLVVPCDKEELCDNASLISMPQLVNEHAISSVPLCANFKHVVHIANDVEERKLITSLNTLGYVQFDDFCELDNLEEKLFAKYDLPCPTNAIFNIFGEYNDRGIYLVHRVFIFSDLEKHVIVNHTTSSFSSFDWMKQVILNELCEEHHMKKLRTIFHEEGEDDVTMATTDTTVAHIMDEQENIKIKSSMCWNPIRPPATLLTSNSRQIYIRPPFSSREYLMESSRSPLSNGSSLIAKFHPSHPSPVLAGIGLICTGKINNPRRGESIAKAQRNVLTRRQARLQVVVAAVRRLGQLIGRSISCRLLLLMYCFNWT

SEQ ID NO: 132345 - protein, 481 aa, Oryza sativa
  unsure (1)..(481): unsure at all Xaa locations
  Clone ID: PAT_MRT4530_34322C.1.pep
MAGLRKGKRDGHAQHQLLHHQRDIATSLRIAYEVHDNDLAMVESKLPVFDGKYDSTAYVNWELAVDKQFDEYDFSNAQMIKAAHNKCAGSASFLWYTVGNMLETWDKCKTMMRKNFVFSYYKRTLLEKLEYLKQCDKTVLEYFHNFKICITYSDLKESNENTMTRFFRGLNSDIQAGLINMTYNHIGHLFMLACSIESNILKNPREKKAMLVPSITNILQGAQNTHHEEKSNMIEMPSPSLTKEEEKTDAPTLSEEGIKGKLKGVDITQGECGHICPLSMLXLEQIXWKVLLIFLCRKLCDNASLISMPQLVNXHAISSVSLCTDFKHVVHIANEIEERELISSLNTLGXNNLKEKLFVKSDLQCPTNAIFHIFGEYNDKGIXXVHRVFICSDLEKHVISHHTTSSFSSFDWMKHVILNGLCEEHHMKKPRTVFYEEGEDDVAMTTMDKTVAHIINQQEDIKMHVTYTCRLARQASVHISF

SEQ ID NO: 132346 - protein, 65 aa, Oryza sativa
  Clone ID: PAT_MRT4530_34323C.1.pep
CNWLWSTLCFVLRNAAPTDPPWDNLISLKRAALIAPSLQIQTPQAGLFLLEPSMIQDKYPFWAAC

SEQ ID NO: 132347 - protein, 85 aa, Oryza sativa
  Clone ID: PAT_MRT4530_34324C.1.pep
YPLYVRISPFLLPSFSSPTVHRSFRNPHEESRTSRLPTIDEDTRCSGVRPCVRCRWLPARRCTGTAAAAACLLDGLMLAAGCPSP

SEQ ID NO: 132348 - protein, 83 aa, Oryza sativa
  unsure (1)..(83): unsure at all Xaa locations
  Clone ID: PAT_MRT4530_34325C.1.pep
MGRGVRQIACRHLTRDLTETHKGSGRLGPLGRGGSGPTPXGETKRRANTSPSGPTXPRVPGHVGDCVCLKPLVMILPVPCHRH

SEQ ID NO: 132349 - protein, 179 aa, Oryza sativa
  Clone ID: PAT_MRT4530_34326C.1.pep
LFWDWSWQELAEYDLLAMLGYVYTVTQSKILYVGHSQGTIMGLAALTMPEIVKMISSAALLCPISYLDHVSASFVLRAVAMHLDQMLVTMGIHQLNFRSDMGVQIVDSLCDGEHVDCNNLLSAITGDGCKNKLLGCFFPVLVLKKGIVVLHSSHLGVKHYMHLSLIEGTDQTCTSITGL

SEQ ID NO: 132350 - protein, 38 aa, Oryza sativa
  Clone ID: PAT_MRT4530_34327C.1.pep
MAIRARSSSSYAVAAVALALALASVAALAGEVFFHEKF

SEQ ID NO: 132351 - protein, 534 aa, Oryza sativa
  Clone ID: PAT_MRT4530_34328C.1.pep
MSCPIVPNQVTRQRQSPRRADPPLSALDSAEQEAVKPSPPPPGRIRYRTPSSPDLLLAPPSDADAKNMRRYSALPGGGARPDTLADRLHRYRGVLLVILAPLALVSLVLLLMPRSPASSSAAAGRRWGPLDANKYAVIFDAGSSGSRVHVFRFDANLDRLHIGDQIELFVQKKPGLSAYAKNPQEAAKSLVSLLEDAKRVVPAELRGQTPVRVGATAGLRALGAEKSEEILQAVRDLLREKSSFKTQPDWVTVLDGPQEGAYEWVTINYLLGKLGKTYADTVGVVDLGGGSVQMAYAIAEKDAVKAPKPSEGEDSYVKKLFLKGTTYYLYVHSYLHYGLLAARAEILKAGNGKGYSYCTLEGHQGQYKYGNGKFEASASPSGASYSKCRDDVVKALKVDQACTHMKCSFGGIWNGGGGAGQKNLFVASFFFDRAAEAGFVNPKAPVAKVKPSDFEKAAKRACKLNLKDAEAAYPGVQKDNIPYICMDLVYQYTLLVDGFGVGSHQEMTLVKKVPYSNAFVEAAWPLGSAIEVAS

SEQ ID NO: 132352 - protein, 678 aa, Oryza sativa
  Clone ID: PAT_MRT4530_34329C.1.pep
MTGFNLPEAVFRSVRPRVVAPQKTLPTEKPAIPAPPTFKTMASKTLRKFAAPSTNNVAIGPQVNIGGMDFNLKSSLITMTPASPFCGKPNEDANAHLQQFLEICSTYTIKGIRDESIPKAWEQLQEYVAACPHHGMDDWLILQNFYNGLTPVSHDHLDTVARRAFLSKTVQGAIELIEKIVSNMGWSEERLQYALSKKLAANDKILENINVKLDGFTSAFQNQLSFNQMIETQLAQLASLVPANDTGRIPGQPNSSVENVKAITTRGGKSTRDPPYPNPVGTNGISKEAPSNDSANKEVQLEKTVPQEYCDTRLLSFPQRSRKPSMDEQFARFVEVIQKIHINVPLLDATQVPTYARYLKDILNNKKPLPTTDVVKLTEKCSNLILHKLPEKKKDPGCPTITSSIGAQQFDQALCDLRASVSVMPKDVFDKLNFTVLAPTLMRLHLADSSVRYPAGIAEDVPIKIQDFFIPVDFVVLDMDTGKETPLILERPFLSTVGANIDVGTGSIRFHINGKEEKFEFQPRTEQCSMAELAPTWRLRGGHVGWREVDDDPVANGRRAAAASGGVNHGDTGKSEHTGQLFVMRGDEPTARIHRRELDGGESRRRQPAGREEGNGDEATRGRFPAVRASTRLRELDASVGLDGATPSEAGDVQVLRSSSGDGGEHTASDGNGRGGAG

SEQ ID NO: 132353 - protein, 121 aa, Oryza sativa
  Clone ID: PAT_MRT4530_3432C.1.pep
MAASGGSCPAAMKATSQGAFQKENPLDFALPLIILQICLVVVVTRVLAYLLRPLRQPRVIAEIIGGILLGPSALGRSSKFLHNVFPPKSMTVLDTLANLGLLFFLFLVGLELDISAIRRTG

SEQ ID NO: 132354 - protein, 601 aa, Oryza sativa
  Clone ID: PAT_MRT4530_34330C.1.pep
MTRHFQSRHRFTICRREGSQTNNRLDFKFEGDRRYSHRVHEYRGATGWLQGDMREVDDDAGRNGRRTTAANGGANHGDTGESEHTGWLHRTRGDEPTARIRRRELDGGESRRRQPAGREEGNGDEATRGRFPAVRASMRLRELDASVGLDGATPSEAGDVRVLRSSSGDGGEHSASDGNGRELALGGRGQSGDREDDAGEEEKGEKEGEKGGLPLCRFGKRRRLVIDYLELVMALLLGGVEKVGPWWSVSSVTLALGLIGRKQKQRRGLGEGVVHARPQLHVTSHAKQTWHSPGLWIDPNAAVGQMNLERQASDLAHIGSSFSAMDHGRVASQDAGKRDWRNINGAEDWRAMACGGAAKILSGMQRRGRGKRTWDRTNLLYLLSYSLRLVFGRAARANPSIIAPADRLRFAFPACVCECECVSSPCLAARLHVPCRRLFGAGSCAFDNAFAAALALAVGTPAQEGEARARGNRANPATLYFLVIFSLYFALEKSLTSEREGARLPSSKACGKRQAKTHAKGEKNTKPKGREGLAGASLSPLRRSSAAGFAFASAAGALVASVDNFADDGFIRSHAGYHRDSLDLAPSYPVRTPTKKPTIMA

SEQ ID NO: 132355 - protein, 414 aa, Oryza sativa
  Clone ID: PAT_MRT4530_34331C.1.pep
MATLPGGPHPTGGGAAADPMQVDQPRSAAAAAAVAPAGEKHGASLMEGSDPVTGHIISTTIGGKNGEPKRTISYMAERVVGTGSFGIVFQAKCLETGETVAIKKVLQDKRYKNRELQIMRSMDHCNVVSLKHCFFSTTSRDELFLNLVMEFVPESLYRVLKHYSNMNQRMPLIYVKLYVYQIFRGLAYIHTVPGVCHRDVKPQNLLVDPLTHQVKICDFGSAKMLVKGEANISYICSRYYRAPELIFGATEYTTSIDIWSAGCVLAELLLGQPLFPGESAVDQLVEIIKVLGTPTREEIRCMNPNYTEFRFPQIKAHPWHKIFHKRMPPEAIDLASRLLQYAPNLRCTALEACAHSFFDELREPHARLPNGRPFPPLFNFKQELANISPELINRLIPEHARRHCGFNFLPAAGP

SEQ ID NO: 132356 - protein, 784 aa, Oryza sativa
  Clone ID: PAT_MRT4530_34332C.1.pep
MVSRLRDIIIWGYILRMRGGPLMVTAQYGETSRTSATAFKTIASKTLREFAAPSADNASPFCGKPNEDANAHLQQFLEICSTYTIKSVSPDAVRLRLFPFSLLGREKQWFYANRAVVNNWDKCSTAFLSKFFPMGKTNVLRGRISSFPQTRDESIPEAWERLQEYVATCPHHLMDDWLILMNFYNGLTPMSHDHLDAAAGGAFFSKMVQGAVELIEKMVSNMGWSEERLQIRQRGMHTVKETELLAANLDHLMKRLDDHEKRPQGTVKALDSHVTFPANETGRIPGQPDSSIENVKAITTRGGKSTRDPPYPNPARTNGISKEAPSSDSAIKEVQPKKTVPQEYCDTRLLPFPQRMRKPSVDEQFAHFVEVIQKIHINVSLLDAMQVPTYARYLKDILNNKRPLPTTVVVKLTEQCSNLIFHKLSEKKKDLGCPTITCSIGAQQFDQALCDLGASVSVMPKDVFDKLNFMVLALTPMRLQLADSSVRYPAGIAEDAPVKIRDFFIPADFVVLGMDTGKETPLILGHPFLSTAGANIDVGTGSIHFHINGKEEKFEFQPRMEQCSMVRIKYGPNPQNIQVVEVEPPKTDSLVKFMQNFLEKETTIPSNRYWRTPVKSPVPAKKLEQLAQKKPSSAPKPKKVRRGERNLGRPFPFAVDHRSPLVAVDRAAAAILLVAGRHRSSFGTLDGHQQGMHPDGPKLHAIASESQPGQVPVRTGGMRLMTSNGGTINPPDQVYNLTEHIAQTQEWQQSADAQFANIYNMMQQQHDNLQAYFRFQGFNPYQGP

SEQ ID NO: 132357 - protein, 98 aa, Oryza sativa
  Clone ID: PAT_MRT4530_34333C.1.pep
TGEFMLALWGYLLLGREIKPPGKFYRTHGPLLIGGRYPIKDPGHTLKKNLRGVKASKSIIFNCLISPGGKKRYSGDPLIWPEILQDQPKIRLRAPLGG

SEQ ID NO: 132358 - protein, 90 aa, Oryza sativa
  Clone ID: PAT_MRT4530_34334C.1.pep
TLCCNLFFLPPEQKSTVQCRQFYTWTLTVPPSYPTRRYSEISTERTHLSLDHPLRPCCFDPATDRAQPATAIMGDARTGGARRWGGIPGR

SEQ ID NO: 132359 - protein, 327 aa, Oryza sativa
  Clone ID: PAT_MRT4530_34335C.1.pep
MTVGTAVRTPVGISHVGRPPSFHDKAFPKPTQETVLKCKSGKTVHPAPFGTRTDCTISEAQLGGYKGTWARPKGKRSGPAELNGPADPRRPKCARAGGEEREGRWTGLTVRGPGWDPLVSGSAHRAEGARGARARAGEGRGARARSAEERMRQAHAQPHGSRWNARMGGADRGRPVPTSAELAPTWRLRGCHAGRREVDDDAGRNGRRATAASGGANHGDTGESEHTGWLHETRGDEPMARIRRRKLDGGESRRRQPAGREEGNGDEVTRGRFPAVRASTRPRESDASVGLGGATPSEAGDERVLRSSSGDGGEHTAGDGNGRGGAG

SEQ ID NO: 132360 - protein, 503 aa, Oryza sativa
  Clone ID: PAT_MRT4530_34336C.1.pep
MAQVSPFCGKPNEDANAHLQQFLEICSTYTIKGEYVAAYPYHGMDDWLILHNFYNGLTPMSRDHLDTAAGGTFFSKTVQGAVDLIKKMVSNMGWSEERLQTHQRGMHTVKETELLAAKLDLLMKCLDDHEKRPQGTVKALDSHITCEICGGTGQGWNQPRPYYQGGNNKGNFSNQPSLKDLVFAQAKTTDALSKKPAANDKVLENINVKLDGFTSAFQNQLSFNKMIETQLAQLASLVHANETGRIPGQPDSSIENVKAITTRGVIQKIHINVPLLDAMQVPTYARYLKDILNNKRSLPTTEVVKLTKQCSNLILHKLPEKKKDSRCPTITCSIGAQQFDQALCDLGASVSVMPKDVIDKLNFMVLAPTLMRLQLADSSVRYPAGIAEDVPVKIQDFFIPVDFVVLDMDTGKETPLILGRPFLSTAGANIDVGTGSIRFHINGKEEKFEFQPRTEQCSMVRIKYGLNPQNIQMVEVEPPKTNSLVKFMQNFLEKETTMPRNRY

SEQ ID NO: 132361 - protein, 376 aa, Oryza sativa
  unsure (1)..(376): unsure at all Xaa locations
  Clone ID: PAT_MRT4530_34337C.1.pep
MGRPAQKXGPKRARGRGGEREXGGPGPSRVVPGGTRLSATRLTVRSEHAARARVRGGRRGARARFAEDAVRRAPAQPHGSPRTMRTGGGGGXKRRERLAGSADLVAAEVAPTWXHVGRREVDDDAGQNGRRTTAASGGANHGDTGESEHTGWLRETRGDEPTARIRRRECVGGGLRRRQPAGREEGNGDEVTRGRFPAARASTRLRESVPCAGLGGNASREAGDERXLPSSGGDGGEHTASDGSSRXRGAPGVPFRALARAGSSDTRDGERRQRTEHGRRRQWSGGERRKRGRLEEGGAWVYRGGNVGLEGLCLRPLEASVQSGGVGLMTTAMTAGWFGAGRRHGRXGAAEADGGGDQAVGHHGARAREATGGAAI

SEQ ID NO: 132362 - protein, 125 aa, Oryza sativa
  unsure (1)..(125): unsure at all Xaa locations
  Clone ID: PAT_MRT4530_34338C.1.pep
FWSTDAPSVVYILQGXAGVQGANNNGNTLCNGDLGRGQQFIITHRYTVVKKSQREGCACRASKSTANSRVTRSPGKSPILRAVRKSVLRNASGISRKKLDSFKHKRGGEAGAISPSKYKSSPVVI

SEQ ID NO: 132363 - protein, 73 aa, Oryza sativa
  unsure (1)..(73): unsure at all Xaa locations
  Clone ID: PAT_MRT4530_34339C.1.pep
TQFPSHLNSSKSNLILFFLLHPHXRSDPPXXQSTSSRGEPSTTSXQPXRREIKIXRYLGCLRRRRRRDKMGAW

SEQ ID NO: 132364 - protein, 1636 aa, Oryza sativa
  unsure (1)..(1636): unsure at all Xaa locations
  Clone ID: PAT_MRT4530_3433C.1.pep
MGCKMAGHPPNHCGEGMIDFVAELARMTLVVGYPNAPEYTTVPPLSGELPHRVRLEVHGYVGTCLANMVVEASGGTADHACQEAAYLMMARLRERHNYIFHDTAYRFHPRRASGDDVSTFRPTAGENDTTFGHMCAVMRGLDRMHSDLHKATKALNDGKLMRIVALKDEIARLKRENAQLKGLPAPGGVRIRTTPRKTTTKPVRIQLAPRNPPPPAAPAVPAAPAPAPVHVLAPASALSFAPASAARGPASGNGGCLFGMVYTRNGSRATGEGSNGEERTEGVHPNSNSGNGPPPLPENPTLAQVMAHQTQMIAAMMQQMQQQHQQMHQRMLQHAEQQHQQFGPPPPQSKLPEFLRVRPPTFSSTTNPMEANDWLHAIEKKLNLLQCNDQEKVAFATHQLQGPASAWWDNHMATRPPGTEVTWEEFCRSFRKAQVPDGVVAQKKREFRALHQGNRTVTEYLHEFNGLARYAPEDVRTDAEKQEKFMAGLDDELTNQLISGDYADFERLMDRKRKAALFRAPQGSHQRPRFTPGQQGGPTTMIVRQYRPFNPSNFPQGASGSQNHHGGQPSRGAAPRPPVAPAQSGPPAQAKKETGAKPGSCFNCGELGHFADKCPKPRRAGPRFIQARVNHASAEEAQATPEVVLGTFPVNSIPATILFDSGATHSFISKKFVGMHGLRKEELSTPMRVHTPGNSSTSVSFSPSVLIEIQRSPFLANLILLESKDLDVILGMDWLTKFKGVIDCANRTVTLTNEKGETVVYKSPDSPKRGVSLNQIETKIPEDTVEKNLRKLEDIPIVCEYPEVFPEDLTTMPPKREIEFRIDLAPGTAPIYKRPYRMAANELAEVKKQVDEQLQKGYIRPSTSPWGAPIIFVEKKDKTKRMCVDYRALNEVTIKNKYPLPRIDDLFEFDQLKGAKVFSKIDLRSGYHQLRIREEDIPKTAFTTRYGLYECTVMSFGLTNAPAFFMNLMNKVFMEFLDKFVVVFIDDILIYSKSEEEHEQHLRLVLKKLKEHQLTPCSATQGVVVDLSNVESVTKWTPPKTVSQIRSFLGLAGYYRRFIENFSRIARPMTQLLKKDEKFKWTAECDKSFEELKKKLVSAPVLILPDQMKDFQVYCDASRHGLGCVLMQEGRVVAYASRQLRPHEGNYPTHDLELAAVVHVLKIWRHYLIGNRCEVYTDHKSLKYIFTQPDLNLRQRRWLELIKDYDMSIHYHPGKANVVADALSRKSYCTALCIEGMCEELRQEFEHLNVGIVEHGQSRVNDSEIAELKKNMRVGKARDFHEDEHGTIWLGERLCVPDDKELKDLILTEAHQTQYSIHPGSTKMYQDLKEKFWWVSMRREIAEFVALCDVCQRVKAEHQRPAGLLQPLQIPEWKWEEIGMDFITGLPRTSSGHDSIWVVVDRLTKVAHFIPVHTTYTGKSTAYHPQTDGQTERVNQILEDMLRACALDFGGAWDKSLPYAEFSYNNSYQASLQMAPFEALYGRKCRTPLFWDQTGERQLFGTEVLAEAEEKVRIIRERLRIAQSRQKSYADNRRRELTFEAGDYVYLRVTPLRGVHRFQNKGKLAPRFVGPYKILERRGEVAYQLELPSNMIGIHDVFHVSQLKKCLRVPEEQADSEHIDIQEXDLTYVEKPVRIL

SEQ ID NO: 132365 - protein, 288 aa, Oryza sativa
  Clone ID: PAT_MRT4530_34340C.1.pep
AHSCIGPQSAETLKLIVADMLLEELLVSRIHFIFFSNWGGFFFIEQGLLTSAEGVHFTHTTLLTRITQPVGISHVGRPPSFHDKAFRKPIQVYHMPTRGVPDQQQFYPSCYSDFKFEGDRRYSHRVHEYRGATGWLQGDMAELAPTWRLRGGHVGWREVDDDPAANGRRAAAASGGANHGDTGKSVHTGRLHVTRGDEPTARIRRRLLDGGGLRRRQPVAGEEGNGDEVTRDRFPAVRASTRLRELDASVGLGGTTPSKAGDERVLRSSGGDGGEHTASDGNGRGGAG

SEQ ID NO: 132366 - protein, 604 aa, Oryza sativa
  Clone ID: PAT_MRT4530_34341C.1.pep
MGKGKTPGVTYYHEYIEAKFATGHSKIVVFTQRDAFHGPRCAQQQQHGGRLLVHTDAPHPLGADVLRHDAHRHQLPQHASPVSDASSRFTATTRPPSRSARYTVPKLPLPMQYASLKCSIAARMLPKENVMSLLHIEAGGWPEPGRLGHGGAAVGQRVTHPMAAGWESYLGAEFHNQDPISRTDGKKFQPRTEQCSMVRIKYGPNRQNIQEVEVEPPKTDSLVKFMQNFLEKDTTMPRNRYWKTPRFAVVDEPGSRLLTLQFLCTLKEIEDGISFRFFHKKYTLTWKSLSTLLGFHDSCKIDLQKGIYGFEKNKFWEDISGAPICKKARTNDIHNPTLRLMHKWIAMTLFPRGDLRPIRGDELIIIFAMVRKIKIAPVKCMIRQWLESIKFSAPVECTSLITRIAKGLGVVSDQIAFISAACPCIDEAYLVQGHILKHGVNKSLIYLFPDCTNEIPLPNTGYHLYNCHELTIPLQNIKESHAAVQMYEVGWEPTGDAPRWTQAPRHSIRVSTWVSASVDLWHAPHDIQWGDNQPPRSSGVPPSPSECRSSSSRWDLGEITRRMDTLDMQTREIQYNLTEHIAQTQEWQQSADAQFANFNNMMQQ

SEQ ID NO: 132367 - protein, 259 aa, Oryza sativa
  unsure (1)..(259): unsure at all Xaa locations
  Clone ID: PAT_MRT4530_34342C.1.pep
RRIERSLGKGGGERGXAAEGGGLCLRPLAACARSGGAEAMTTAMTAGRCGAERRHGRQARAGADDGGDQAVGHSARARGLQREARRMEWRGSGTRAGCGAERQPLRLLPPPCGPMTSALGGPRRLMISCPPLPLSPAFICVAGLGLLGLCNILRVVLATSAAKQEFRVWLPIGADRCRLDCLKYYHVVDNGVVFLESKLSKIRYSARSLLLASTDTILGLSRLISDVDNRRLVLACVLCVDLLLLLFPPPPPRGSIYTH

SEQ ID NO: 132368 - protein, 184 aa, Oryza sativa
  Clone ID: PAT_MRT4530_34343C.1.pep
MCSPPSPPVLRSTRSSPTSLGVAPPNPTLATDSRNRVDALTAGNWPLVTSSPFHPFLSAGCRRRNPPPTDTLRRIQAVGSLPLILPRHPGVRPVAPHRRKASRRNRRRPPSIRGRRLRLPPASPRRRHVGATSAPARPRSGRADPVSETEDPQCEDFEGQAPDLEQGKPPLNILSLYLKFNYVA

SEQ ID NO: 132369 - protein, 481 aa, Oryza sativa
  Clone ID: PAT_MRT4530_34344C.1.pep
MATPLLLLELLCFSMALAGGAALRLELAHVDANEHCTMEERVRRATERTHHRRLLHASTAAAAGGVAAPLRWSGKTQYIASYGIGDPPQPAEAVVDTGSDLVWTQCSTCRLPAAAAAGGGGCFPQNLPYYNFSLSRTARAVPCDDDDGALCGVAPETAGCARGGGSGDDACVVAASYGAGVALGVLGTDAFTFPSSSSVTLAFGCVSQTRISPGALNGASGIIGLGRGALSLVSQLNATEFSYCLTPYFRDTVSPSHLFVGDGELAGLSAAAGGGGGGGAPVTTVPFAKNPKDSPFSTFYYLPLVGLAAGNATVALPAGAFDLREAAPKVWAGGALIDSGSPFTRLVDPAHRALTKELARQLRGSGSLVPPPAKLGGALELCVEAGDDGDSLAAAAVPPLVLRFDDGVGGGRELVIPAEKYWARVEASTWCMAVVSSASGNATLPTNETTIIGNFMQQDMRVLYDLANGLLSFQPANCSAV

SEQ ID NO: 132370 - protein, 331 aa, Oryza sativa
  Clone ID: PAT_MRT4530_34345C.1.pep
MGMFSVQSAYKIALAEQLRKDDHGASSATGNGERALWKHIWSFLSKKKHIWSANVPQKVRIFAWRLASEGLATQLNKHRRRIIKNPACEICGAPAKDGFHANVACTKSIALRAELRKCWRLPPEEEFVQSGPDWLLLLLDHTDSHTRSLTHLMLWRVWFLRNDAVHCHGKNSVCGSVQFLQHYAETLLLTRQKADDPKGKQIAQHMGQQKPNSDKELKKEHKQHWKPPPVGWAKINVDGAFTVEDGRCGLGIVIRNSEGKVLLSSWRFIRQCRTAEEAEVMACCEGLKLACALVANRLASNTQESSLSLGKKKERRPTHLMLMYMTEKLKV

SEQ ID NO: 132371 - protein, 70 aa, Oryza sativa
  Clone ID: PAT_MRT4530_34346C.1.pep
MGSPTTYPFLFRLRLPQPPLRATARTLTASSVPAFVNALSLRLALLPERLPITRVQERRMKHALPRGPHG

SEQ ID NO: 132372 - protein, 569 aa, Oryza sativa
  Clone ID: PAT_MRT4530_34347C.1.pep
MADAAGIATVLAADGRDFLLRNSAEMVKISSIEASTVALYFSASWCPPCRRFTPKLIEAYNELVSQGKNFEVVFVSGDKDQEAFDAYFAKMPWLAVPFSDSECRAKLNKRFKVRGIPHLVILNATSGEVYTEDGVELVTVHGTEAYPFTTERINELKEQEKAAKDNQTVQSVLGTPTRDYLLSNKGDRVPISDLEGKYVGLCFVVNGYGPVVQFTSLLAKFYEKLKEVGEKFEVVAVSLDSDEELSNESFAGMPWLAIPQEDKMGEKLARYFELRGLPTLVLIGPDGKTLNNNVADIIDEHGQDAWEGFPFTAEKMEILAEKAKAKAELQTLESLLVIGDLDFVLGKDGAKVPVSELVGKTVLLYFSAKWCGPCRAFLPKLVDEYNKIKEKHNDFEIIFISSDRDQSSYDEFFSGMPWLALPLGDERKQHLSKTFRVRGIPSLVAIGADGRTVARDAKTPLTAHGADAFPFTQESGLEMERKIDEMAKGWPGKLKHELHDEHELVLTRCTTYGCDGCDEMGSSWSYRCRECDFDLHPKCALGKEEEKKGDDEAEAEADPACEGGVCRKA

SEQ ID NO: 132373 - protein, 52 aa, Oryza sativa
  unsure (1)..(52): unsure at all Xaa locations
  Clone ID: PAT_MRT4530_34348C.1.pep
FGLPHVXSIRLTRKPLVCNTPEGXNPFPKDYPPLHTRATKVANTIPXGTPRV

SEQ ID NO: 132374 - protein, 269 aa, Oryza sativa
  Clone ID: PAT_MRT4530_34349C.1.pep
MAKPVPVCRGFRHIIFARAAFCRELHLAKVVLPPVTAFAQKSLLYLFKVVAAEKSLLYLFKVVGMFSDVILSHAPAHPGCVVLIADLEETVLWHCRPGAGAGGRWLRHEYDDHAVSPDVSISYSMSMLTTVGGRFYSVDHLQKHFLVVALEFSPVDGAAPQFTAVATNDTEHTPAGHSRTVFRAVESVGELFLVAMYYVKPRDRVASKILVLKLDLLKRARVEVMSTLGERSFFLAASSKFGASVRARQVGLKENCIYYLKPDDKGLKD

SEQ ID NO: 132375 - protein, 101 aa, Oryza sativa
  Clone ID: PAT_MRT4530_3434C.1.pep
MQQQGWSYAEDEEEEEQEVASAAAIGERAGGFYSGGHRICARLREWRRRTSGGGGGARLRESYSQSKQAEIQKRFRRPASQPATEEAVAAAAAASANPYGP

SEQ ID NO: 132376 - protein, 214 aa, Oryza sativa
  Clone ID: PAT_MRT4530_34350C.1.pep
MQSEAPCSCMDTREVLVVNPTGSNQVDPDYLESEKRLEKWFVQRLAETIGFITSTPENIPTTLKRYRSDFSAATTLKRYRSDFSAAIISKLVKAGSKRYKFIAVGGLSWRAFSRTCRNQKVQAICSRRRWAAKDKSEAIRAKAVTGGNTTFAKWSSRQKAARAKMMWRKPRHTGTGFAIAPNLVDGRFGGLLRPRGISPDRWAELFRPTRGPYV

SEQ ID NO: 132377 - protein, 248 aa, Oryza sativa
  Clone ID: PAT_MRT4530_34351C.1.pep
MVLVVKQHRCMHSASCVCIKGHLSEDALFLVFRHMNWNPRLIAVLSCVCKWFDEVAKQVLWKEFCHARAPKMMLDLHSGGSHIVDGNWKALGKLLIYCNGCTKGGLFNNIHVPGHFVFRTRFSRTAGKSFLPQQCRNDVLYVSDPCEHLDQGDEGDLGFFRGIFMSFATSKVKKMLIEKRARFHPSESCPYCKAKLWSMLEANMSPGSSSARLGAYEDSVEYFVCLNGHVIGIGTLLPLSDSEEVPEE

SEQ ID NO: 132378 - protein, 386 aa, Oryza sativa
  Clone ID: PAT_MRT4530_34352C.1.pep
MAAQRQLAEGGSGGGGGTAALVPSPSPLLRGDSPSQSIHSTLFRSPTAAGPYPFHSPPTPTAAGVLGHHTMSVATEACPSPKLHTRLRLWEFADRYVFEPVDGLADLFLSVDRTNGSMSLVEELPPRGPSTNPKVRIVFGVIGVLKLAVRSYFLVITGRDCVGSYLGHAIFKLTGLKVLPCNNSLNTSSAEQKKMESEFSELLDAAERTIGLYFSYDVNLTLTSQRLHDLGDQFKSLPLWRQAEPRFLWNGYLLEPLIENKLHQYLLPVIQGSFQSIHAEVGSEKVNVTLIARRCTRRIGTRMWRRGADPEGYAANFVESEQIMQSKEFTASYVQVRGSMPFLWEQIVDLTYKPSFDVVRVEEAPRVLERHFHDLQKKYGAVVACD

SEQ ID NO: 132379 - protein, 252 aa, Oryza sativa
  Clone ID: PAT_MRT4530_34353C.1.pep
MAREGGRDDGDDTGAASTSPNSVANQSSSSSSSSEPEPVPFPVHRLARYSKSIDKAIRESVLINLLSWSLEQRMLSPEAAAHATADGLVGVVRCHAVDSGVTFYGMEGIGRSFEEELLKSFDRQLIAFRGGLPSRGEKVPVSAGEAARIRALHAAFVERDAELWTLAHVTLAEDLAASRGGDASAASIPRMVERLRQVRRLFEAVLIPLRSLKSIFDDLLSSSRSPPADADVLGGATCDTPVSNAGSCVPNV

SEQ ID NO: 132380 - protein, 89 aa, Oryza sativa
  Clone ID: PAT_MRT4530_34354C.1.pep
MASSASAKLVRALVVAAVLMQCCGVLLAARPLAAAGGGGGEEMFVVTPEILKTTGGGATTTPTGNTCKEGPTPPSSPSPPCIGSTPGRR

SEQ ID NO: 132381 - protein, 82 aa, Oryza sativa
  Clone ID: PAT_MRT4530_34355C.1.pep
DSGAILRHISSLKDMLDKVNEEIEENIQKTREIESEIVKHSETEKEYIMKESELMKGVSIAEFELNGIIQVAGNYCLYSCSY

SEQ ID NO: 132382 - protein, 229 aa, Oryza sativa
  Clone ID: PAT_MRT4530_34356C.1.pep
MAHRRRCLLLLLAVLLPAMAARGDPDAVQDFCVPDAGRGRPVELAMLPAYPCRSPANLTAGDFAFSGVRAAGNFSPETGFAGVSVTPAQFPGLHTLGMSFARADLSAAGGVNPPHYHPRATETALVLAGRVYAGFVDSGGRLFAKVLEQGEVMVFPRAMVHFQLNVGDTPATVYGAFNSENPGIVRIPATVFGSGIREAVLERAFGLTPAELRRLEKRFGPPKKAEMED

SEQ ID NO: 132383 - protein, 47 aa, Oryza sativa
  Clone ID: PAT_MRT4530_34357C.1.pep
QPHVKPFKPSSSYFFHYSQVGIHLEPDSWIWSLATIFGTVASGLPSG

SEQ ID NO: 132384 - protein, 105 aa, Oryza sativa
  Clone ID: PAT_MRT4530_34358C.1.pep
MASAAAKIAVVCLVVLSVGQSMMMTAAATTAATGATTCNCDTSGCYNCMLDVVTNWCKGRDFNWMGGREGERHRGRKEGMERHHRWGRGVERRHRWGRGSSRWEE

SEQ ID NO: 132385 - protein, 54 aa, Oryza sativa
  Clone ID: PAT_MRT4530_34359C.1.pep
KAEVGFIKNPAPHEGTGQDFMMGSPFITKTHPGPFGSPKRLTDPRPHCATTLRF

SEQ ID NO: 132386 - protein, 1493 aa, Oryza sativa
  unsure (1)..(1493): unsure at all Xaa locations
  Clone ID: PAT_MRT4530_3435C.1.pep
MVEILEVEEAVAFTPTPSGSEYSSGSRGPRHRRRDSPTPPRREPSRREDTTRSGGSALSSPPGGGRPRRVGARRRLTYGDDDSPRGALQAAGALLWHPPVNSEPETPVQRWLDDLANLVTSAQRQLAAGDRPAATGTSRTPVTLSSSARRRARRSATASRRSTAPTSSGASGSRRRHDGLYGEQDARINIERRRDERXAARMGKGASSSGVPRSSSRGGPPPXLSPGGTGCKAFVVSLQNVLWPLKFRPNLTEKYDGSINPSEFLQIYTTIIVVAGGDYRVMANYFPMALKDQARGWLMTQPPDSIHSWEDLCQQFVTNFQGTYPRPGEEADLHAIRRKDDESLRSYIQRFCXVRNTIRCIPAHAVVYAFRNGVQHNCMLEKIASKEPKTTAELFELADKVARKEEAWAWNSPGTGAAATAAPESAPHSKWRDRRGKRKPARSDDEGHVLAADGPARAPCKGKDTGDKTISTAPSGEGRSADKWCSVHNTYRHSLADCRSVKNLAERFRKADEEKRQGRREGKAPATSTGNRREEAKNKAPADDGAQGTVATLDGGGGGXACAHTSRRGFKAMRRELLAAVPTHEAARKARWSEVKLTFDQSDHPTAPGMKLQPSLPIIGVTPGHTWPLGHVELPMTFGDSTNFRTERNDFDVADLNLPYNAVLGRPTLVKFMAATHYAYLQMKMQGPAGPITVFGDVKVALTCAEQCADNLAVATEPQAPEASASRXKKRLTSADEEGALVSFLRANSDVFAWKLSDMPRVLKEVIEHRFAVRQKVRRQALERQAFIREEVAWLLEADFIREVIHPEWLANLVVAPKANGKLRMCIDYTDLNKACPKDPFHLPHIDQIVDSTAGCDLLCFLDAYSGYHXIRMAREDKEKTAFITPVGTFCYTTMPFGLKNSGPTFQRMTRIILSNQIGRNVEAYVDDLVVKTRHXDTLLQDLAETFDSLRSTRVKLNPDKCVRCAGGQTSRFSSLLPRHRSKSRENTRDREDGPPYKLRDVQCVTGCMAALSRFISRLGERALPLFKLLKRSRPFVWTEEAEQALNQLKAYLTSPPXLVAPGPEEPLLLYLAATPHVVSTALVVECEEGEPEAPLTRDGPTSPKGPEPEAPVGGREALASGPKAYDPDMTRDPPGAPEQGQPRSSRQANPPAGPSLAGHPALLAFCGLXLDILGPFKAARGGYQHLXYVAIDKFTKWPEAYPIVKINKHSALKFIRGITSRFGVPNRIITDNGTQFTSELFGDYCNDMGIKLCFASPAHPKSNGQVERANAEILKGLKTKMYNVLKKHGDSRLEELPTVLWANRTTPSRATGETPFFLVYGAEAVLPSELSLGSPRVALYNEANQDDLRRDDLVYLEEWRRRVALRAACYQQSLWRYHQRLVRAQSLQVGDLVLRRVQSRLXLSKLSPMWEGPYKLIGVPRLGSIRLTREDGTELPNPWNIEHLRRFYPXRRDFLLSRSSGQPPHNPSVCAGLVGGYHCVSFSXLQAMNFST

SEQ ID NO: 132387 - protein, 651 aa, Oryza sativa
  Clone ID: PAT_MRT4530_34360C.1.pep
MPKRTSSHSPTVSAMNPLLPSSSFPKFPHPDPNLSSPNPSPCSYLLHADADDEALIQIPCPNPSSGAASSSSVVLPPIDPAPHISSQFYTFTAESHALMLRCVLAGRPAAADEVRSATPPSVLASWRAVWKDRNEDTAYLTAWKRIQDKLGASADGRSLHFKSNPGQRVSHVGQWRDIVSEAHADPDLLRHLGLKDTVDRIKQSWTVGAKFYGIPESFVRVCVSACAVCKAAPAGQPDFAMSSPGRGKRRRRFEYTETLDVPARDVPRRLQQLAAKHKVVLCIRQKYIRHKPFMAEVKDYACHRAGVPTSSGVNATSSSGSVPDGKKTRVLKREPYQSKRCGCGFRIRAIVPIANYNEKDKSFVYEEEGTAVFKLYAVHSGHEPGPLDGNARIVHRLVGHKGALEFDPDIYGVSEEGDPNFTIKGDFDVETDDSHLAVLQQIRDLKTEVGLLEGKVGKMHPELLGSLSNELSECLHRIRKFNFDGNVCQPEDTLMIGNEEVPGWGPADVSHHLDQHDGAFCRDDEMLDDDDTDFGSSLGPIVSWDGMTAECEDRKMLMSDSPKCDKWMLKEDVGDFVEKSILNCGDDDGVEDSKIIKPLMHDETMVADPGLVGIHVEGFYSGAKWYDSPVPFCIRLIDWVDVYYDSINPSL

SEQ ID NO: 132388 - protein, 249 aa, Oryza sativa
  unsure (1)..(249): unsure at all Xaa locations
  Clone ID: PAT_MRT4530_34361C.1.pep
MVSWRRSRVVAAAGEDEXARERLVPGCGGAGGEKXAAVPRWCVALLLVGNGGRCAVRATCDDGERVVVEVRALERPRVGALLEKAAREFGYDXRACCVSLAPPASSDKLSRRTAXAPPPPELRAAGDDAARLARWALLVPAKLFLDACCTHARCMNDDDSGVHADLIRGFQFAGFRRNXCIATLADAAHPSPAPMPRRTARDEFELVDARAADRARDVRDSLPPHLPVLNRVRLQLGGGIDSIFFRNEV

SEQ ID NO: 132389 - protein, 71 aa, Oryza sativa
  Clone ID: PAT_MRT4530_34362C.1.pep
LFLCSLNITVIMRGRQRLPFKNNDFFGCILQSMFRKCFLEEIIICYEIPTLAPDDIHASYAKQIKQYMMEL

SEQ ID NO: 132390 - protein, 117 aa, Oryza sativa
  unsure (1)..(117): unsure at all Xaa locations
  Clone ID: PAT_MRT4530_34363C.1.pep
WPKPVKGRGVAAGSGLPSCAADARHHRRFSRGREARGGRGSRRRCRRICPPQPPPPLDPPMAAARPPPPLDLPQEGGERGRREPPPPLPDPPPPAXPPPPPPPPPDIPREGVAAPCR

SEQ ID NO: 132391 - protein, 205 aa, Oryza sativa
  unsure (1)..(205): unsure at all Xaa locations
  Clone ID: PAT_MRT4530_34364C.1.pep
MAKTGEGARSGRRQWLAELRCRRPPPPSFQPREGSERGQREPPPLSPDXPPQPPPPLDPPMAAARPPPPLDLPQEGGERGRREPPPPLPDPPPPAXPPPPPPPPPDIPREGGDKGLREPPPPPDSCRKESAAGGGRGEWPRGSGAAGGSPPSRRAVPVRQEEEGEMERWRRSPVEGGGGGAAALVGGRLGRGAAADVVLSERDGE

SEQ ID NO: 132392 - protein, 88 aa, Oryza sativa
  Clone ID: PAT_MRT4530_34365C.1.pep
SDSTCRIHLLLHATDVLWPCRLMAISHPRLNQTCEVSQMLQCSSRANLGARIPMRRMRDYPASEKPDWQITGRDQRSLLFGEWTALSQ

SEQ ID NO: 132393 - protein, 794 aa, Oryza sativa
  unsure (1)..(794): unsure at all Xaa locations
  Clone ID: PAT_MRT4530_34366C.1.pep
MEMEMEDNKAPSPPSPMESDVAGEKRKREDDASSSAVLAAANNTGGAQHPMWKTSLCSFFRRRAASSADGCSHGDSCRYAHSEEELRPRPDGTWDPTSDRAKKLRKVAADEVEEEVVTIDDKALDKCLVGLPRGWANDRLKTFLQDKARTNYSSILPPALLLGISYATAKKKKGMTVGFVTFENIEQLKNAIEVLTENQSGGKEIKIADANRRSHQKLHTEKPVSDNGVTTENGTSVDVPPGETSAPEAAISNKKSVRDAVTPLAHMSYNDQLEHKKNSVAQILKRLTRNARKACPTGIPLPDWVFKSKEIGGLPCKLEGILESPVINGYRNKCEFSVGFSLEGKKTVGFMLGNFREGVTAVEEPVDCPNVSEISCKYALMFQDFLQSSSLPVWNRVDNCGFWRQFTVREGRCQAQAVAQNAENQISEVMLIVQVCSTGVDDAVMKDEFDKLTVALQQGAATCSPPLPLTTIVVQDHKGISNAAPADCPLIPLLVPKVDQSEGTVDKTRIHDHIGNLWFSISPTAFFQVNTLAAERLYTLAGDWANLNSGTLLFDVCCGTGTIGLTLAHRVGMVVGIEMNESAVSDAERNALINGVSNCRFVCGKAEDVMGSLLTEYLGSPQQDIPVSEGAVSGTVKDEEVIDSSKNSGENLDSSMQKNDNGESQQLGDAPADSSSSAIDEIKGNSNDRVGNGLEGSHDEYNEVAGEDIHGEASLINESVDLKVSDCLEDRKTSDDGSSISNNDVTAATACQFEDIVAIVDPPRVGLHPTDQAYTLNLXVIKALRTHPRIRRLV

SEQ ID NO: 132394 - protein, 146 aa, Oryza sativa
  Clone ID: PAT_MRT4530_34367C.1.pep
MRRAHAQPHGSRWNARTGGANRGRPDPTSAELAPTWRLRGCHVGWREEDEGPAVNGRRAAVVSPGRLATMRGDGAYTETTRKKERERANGLDSPEGVRRRQISAAATGGEQRGKRRRGHEGPIPSGGGNVGLETDFGGQGASWRSG

SEQ ID NO: 132395 - protein, 718 aa, Oryza sativa
  unsure (1)..(718): unsure at all Xaa locations
  Clone ID: PAT_MRT4530_34368C.1.pep
FISKDSPLLEEMRTEMSSSLEAISTMPSTKISWIEQKKNNKVYDIVFDADSQNSKACNRPESYVPSVGDIIILSDVKPEHISDITRNGRPYIVAFVTEGGDEDDDSPPVKYVIISSGKIDSEDGKCQDRKEIKLFAAYLLNIVTYIRIWRCLDYNTAVRRNQSLIQEMVHYPLVADIVQKQKKDHSIDSMEIWSKLSTMDLNNSQNDAILNCISSMHSNNSSSSFSLIWGPPGTGKTKTISVLLWLMREMDHGTLTCAPTNLAVKQVASRFLKVIKESSDRACLGDVLLCGNKQRMCVDGNLKEIYLHDRVRTLLGCFVPMTGWRHRLSSLSDLFENGYSQYQKYLEDQKEGDSLTFYSYTRKRFNATYPELRRCFKEVLFHVPKSTILEVNYNNIISLLELLEDFNKKFMNKNIEDEVKGIFLYNDDQSDSSVSSLTKFSKTAISLGKIRIRCLELLNMLLSSLKLPITSSKRTIREFCMESASIVFCTVSSSSKISNKKLQLLVVDEAAQLKECEGLIPLRLPTLKHAILIGDECQLPATVKSKVCEDASFGRSLFERLSSLGHEKHLLNMQYRMHPSISIFPNISFYDRKLLDAPNVKQKEHRKKYLPGLMFGPYSFFNIEDAHSKTKNKVTVGVICPYTAQVLAIQQKLGKMKFDPVIVKINSGDGFQGGEEDIITLSTVRSNSDGAVGFLXSNRQRTNVSLTRARFKCHPEVG

SEQ ID NO: 132396 - protein, 153 aa, Oryza sativa
  unsure (1)..(153): unsure at all Xaa locations
  Clone ID: PAT_MRT4530_34369C.1.pep
MGGNVGLGTDLRGQGRELALGGRGQSGDREDDAGEEEKGEKEGEKGGLXPLCRFGKKEEVSGGDAAEGGGMLPPSLGGLRAEWRGRXMTTAMTAGRFGAERRHWRQARAEADGGGDRAVGHHGTRARLATGGAVDGVARLGHARWLAGPSGCA

SEQ ID NO: 132397 - protein, 75 aa, Oryza sativa
  Clone ID: PAT_MRT4530_3436C.1.pep
NCCSCFSFRFLCPLIWYIAALLYYCKYYNRDPRERPGLAASAFLAVIFTAATIVTLSVLLIMCTQKRLNSCACLG

SEQ ID NO: 132398 - protein, 207 aa, Oryza sativa
  Clone ID: PAT_MRT4530_34370C.1.pep
MAMGGSGPMWHRSGAGMRAERRWAAARGATLRPARCSRRPARLSPPIYATCRHARLLSPLRAARSRTDPLSHFFPAHHRACIYSPHLSGKSLRRTKATPMAHANGSKVAAHLTRLLHRSPRRPVALARRGPAAVPPAGRRPTSLKKKRREFTEHVLQTPEQQNRQVLSPDLPVLHVNMPPSGVRDADATPATHAPACEGNSIVTEFT

SEQ ID NO: 132399 - protein, 606 aa, Oryza sativa
  Clone ID: PAT_MRT4530_34371C.1.pep
MATWRLRRAAAAIAASSAVVAAGAAWPSASASDPSPAALEAARRRVAQPGAAPPPRAAQRAALAGSTPADPLDVLVVGGGATGCGVALDAATRGLRVGLVEREDFSSGTSSRSTKLIHGGVRYLEKAVFNLDYGQLKLVFHALKERKQVVYYWFGLKFYDIVAGRRLLHLSRYYSVDESVELFPTLAKNSHDRSLRGTVVYYDGQMNDSRLNVGLACTAAVVGAAILNYAEVVSLIKDESGERIIGARIRDTLSGKEFDAFAKVVVNAAGPFCDSVRKMANNDVVPMISPSSGVHIVLPDYYSPDGMGLIVPKTKDGRVVFMLPWLGRTVAGTTDSSTAITMLPEPHEDEIQFILDAICDYLNVQVRRSDVLSAWSGIRPLAMDPSAKNTESISRDHVVFEDYPGLITITGGKWTTYRSMAEDAVNAAIRSGNLKPANGCVTDHLHILGGYGWDPASFTVLAQNYKRMKRTYGGKIIPGAMDSAVSKHLSHAYGTLATQVASIAQNEGLGKRLAHGYPFLEAEVAYCARHEYCESAVDFIARRCRLAFLDTDAAGRALPRIIEILALERKWDKARQKLELQKGKDFLETFKSSKNAQFRDGKHNGQ

SEQ ID NO: 132400 - protein, 443 aa, Oryza sativa
  unsure (1)..(443): unsure at all Xaa locations
  Clone ID: PAT_MRT4530_34372C.1.pep
MDISRANEGYTSCGPVVEMSWHRAGVLLLGAQSCLPVPEVPAVGGVGSVLLSMARMGWKLCHVLRPYAMVKRPQDTVKALDSHVTCEVYGGTGHSRNDCPKTCEEAMYMGNNNGYRPQGGQGWSQPRPYYQGGNNIGNFSNQPSLKDVVSAQAKTTDALSKKLVANDKIGENINVKLDGFASAFQNQLSFNKMIETQLAQLASLVPSNETGRIPGQPNSSTENVKAITTRGGTNEIAKEAPSSDSTDKEDQPEKTLPEKKKNPGCPTITCSIGAQQFDQALCDLGASVSVMPKDVFDKVNFTVLAPTPMRLQLTDSSVRYPAGIAEDVPAKIRDFFIPVDFVVLDMDTGNETLLILGQPFLCTAGANIXIKYGPNPQNIQVVEVEPPKMDSLVKFLQNFLEKETTMPKNRYWRTPVKPPIPAKKLEQPAQKKPPSAPKPRKDF

SEQ ID NO: 132401 - protein, 372 aa, Oryza sativa
  unsure (1)..(372): unsure at all Xaa locations
  Clone ID: PAT_MRT4530_34373C.1.pep
NPSFTQVVFQILSLKASVDTRTGCTNIETQLDGYKGTWARPERKDSSAELNGPAGPRRRPRAAQDARARRKERESGGPGSPRAVPGGTRLSAARLTVRREHAAXARVEDGRGARTRFAVDAGAAGPRATSRLAVERAHGEGLTGVGPSRXSAELAPTWRLRGCHVGWREVDDDPASNGRRAAAASGGANHGDTGNSEHTGRLHVTREGEPSARIRRRLLDGGGLRRRQPAAGEEGNGDEVTRGRFPAVRASTRLRELDASVGLGGTTPSEAGDERGGQGRELALGGRGQSGDREDDAGEEEKGEKEGEKGGLPLCRFGKKGEGSGGDAAEKGGARPPSLGGLRAEWRGPGGDDGDDGGXRFGAERRHWRQAR

SEQ ID NO: 132402 - protein, 163 aa, Oryza sativa
  Clone ID: PAT_MRT4530_34374C.1.pep
MARGGSFSRLRLRAGVVVAAAAAALLLFAVVAPPAAAFNIGLQSAGDGASKAGLCSRTCESDHCTTPPLLRYGKYCGILYSGCPGEQPCDELDACCMHHDNCVQAKNDYLSTACNEELLECLARLREGSSTFQGNKCMIDEVIDVISLVIEAAVVAGRLLHKP

SEQ ID NO: 132403 - protein, 325 aa, Oryza sativa
  unsure (1)..(325): unsure at all Xaa locations
  Clone ID: PAT_MRT4530_34375C.1.pep
WAGRPKTAQARARAXGGERESGGPGSPRAVPGGTRLSTARLAVRREHAAHARGRGGTRCTRAVCGGRGCDGPTRSLTARGGTRARGGTDRGRLDPVXAELAPTWRLRGCHAGRRKVDDDPAANGRRAAAASGGANHGDTGKSEHTGRLFATGGGEPTARIRRRLLDGGGLRRRQPAAGEEGNGDEATRGRFPSVRASTRLRELDASVGLGGTTPSEAGDERVLRSSGGDGGEHTASEGDGEGEGAAEVPFRVLECTGSPGARRRTAEARQSTGRRQQRGDEWKRRGRMTPAGGKGKKEGEKGGLPLCRIGKXGGSGGDAPGGFPA

SEQ ID NO: 132404 - protein, 338 aa, Oryza sativa
  Clone ID: PAT_MRT4530_34376C.1.pep
MVEEGRSLAETPTWSVATVTTLMVAACFLVERGISRFAKWLRKTKRKAMLAALEKIREVLLLARCLIVFLTKGNPCLIAELMLLGVISLLLSARSRVRTRPRSSFVVEAMQTAAAAAAAWAAEPIAVHLHLIAAPLQGGDRVAVWDGCSRLLRAEVGCCGHSPGAAAAAASGLRLFPTPDPAVELPLTAENVEIVLDEVRPYLMADGGNVALHEIDGNVVRLKLQGACGSCPASVTTMKMGIERRLMEKIPEIVAVEPIADEETGLELNQENIEKVLDEIRPYLSGTGGGELEFVAIEEPIVKVRLTGPAAGVMTVRVALTQKLREKIPKIAAVQLLS

SEQ ID NO: 132405 - protein, 775 aa, Oryza sativa
  unsure (1)..(775): unsure at all Xaa locations
  Clone ID: PAT_MRT4530_34377C.1.pep
MPAGNFWVRYARRFLGLQFKFTHDRWASHGAVDYVLRWKESYSDRTGSSMYRAGSGWCMTGFNLPKNFNENPEAFFRSVRPRVVAPQKTLPTEKPAIPVPPTFKTMASKTLREFAAPSADNVAIGPQVNIGDVDFDLKSSLITMAQASPFCGKPNEDANAHLQQFLEICSTYTIKGVSPDTIRLRLFLFSLLGRAKQWFYANHAAVNTWDKCYTAFLSKFFPMGKTNALRGRILSFQQTRDGSIPEAWECLQEYVAACPHYGMDDWLILQNFYNGLTPMSRDHLDTAAGGAFFSKTVQGAVELIEKMVSNMGWSEERLQTCQRGMHTVKETELLAAKLDLLMKCLDNHEKRPQGTVKALDSHVTCEVCGGTGHSGNDCPETREEAMYMGNNNGYHPQGGQGWNQPHPYYQGGNNNGNFSNQPSLKDLIFVQAKTTDALSKKLAANDKILENINVKLDGFASAFQNQLSFNKMIETQLAQLASLVPANETGRILGQPDSSIENVKAITMRGGKSTRDPPYPNPAGTNGMSKEAPSNDLADKEIQPDKTVPQEYCDTRLLPFLQRMRKPSADEQFARFVEVIQKIHINMSLLDAIVSVMPKDVFDKLNFTVLSPTPMCLQLADSSVRYPAGIEEDVPVKIQDFFISVDFVVLDMDTGKETPLILGRPFLSTAGANIDVGTGNIHFDINRKEEKFEFQPRTEQCSMXVKFMQNFLEKETTMPRNRYXKTLVKSPVPAKKLDQPAQKKLSSAPKPKKVWKEKPKAPAPSPLETGGKYAN

SEQ ID NO: 132406 - protein, 62 aa, Oryza sativa
  Clone ID: PAT_MRT4530_34378C.1.pep
FFFFCIFLARQSFFFPKHNRGSYTHAHARQSYWKRLFKLRISRHFGANGLISKKIKEGGKDS

SEQ ID NO: 132407 - protein, 462 aa, Oryza sativa
  unsure (1)..(462): unsure at all Xaa locations
  Clone ID: PAT_MRT4530_34379C.1.pep
RAGRPKKAAQNGPRRARAXEEERESRWTGLTTRGPGWDPLVSGLAHRAEGARDAALGWGEGRGCGGPTRSLTARGGARAREGTDRGRLDPVXAELAPTWRLRGCHAGRREVDDDAGRNGRRSTAASGGANHGDTGESEHTGWLHETRGDEPTARIRRRKLDGGESRRRQPAGREEXGNGDEVTRGQFPAARASMRLRESDASVGLGGATPSEAGDERVLRSSGGDGGGHTVSDGNXGRRGRGQRGREDDAGXEEKGKKEGEKGGLPPCRFRKKEEGGGGVAAEGGGLXPPSLGGLRAEWRGRXAMTAAMTAGRFGAARRHGRQARAGAAEGDGGGDQTVGHXGTRARLAAGGXAADGEARLEHARWLXGPSGCWRGRVAGPGGADAMRARTTRARARERRAGSGKEGRKGXARLGAGGSRTRGRLARSRTQRARRAGGAERRERERGRRGGRGRWAERDSAH

SEQ ID NO: 132408 - protein, 1380 aa, Oryza sativa
  Clone ID: PAT_MRT4530_3437C.1.pep
MEANDWLHAIEKKLNLLQCNDQEKVAFATHQLQGPASAWWDNHMATRPPGTEVTWVEFCRSFRKAQVPDGVVAQKKREFRALHQGNRTVTEYLHEFNRLARYAPEDVRTDAEKQEKFMAGLDDELTNQLISGDYADFERLVDKAIRQEDQRNKMDRKRKAAQFRAHQGSHQRPRFTPGQQGGPTTMIVRQYRPFNPSNFPQGASGSQNHHGGQPNRGAAPRPPMAPAQSGPSAQAKKKTGAKPGSCFNCGELGHFADKCPKPRRAGPRFIQARVNHVSAEEAQTAPEVVLGTFPVNSIPATILFDSGATHSFISKKFVGMHGLIREELSTPMRVHTPGNSSTSVQFSPSITIEIQRSPFLANLILLESKDLDVILGMDWLTKFKGVIDCANRTVTLTNEKGETVVYKSPDSPKRGVSFNQIEAEIPVDTVEKNLRKLEDIPIVCEYPEVFPEDLTTMPPKREIEFRIDLAPGTAPIYKRPYRMAANELAEVKKQVDEQLQKGYIRPSTSPWGAPVIFVEKKDKTKRMCVDYRALNEVTIKNKYPLPRIDDLFDQLKGAKVFYKIDLRSGYLQLRIREEDIPKTAFTTRYGLYECTVMSFGLTNAPAFFMNLMNKVFMEFLDKFVVVFIDDILIYSKTEEEHEQHLRLVLEKLKEHQLYAKFSKCDFWLTEVKFLGHVITAQGVAVDPSNVESVTKWTPPKTVSQIRSFLGLAGYYRRFIENFSRIARPMTQLLKKDEKFKWTAECNKSFEELKKKLVSAPVLILPDQMKDFQVYCDASRHGLGCVLMQEGRVRHYLIGNRCEVYTDHKSLKYIFTQPDLNLRPRRWLELIKDYDMSIHYHPGKANVVADALSRKSYRTALCIEGMCEELWQEFEHLNVGIVEHGFVAALEARPTLVDQVRAAQVNDSEMAELKKNMRVGKARDFHEDEHGTIWLGERLCVPDDKELKDLILTEAHQTQYSIHPGSTEMYQDLKEKFWWVSMRREIAEFVALCDVCQRVKAEHQRPAGLLQPLQIPEWKWEEIGMDFITGLPRTSSGHDSIWVVVDRLTKVAHFIPVHTTYTGKRLAELYLSRIMCLHGVPKKIVSDRGSQFTSKFWQKLQEELGTRLNFSTAYHPQTDGQTERVNQILEDMLRACALDFGGAWDKNLPYAEFSYNNSYQASLQMAPFEALYGRKCRTPLFWDQTGERQLFGTEVLTEAEEKVRIIRERLRIAQSRQKSYADNRRRELTFEAGDYVYLRVTPLRGVHRFQTKGKLAPRFVGPYKILERRGEVAYQLELPSNMIGIHDVFHVSQLKKCLRVPEEQADSEHIDIQEDLTYVEKPVCILDTSERRTRKKVTRFCRVQWSHHSEEEATWEREDELKAAHPHLFASSSESRGRDSV

SEQ ID NO: 132409 - protein, 413 aa, Oryza sativa
  unsure (1)..(413): unsure at all Xaa locations
  Clone ID: PAT_MRT4530_34380C.1.pep
TGWRYSLARRTLNDTTFTNRSQPAERGNSTPFQHILNDIDLDLVSDRERQAYYMLSDREYAHTREYSPELLKKIGMDVEFRTIXKAVGWQRFAVVDEPGSCLLTLQFLCTLKEIEDGISFRFFHKEYTLTXKGLSTLLGFHDSCKIDLXKGISGFEKNRFWENISGAPICKKPRTNDIHNPTLRLMHKWIAMTLFPRVQGHILKHGVDGSLIYFFSGCTNEIPLPNAGYHLYNCRELTIPLQTIEESRAGGAYRETRNMTRNERESSSSSTPVQMYEAGWEPIGDAPGWTQAPRHSIGVSTWASASEDRWRAPHDIQWGDNQPSRSSGAPPSPSEWRSSSSRWDLGEITRRMDTLDMQTSEIQYNLTEHIAQTQGWQQSADAQFANFRNMMQQQDDDLQEYFRFQGFNPYQGP

SEQ ID NO: 132410 - protein, 694 aa, Oryza sativa
  unsure (1)..(694): unsure at all Xaa locations
  Clone ID: PAT_MRT4530_34381C.1.pep
MTGFNLPENFKENPEAFFRSIKPRVVAPQKTLPTKKPAILAPPTFKTMADKTLREFAAPSVGNVAIGPQLNLGDVDFDLKSSLITMAXASLFCGKPNEDANAYLQQFLEICSTYTMKGVSPDVVRLRLFPFSLLGKAKXWFYANRATINTWDKCSIAFLSKFFPIGKTNPLHGRISSFQQTRDKSIPETWERLQKYTPMSCDHLDTLAGVAFFSKTVQGAVDLIEKMASNMSWSKERLQTRQRGIHTIKEIEMLAAKLDLLMKRLDDHDKRPQGTIKALDSHVTCEICGSTGHSRNDCPETREEAMYMGNNNNGYRPQGETQLAQLALLVPANEYGRIPRQPDSSKTDSLVKFMQNFLEKETTMPRNRYWKTPVKSSIPAKKLEQPAQRKPSSTPKSKRGSGSSSSHHDESSAHSSADVSMEDADAPRHLLNDADLDLVDDREMQAYYLLSDRKYAHTREYSPELLKKIGMDVDFRAIWKAVGWQRFAVIDXPGSHLLTLQFLCTLKEIEDGISFRFFHKEYTPTWKGLSTLLGFHDSCKIDLLKGISGFEKNRFWEDISGAPICKKPRTNDIHNPTLMLMHKWIAMTLFTRGDLRPIRGXELIIMFAMVRKIKIAPVKCMIRQCYHELTIPLXTIVESRAGGAYRETHNMTRNEXEGSSSSTPVQMYEAGWEPTGDVPGWTXQAPCHSIGVSS

SEQ ID NO: 132411 - protein, 58 aa, Oryza sativa
  Clone ID: PAT_MRT4530_34382C.1.pep
MASRRRTLLKVIILGDSGVGKTSLMNQYVNKKFSNQSCSSTPASPPPTPSATPVTHMS

SEQ ID NO: 132412 - protein, 83 aa, Oryza sativa
  Clone ID: PAT_MRT4530_34383C.1.pep
DRKEAVDVLSANLTPWSISSLDSLIAPNVPEERFSSAQCPELLTVKLIRLLCYCSRKFPVIMLNKPNMCTYEVPYNMVALSYA

SEQ ID NO: 132413 - protein, 140 aa, Oryza sativa
  Clone ID: PAT_MRT4530_34384C.1.pep
KDLGGLFGGPRFFKKAPRDFPPREGLKVFVWGPPPLPPGMFWTKGGAINPPVVPVIFWAKAFPPTGGGFYPFFGPQDKVFQLKQAPKKIRGSFGSMVGGRETKFFLPPPPQGREVRFFQKNPTPKGKFRGLQSLFLPPRP

SEQ ID NO: 132414 - protein, 102 aa, Oryza sativa
  Clone ID: PAT_MRT4530_34385C.1.pep
KGGGDPWVYRGMRDRNRQGNQLPQKGGEQELGETRAKEGSGGKRISVYKGEKQTSRKQKEESRGGLRRGLTQHNGVGPKDRFPGGETGGAPTKKKNRPNPPG

SEQ ID NO: 132415 - protein, 1064 aa, Oryza sativa
  Clone ID: PAT_MRT4530_34386C.1.pep
MASDACSGLHLVRLHAWGMQVVCSTALITLKKGSKLIKYSRKGKPKIREFRLSSDENTLVWYSHNKEKCLRLSSVSKVIPGQRTAVFRRFLRPEKDYLSFSLIYKNGQRSLDLVCKDQAEVEVWFSTLESLITSCRLNFLNDGQTDRVSFSEDVTIYQDSTSYDTTLDIASSITRSFNSAGYSTPNSLNSIRADVGSDRVNMLRASTGDNSRVSISSAPSSSSQSSGLDDIESLGDVYVWGEVWTEVLPSEGSSNYLCSKTDFLIPKPLESDVVLDVQQIACGSRHIGLTTRQGEVFTWGEELGGRLGHGTDTDICRPKLVESLAVSNVEYIACGEFHTCVVTASGDLYDWGDGSYNAGLLGHGTGVSHWLPKRVSGPLEGLQVLSVACGSWHSALTMSSGKLFTFGDGTFGSLGHGDRESVAYPKEVEALSGFRAMKVACGVWHSAAIVEISGQASTNAMSRKLFTWGDGDKNRLGHGDKEAKLVPTCVQALVDHNFHQVACGHSMTVALATSGHVFTMGSSNNGQLGNPKADGKQPCMVQDKLGNELVEEISCGSNHVAALTSRSEVYTWGMGANGRLGHGSVEDKKKPTLVDALKDRHVKSISCGSNFTTCICIHKWVSGADQSVCSGCRQPFGFTRKRHNCYNCGLVHCHACSSRKVLKAALAPTPGKPHRVCDSCFMKLKAADTGVISSYNKRNVITRRSIDIKDKLERPEIRPSRLATTSPAEPVKYQETKNVRNETKPADPMSMMKASQVPAMLQFKDMAFAGTFGTVPTTVKSMTMGGQMQMGMPMFSPSPPSKKPSPPPATASPLIGKVDNDGLKKTNELLNQDISKLQSQVNKLKQKCETQDEQLQKAERKAKQAASMASEESARRNTVLDFVKHLDSEDILMISQPSILQLKVIADRVPGDVADNLKTLQSQSERFLAGQSSNLVEITGLTGHDIGHHRSSSTGSLPVSQDGSSGNASGSSIAMASDSPCHRIMENNLKAPGDFAPKYGTHGEVQLIEQFEPGVYVTLIQLRDGTKVFKRVRFSKRRFAEQQAEEWWRENQERVFKKYNHPTN

SEQ ID NO: 132416 - protein, 154 aa, Oryza sativa
  Clone ID: PAT_MRT4530_34387C.1.pep
MVQKDCMPWLSLPGRVRLNSGKKSTSREREKKEGRSPASSKKSARQMSKPHCLCPGGAPRYGHTDTGGQHKVGPTNAHTAQSQWPLTRRCNPGGPSEEKRTVPRGRETWAMLITTCPPNEESSSCKIELQFCCGTTQTDPAHMFAPDKWGPIAQ

SEQ ID NO: 132417 - protein, 160 aa, Oryza sativa
  Clone ID: PAT_MRT4530_34388C.1.pep
RSDLGDMKQIVVAFIQLAKKLENPRLISDRDGTAVQKDSSDMSQYSSDLKLKKKQSKTMSERRGANWTTAGADPSSRAFDREIKRSLSKLKKRDIDSGSETSDDDDGYSEGDETESETTVSDTESDLDVNSGAWDLKGNGMKLFESSESLTDDRGWGARM

SEQ ID NO: 132418 - protein, 98 aa, Oryza sativa
  unsure (1)..(98): unsure at all Xaa locations
  Clone ID: PAT_MRT4530_34389C.1.pep
ATRPILARSEEQLEARQEKKKRKSKVELLMAVKRIHKELKDPHKDCPTSCSLRTLGQDMFHCXVTIMGAFDSPHALXTVLRSMHFPPDYRFRQHKVEL

SEQ ID NO: 132419 - protein, 1360 aa, Oryza sativa
  Clone ID: PAT_MRT4530_3438C.1.pep
MVYTRTGNRTAGEGSNGEERADGVHPNGDSGNGPPPLPENPTLAQVMAHQTQMMAAMMQQMQQQHQQMHQRMMQHAEQQHEQFGPPPPQSKLPEFLRVRPPTFSSTTNPMEANDWLHAIEKKLNLLQCNDQEKVAFATHQLQGPASAWWDNHMATRPPGTEVTWAEFCRSFRKAQVPDGVVAQKKREFRALHQGNRTVTEYLHEFNRLARYAPEDVRTDAEKQEKFMAGLDDELTNQLISGDYADFERLVDKAIRQEDQRNKMDRKRKAAQFRSNQGSQHRPRFTPGQQGGPTTMIVRQHRPFNPSNFHQGTSGSQNHHGGQPNRGAAPRPPMAPAQSGQPAQAKKETGAKPGSCFNCGELGHFADKCPKPRRAGPRFIQARVNHASAEEAQAAPEVVLVTLTNEKGETVVYKSLASPKKGASLNQIETEIPVDAEEKNLRKLEDIPIVCEYPEVFPEDLTTMPPKREIEFRIDLAPGTAPIYKRPYRMAANELAEVKKQVDEQLQKGYIRPSTSPWGAPVIFVEKKDKTKRMCVDYRALNEVTIKNKYPLPRIDDLFDQLKGAKVFSKIDLRSGYHQLRIREEDIPKTAFTTRYGLYECTVMSFGLTNAPAFFMNLMNKVFMEFLDKFVVVFIDDILIYSKSEEEHEQHLRLVLEKLKEHQLYAKFSKCDFWLTEVKFLGHVITAQGVAVDPSNVESVTKWTPPKTVSQIRSFLGLAGYYRRFIENFSRIARPMTQLLKKDEKFKWTAECDKSFEELKRKLVSAPVLILPDQTKDFQVYCDASRHGLGCVLMQEGRVVAYASRQLRPHEGNYPTHDLELAAVVHALKIWRHYLIGNRCEVYTDHKSLKYIFTQPDLNLRQRRWLELIKDYDMSIHYHPGKANVVADALSRKSYCTALCIEGMCEELRHEFEHLNMGIVEHGFVAALEARPTLVDQVRAAQVNDPEIAELKKNMRVGKARDFHEDEHGTIWMGERLCVPDDKELKDLILTEAHQTQYSIHPGSTKMYQDLKEKFWWVSMRREIAEFVALCDVCQRVKAEHQRPAGLLQPLQIPEWKWEEIGMDFITGLPRTSSGHDSIWVVVDRLTKEELGTRLNFSTAYHPQTDGQTERVNQILEDMLIACALDFGGAWDKSLPYAEFSYNNSYQASLQMAPFEALYGRKCRTPLFWDQTGERQLFGTEVLAEAEEKVRIIRERLRIAQSRQKSYADNRRRELTFEAGDYVYLRVTPLRGVHRFQTKGKLAPRFVGPYKILERRGEVAYQLELPSNMIGIHDVFHVSQLKKCLRVPEEQADSEHIDIQEDLTYVEKPVRILDTSERRTRNKARVGVMERGGPCDGLCRFRIHLGTRGDCPSPAGDGGET

SEQ ID NO: 132420 - protein, 92 aa, Oryza sativa
  unsure (1)..(92): unsure at all Xaa locations
  Clone ID: PAT_MRT4530_34390C.1.pep
TVHISQHRGSTFHGRNPIVTMTSFDSPGERLRRRPNDGNGHQADHEQLHELDVDRIARRDHCRTTLMIKNILNKRTSXMLLAAIDENHQQTY

SEQ ID NO: 132421 - protein, 68 aa, Oryza sativa
  Clone ID: PAT_MRT4530_34391C.1.pep
CFFFFFFFFFFFKVPCNINRYYYRLPFDGTRFIGQPCRRSLNTDEHITQVMGVSTRRYSLGIAHLLRA

SEQ ID NO: 132422 - protein, 187 aa, Oryza sativa
  unsure (1)..(187): unsure at all Xaa locations
  Clone ID: PAT_MRT4530_34392C.1.pep
TLNFKVHNGTQLRFWEDCWAGNSSFDRLYPSLYQLTRKKNVTMAEVLGREPLNASFRRALVGDNLDSWFSLVTEVVSFELSDQNDVFIWKAHKKGVFTVNXMYKALICDGVIPRKTFIWKLRVPLKIKIFLWYLKREIILTIDNLAKRRWKGNTKCCFCNANETIQHLFFDCHNQENFGSKILARKK

SEQ ID NO: 132423 - protein, 505 aa, Oryza sativa
  Clone ID: PAT_MRT4530_34393C.1.pep
MAASTITLICWFISCAGAFKLHVASVRLLFRWSSTAQHQLVIEDSGIIKYGERTWALKRNKKWHHSRVDVAITYALFIGALCLEVCAIFFMVMMSPWTWASLQYWKYHRLADAAWYVFKSLQTESMSWWSNSLGQYNFLSSCFSDNVFGKVMSLVGAKEFWRNFRYSQRVGVKAEMKKLVFEAKCLAEIFGASQTSSVDADPNSGVGSALDIILREQFEVAILSLHVYTDIFLHRCMNPTSADSCDATRERRHLMDACRTISEYMCYLLVVHPEMLPVSGSVRDVLDKASETVAKVSSGAAASKGRVSVVLEKLATDRDLNDLSDPITLAGFVFRGHKEEAVHCHESLQVLARAWVGVLLYAAGKSRGENHARQLSMGGEFLSFVWLHMAHCSLGDMGTFEVELVRPSAVNEGGRHFTPTGQLCESDSGEEMPSAARLWTTEAGSSGTRSAAGLELGRTARFGPEILPRCLVLVVGGDIPGEGRWSVALGEGEEELAWIFHLLSN

SEQ ID NO: 132424 - protein, 233 aa, Oryza sativa
  Clone ID: PAT_MRT4530_34394C.1.pep
MAVWWERNMGLARRTTQVNLGVLNLESFALALHVRWLWYEWKSLDKAWVGLDTLCDETDKILLSTTMITIGDGATSHFWDLAWMHGRHPKDVMPQVYTISKGKNRTLRDTITDNTWSQDLNLSIIGDMSTKLLEQLVTLWTTVQSVQLSPDTNWRLLSTSSWTEIHEKNLEHARKLDVARAHKVSQLDSRYSPYLVYNHPESVGTKQIHELETAFHLLVVCRYMRRIWNMLAN

SEQ ID NO: 132425 - protein, 267 aa, Oryza sativa
  unsure (1)..(267): unsure at all Xaa locations
  Clone ID: PAT_MRT4530_34395C.1.pep
MVLIFSMHVSLILFFTEKCLVNIMCSPTAYGSLGVLNLESFALALHVRWLWYEWKSLDKAWVGLDTLCDETDKILLSTTMITIGDGATSHFWDLAWMHGRHPKDVMPQVYTISKGKNRTLRDTITDNTWSQDLNLSIIGDMSTKLLEQLVTLWTTVQSVQLSPGVVDEIIWRLTNHEEYSVPPKKSSSLXSTSTNYDIIIWKPWARNKCKLFARLVIRNRDWILDKLVIQGCPNNTYCLLCRHELETAFHLLVDCRYMRRIWNMLAN

SEQ ID NO: 132426 - protein, 137 aa, Oryza sativa
  unsure (1)..(137): unsure at all Xaa locations
  Clone ID: PAT_MRT4530_34396C.1.pep
AHQVEFLVDADLIMVMQNGKIAQAGKFQRXLQQIMAFGGILGAHFCAVEQVIRCIKGNQQQMAKHIYDKLLTRSXRDNTEEGKLLLGEERENGYLSXQVDWSYLTAARGGLFIPMIIARQCFFQILKVGSNYRMASA

SEQ ID NO: 132427 - protein, 131 aa, Oryza sativa
  unsure (1)..(131): unsure at all Xaa locations
  Clone ID: PAT_MRT4530_34397C.1.pep
ALTSDTMLGSGDAYVIQKNCDTADLYEAEDKDTEQRPVLHTKNGIAPSXMREHTXYGHADQLLXFGSNDVATEANKPGHGGETISCSQDEGADELKNQNSLYECTTPDKYFASSGISAPTLVSAAIRVLYW

SEQ ID NO: 132428 - protein, 244 aa, Oryza sativa
  unsure (1)..(244): unsure at all Xaa locations
  Clone ID: PAT_MRT4530_34398C.1.pep
LHRVYTQFVADFDQLTPDRVRWTPYTQHDVNDRAPHGLADLCTRDMQLWMTTCHLVVDVHVEPHNVHRVLKQLGMYQDFPPRDGRPLDAEFVEHVHVESDXRRVSCRSAADVVQTSGRRPSPPLPRRSSVDRSGPSSSRRGYEAAHTSHGRPSFQHTPAPEYTRGSAGSGVPTSSTAPPRPQVFQTPPYVHPSQGASGSAHFPCRTAPVRRISCRTGAVRQPSCRTGAVRQPCLSNGGCSTGPA

SEQ ID NO: 132429 - protein, 336 aa, Oryza sativa
  Clone ID: PAT_MRT4530_34399C.1.pep
MSVLPEQRTPQGSHSSAPFASRSTANILPSTWTFTCCCPPVAAAAAAASAATGAPPSLASAVWSTSMGATEPSPVCAATTARGADDGEEAAAAAAVSFDLAFTISMSSMAAFSAIDLFLCFFPARCSLMPLSDVAITLQDAHPRNSPICLTAWCSPPTTMSTVPFSGQVLSATLLVATPSATAMAPASRFPPTLPAAAMVVEAAASAPFAFAVAAAMDLCFLPARCDRMTVTDGAFTLQTSQIMKTSSSLRMACGSPSTSTTTVPCSPSAAAAVVGGAPAAFTPFIGEAVAVAGAGGFPACCCFSFVALETCLPPSRWHIMVTRSAVLTLQPSQRR

SEQ ID NO: 132430 - protein, 488 aa, Oryza sativa
  Clone ID: PAT_MRT4530_3439C.1.pep
RPVYFVSEALRDAKTRYPQAQKMLYAVLMASRKLRHYFQAHRVSVVTSYPLGQILHNQEGTGRVVKWAIELAEFDLHFKPRHAIKSQVLANFIAEWTPVDEPVPPNVSFLPRDVKDPNADIHGGHWVMHFDGSLNLQGAGARVTLTSPSGDVLKYVIWLDFRATNNMAEYEGLLAGLRAVARMGIHRLLVLGDSQLVVNQVSKELELRHVPRRDNTVADELSRVASARAPLPPGTFEERLAQPSARPNPSRDPDDTPSAPTLGDSRPSGPEGVDPDPPHQVVWMTDIRAYLDGNTLPEDRAEAEKLARISKRYVLIEGTLYRRAANGILLKCVSREQGIELIADTHQDILGPFKTARGGYQHLYVAIDKFTKWPEAYPVVKIDKHSALKFIRGITSRFGVPNRIITDNGTQFTSELFDNYCDDMGIKLCFASPAHPRSNGQVERANAEILKGLKTKTYNVLKKHGDSWLEELPAVLWANRTTPSRATG

SEQ ID NO: 132431 - protein, 44 aa, Oryza sativa
  Clone ID: PAT_MRT4530_343C.1.pep
MRRRDLTSSEERLDRWTQATGLRRLMFTAVTVEAHDLDPGRCRP

SEQ ID NO: 132432 - protein, 790 aa, Oryza sativa
  Clone ID: PAT_MRT4530_34400C.1.pep
MSDDMPIRLYYGDAPIQICDSGVDLTVYAFHDTSLNAPEHMGLNDVLGWLYNMFGVDPVHDKFVINAVWPVRGQHGWQWRVVEVASTGSWRKFVSKVREKGYSLAIVVQKTKCVDRSGESSHAVVEETPLEGGQAENVWRTEQGRGEEVVEGNTQGEVIVRGTNREANDSDDEEPDSPMRVDAAEENEAVVDQMEVENEEYIALVVEGEDTTLWDNETYIPDNWTTISMSRMKVNDGLDAHWCYDSKQVKVGQMFHDKGHLQDAVKRWAFVQKREFRVKVSNRTTYDVKCIQGGCPWRVHGYKPQHDTLWVASRVEQHTCLLENTRLVHRNLTAAFVAQMVYSKVVRKTSLSPFTIMHDVEKEYGYEISYDKAWRAKQKALEMRFGTYEDSYHNLPPLLEVMQARNPGTHMAILDEVNEYGENVLRRAFWSFGCMIEAFKNCIPLLCVDGTFMTGKYRGTILTAIGVDADSHVVPVAFAFFESENTSSWLWFLRHIKMCVVENRPNVCVLHDRHAGLLSAIQKLQEDVTQSVPWPDLHSRWCMRHFGANFYRQFRSKRLMDLFKKLCKQNQQRKFDAIWEQLDRLTTTHMEEAEFVEHVHVESDTLLQRLEARPPVVRCGADVRPTAITTTTPTFQRGSEWSILFTSRGASGSAHFPYMPTGDNVLNTPAWGLHITPRAPEQGHTQHTYDEYGSASTHHGVPAYSPCTAFIEDFFSTDPPQGEVGMDYWHAAPQVTQPTQETEAGQGPDVTPQQAARDRHPPDNLTYPTEQIRRMKKGGPSKRAKGTDRP

SEQ ID NO: 132433 - protein, 257 aa, Oryza sativa
  Clone ID: PAT_MRT4530_34401C.1.pep
MEIRLFLGRLRRGPRELERTGRSKRAGRPKKAAQSGPRRARAEEGERESGGPGSPRAAPGGTRLSAARLTVRREYAAHARGRGRDAVHARGSRWTRMRRAHAQPHGSRWNARTGRDRPGLARPGRREVDDDPAANGRRVAAASGGANHGDTGKSEHTGRLHGTRGDEPTARIRRRLLDGGGLRRRQPAAREEGNGDEATRGRFPAVRASTRLRELDASVGLGGTTPSEAGDERVLRSSGGDGGEHTASDGNSRGGAG

SEQ ID NO: 132434 - protein, 963 aa, Oryza sativa
  Clone ID: PAT_MRT4530_34402C.1.pep
MSGDMPIRLYYGDAPIQICDSGVDLTVYAFHDTSLNAPEHMGLNDVLGWLYNMFGVDPVHDKFVINAVWPVRGQHGWQWRVVEVASTGSWRKFVSKVREKGYSLAIVVQKTKCVDRSGESSHAVVEETPLEGGQAENVWRTEQGRGEEVVEGNTQGEVIVCGTNREANDSDDEEPDSPMRVDAAEENEAVVDQMEVENEEYIALVVEGEDTTLWDNETYIPDNWTTISMSRMKVNDGLDAHWCYDSKQVKVGQMFHDKGHLQDAVKRWAFVQKREFRVKVSNRTTYDVKCIQGGCPWRVHGYKPQHDTLWVASRVEQHTCLLENTHLVHRNLTAAFVAQMVYSKVVRKTSLSPFTIMHDVEKEYGYEISYDKAWRAKQKALEMRFGTYEDSYHNLPPLLEVMQARNPGTHMAILDEVNEYGENVLRRAFWSFGCMIEAFKNCIPLLCVDGTFMTGKYRGTILTAIGVDADSHVVPVAFAFVESENTSSWLWFLRHIKMCVVENRQNVCVLHDRHAGLLSAIQKLQEDVTQSVPWPDLHSRWCMRHFGANFYRQFRSKRLMDLFKKLCKQNQQRKFDAIWEQLDRLTTIHMEEVRKKPIVARQEEPEGLEPIPNEAPSITRRRKRGRATKCFTEWVEFEPREKWSLLYDTDGSRYGVMTTNLAEVYNWVMKNTRPLPLVAILEGITRGTQKYLCKSVTRWRCFPPQGDSTVPHQAAITDTFAPQPRSAYNSMAEFVEHVHVESDTLLQRLEARPPVVRCGANVGPTAITTTTPTFQRGSEWSILFTSRVRSSPHISRSSFLSAHPSTGVHQGVSRIRGTHVEHGTTTSADDEYGSASTHHGVPAYSPRTAFIEDFFSTDPPQGEVGMDYWHAAPQNATLSNCGSSTDILSNCGSSTAQPVERGLFDSPACRTGAVRQVLLNGSLPISSPVALWPFDRRPIELHPFDRDLFSRFSPVDHYFCDFP

SEQ ID NO: 132435 - protein, 246 aa, Oryza sativa
  Clone ID: PAT_MRT4530_34403C.1.pep
MTDVFEGVEFTWTSVPGEGGGGGGRSNGGGTAAESDSRELSFDAEHTDTALDRYVPFIRDEVERARRRDRELEISMNEGSSWNGIVHHHPATFDTVAMDPALKKQFDFNKSQNILLTLNEEEKEKLTLSGLLNFIDGLWSTSGEERVIVFTTNYRERLDPALLRPGRMDKHVYMGHCGWDAFTTLARNYFLVDDHPLFPEIRRLISQAEVTPAEVSEMLLRSEDAGAALAGLAEFLEVKKKKMNQA

SEQ ID NO: 132436 - protein, 67 aa, Oryza sativa
  Clone ID: PAT_MRT4530_34404C.1.pep
SGETSHSPVQLYEAGWEPTGDAPGWTQAPHHNIVVSTRASASEDRWRAPHDIQWGDNQPSRSSGVPP

SEQ ID NO: 132437 - protein, 1012 aa, Oryza sativa
  unsure (1)..(1012): unsure at all Xaa locations
  Clone ID: PAT_MRT4530_34405C.1.pep
PHRQPPPRVATSSPYKXMSGDMPIRLYYGDAPIQICNSGVDLTVYAFHDTSLNAPEHMVRGQHGWQWRVVEVASFGSWRKFVSKVREKGYSLAIVVQKTTCVDRSGESSHAVVEETPLEGGQAENVWRTEQGRGQEVVEGNTQEEVIVHGTNREANDSDDEEPDSPMRVDAAEENEAVVDQMEVENEEYLALVVEGEDTTLWDNETNIPDDWTTISMSRMKVKVGQMFHDKGHLQDAVKRWAFVQKREFRVKVSNRTTYDVKCIQGGCPWRVHGYKPQHDTLWVASRVEQHTCLLENTRLVHRNLTAAFVAQMVYSKVVRKTSFSPFTIMHDVEKEYGYEISYDKAWRAKQKALEMRFGTYEDSYHNFHPLLEVMQARNPGTHMAILDEVNEYGENVLRRAFWSFGCMIEAFRNCIPLLCVDGTFMTGKYRGTILTAIGVDADSHVVPVAFAFVESENTSSWLWFLWHIKMCVVENRPNVCVLHDRHTGLLSAIQKLQEDVTQSVPWPDLHSRWCMRHFGANFYRQFRSKRLMDLFKKLCKQNQQRKFDAIWDQLDRLTTTHMEEVRKKPIIARQEEPEGLEPIPNEAPSITRRRKRGRATKCFTEWVEFEPREKWSLLYDTDGSRYGVMTTNLAEVYNWVMKNTRPLPLVAILEGITRGTQKYLCKRYSRKGLGLSYELVIVTTVQPTVQEWEHAADNLALQTPPDDGSYYGAYLRWYRSVTRWRSAYNSMAEFVEHVHVESDTLLQRLEARPPVVRPDDVASILRNFRARAAALLRRVSCRSAADVVQTSGRRPSPPLPRRSSVDRSGPSSSRRGYEAAHTSHGRPSFQHTPAPEYTRGSAGSGVPTSSTAPPRPQVFQTPPYVHPSQGASGSAHFPYMPTGDNVLNTPAWGLHITPRAPEQGHTQHTYDEYGSASTHHGMPAYSPRTAFIEDFFSTDPPQGEVAMDYWHAAPQVTQPTQETEAGQGPDVTPQQAARDRHPPDNLTYPTEQIRRRKKGGPSKRAKGTDRP

SEQ ID NO: 132438 - protein, 547 aa, Oryza sativa
  unsure (1)..(547): unsure at all Xaa locations
  Clone ID: PAT_MRT4530_34406C.1.pep
RKDRLLGRNFSQVSTKARNTRAKRKASRRERTGSSRAKRFPKTLLPPSPGAGRQRQRFRRPALPIAGARRRAGWSKKERKRKERGREIRLSSGGXGAAREKGAARPNLTGRPAREGGPKRARGRGGEXRSRWAGSISRGSGWDPLVGGSAHRFGRGTAHARGSWRTRXAAGPRAALRLTVDHAHGEGGXRRERLTGSADPVVPRWLRRGXATRAGWRKTKAPAANGRRAAAVSPGRRAMTRGDGVYTGMTRENERVRANGLDSPEGVRRRRIAAAATGGEKRGKRRRGHEGLIPGGESIYAAAGIHPLRRIRGKRTEGGRRREALPSSGGDGGEHTASDSSSRGGAREEMDRGGRTGECTTEMRRGAVTRGRRHGSDLSSLGPGKRKKRAHPESPSASSLVPAPLTRTTTNGDGEXEHGRRRQWSGGDGTKREEKEGERATRQKXELCLRPLEASAQXWRSRVXDDGDDGGXVWSGAATRAAGXGQARQRLTAAATRRSATTACTRGKQRAAWRFGRRRREAAARTEGARLGAAHAHARAAHGQSGG

SEQ ID NO: 132439 - protein, 116 aa, Oryza sativa
  unsure (1)..(116): unsure at all Xaa locations
  Clone ID: PAT_MRT4530_34407C.1.pep
MAKGGAFVIFEVLPTAGVISIALPMRGKVQPPQECHATLGRGQGPPHPHRPCLTEKYDGDVDPSESLQICTAIIEAVGGGDQVMASVFPMALRGQAGGWPMNLLXASVHSWEDSCS

SEQ ID NO: 132440 - protein, 222 aa, Oryza sativa
  Clone ID: PAT_MRT4530_34408C.1.pep
MGNDWACSIAFPFLMYLGEVGCDGDWMDRVAVYAASGFTLAQEGAPYLGFKVMVETCSVVLLVRGSYAKDPVRVPFCFSAFNYCFITILCKRTPSLLGNPCVIPPLEKLAVPAPPTFKTMASKTLCEFATPSADNVAIGPQINMGDVDFDLKSSLITMAQASLFCGKPNEDANAHLQQFLEICSTYTIKGVSPDAIRLRRFPFSLLGRAKQWFYANRAAVNT

SEQ ID NO: 132441 - protein, 915 aa, Oryza sativa
  unsure (1)..(915): unsure at all Xaa locations
  Clone ID: PAT_MRT4530_34409C.1.pep
MEVMASLVNILALISEACRSAEKLPAALITGGVVEAAAAIFVGVFKAPGGIFQHHGKAPFYLYYGITGGVAIFGFAEAWAGFWVSGDLNGRRAVGKTILWVSILPLVLVAALGGAHHPAPRGLSNRGRSTGPSTDPVEQWAFDRPAGEEAEEAPAGRKGLATPSSSEVKVKVGQMFHDKGHLQDAVKRWAFVQKREFRVKVSNRTTYEISYDKAWRAKQKALEMRFGTYEDSYHNLPPLLEVMQARNPGTHMAILDEVNEYGENVFRRAFWSFGCMIEAFRNCIPLLCVDGTFMTGKYRGTILTAIGVNADSHVVPVAFAFVESENTSSWLWFLRHIKMIKNLMDEAEVKDRSRRKKACILCGENHSRTFCNVLKMRGPDQYWRIDPLWVPRLRAAGLLTFARLVEPSRARSERIHIDAALLSALVDRWRPETHTFHLTVGEMVPTLQDVSYLLGLPIAGPAVGPTMVNAGWADDLLASFGGVLPVALEDLTDGHGPTKSWLNQFRQDVFPDDQEEWIVQRHLVAYLLWLFGWVMFTGTHADSVDKYFIHFAEQIAELPIAEIPQYSWGSAVLAATYAGLCDACVRNSKQSSLPGCPLLLMLWAHERFDIGRPQLDSYANYGLREMYRSGVDDIDDRPTMGSLWTHREPQWVSGMTRRVYTQFVADFDQLTPDRVRWTPYTQHDVNDRAPHGLADLCTRDMQLWMTTCHLVVDVHVEPHNVHRVLKQLGMYQDFPPRDGRPLADSLHRYSRKGLGLSYELVVVTTVQPTAEFVEHVHVESDTMLQRLEARPPVVRPDDVASILRNFRAXTSGRRPSPPLPRRSSVDRSGPSSSRRGXASGSAHFPYMPTGDNVLNTPAWGLHITPRAPEQGHTQHTYDEYGSASTHHGMPAYSPRTAFIEDFLSHPNPAPPHNGT

SEQ ID NO: 132442 - protein, 131 aa, Oryza sativa
  unsure (1)..(131): unsure at all Xaa locations
  Clone ID: PAT_MRT4530_3440C.1.pep
PSAGKRREQRPPGTGSQKXRQRTRDAHERINESPTDPGDXAAKPQPRDRGRGEXXGKEEQDEPHPEPQGGXTRKGEXQREPRRAGAAXXXAPXRAXAGXRXRGXAPPXXXXXXVPRPPLHLRCLKERTRGR

SEQ ID NO: 132443 - protein, 384 aa, Oryza sativa
  unsure (1)..(384): unsure at all Xaa locations
  Clone ID: PAT_MRT4530_34410C.1.pep
VHAELDRAPLPCRACSRSAPQPARVPEPRHSNRRVSRCKPRARAVVADRLVAAVVSACPRLSPVSPLRSTPPRLGFQTDIAALXKAPGALPLFFSRCPIASTPLLPPPLLISVVPPFVLPPRSISPPXVFGSSTSSLPVASRRRPDHCRRSPCARXPSPPVLRSTRSSPASLGVAPLNPTLATDSRSRVDALTTGNWPLVTSSPFSPFXLSAGYRRRNPPPTDSLRRIQAVGSLPLILPRHPGVRPVTPHRRKTPRRNRRRPPSIRGRRLRLPPASPRGSHVGATSAPARPKSGRADPGQPLPCARSIVHPVQVSTDASKLKIXITTWVKLGFYKRLGKPDTWVGACELNEFXKTADRGTYRVYGFPLLHLRTVSLEFHPNIRQ

SEQ ID NO: 132444 - protein, 1440 aa, Oryza sativa
  unsure (1)..(1440): unsure at all Xaa locations
  Clone ID: PAT_MRT4530_34411C.1.pep
MGVRQAGLKPRPPRPRVRFXFEDHIASRRRESPHRRRDMPIRLYYGDAPIQICDSGVDLTVYAFHDTSLNAPEHMGLNDVLGWLYNMFGVDPVHDKFVINAVWPVRGQHGWQWRVVEVASTGSWRKFVSKKTTCVDRSGESSHAVVEETPLEGGQVENVWRTEQGRGEEVVEGNTQGEVIVRGTNREANDSDDEEPDSPMRVDAAEENEAVVDQMEVENEEYLALVVEGEDTTLWDNETNIPDDWTTISMSRMKVNDGLDAHWCYDSKQVKVGQMFHDKGHLQDAVKRWAFVQKREFRVKVSNRTTYDVKCIQGGCPWRVHGYKPQHDTLWVALMVEQHTCLLENTRLVHRNLTAAFVAQMVYSKVVRKTSLSPFTIMHDVEKEYGYEISYDKAWRAKQKALEMRFGTYEDSYHNLPPLLEVMQARNPGTHMAILDEVNEYGENVLRRAFWSFGCMIEAFRNCIPLLCVDGTFMTGKYRGTILTAIGVDADSHVVPVAFAFVESENTSSWLWFLRHIKMKRGRAMKCFTEWVEFEPREKWSLLYDTDGSRYGVMTTNLAEVYNWVMKNTQPLPLVAILEGITRGTQKYLCKRYSMDSLNLSKPSVKYSPAITQYMDEKSKKGGIHRVWHAGNRELLFEIRLRDKSGVGIGTTNITLECTLWPEYHTCKCNCNKPYLLHRPCSHVLAASAKGGVDGNIFVSPYFRKESWEATWRGELRGWRAVCDFTRPPPGQANWVPDSNLLVDTKGRRQSRRIKNLMDEAEVKDRSRRMADQYDGQLIDKEIDRNHRSRRLSTGTFCNVLKMRGPDQYWRIDPRWVPRLRAAGLLTFARLVEPSRARSERIHIDAALLSALVDRWRPETHTFHLTVGEMVPTLQDVSYLLGLPIAGPAVGPTMVNAGWADDLLASFGGVLPVALEDLTDGHGPTKSWLNQFRQDVFPDDQEEWIVQRHLVAYLLWLFGWVMFTGTHADSVDKHFIHFAEQIAKLPIAEIPQYSWGSAVLAVTYAGLCDACVRNSKQSSLPGCPLLLMLWAHERFDIGRPQLDSYANYGLREMYRSGVDDIDDRPTMGSLWTHREPQWVSGTTRRVYTQFVADFDQLTPDRVRWTPYTQHDVNDHAPHGLADLCTRDMQLWMTTCHLVVDVHVEPHNVHRVLKQLGMYQDFPPRDGRPLADSLHRYSRKGLGLSYELVIVTTVQPTVQEWEHAADNLALQTPPDDGSYYGAYLRWYRSVTRWRCFPPQGDSTVPHQAAITDTFAPQPSSAYNSMRGRCGADVGPTAITTTTPTFQRGSEWSILFTSRVRSGPHISRSSFLSAHPSTGVHQGVSRIRGTHVEHGTTTSADDEYGSASTHHGMPAYSPRTAFIEDFFSTYPPQGEVGMDYWHAAPQVTQPTQETEAGQGPDVTPQQAARDRHPPDNLTYPTEQIRRRKKGRPSKRAKGTDRP

SEQ ID NO: 132445 - protein, 114 aa, Oryza sativa
  Clone ID: PAT_MRT4530_34412C.1.pep
MSSGRTPPPTGKCRTAASRGIRSTATFAAAFTLPGGYSSDAGSQGLPIMARNVAFKAFLISDTLAMCASLAGLDLGSSSIPVTKSSTVPECCAPSATASATTTTTNSAGVGSSP

SEQ ID NO: 132446 - protein, 57 aa, Oryza sativa
  Clone ID: PAT_MRT4530_34413C.1.pep
GSPNYKSLIKPISIINNLTTNSQLQCEIIKITTVTKVYFHCKWCELHCKCVLGLPET

SEQ ID NO: 132447 - protein, 48 aa, Oryza sativa
  Clone ID: PAT_MRT4530_34414C.1.pep
EAIAIDFSETSSHFSLGAAVKASGKKKESGKSSVLLDVKPWDDETDMA

SEQ ID NO: 132448 - protein, 527 aa, Oryza sativa
  unsure (1)..(527): unsure at all Xaa locations
  Clone ID: PAT_MRT4530_34415C.1.pep
LKVCRKKGREAETGAGERREGSRAWRRRLSVASASAEVVAVAVASASARAAGREAAQHRRRXPAAPPTASSCPPPPCLAARPGRRRPRRAAPAALDRPPDPAPGRASWRAAAPRRGSSRTRRRRRGGPPCCRGTASPXPPQLPQLLQEHGHRRHAAADVDDGDEVQARPVGGRGGAPELEQQLLVMGCHGRDVVVVLVEXTCFTSWPVIPTVGLAGSVAVLVGAVCSSSLYAISSRSLASFLVVGKSSAETLKLIVAGLLLEELHINRIRFIFFSNWGGXIYLEQGLLTSAEGVHFTHTTLLTRITQPEGISHVGRPPSFHDKAFRKPIQVYHMPTRGVPDQQQFYPSWYSDFKFEGVRRYSHGVHEYRDATRWLQGDQAEVAPTWRLRGSHAGRREVDDDAGRNGRRTTAASGGANHGDTGNSEHTGRLHVTRGGEPTAWIRRRLLDGAGLRRRQPMAGEEGNGDEVMRGXFLAVRAYKWLWELDASVGLGGTMLSETGDERVLWSSGGDGGEHTASDGNGRGGAG

SEQ ID NO: 132449 - protein, 1026 aa, Oryza sativa
  unsure (1)..(1026): unsure at all Xaa locations
  Clone ID: PAT_MRT4530_34416C.1.pep
MGLGRRQQGGNGTGVDREAGVVDGGRDAVEVAHLTATGIFDLELTRAATTNASRASPTVRPQGRTRRHCLPSQASQPLPLPFSRVVAVAAGLSPKANILVMRSPRNRVTIVPLGLPEPSFPWGSFCFFLVVLCLPDSNISTSSHGCFVEERTALMDIGSSLTRSNGTAPRSWGRGDDCCLWERVNCSNITGRVSHLYFSNLYDSNEVLDALGHSFWRFDTTVFSSFPELQFLDLSMNNATFQSWDVESLDLSHNKLSGAIPWQLTRLSSLSVFSVMAHHPAPPGLSNRGRSTGPSTDPVEQWAFDKPAGEEAPAGRKGLATPSSSEVKVKVGQMFHDKGHLQDAVKRWAFVQKREFRVKVSNRTTYDVKCIQGTFCNVLKMRGPDQYWRIDPRWVPRLRAAGLLTFARLVEPSRARSERIHIDAALMSALVDRWRPETHTFHLTVGEMVPTLQDVSYLLGLPIAGPAVGPTMVNAGWADDLLASFGGVLPVALEDLTDGHGPTKSWLNQFRQDVFPDDQEEWIVQRHLVAYLLWLFGWVMFTGTHADSVDKHFIHFAEQIAELPIAEIPQYSWGSAVLAATYAGLCDACVRNSKQSSLPGCPLLLMLWAHERFDIGRPQLDSYANYGLREMYRSGVDDIDDRPTMGSLWTHRESQWVSGTTRRVYTQFVADFDQLTPDRVRWTPYTQHDVNDRAPHGLADLCTRDMQLWRTTCHLVVDVHVEPHNVHRVLKQLGMYQDFPPRDGRPLADSLHRYSRKGLGLSYELVIVTTVQPTAEFVEHVHVESDTLLQRLEARPPVVXDVVQTSGRRPSPPLPRRSSVDRSGPSSSRRGYEAAHTSHGRPSFQHTPAPEYTRGSAGSGVPTSSTAPPRPQVFQTPPYVHPSQGASGSAHFPYMPXGDNVLNTPAWGLHITPRAPEQGHTQHTYDEYGSASTHHGVPAYSPRTAFIEDFFSTDPPQGEVGMDYWHAAPQVTQPTQETEAGQGPDVTPQQAARDRHPPDNLTYPTEQIRRRKKGGPSKRAKGTDRP

SEQ ID NO: 132450 - protein, 688 aa, Oryza sativa
  unsure (1)..(688): unsure at all Xaa locations
  Clone ID: PAT_MRT4530_34417C.1.pep
MANKTLREFAAPSADNVAIGPXVNIGDVDFDLKSRLITMAHASPFCGKPNEDANTHLQQFLEICSTYTIKGVSPKAVRLRLFPFSLLGRAKQWFYANRAAVNTXDKCSTAFLSKFFPIEAWERLQEYVPACPHHGMDNWLILQNFYNGLTXMSHDHLDAAAGGAFFSKTVQGAADLIEKMVSNMGWSEERLQTRQRGMHTNKETELLAAKLDLLMKRLDDHKKRPQGTVKALDSHITCEVYGNTGHSGNDCPETREEAMYIGNNNNRYRPQGGEGWNQPCPYYQGGNNNGNFSNQLSLKDLVFAQAKTTDALSKKLAANDKLASLVPANETGRISGQPDSSIENVKAIMTRGGKSTRDSPYPNPVGTNGISKEAPSNGSTDKEVQPKKTVPQEYCDTXLLLFPQRSRKPSVDEQFTRFVEVIQKIHINVPLLDAMQVPTYASYLKDVFNNKRPLPTTEVVKLTEQCSNLILHKLPDKKKDPGCPMITCLIGAQXFDQALCNLGVSVRVMPKDIFDKLNLTVLAPTPMHLQLAHSSVRYPAGIAEDVPVKIRDFFIPDDFVVLDMDTGKKTPLILGCPFLSTAGANINVGTGSIRFHIIGKEEKFEFQPRTEQCSMVRIKYGPNPQNIQEVEVEPPKTDSLVKFMQNFLEKKTTMPRNRYWKTLVKPLLTTKFGNLSIGDGDCHARKIT

SEQ ID NO: 132451 - protein, 579 aa, Oryza sativa
  Clone ID: PAT_MRT4530_34418C.1.pep
MGLNDVLGWLYNMFGVDLVPDKFVINVVWPIRGQHGWQWRVVEVASTGSWRKFVSKVREKGYSLSIVVQKTKRVDRSGESSHAVVEEIPLEGAQAENVWRTEQGRGEEVVEGNTQAEVIVCANNREANDSDDEEPESPMRVDAAEENEAVVDQMEVENEEYIALVVEGEDTTLWDKETNIPDDWTTILMSRMKVKDGLDAHWRFDSKQVQVGQMFHDKGHLQDAVKRWAFDQKREFRVKISNRTTYDVKCTQAGCPWRVHGYKPQHDTLWVAARVEQHTCLLENTRLVHRNMTAAFVAQMVYSKVVRKTFLSPFTIMHDVEKEYGYVISYDKAWRAKQKALEMRKRRRATKCFTEWVEFEPMEKWSLLHDTDGLRYGVITTNLAEVYNWVMKNTRPLPLVAILEGITRGTQKYLCKRYSMASLNLSKPSVKYSLAITQYMDEKSQKGGMHRVRPAGNRELLFEIRLSDKSGVGIGTTDITLECMWWPKYRACKCNCNKPYLLHRPCSHVLAASAKGGVDANLFVSPYFTKEAWEATWRGELRGWRAVCDCRDRENCLFPNASVLIPVPGKAGVHHTNMI

SEQ ID NO: 132452 - protein, 543 aa, Oryza sativa
  unsure (1)..(543): unsure at all Xaa locations
  Clone ID: PAT_MRT4530_34419C.1.pep
MGRPAQEGGPKRARGRGGEREXGGPGPSRVVPGGTRLSVTRFTVRNAHAARARVWGXGRGARARFAEDAVRRAHAQPHGSPRTMRTGGERRERLAGSADPVAAEVAPTWRLSGSHAGRREVDDDAGRNGRRTTAAGGGANHGDTGESEHTGWLHETRGDEPTAWIRRRECVGGGLRRRQPAGREEGNGDEVTRGRFPAARASTRLRESVPCAGLGGXASREAGDERXLPSSGGDGGEHTASDGSSREGAPGVPFRVLARAGSSDTRDDKRRRRTEHGRRRQWSGGXWDNERRREGGRLGFIXMAMTVWERXPTLDGQASELALRLAAKSATGRREDDAGGRKKGKRRERKGACPLPLWEKEEGAGATRQREEGLCLRPLEASARSGGVGLMTTAMTAGRFGAERRHGRQARTGAAEADGSGDQAVGHHGTRAREATGGAAIXSGAARARVLTRGADGAGAARAATARARACEQRRAGSSSEGAEREGSARRGSCASRAGRGRRPVDRGSTTKRRRRRSXYSFCKKKPPPSASMAPWSSARNGI

SEQ ID NO: 132453 - protein, 308 aa, Oryza sativa
  Clone ID: PAT_MRT4530_3441C.1.pep
MRVQCDVCAAEPAAVLCCADEAALCSACDRRVHRANRLASKHRRLPLVHPSSSSSGDGGAAAAPLCDVCREKRGLVFCVEDRAILCADCDEPIHSANDLTAKHTRFLLVGAKLSPAALAEQPLPSSDCSSDDDAAAAATEEEYHSSAASTGAAVSAPLDASSNGAGGGGGVGGSSISDYLTTICPGWRVEDLLPDDDAFAAAAAQAGKEKDERVPFLDADLFDVVAGRPEKKGGAWAPHVPHLPAWCLDEVPVVVAASAAPAATPVKAKQGHVRDSHWSDSDAFAVPEFSPPPPPAKRARPSSQFWCF

SEQ ID NO: 132454 - protein, 61 aa, Oryza sativa
  unsure (1)..(61): unsure at all Xaa locations
  Clone ID: PAT_MRT4530_34420C.1.pep
REHPPSDYGTSIRKSIVRMEQXVXLXPSPPLPCSLLATRGMEIGARSDDETGDFLRRRGED

SEQ ID NO: 132455 - protein, 34 aa, Oryza sativa
  Clone ID: PAT_MRT4530_34421C.1.pep
ILNSNCGGGFKHRSSNLKIVSCSHYQSLPHCFIF

SEQ ID NO: 132456 - protein, 484 aa, Oryza sativa
  Clone ID: PAT_MRT4530_34422C.1.pep
MSLGIKAPLWDPLVSGSAHRAEGARGARARAGEGRGAHARSAEERMQRAHAQPHGLRWNARSGGADRGRPVLTSAELAPTWRLRGCHAGRREVDDDAGRNGRRTTAASGGANHGDTGESEHTGWLHEIRGDEPTARIRRRKLDGGESRRRQPAGREEENGDEVTRGRFPAARASTRLRESDASVGLGGATPSEAGDERVLRSSSGDDDEHTASDGNGASWHSALAAKTVTEGGRMTPAGGKGEKGGGERGLPPCRFRKKEEGSGGVAAEGGGLGLRPLAACARAGAAESDGGGDQMVGHSARARGKQREGAADGVARLGHARWLRGRAAAGAAGQRGRAAQMRREQGPRGRARERRAGSGIEGAEMRARLGAGGSRAHARAERRERRRGARLGAGGSRARAGRARLKGGGARRGGSRARARGARAGRSGAEGEGERERAGGGEGARERERGGEGARRGRGGRDGPSEIRPIDPGGGKIDFCGGI

SEQ ID NO: 132457 - protein, 71 aa, Oryza sativa
  Clone ID: PAT_MRT4530_34423C.1.pep
MASEGSTSEKQAATGSKVPAADRGKEKEEIEVMLEGLDLRADEEEDVELEEDLEELEADARWLALATVHTK

SEQ ID NO: 132458 - protein, 351 aa, Oryza sativa
  Clone ID: PAT_MRT4530_34424C.1.pep
RISIKCCIISGRDNTGESEHTRWLHETRGDEPTARIRRRKLDGGESRRQQPAVGKGENGDEVTRGRFPAVRASTRPRESDASVGLGGATPSEAGDEWVLRSSSGDDGEHTASDGNEEGEGAPGVPFRVLARAGSSGTRNDERRRRTEHGGGGNGAEANGRGRERGRLGFKWAAMSVWEPTCAVKGASWRSAVAAKAATGRMTPARRKRGKGGGERGLAPLPIWEKGGGERGRRGRERRGVASVPWRLARGVAGAGRRSATTARACGLQREARRMERRGSARALAAGPSGCRRGRAAGPGGADATRARTTRACARSTRGERQRGSGKEGLARRGRRGSRARARGTRARRSGA

SEQ ID NO: 132459 - protein, 193 aa, Oryza sativa
  Clone ID: PAT_MRT4530_34425C.1.pep
TGARDHSWWKWRACHEGGKVSKMAGHVACCLTRQRATWWWQAALRWTDLIETMSSSRRRHQQLGGGGGVSSVGDGFVPTAVQGMYDESKLLAEAENNTYLSSGSTSFRASLSVLRQLIRNRKPERVWSDTINQESGRLESRGGGSTVGECKEEADEEAVDDAYAEIIESHARTRLVSVEDDGGRRRRYDACRL

SEQ ID NO: 132460 - protein, 488 aa, Oryza sativa
  Clone ID: PAT_MRT4530_34427C.1.pep
MDAHAPPRSPASDGGHGDGDGDTKKPHVLVVPYPAQGHMLPLLDLVALLAARGLALAVAVTPGNVPLLAPLLASCPPSSVATVTLPFPAASASGLLPAGCGENTKDLPGHLFRPFMASLAALRAPLLAWCKAQRRRRRRVTAVVSDMFTGWTQPLAADLGVPHVTFSASGAHYLAVSHSLWRRLPRRRCPDEAVSFQDVPGSPTFRWSHLSWLYRTYVAGDEVSEAIRQFFLWNLESSCFVANSFTAIEAAYVDRPLPDLMEKKVFAVGPLSDAVGRCTDRGGKPAVAPARVAAWLDAFDDGSVLYVCFGTQQALSPAQAASLAGALGRSAAPFVWAARGGTPVPGGFEAATAARGMVIRGWAPQVEILRHRAVGWFLTHCGWNSVLEAVAAGVAMLAWPMSADQFTNAWLLAEAGVAVAVAEGADAVPDAGQMADAIASAIGNGGASVRQRAAELGRSTAAAVAEGGSSSVDLEELVSILSSPKLTN

SEQ ID NO: 132461 - protein, 112 aa, Oryza sativa
  Clone ID: PAT_MRT4530_34428C.1.pep
MNPCRAYLQRSQLPQREVEKDFPWSSSPLTATVVVVSLLAKSAAARSSELVAGFGELMAGSIAAGGPSPSREGGGRGEASRCGQIRRRDPPPPPLAEKGGGEAGGGRGALQR

SEQ ID NO: 132462 - protein, 560 aa, Oryza sativa
  Clone ID: PAT_MRT4530_34429C.1.pep
AGDFGCCQVEEAYTTDGSLDIDGNPALKHRTGGWRACRSILGTEFCYCLAYYGIMYNLVTYLTTVLHQSNVAAAKNVSTWQATCFLTPLAGAVVADSYWGRYRTMVVGCCVAVAGMLMASLSALLPQLIESSSTLSMEIILFLGLYMIAFGVGGLRPCLISFGADQFDAGDPSELISKGSYFNWYIFTMNCGSVISTSGMVWVQDHYGWALGLAIPAMVLAVGLSCLVAASRAYRFQTTRGSPLTRVCQVVVAAVCKFNVAPPDDMSLLYELPDDASSMKVVERIEHTTDLRFFDKAAVVTASDEEAAGAAPRNPWRLCVVTQVEELKIFVRMLPLWACITFFYTGTAQVNSTFVEQGMAMDARVGSLRVPPASLLTFQMLTTITLIPLYDRAFVPAVRRLTGREKGISELVRIGGGLAMVVLAMAAAALVETKRVRAWQTAMEKTSIMWQVPQFVLVGVGELLTSIGQLDFFYSQAPPAMKTVCAALALGAIAAGDYLSSIIVTAVSWATATGGRPGWIPDDLNEGHLDRFFWMMAGLGCLNLAAFMSCAMKYKTRKAC

SEQ ID NO: 132463 - protein, 1129 aa, Oryza sativa
  unsure (1)..(1129): unsure at all Xaa locations
  Clone ID: PAT_MRT4530_3442C.1.pep
MIVRQHRPFNPSNFHQGTSGSQNHHGGQPNRGAAPRPPMAPAQSGQPAQAKKETGAKPGSCFNCGELGHFADKCPKPRRAGPRFIQARVNHASAEEAQAAPEVVLGTFPVNSIPATVLFDSGATHSFISKKFVGMHGLIREELSTPMRVHTPGNSSTSVQFSPSITIEIQRSPFLANLILLESKDLDVILGMDWLTKFKGVIDCANRTVTLTNEKGETXGTAPIYKRPYRMAAXNELAEVKKQVDEQLQKGYIRPSTSPWGAPVIFVDKKDKTKRMCVDYRALNEVTIKNKYPLPRIDDLFDQLKGAKVFYKIDLRSGYHHLRIREEDIPKTAFTTRYGLYECTVMSFGLTNAPAFFMNLMNKVFMEFLDKFVVVFIDDILIYSKSEEEHEQHLRLPQGVAVDPSNVESVTKWTPPKTVSQIRSFLGLAGYYRRFIENFSRIARPMTQLLKKDEKFKWTAECDKNFEELKRKLVSAPVLILPDQTKDFQVYCDASRHGLGCVLMQEGRVVAYASRQLRPHEGNYPTHDLELAAVVHALKIWRHYLIGNRCEVYTDHKSLKYIFTQPDLNLRQRRWLELIKDYDMSIHYHPGKANVVADALSRKSYCTALCIEDMCEELRQELEHLNMGIVEHGFVAALEARPTLVDQVRAAQVNDPEIAELKKNMRVGKARDFLEDEHGTIWMGERLCVPDDKELKDLILTEAHQTQYSIHPGSTKMYQDLKEKFWWVSMRREIAEFVALCDVCQRVKAEHQRPAGLLQPLQIPEWKWEEIGMDFITGLPRTSSGHDSIWVVVDRLTKVAHFIPVHTTYTGKRLAELYLARIMCLHGVPKKIVSDRGSQFTSKFWQKLQEELGTRLNFSTAYHPQTDGQTERVNQILEDMLRACALDFGGAWDKSLPYAEFSYNNSYQASLQMAPFEALYGRKCRTPLFWDQTGERQLFGTEVLAEAEEKVRIIRERLRIAQSRQKSYADNRRRELTFEAGDYVYLRVTPLRGVHRFQTKGKLAPRFVGPYKILERRGEVAYQLELPSNMIGIHDVFHVSQLKKCLRVPEEQADSEHIDIQEDLTYVEKPVRILDTSERRTRNKVTRFCRVQWSHHSEEEATWEREDELKAAHPHLFTSSSESRGRDSV

SEQ ID NO: 132464 - protein, 87 aa, Oryza sativa
  Clone ID: PAT_MRT4530_34430C.1.pep
QLPFSMHTWLKMDPFEGPPPFYVNFVNYECSSIFFFCVFLCVFSVFFHELPLDFPIPQNGNSTSSSRQREVCQEFYNSATLVYMTVI

SEQ ID NO: 132465 - protein, 262 aa, Oryza sativa
  Clone ID: PAT_MRT4530_34431C.1.pep
MARRGGAWAWAATAAALLWWMAAGAGAVWLEIPPSATKCVSEEIQSNVVVIGDYSVLYEHHLNPTVTVKTVEAATKFLSFCDPEMASPCQGLLEEVRCNHIHLERRAIPISSRFGTPAKVTSPFGDIVHHKQKVSTGQFSFTTAEAGNYLACFSADGRNKRLVVKLNLDWRVGIATKDWDSVAKKEKLEGVELELVKLETSVQAIHENLLLLRSKEANMRDTSEKTNARATWLSIISLIVCIIVSVLQLWHLQQYFRKKKLI

SEQ ID NO: 132466 - protein, 372 aa, Oryza sativa
  unsure (1)..(372): unsure at all Xaa locations
  Clone ID: PAT_MRT4530_34432C.1.pep
MLLLSSPMPATGRSPSSDYFRPSPRAIGFASMGQTHSLTFPFLSPSKISHHRYFPNRPGQAFGHRRSGLLSHSPCRTPPSPDARRSGTHSASDVAASQPPEPWCPSSPSSRLLGWKRGGRRREEEEKKENAAGRLTGRPINSALSSFQDYQPRSRRQAPDAPPTPVPPGFGRTGTMAARTGEPPLFTPSPTRGHVGAAAARRPGLRHTFIAVPHGSPSRMVPNGXGGNGVRVWPVSNSDEESGPSAXSRPACRRPTRGTRRRRIVDGGGGRWRWKQGGSGNGGGSGGAITEGGDGGGIGGGXSAAPPRRXSAAPPSGGIGGAPQRRQRRTSAASVVPHGGVDSGELAAVSDEMTAVGGGVCSEKGGGGGGEI

SEQ ID NO: 132467 - protein, 165 aa, Oryza sativa
  unsure (1)..(165): unsure at all Xaa locations
  Clone ID: PAT_MRT4530_34433C.1.pep
MAARTGEPPLFTPSPTRGHVGAAAARRPGLRHTFIAVPHGSPSRMVPNGXGGNGVRVWPVSNSDEESGPSAXSRPACRRPTRGTRRRRIVDGGGGRWRWKQGGSGNGGGSGGAITEGGDGGGIGGGXSAAPPRRRRRRPXSGGIGGXLNGVNGAPAANWRRSATK

SEQ ID NO: 132468 - protein, 135 aa, Oryza sativa
  unsure (1)..(135): unsure at all Xaa locations
  Clone ID: PAT_MRT4530_34434C.1.pep
AGRQGRGGPAQPSRSRGAWGGASGRGVSGLTLTAPTISPPPPPPFSLHTPPPTAVISSLTAASSPLSTPPXAPPTPPRCAVDAVEVRRLFHRWGAPPTPPRGRPSISAAALLPPPPPTATVHYPPPPRPSRRPAA

SEQ ID NO: 132469 - protein, 921 aa, Oryza sativa
  Clone ID: PAT_MRT4530_34435C.1.pep
MRHNRSLAALLRAGRYGAARRLFDALPARSVVTWNSLLAGLARRPDARAAREFFDAMPVRDAVSWNTLLAAYSASPHPDHLAAARRLFDEMPQRDVVTWNTLLGAYARRGLMDEARRLFDEMPQRNAASWNTMVTGFFAAGQVVKALDVFDAMPAKDSASLSTMVSGFTKNGMLHEAEELLTKRLSVTDMDKAVDAYNTLIVAYGQAGRFSDAKRLFDMIPKGQYQHNMLKRKGFERNVVSWNSMMICYIKAGDVCSARALFNEMPDKDLVSWNTMISGYTQASDMKESEKLFWEMPDPDTVSWNLIIQGFMQKGEAEHARGFFDRMPERGTISWNTMISGYEKNGNYISSVKLFSKMLEVGEIPDRHTFSSVLAACASIPMLGLGAQIHQLVEKSFVPDTAISNALITMYSRCGALNDAEAIFKQMHTKKDLVSWNALIGCYEHHGRATKALQLFKEMRRAKVMPTHITFVSLLSACVNAGLVSEGRMVFDTMVHEYGIVARIEHYAALVNLIGRHGQLDDALEVINSMPMAPDRSVWGAFLGACTAKKNEPLAQMAAKELSTINPDSSAPYVLIHNLHAHEGKWGSAAVVREEMERQGIYKQPGYSWIDLEGKMHVFISGDTWHPNAQEIFSVLEGGHWPCPVCWEMNQLTQVKLIAKRNNQIMDKQATATKMHKATNIRHIYSKFKVDEQQNTSWWPYCTSLWPDSYLLEEEALFSSLSFPSFHPQPVYSTVMQSNVLQDELGVIFEDDVLKYWDEMEQSENKVEKSEKGLPLLYYGDENGAASKIMRDDVRSEEKALTFELVSQYFYMPITQAARELNVGLTLLKKKCRELGIPRWPHRKMKSLQTLINNVQVLQEASKANNEEQLRMLVEMLQEERRLLEQKPYVQLEEKTKRLRQACFKANYKKRRLLALEAGEP

SEQ ID NO: 132470 - protein, 99 aa, Oryza sativa
  Clone ID: PAT_MRT4530_34436C.1.pep
KHGPKTFFRVSKSLHFNHQWDSKLLWGRLFPRGRFLGESAVFYWETKRSGGALFRNAGGRSLPQKSSAGPLEMPQEKSVAFVIHWGLRWEWSFGAPVDF

SEQ ID NO: 132471 - protein, 453 aa, Oryza sativa
  unsure (1)..(453): unsure at all Xaa locations
  Clone ID: PAT_MRT4530_34437C.1.pep
GPAGPRRPKARARGRGGEREPVDRAHHAWSRVGPACRXHGSPCGASTRRTRAGEGGTRCTRAVRGGRGCGGPTRSLTAHGGTRARGGADRGRLDPVLAELAPTWRLRGCHAGRREVDDDTGRNGWRTTAASGGANHGDTGESEHTGWLHETRGDEPTARIRRRELDGGESRRRQPAAGEGGNGDEVTRGQFPVVRASTRLRESVASVGLGGATPSEAGDERXYGARAATAASTRRATATVGAAPASYGEATRTTVRAGATTRGRRRGSNLSGLGPGKRKERARLESPSASLLVPAPPTRATTNGDGEQSTGGGGNXRGGEEGEGARGFKGGNRAEWRGPGYDVGDDGGGGSSGAARARALARGAERLRGCRRGRAAGPGGDHAALAHARAERGRGARRGARARARGARAERXRGRGRERERPGGRRRWAERDSAHRTRGRQNRLLRRNLIWKD

SEQ ID NO: 132472 - protein, 110 aa, Oryza sativa
  Clone ID: PAT_MRT4530_34438C.1.pep
KLKKKFFFFFFIYSHIFFFFPKKKNWGPIITHPVLKPPAKKKKPFFFTPPKGSTPKFFFGTCRPTMGAFKKPHQRKNPSLPNILSVRQWGSLLIPPKIPARSLKGKNFFL

SEQ ID NO: 132473 - protein, 584 aa, Oryza sativa
  unsure (1)..(584): unsure at all Xaa locations
  Clone ID: PAT_MRT4530_34439C.1.pep
MAAAPKPEELVVAIEQPFSPSLFLDLPPTPHHDDDPNNVNDDLLLPFISRILMEDDIDDKFFYQFPDHPALLQAQQSYAQILHAPATSSSSDDTTINNNTTNSTSVPDTLAMPDHDADTQSAPDDMEMLYMAFLKGREEATKFLPTNNTLFSGFKAEPVLDIQPTFTFGPSGGGRGRKNRHAEEDDLETETSRSSKLMAPEHDDAAAADEIFDEIILNGYQMIIKGIDELRVAMGSQSQADKNGRRASRAKTAVVDLHTLLIHCAQAVATGDWRSATELLKQIKQNSSARGDATQRMACCFAEGLEARLAGTGSQMYQSLVAKRTSTVDFLKAYKLFTAACCIKKVSVIFSNKTIYNAVAGRRKLHIVDYGLSYGFQWPALFFLLGAREGGPPEVRMTGIDVPQPGFRPADQIEETGRRLSICARQFGVPFKFRAIAAKWETVRREDLHLDPEEEEEEVLVVNCLHGLNTLQDESVVVDSPSPRDVVLDNIRDMRPHVFVQCVVNGAYGAPFFVTRFREALFFYSAHFDMXDATIPRDNDDRLLIERDMLGRCALNVIACEGADRVDRPETYKQWQVRNHRAGL

SEQ ID NO: 132474 - protein, 337 aa, Oryza sativa
  Clone ID: PAT_MRT4530_3443C.1.pep
MRVQCDVCAAEPAAVLCCADEAALCSACDRRVHRANRLASKHRRLPLVHPSSSSSGDGGAAAAPLCDVCREKRGLVFCVEDRAILCADCDEPIHSANDLTAKHTRFLLVGAKLSPAALAEQPLPSSDCSSDDDAAAAATEEEYHSSAASTGAAVSAPLDASSNGAGGGGGVGGSSISDYLTTICPGWRVEDLLPDDDAFAAAAAVSTTNPSLRRVLATSPSMKPRLTYDSLEQQAGKEKDERVPFLDADLFDVVAGRPEKKGGAWAPHVPHLPAWCLDEVPVVVAASAAPAATPVKAKQGHVRDSHWSDSDAFAVPEFSPPPPPAKRARPSSQFWCF

SEQ ID NO: 132475 - protein, 79 aa, Oryza sativa
  unsure (1)..(79): unsure at all Xaa locations
  Clone ID: PAT_MRT4530_34440C.1.pep
MGPPHXVRRGPRACTAXPPRPRTCAACSLRTVSRAADKRVPPGATREPEDPQCEDFEDQAPDLEQGKPPLNILSLTCCI

SEQ ID NO: 132476 - protein, 221 aa, Oryza sativa
  Clone ID: PAT_MRT4530_34441C.1.pep
MAHLIGRDGDETMLSMRDDNLYVLGFANRSGDWHAFERHAHLFREDVTPLKINDNYGSLLGAGHRGHKDRPRIALGQQAVLDAIQALSNYDPSTTDDRILGDALATLIVTLPEAVRLRKIRDWQLRGWSTGTHLTSKLADEVVKWRVMTCGLLVSHRNNGWWGGEEARDLYGSLRIANKFGAMERVGVMLWPARRKCSEEVLDEWHISKIRRDMMMVQQRG

SEQ ID NO: 132477 - protein, 162 aa, Oryza sativa
  unsure (1)..(162): unsure at all Xaa locations
  Clone ID: PAT_MRT4530_34442C.1.pep
NLCRGGTLYPHDVTNLGHPARISKADTGLPYANERGPRPTTGXVPDHTVPGSPRVLPDTTPLNPHVSWHHGSPDXLITQPGASHYTHVAALXVCSDVIPXRNRSLNATAQVFHPDFKFEGDHRYSHRVHEXYRGATRWLQGNMVACLAQGLHEASQIFEKSA

SEQ ID NO: 132478 - protein, 72 aa, Oryza sativa
  unsure (1)..(72): unsure at all Xaa locations
  Clone ID: PAT_MRT4530_34443C.1.pep
PPPKGLCHRXXVHXAGCHXRXNRAXXXPFXXWXPACXMWIEMHSLMSTXVTXETKXXRTXXEEGAERGEYXR

SEQ ID NO: 132479 - protein, 354 aa, Oryza sativa
  Clone ID: PAT_MRT4530_34444C.1.pep
MTRPSPTEQIKIKFSTKIHCATTTLTVGTQRPKVGLVWLTKGSAEPARQRSAASLFEATASGPHRMRRQLSRLFKGSGFSSSHHDESSAHSSADVSIEDAEAPRRLLNDADLDLVDDWERQAYYILSDREYAHMREYSPELLKKIGMDVDFRAIWKAVGWHRFAVVDEPDSRLLTFQFVCTLKEIEDGVSFCFFHKEYTLTWKGLSTLLGFHDSCKIDLQKGISLFEKNRFWEDIYGAPICKKPRTNDIHNPTLRLMHRWIAMTLFPRGDLRPIRGDELIIMFAMTIEESRAGGAYRETRNMARNERESSSSPTPVQMYEAGWEPIGDAPGWTQAPCHSIGVSSWASASEDRWH

SEQ ID NO: 132480 - protein, 185 aa, Oryza sativa
  unsure (1)..(185): unsure at all Xaa locations
  Clone ID: PAT_MRT4530_34445C.1.pep
GAAREKRGGSAELNGPAGPRRRPRTAQDARAREGGEREPVDRAHHARSQVGPACQRLGSPCGGSTRRGARVGGRTRCTRAVRGGRGCGGPTRSLTARGGARAREGTDRGRLDPVXAELAPTWRLRGCHAGRREVDDDAGRNGXSTAASDGANHGDTGKSEHTGWLHVTRGDEATARICRGLLDGG

SEQ ID NO: 132481 - protein, 436 aa, Oryza sativa
  unsure (1)..(436): unsure at all Xaa locations
  Clone ID: PAT_MRT4530_34446C.1.pep
MGRPAQKXGPKRARGRGGEREXGGPGPSRVVPGGTRLSATRLTVRSEHAARARVRGGRRGARARFAEDAVRRAPAQPHGSPRTMRTGGGGGXKRRERLAGSADLVAAEVAPTWXHVGRREVDDDAGQNGRRTTAASGGANHGDTGESEHTGWLRETRGDEPTARIRRRECVGGGLRRRQPAGREEGNGDEVTRGRFPAARASTRLRESVPCAGLGGNASREAGDERXLPSSGGDGGEHTASDGSSRXRGAPGVPFRALARAGSSDTRDGERRQRTEHGRRRQWSGGEXENEGDWRREELGFIGAAMSVWERGTDIGRSSLRAGARLAAHHDDRXDAGEREKGRKGREKGXCPLPLWEKEEGAGATWQREEGLCLRPLEASVQSGGVGLMTTAMTAGWFGAGRRHGRXGAAEADGGGDQAVGHHGARAREATGGAAI

SEQ ID NO: 132482 - protein, 115 aa, Oryza sativa
  Clone ID: PAT_MRT4530_34447C.1.pep
IHAAFLGPACRRTAGEHPALGRLRGYAAAVVPGFLWRERLSRRRREERWRAELGSTRRTRGRDSRGGEGDPGARPPAAARSGEGRGDEGNEFNTRLAVPPPRVARALDITFNQKN

SEQ ID NO: 132483 - protein, 96 aa, Oryza sativa
  Clone ID: PAT_MRT4530_34448C.1.pep
PKAPPPPGGFPPKKNESTFFLGFVFYIPKNKMPIIFFFPFGLGPSQWPRPLTQREYFLPPPPDRFFCKSPPPFLGVGDFKTKTPAFYPPNLFLKGI

SEQ ID NO: 132484 - protein, 117 aa, Oryza sativa
  Clone ID: PAT_MRT4530_34449C.1.pep
MDEKESCHKCDYERNNRLTCCNPNDPIKFELLQFCISALWPFDNEPMILRSFSPFQYSHLKGVLVTGYKGAIEQPEFLAHIAELLTVDTVEAPWNDIFGYVIRIKHQLRAPFSSNCS

SEQ ID NO: 132485 - protein, 54 aa, Oryza sativa
  unsure (1)..(54): unsure at all Xaa locations
  Clone ID: PAT_MRT4530_3444C.1.pep
ESKVHLFEQWSXMLTCREANNFNSGPRARSLRSTMLDMALFLYFDQTEVRSSQI

SEQ ID NO: 132486 - protein, 190 aa, Oryza sativa
  unsure (1)..(190): unsure at all Xaa locations
  Clone ID: PAT_MRT4530_34450C.1.pep
NLYRGGTLYPHDITHSDHPARISKADTGSPYANERGPRPTPGXVPDHTVPGNPGVLLDTTLLNPHVSWHHGSPDXLITQPEVSHSTHVVALVLCSDEIPRKRSLSARAGNRTPGTSPGLRFWKXHLVRKHRPRCQVFQGSKVTCLARDLELDTRNPRTAGLQAPKLHAKWDNSTNGENKALLLTSKHAIR

SEQ ID NO: 132487 - protein, 420 aa, Oryza sativa
  Clone ID: PAT_MRT4530_34451C.1.pep
MSLSDLPDEALLVILNKLDTREAVRCSVLSRRWRRVPGMLPNIELDVDSFTPDHDDGFTSTLSDAARNNYAMVSAVQSLLSHESRHDIRRLDLSFFSRDESVGIIHAIDDAMARGRRILDLRFDVLSEKSYMECPDSDRVKQGRRLLHCFDRYPRVFAGLTSLHLECVTVQGPRFSDVITACEKLIDLSLVRCNFGKETALTIQHEQLSMINLEFCTCDTVELEWLPKLSELSMSVWFWSPRQYPLVFGHAPRLQRLELTHAGLVHSKVLRLSKLLDNCTSLRELWLDFECEKVTDHHCVPLEEELLERMFICEKNNINWEPSNFKHNNLTKLIIYGFRPENRFMSYIRRVMKAAVNLDEISLHDDRCEICESYYPITRYPHTKKERDLVKRAINEGRTSPIKSIQFFHTSEARTIKIID

SEQ ID NO: 132488 - protein, 176 aa, Oryza sativa
  unsure (1)..(176): unsure at all Xaa locations
  Clone ID: PAT_MRT4530_34452C.1.pep
IHINVPLLDAMQVPTYARYLKDILNNKRPLPTMEVVKLAEHYSNIILHKLPEKKKDPGCPTITCSIGAQQFDQPXCDLGASVSVMPKDVFDKLNFMVLAPTPMRLQLADSSVRYPAGIAKDVLVKIRDFFIPVDFVVLDMDTGKEMPLILGHPFLSTAGANIDVRTGSIRFHINGK

SEQ ID NO: 132489 - protein, 321 aa, Oryza sativa
  unsure (1)..(321): unsure at all Xaa locations
  Clone ID: PAT_MRT4530_34453C.1.pep
MGRPAQGGPSARAREXGGERGPVDWAHHARSRVGPACQRLGSPCGGSTRRTRAGGGGTRCTRALATTWRLRGCHVGWREVDDDAGRNGRRTTAASGGANHGDTGNSEHTGWLHRTRGDEPTARIRRREFVGGGLRRRQPAAEEGGNGGEVTRGXFPAARASTRLRESDASVGLGGATPSEAGDERVLRSSSGGGGEHSASDGKGGDGARRKNGERHYRAGRGAVTRXADGAGVISPASGRGRGRRGRARSPLPRPRTHRLTRRLAKDGGGETELGRRRQWRGRETGRNGGKGKGGRPGLIGGGNVGLETDFGGQGASWRSG

SEQ ID NO: 132490 - protein, 115 aa, Oryza sativa
  Clone ID: PAT_MRT4530_34454C.1.pep
LLPLSPNVAISRRRRWRQLWRVAAPSAAATAGATAAGRGKHAGGRWATRGRRRAARAAMTRNRRGTAHAAAGRCTTEAMKLDGRRAARGRWRAAGGRRRAGGGGRPAEYGGRSGA

SEQ ID NO: 132491 - protein, 71 aa, Oryza sativa
  unsure (1)..(71): unsure at all Xaa locations
  Clone ID: PAT_MRT4530_34455C.1.pep
EHXKXXVVXXGAHRGSRRGRRRRGGRPWTPWVKVFDGGVGNWSGMSSGRGVLSRSFKLKCLGLALTTVALG

SEQ ID NO: 132492 - protein, 100 aa, Oryza sativa
  unsure (1)..(100): unsure at all Xaa locations
  Clone ID: PAT_MRT4530_34456C.1.pep
KITLXXSSSGGFTVAWSGHHSVVHKPHESPRXVPXGPTNDVXAQPXQRGDTTTLLIXCDTRTTSHHXIKITSRDARPRGGAYPXNEXKGPTVLCPPRQPQ

SEQ ID NO: 132493 - protein, 44 aa, Oryza sativa
  unsure (1)..(44): unsure at all Xaa locations
  Clone ID: PAT_MRT4530_34457C.1.pep
PSLHHRRREXHHRGEPCLTDSVFTPTDGQICRSPFPPVVGAGSN

SEQ ID NO: 132494 - protein, 1131 aa, Oryza sativa
  unsure (1)..(1131): unsure at all Xaa locations
  Clone ID: PAT_MRT4530_34458C.1.pep
MSSLSRELVFLILQFLDEEKFKETVHKLEQESAFYFNMKHFEDLVQGGEWDEVEKYLSGFTKVEDNRYSMKIFFEIRKQRKYLEALDRHDRAKAVEILVKDLKVFASFNEELFKEITQLLTLENFRQNEQLSKYGDTKSARNIMLMELKKLIEANPLFRDKLNFPPFKVSRLRTLINXWQHQLCKNPRPNPDIKTLFTDHSCAAPTNGARAPPPANGPLVGRTPVGPIPKSAAFPPMGAHAPFQPVVSPSPNAIAGWMTNANPSLPHAPLAQGPPGLVXAFLKHPRTPTSAPAIDYQSADSEHLMKRMRVGQPDEVSFSGASHPANIYTQDDLPKQVVRNLNQGSNVMSLDFHPVQQTILLVGTNVGDIGIWEVGSRERIAHKTFKVWDISSCTLPLQAALMKDAAISVNRCLWSPDGSILGVAFSKHIVQTYAFVLNGELRQQAEIDAHIGGVNDIAFSHPNKTLSIITCGDDKLIKVWDAQTGQKQYTFEGHEAPVYSVCPHYKESIQFIFSTAIDGKIKAWLYDCLGSRVDYDAPGHWCTTMAYSADGTRLFSCGTSKDGDSHLVEWNETEGAIKRTYNGFRKRSLGVVQFDTTRNRFLAAGDEFVVKFWDMDNTNILTTTDCDGGLPASPRLRFNREGSLLAVTANENGIKILANTDGQRLLRMLESRAYEGSRGPPQQINTKPPIVNTLGSVSNVSSPMAVNSERPDRALPTVSMSGLAPMDVSRTPDVKPRITDESEKVKTWKLADIGDSGHLRALRMPDTSATSSKVVRLLYTNNGVALLALGSNAVHKLWKWQRTDRNPNGKSTASFTPQMWQPANGILMANDTSDGNPEEATACIALSKNDSYVMSASGGKVSLFNMMTFKVMTTFMAPPPAATFLAFHPQDNNIIAIGMEDSTIQIYNVRVDEVKSKLKGHSKKITGLAFSQSMNMLVSSGADAQLCAWSIDGWEKKKSRYIQSPANRSGALVGDTRVQFHNDQTHILVVHESQLAIYDAKLECLRSWSPREALPAPISSAIYSCDGLLIYAGFCDGAIGVFEAESLRLRCRIAPSAYIPPSMSSGGSVYPMVVAAHPLEPNQIAVGMSDGAVHVVEPLDSDPKWGVAPPQDNGTHPTISAAPAAANKPEV

SEQ ID NO: 132495 - protein, 399 aa, Oryza sativa
  Clone ID: PAT_MRT4530_34459C.1.pep
MLAAVMDYFRSCWGPRSPAGHRVRGSDVAGRQDGLLWYKDAGQLVTGEFSMAVVQANNLLEDQSQVESGALSMAEPGPQGTFIGVYDGHGGPETARFINDHMFHHLRRFATEHKCMSTDVIRKAFQATEEGFLSLVSKQWSLKPQIAAVGSCCLVGVICSGTLYVANLGDSRAVLGRFVKSTGEVVATQLSSELHAFYEEVRQELQASLPDDPQRQILIHNVYFSYGLFQISRSIGDVYLKRPEYNREPLHSKFRLRETFKRPILSSEPAIAVHQIQPNDHFVIFASDGLWEHLSNQEAVDLVQNNPRNGIARRLVKVAMQEAAKKREMRYSDLKKIDRGVRRHFHDDITVIVVFLDSNAISKANWSRGPSVSLRGGGVTLPANSLAPFSAPTVLSSTY

SEQ ID NO: 132496 - protein, 54 aa, Oryza sativa
  unsure (1)..(54): unsure at all Xaa locations
  Clone ID: PAT_MRT4530_3445C.1.pep
MHAVRKNRYVILPKGFVKGLPXQCQEGLRLNFDFLQMRQHIVGLHACFPAEANH

SEQ ID NO: 132497 - protein, 177 aa, Oryza sativa
  Clone ID: PAT_MRT4530_34460C.1.pep
QDTHEGGGHFIYPTKKKGGATLPKTGRTRKNFGGGAGNPRGDPPQGGQKESHRGRGLSWGPANKARKKPDLGEEKPPQGAKSPARKLGGQKPHWGTKLGAQNPGGAKLEPGGRPPREAKRAERGPHKPIGRGKERFLKRGGGGLPNWARIKLGPGPALWGGGGREEDKKLQGFGGGA

SEQ ID NO: 132498 - protein, 87 aa, Oryza sativa
  Clone ID: PAT_MRT4530_34461C.1.pep
QTPLKFLGSLLNFTGSCTSIQHFRHYFWQTPLNPFFFCNQLTSFIGFFICIFFILQKLKSLAHHQGFFLSGCCFPRFCSWQTPQIFF

SEQ ID NO: 132499 - protein, 44 aa, Oryza sativa
  Clone ID: PAT_MRT4530_34462C.1.pep
MEFSRSLHLRGTDYGHAPLFMREPRIESDSYSSPTPSTTPSPKL

SEQ ID NO: 132500 - protein, 150 aa, Oryza sativa
  Clone ID: PAT_MRT4530_34463C.1.pep
MGAVTASSSSPQPSAVATKSDQDDDQSMEGEKTTMTKVVAPVERVVFELNGERQEVAAADVEPSTTLLEFIRTRTPFRGPKLGCGEVPGDGSSRPSPGWQRIQRCRCWETAAATATAVVVPVITGNRSALPAVAGRPPPPPSPMSPPPPP

SEQ ID NO: 132501 - protein, 1883 aa, Oryza sativa
  Clone ID: PAT_MRT4530_34464C.1.pep
MAGGGGVGGGAGEHAAAAYWYDACEDGASLLCGIDFAASADFDPGLIPAMDTGADDGFVAEIDRILESINAESSPAPPPPPPPPLPEPVPVAPPELPIQEKQLQVASAPVANNAVAVVGVVQRSKGVVARKEPRRESHGCAANGGGGGEWRDGKRPRLASGGVGGPRQEWRRRPMLPPPPSRGWDDRRGRRDFDRVRKHEHHRREARGFWERDRGGKMVFRSGTWEQESDREAKRARTQDGGSMEKKAEADRMGAAQREKPVAEERARQYQLEVLEQAKSRNTIAFLETGAGKTLIAVLLIKSVCDKMLKENKKMLAVFLVPKVPLVYQVLVMTAQILLNILRHSIIKMDAIHLLILDECHHAVKKHPYSLVMSEFYHTTPKEKRPAVFGMTASPVNLKGVTSQEDCAIKIRNLESKLDSVVCTIKDRKELEKHVPMPLEVVVQYDKAATLWSLHEQIKQMESTVEEAALSSSKRTKWQFMGARDAGSRDELRLVYGVSERTESDGAANLIQKLRAINYALGELGQWCAYKVAQSFLTALQNDERANYQVDVKFQESYLKKVVDLLHCQLTEGAAMKSETSDVEMQNTEKHNTNDLEEGELPDSHGEHVDEVIGAAVADGKVTPRVQALIKILLKYQHTEDFRAIIFVERVVTALVLPKVLAELPSLSFIRCASLIGHNNNQEMRACQMQDTISKFRDGRVTLLVATSVAEEGLDIRQCNVVIRFDLAKTVLAYIQSRGRARKPGSDYILMLERGNISHETFLRNARNSEETLRKEAMERTDLSHLDGTSVLSPVDTSPGSMYQVESTGAVVSLNSAVGLIHFYCSQLPSDRYSILHPEFIMQKYEKPGGSVEYSCKLQLPCNAPFEKLEGPICSSIRLAQQAVCLAACKKLHEMGAFTDTLLPDRGSGEGEKTEQNDEGEPLPGTARHREFYPEGVADILRGEWILSGRDGYQNSQFIKLYMYSVNCVNVGTSKDPFVTQLSNFAIIFGNEPDAEVLSTTMDLFVARTMITKASLVFRGRIEITESQLVLLKSFHVRLMSIVLDVDVDPSTTPWDPAKAYLFVPVGAEKCTDPLREIDWTLVNNIVNTDAWNNPLQRARPDVYLGTNERTLGGDRREYGFGKLRHGTAFGQKAHPTYGIRGAIAEFDIVKASGLVPARDRGHFSDYQNQGKLFMADSCWNAKDLAGMVVTAAHSGKRFYVDCICYNMNAENSFPRKEGYLGPLEYSSYADYYKQKYGVELIYRKQPLIRARGVSYCKNLLSPRFEHSDAREGDFSENLDKTYYVYLPPELCLVHPLPGSLVRGAQRLPSIMRRVESMLLAVQLKDIIDYPVPATKILEALTAASCQETLCYERAELLGDAYLKWVVSRFLFLKYPQKHEGQLTRMRQQMVSNMVLYQYALNKTLQSYIQADRFAPSRWAAPGVLPVFDEESREYEPSIFDEESTGCELQKESYDDYADNMQEDGEIEGDSSCYRVLSSKTLADVVEALIGVYYVAGGKIAANHLMKWIGIHAELDPEEIPPPKPYDIPESIMRSINFDTLKGVLGIEFQNKGLLVEAITHASRPSSGVSCYQRLEFVGDAVLDHLITRHLFFTYTDLPPGRLTDLRAAAVNNENFARVAVKHKLHVHLRHGSSALETQIREFVKDVQEELLKPGFNSFGLGDCKAPKVLGDIVESIAGAIFLDSGYDTSVVWKVFQPLLHPMVTPETLPMHPVRELQERCQQQAEGLEYKASRAGNIATVEVFVDGVQIGVAQNPQKKMAQKLAARNALVVLKEKETATKKEDERDGEKKNGAQMFTRQTLNDICLRRQWPMPQYRCVNEGGPAHAKRFVYSVRVNTSDRGWTDECIGEPMPSVKKAKDSAAVLLLELLNRDFPDKPDGKQP

SEQ ID NO: 132502 - protein, 36 aa, Oryza sativa
  Clone ID: PAT_MRT4530_34465C.1.pep
MRHVGRFGCWALWALAIGYPHRNTWVVRSGVRMAYR

SEQ ID NO: 132503 - protein, 39 aa, Oryza sativa
  Clone ID: PAT_MRT4530_34466C.1.pep
HPIGIFKNVIDQKNRTYANYIQKFIYTHSLQWILLKYQD

SEQ ID NO: 132504 - protein, 92 aa, Oryza sativa
  Clone ID: PAT_MRT4530_34467C.1.pep
KHCRNIKFFIEHRGLSSIGRTLSTLICLACNCKSSYANYLSCISWDYAMFQYSYKCHCHSWMEAFNPIPSPTLLARWRSAAATRLGGGARRT

SEQ ID NO: 132505 - protein, 85 aa, Oryza sativa
  unsure (1)..(85): unsure at all Xaa locations
  Clone ID: PAT_MRT4530_34468C.1.pep
IGPGEGDRGRGGRQPPAEGAPATWASEARTAPIFGEXGENVEEGEDVGWTTSTRARERGDARRRRRRGAARASMAAVGAGGRGWA

SEQ ID NO: 132506 - protein, 170 aa, Oryza sativa
  unsure (1)..(170): unsure at all Xaa locations
  Clone ID: PAT_MRT4530_34469C.1.pep
MGWGREPATGGAGTAAGTTAGGNGRRPEKTRAFRTVGIGADLGEQXVLGFPGEGEETEREEEEDDGRPGAWAPRGQARAQRACDARARGREGRLGQGRGLGRAAGPGGEEGGGSWAEGEGSPRKGGREGEGEKERERKRGRRGRLRPRAEREREXEFGPNLAQREREGYF

SEQ ID NO: 132507 - protein, 271 aa, Oryza sativa
  Clone ID: PAT_MRT4530_3446C.1.pep
MDRRRLQARAGIDDHRLESLHRPRLGETREEACAVCLQDFGEKDEELRMMPCSHSFHQRCIFGWLAIRDNCPVCRSAMSSYNDVLEELHAELEQWIQGTYGERLRRVLLPQIDGGGCLRGSRTLLTQEEAHEIIRERLRSDIRRGRIELDADFLQQLVDQVRDHILQRQRRGTATAIAMDGVVEVEDAYRNGGFGAVPASSKAMAELQEAMASDARERGCAVCLEDFEAGEKLTRMPCSHCFHATCILDWLRLSHRCPLCRFPMPTQDQSY

SEQ ID NO: 132508 - protein, 285 aa, Oryza sativa
  unsure (1)..(285): unsure at all Xaa locations
  Clone ID: PAT_MRT4530_34470C.1.pep
MAGRASGWRRGAGEGSNGRTWWKNATVSGSGTPRRSARRPSESSGGILILLHDGVEGDASLGVDVPGPGSDQGKASMCGLYNSSRGRGSATQFQSSVFSMEEILHTTNNFSPALKIGQGDFGAVYRGVLPDGIFVVVKCAKLRAPGAYTPCFTTASKATLPLASTVSARIFEPPFSSRRPMPSGYCATWISGKAPPSLKSSSRRGTNPPRXGTGLVGPEDFAAAAASDCADSPPYRSGPHLRAAAARSRHPPPAEGKRGRERERCHRPKGRMGQKEREGRERRKD

SEQ ID NO: 132509 - protein, 58 aa, Oryza sativa
  Clone ID: PAT_MRT4530_34471C.1.pep
INSLQVETEGMYEKFNLAEERSEEGDAKSMHMAAVIADAIEPEANLISRKDAALQQRK

SEQ ID NO: 132510 - protein, 100 aa, Oryza sativa
  unsure (1)..(100): unsure at all Xaa locations
  Clone ID: PAT_MRT4530_34472C.1.pep
MDRCVMIVLASTAIAYHGLKYTADMPILLPGXSCRIGYTTCGSRIRCIHAYIIEGSNRXGTLYYLTPLTKEDLLXPIEYLLRFTWLPCLKHSTVGWCYRE

SEQ ID NO: 132511 - protein, 162 aa, Oryza sativa
  Clone ID: PAT_MRT4530_34473C.1.pep
MAVAHKNSSRNKLAVAAIVALMSLLVFAAAPSEACGGRCNGGACRSRCAKPTPAPARRAAGAKCPFDALKLAACADVLGGGGGGGGLLNLGHLLGNSSPSSSGEQCCGLLAGLADVDAAVCLCTALRANVLGLVGVEPHVQLSVLVNRCSRKLPNGFQCSSN

SEQ ID NO: 132512 - protein, 97 aa, Oryza sativa
  unsure (1)..(97): unsure at all Xaa locations
  Clone ID: PAT_MRT4530_34474C.1.pep
FFFXXXXFFFFFFFFFFYTWKTGIHIXHLDLXKRKVTTNDYILTRQTPPPASVXXTHGRRQIPXPTASALESVAXTCSTVDPAASLATIFSIVITYS

SEQ ID NO: 132513 - protein, 180 aa, Oryza sativa
  Clone ID: PAT_MRT4530_34475C.1.pep
MSALLSLFSLSPPSSVLMAAVAGGRGRSGRGDTRAGWRQPPSGSELDRPSEVLQDKHYRAAAAADDAPELRESPLCLLPQSTIATFKRAQVHQRWGFVETQQQPVLAECAAAAEAAARVAVERIRRGAARQHAQVVTLTVSRFHSTPREGAEQRLAELRSAVSGSGCAMVLVVEDLARAA

SEQ ID NO: 132514 - protein, 115 aa, Oryza sativa
  Clone ID: PAT_MRT4530_34476C.1.pep
TRDVQNSFISTSLSFHIHKSTTVRGFEMARLQFNPNAVWVSASGSGGIQGILKPSESLNNSQKTTPNQGANPHQMLEGHICPLPNRSHLAAQRPKCTENNPKTLGVWCGFHPTHH

SEQ ID NO: 132515 - protein, 53 aa, Oryza sativa
  Clone ID: PAT_MRT4530_34477C.1.pep
VKGELICALQSMLIRELHWHDLLQHLCRTMGFCLSCVLLEMIKTDCIIVVTTI

SEQ ID NO: 132516 - protein, 978 aa, Oryza sativa
  Clone ID: PAT_MRT4530_34478C.1.pep
MEEEVMGGRGGLGGGKKMAAGEVELKEKAGTAWSHSYLNQKPWHPLSYPNQRRKWIAEQIHANRARRQEEVQREFAQEQEFFRQTALFSKKDKEKMEIMKAVSFMYVRPPGYNAESAKAAEIEDEKRRSGEGHATQSAAAASTSSMPDKELDKTHAGPDKKNRPKDVFGRPLPTEQEFEVLKNAPRLETGAPARVKPFGVEVRNVRCLRCGNYGHQSGDRECPLKDVIMPNEESRLKRDDPLTAIMAQTDSSEPLKWELRQKPGMSPPRGGYNPDDPNQQIVAEDIFDEYGGFLGGCDIPALLSNFSASKSKKRSKSKSKHRQAEPAAHEESSHSEAEKSNRTSRSKRKKEYCSDSSFSGAEVEARKSKQKSKHKKKHLPESLSDSKVEVGRDTRRHQKREHRKKKRNITESESSSDSEVDIDTRKHPKREHRKKKRDVTESYSSSDSEVEVDRDTRRHPKREHRKEKRNMTENGHSSRSREKHHYSDTSTSDNEKHSMGHKDEQYYSDSSSSRSNRHSRRSREKRYYSDSSSPEHNRHSGRSKEKRAYTDLSTHDRDRHSKRSRDKREYTESRPYESNKHSRTLKVNWHYSDSRFPPKPTTPEQGRQQSEPSPTPEASNARGGEMLSSSTSTHCLHQPPPPPASHQFRSAAAFRRPPSPAAAPLRARPQRGGGTTIRAIDAAQPFDYESRAAGLLEERQRLKIAIVGFGNFGQFLARTFARQGHTLLAHSRSDYSSLAASVGASYFQDPHDLCECHPDVVLLATSILSAEAVLRSLPVHRLRRNTLFVDVLSVKEFPRNLLLGSLPPDFDVICTHPMFGPESARDGWDGLPFVFDKVRVGDCPARRARAEAFLNIFEREGCRMVEMTCAEHDAHAAETQFLTHTVGRMLAMLELRSTPINTKGYETLLRLVDNTCSDSFDLYNGLFMYNKNSTELLNRLEWAMDSVKKKLFDGLHDVLRKQLFEGSPHAPNNTPVRK

SEQ ID NO: 132517 - protein, 735 aa, Oryza sativa
  unsure (1)..(735): unsure at all Xaa locations
  Clone ID: PAT_MRT4530_34479C.1.pep
MTKPEIDPTNILPISLEDLDEEQPREIEQHLKATQEALLAGCFIKTRQGIVRKPGSTPKVTVNEVSGDDIALLVQKLVASSINETVNATFNNKLEHAMXVIFISGFNXFMNSKFSSLMTDLTSTSVASTSQPPVHHIFSKNDGATMQHAGTGPTTGGSLAGQIAPTFGVTGHMAGQTGAIVLVXEVDPTTNNFVLYHYPVPNPPVATVNPQIPPYIPNSYNDPAIGYPQDAIYGQYNNIVPPQPPFRPPNPPRPKNMEERVRNITREXAFGIEPRNRDRVYGKSYPNYFDNITYPRGFRVPKFTKFNGEDSRTTWENIGQFLAQCGEASNTDTFKLYLFSLSLSGTAFTWFTSLPAIYIHTWAQLXTKFHDYFYTGETELRLCDLTSVRQKYNESVTDYIKRSMDATNRCFSLNITERGLVDLASSSLLAPIKXRLVGQQFLDVSQLMHKALAQESRVRESKKFVRSNXQKKPNVSIVDCPDDSDSDNDDGDPDIYVAEWSWTNKPFVCSNLMLTPCKDRQSQIKYSFDVAKCDKIFDYLLXKKKKIRLPKGHVIPSPEELKRRAYCKWHDSHSHTTNNCNVFQRQVQSAIEEGRLKFTEGSKKKLDHDLFPVNTIDFNDKKVLIRPEQAVFTNGKEVVVGEPRHKMVVSKNTEKYEKKXAEQYPNKGKRPRSPPSERFGPSPRPLEPPFPYNPQLMPWGPCPMPPPGFSFSYFMPWGALPPMYGHMQPMQIHQG

SEQ ID NO: 132518 - protein, 378 aa, Oryza sativa
  Clone ID: PAT_MRT4530_3447C.1.pep
MLRCFLVAAAAVALAAAAAAPARAIPFTESDLSSEESLRALYERWRSRYTVSRPAASGGVGNDDGEARRRFNVFVENARYIHEANRRGGRPFRLALNKFADMTTDEFRRTYAGSRARHHRSLSGGRGGEGGSFRYGGDDEDNLPPAVDWRERGAVTGIKDQGQCGSCWAFSTVAAVEGVNKIKTGRLVTLSEQELVDCDTGDNQGCDGGLMDYAFQFIKRNGGITTESNYPYRAEQGRCNKAKASSHDVTIDGYEDVPANDESALQKAVANQPVAVAVEASGQDFQFYSEGVFTGECGTDLDHGVAAVGYGITRDGTKYWIVKNSWGEDWGERGYIRMQRGVSSDSNGLCGIAMEASYPVKSGARNAAASNRVVKDEM

SEQ ID NO: 132519 - protein, 120 aa, Oryza sativa
  Clone ID: PAT_MRT4530_34480C.1.pep
MARSDRRWLGLTGYSTGGSGSATQSVAASNQGASQLGRHAPVRPTIWARSDQPWSLNPAGDQVFGERSRARLLCFLYVNISDAGAAGGGRDTKVDETIILALVDMVVGAFGARRSQGGVG

SEQ ID NO: 132520 - protein, 43 aa, Oryza sativa
  Clone ID: PAT_MRT4530_34481C.1.pep
MGRRVHLLRWGHDSSLRMVGKRLHLAAAAASVQITSNGCDLTD

SEQ ID NO: 132521 - protein, 105 aa, Oryza sativa
  unsure (1)..(105): unsure at all Xaa locations
  Clone ID: PAT_MRT4530_34482C.1.pep
LPTSPVTSPLPLPPVPPPPSXARRPSLPTFPPVRPTASLPLSLQGSPTSYPLLSLLDSPTSSPRSPAGAFGLSPSLPGSPTSSSPPPVLSAAPHLPGLGRKEKKG

SEQ ID NO: 132522 - protein, 77 aa, Oryza sativa
  Clone ID: PAT_MRT4530_34483C.1.pep
RPPSPRTPSHHRVSRTPQPARPGSPHRCHPLATPAAVAILPDLGSKRRRHHHQTSLPPHRSAPPLADPPLDLAGRFP

SEQ ID NO: 132523 - protein, 844 aa, Oryza sativa
  unsure (1)..(844): unsure at all Xaa locations
  Clone ID: PAT_MRT4530_34484C.1.pep
MAEVEVAAAAAAAEGVLHRRIEFHLARRSHSVVAVGGGGFRMETLNPDAXTERRAGAAQGVGVAAGGEGEARRAEKGEVVGGGLDPELSVARIYLGRIGAGLQNLGNTCYLNSVLQCLTYTEPFAAYLQSGKHKSSCRTAGFCALCALQNHVKTALQSTGKIVTPSQIVKNLRCISRSFRNSRQEDAHELMVNLLESMHKCCLPSGVPSESPSAYEKSLVHKIFGGRLRSQVKCTQCSHCSNKFDPFLDLSLDIGKATSLVRALQNFTAEELLDGGEKQYQCQRCRKKVVAKKKFTIDKAPYVLTIHLKRFSPFNPREKIDKKVDFQPMLDLKPFISDSKGADFKYSLYGVLVHAGWNTQSGHYYCFVRTSSGMWHNLDDNQVRQVREADVLRQKAYMLFYVRDRVGNPTPRKDNITANMPARRTIPEKISGLSDMIQSGVIEAKLNGSSSPYGDKRLHGISNGNSIKTSREHYLKKDGKTEAPKASENNGLASTQKASAPQIDGATLSAQSKQITSTGHREVSSSDRSASLTHVIVNQAVAMVPSQELQPKVDGLTDTSSLGNGNAILSERNKQTSQHQNPFSMPASHGKDTGAGLAAQTFPTKDAIVSNGVVPSSRDPISSEKVCGLQKSIKQDDKTVKELPISENNIVSGLERVNARKQTSSEVSMKVAAADSCNSNTPKRVDLKSKKLVRYPVMNMWLGPRQVMLGSLKVQKKKKCNRTRRRSVVCEDMANATCSGNNTSEQQASTSTTTSSETVQCTPRGRKRAYDSDSPKNNNQKQNKQDVIGADTGSGELNMDKRNVISETAASAELPKLGPGSSANQEHSRKMFMQNWEFPGILLF

SEQ ID NO: 132524 - protein, 106 aa, Oryza sativa
  Clone ID: PAT_MRT4530_34485C.1.pep
MPPFLPLLNYSLCFAPDLVGPPLSHRSSHHRTEPAKKKCSTNHDTIPTGGSDINIIHLKFLPNKAGVWRALVLARARAACCGAAMSVTYHEPPKGSGKQAERETET

SEQ ID NO: 132525 - protein, 71 aa, Oryza sativa
  Clone ID: PAT_MRT4530_34486C.1.pep
MPPPPTPAHCRPPAPQLRRLAAHRRAAASPAPEKKRRLPELEESMEHESQSSSDVPKIAKFGEVQFLSKEG

SEQ ID NO: 132526 - protein, 121 aa, Oryza sativa
  Clone ID: PAT_MRT4530_34487C.1.pep
MYMGSTSPISPRRTPSPAPPPPRSPRRPRPPPMSPRLPRPSGAASPSSPETEEAAGPTDGAPPLRRSARRGRRRRRRRGTRRGNLISSGGGAFVLRIMATPRRRSCPRSYLGMIPDFGRSR

SEQ ID NO: 132527 - protein, 46 aa, Oryza sativa
  Clone ID: PAT_MRT4530_34488C.1.pep
DCIANLVPYVYKELYDGIFFCLENYDYFKNIYQLYKWKKEVKKKKN

SEQ ID NO: 132528 - protein, 275 aa, Oryza sativa
  Clone ID: PAT_MRT4530_34489C.1.pep
MNGRDLSVHDRATGNDDNDVSGDVTTGGGSGVHACRRTTARQREQREPTCRGRRGELTGDQNNGGRSTDGDGVEEEAAATFGLTTTAVFRRSTATAEGRTRASLPRRRLLDDEDNDDDVGGPSVGVDGCGPLYALGLRQWWLYSALQNCLSLATAPCRTGLPLLPRDDDDDDDSDGDGDDDLPLLQASPLRLRGGCSQAVTTTVCARMRNLEWMSRARVFNGDEALSESYEAAAVESSADIGGRRRPELAWGGKAEKDQRSRHGEGRRRRRRRPI

SEQ ID NO: 132529 - protein, 59 aa, Oryza sativa
  Clone ID: PAT_MRT4530_3448C.1.pep
RVQAYHSKIRIAYRTCINWKGLDIHLPCCDHSASGDIPLGVFQSVNPQRDRGCLSVDIR

SEQ ID NO: 132530 - protein, 103 aa, Oryza sativa
  Clone ID: PAT_MRT4530_34490C.1.pep
MAGGAEARRHPGGAARGAGVDGRGGRGGGRRRLLAGEHGGGGCCWRPVAAQLRRRPPPAQLRATARLGPVGVAYPLKKRKEKKREEIGDDVDSMTCEAHVIPR

SEQ ID NO: 132531 - protein, 1091 aa, Oryza sativa
  Clone ID: PAT_MRT4530_34491C.1.pep
MCQWRGVACGLSGRRTGRVVALDLTKLNLVGAISPLLGNLTYLRRLHLHKNRLHGEIPSELGHLRDLRHLNRSYNSIQGPIPATLSTCRGMENIWLYSNKLQGQIPSEFGSLQNLQALVLGENRLTGSIPSFIGSLANLKFLILEENNFTGEIPSDIGRLANLTVLGLGSNQLSGPIPASIGNLSALQFLSVFSNNLVGSIPPMQRLSSLEFFELGKNNIEGSIPTWLGNLSSLLTVKLGGNRLDGNIPESLGKLKLLTSLDLSSNNLVGPVPDTIGNLYSIKQFHVENNELEGSLPSSIFNLSSLEELNLQTNNLNGTIPLDLGNRLPKLQLFLISENQFHGSIPPSLCNISTLRWIQTVNNSLSGTIPQCIGINQKSLYSVTFAVNQFETSNKYGWSFMSSLTNCSNLRLLDVGDNKLTGELPNSIGNLSTRLEYFVTNYNSMTGKIPEGLGNLVSLKFIEMNNNFYEGTIPDSLGKLKNLNRLYLTNNNLSGSIPSSIGNLRMLTLLSVAGNALSGEIPPSLSNCPLEQLKLSYNNLTGLIPKELFAISVLSTSLILDHNFITGPLPSEVGNLTNLALLDFSSNLISGEIPSSIGECQSLQYLNTSGNLLQGQIPPSLDQPKGLLLLDLSHNNLSGSIPKFLGTMTGLASLNLSFNNFEGDVPKDGIFSNATPALIEGNNGLCNGIPQLKLPPCSHQTTKHKKQTWKIAMAISICSTVLFMAVVATSFVFHKRAKKTNANRQTSLIKEQHMRVSYTELAEATKGFTSENLIGAGSFGSVYKGRMKINDQQVAVAVKVFNLKQRGSSKSFAAECETLRCVRHRNLVKVLTVCSSIDFQGRDFKAIVYKFLPNRNLDQWLHQNIMEDGEHKALDLITRLEIAIDVASSLEYLHQYKASPIIHCDLKPSNVLLDDEMVAHVGDFGLARFLHQDPEQSSGWASMRGTTGYAAPEYGLGNEVSIHGDVYSYGILLLEMFSGKRPTDSEFGESLGLHNYVNMALPDRTASVIDLSLLEETVDGEAKTSKSNQTREMRIACITSILHVGVSCSVETPTDRMPIGDALKELQRIRDKFHRELQGAGATNHQDIQIC

SEQ ID NO: 132532 - protein, 684 aa, Oryza sativa
  Clone ID: PAT_MRT4530_34492C.1.pep
MPPFSAAGGEGAPSPISSRPPPPEQAAAAAAEEQLNGSSLEHDGVLGGEEGDRGGSSAGNRWPRQETLALLKIRSEMDAAFREAALKGPLWEEVSRTQKVIENSEGTSTTPPVVAFNQKGELLVGTPAKRQAVTNPQNTFFGTKRLIGRRFDDPQTQKEMKMVPYKIVKALNGDAWLPPPHGKQYSPSQIGAFVLTKMKETAESYLGKSVSKAVITVPAYFNDAQRQATKDAGRGLGGGGEEAIGAVQLRLSFRCLLSCTPSLRSAICVNCVVDSLQFSSHHDVAMDLINSVTGVDEEGRSRQRILSFAAKRYVSAIERNPEDPDAYYNWALVLQESADNVDPDSSSSKDSLLEEACKKYAEATRLCPTLYDAYYNWAIAIADRAKMRGRTKEAEELWKQAIMNYDKAVQLNWNSPQALNNWGLGLQELSAIVPARDKQTIIKTAISKFRSAIQLQFDFHRAIYNLGTVLYGLAEDTMRSAGPDVSPNDLYSQSAIYVAAAHALKPNYSVYRSALRLVRSMLPLPYLKAGYLTAPPADNTIAPHKHWERSEFVLNHEGLQQVDASESPSSKPLGHMGRSKKYIKVAVEDIVSVSACSDLTLPPGAGLCIETIHGPLFLVADTWESLDGWLDAIRLVYTIFARGKSDVLAVYRVNHAGIEVVSPSKTVVPSSINSLFTSFRRTGA

SEQ ID NO: 132533 - protein, 69 aa, Oryza sativa
  Clone ID: PAT_MRT4530_34493C.1.pep
MRESYSEHLKQGKCFTDIVNDSFGALVIVQWKNNSWICTASSSQAHSQGSIFRFCFRYLYWECQYGEIC

SEQ ID NO: 132534 - protein, 155 aa, Oryza sativa
  unsure (1)..(155): unsure at all Xaa locations
  Clone ID: PAT_MRT4530_34494C.1.pep
AAHALKPKYSVYRSALRLVRSMLPLPYLKAGYLTAPPADNXIAPHKHWERSEFVLNHEGLQQVDASESPSSKPLGHMGRSKKYIKVAVEDIVSVSACSDLTLPPGAGLCIETIHGPLFLVADTWESLDGWLDAIRLVYTIFARGKSDVLAGIITG

SEQ ID NO: 132535 - protein, 57 aa, Oryza sativa
  Clone ID: PAT_MRT4530_34495C.1.pep
MGIAGSARQEKQPRAARVPVLIGSDAHAASPPVFGVFTSSPALGFSEHFPWLTARQS

SEQ ID NO: 132536 - protein, 122 aa, Oryza sativa
  Clone ID: PAT_MRT4530_34496C.1.pep
LRGRVPLAVWWPPPFCQVVQSGCSPHLWGPCFSCLQSWPLDPLYSVFFNGVIFSPGAPGVLVCLVASSPFRSFICPLFLWKSRGSFSCVFPEINRLCCLLVYYLCVLQKLWASRVQKLIFSF

SEQ ID NO: 132537 - protein, 98 aa, Oryza sativa
  Clone ID: PAT_MRT4530_34497C.1.pep
KKREKAEGHLSHGTTTTLTPTPTPTDSPAGEPTPPTDGDGHAHRRFLSRQAALQAHPPTTNILPLRLRRLLLLLIAATTTAPDADHHDPSPTSNTSLL

SEQ ID NO: 132538 - protein, 50 aa, Oryza sativa
  Clone ID: PAT_MRT4530_34498C.1.pep
MTRLIGPKFRSLWRGEVQEASSQIMGWLGRPLVRPNPPHRRWMQGFSWTV

SEQ ID NO: 132539 - protein, 180 aa, Oryza sativa
  Clone ID: PAT_MRT4530_34499C.1.pep
KKKKKKKKKKKKKKKKKKKKKKKKKRGEKKKKGRGAPFFRVPLLPAASFQGLRFFFVSLAFHFFVPLVFPRFAWGPLVFPPFIGLPLLPLFFTGFNPEPFSPAGFSNKWPALFAFWDPSFSGLLNWPLPFVSPLVPGSFAIPLGPPLLFSSPSFPALFAFFPFLAPNRGFSLGFPFRACP

SEQ ID NO: 132540 - protein, 113 aa, Oryza sativa
  Clone ID: PAT_MRT4530_3449C.1.pep
MNEGISRAFHIHIIHHVNTFKVNKQFHTSSTQQFLAIQIHYSFPSAIPLTIKNKQFGCCATATAPCRRAARWWGQGKSPHQPSAAGCALHIHCGMSHGCGSGTEKTIPLELQV

SEQ ID NO: 132541 - protein, 366 aa, Oryza sativa
  Clone ID: PAT_MRT4530_344C.1.pep
MAERRWIGGLAGSRRDGGVALRRRPHVFTLPHQIWRQHEPAPPDPLYAPTMPYLHGGNTRERTETAAPEVLPGAVGMEDAPPLDPLLFSLDMRFGSLPPRESPAAAAPTAWKPRRSAAHARPSLLPLARAPTCPQRRCRAACPPSPPLPCHAPPIARREVVITERPEKSRVLEAVSFRRPNDQAAAAAGGCHSLCDVQEISACVAAIHRTSPNAKLAYGRISLLALGRVQVFGSLLAYDRLPLSQIRSETKKMASNYVDTTGDEGRFHGHHSTNTTPTGAAASSPRTMRRSFSNASSGSHGGGGGAKCVCAPATHAGSFKCRLHRTNSQGHGHGHPHPSPPTSPAAGGASAAPRPSSASSRTVEAQ

SEQ ID NO: 132542 - protein, 45 aa, Oryza sativa
  Clone ID: PAT_MRT4530_34500C.1.pep
ISIVFAKLCLYVNSLLRSRNFHGFRNQEIFLMFHKSFCCLMFNMI

SEQ ID NO: 132543 - protein, 68 aa, Oryza sativa
  unsure (1)..(68): unsure at all Xaa locations
  Clone ID: PAT_MRT4530_34501C.1.pep
PRVRSTALILSILLVGLASPLAVGEIQTGLNGLIRIGKLVARVALQSEDGQLNTVNXDPFITTDYMDL

SEQ ID NO: 132544 - protein, 317 aa, Oryza sativa
  Clone ID: PAT_MRT4530_34502C.1.pep
EKYNHRESTVRFINSTFLFLLPFLLLAFVYSLFFPGYFSILPSLAARCSNSVAATPANATGPAVDLRVLLGVVTRAEMYERRALLRLAYALQPAPARAVVDVRFFVCSLAREEDAVLVSLEIIAHGDVVVLNCTENMDDGKTHSYFSSLPALFADAPYDYDPYDYVMKADDDIFLRLPRLLASLGAMPREDAYYGATIPCGSMDPFREYMSGMAYALSWDVVEWVATSDVPRNRTVGPEDRMTGQWLRLGGRGKNRFNAKPAMYDYPLPAPVDKCSHEFIPDTIAVHRLKDNPRWAETLKYFNFTKGLEPSKFYKIN

SEQ ID NO: 132545 - protein, 361 aa, Oryza sativa
  Clone ID: PAT_MRT4530_34503C.1.pep
MNLDISLSRFVTPIDLVSSSAKSGSGDAAPPPHVVEDFFGVIQLLSDGSVVRADDAALLAMPELQDVPGVQWKDAVYDATHGLRVRVFKLAAAAAGDDGGKLPVLVYFHGGGYCIGALDQSPFHTFCLRAADELPAVVLSVQYRLAPEHRLPTAIDDGAAFFSWLRGAGSADPWLAESAELARTFISGVSAGANLAHHVAVRVASGRQPVVDDVDPVVRVAGYVLLDAFFGGVERTAAEANPPADVSLLTVEMADQFWRLALPAGATRDHPVANPFGPESPSLEAVALPPALVVASGGDVLYDRVVGYAARLKEMGKAVELVEFEGAQHGFSVIQPWSPETSEVIQVLKRFVHKAIRPAEG

SEQ ID NO: 132546 - protein, 74 aa, Oryza sativa
  Clone ID: PAT_MRT4530_34504C.1.pep
MASSLPAMASSPRAPAEGCAVAAGAVDGGGHGLRRRAAWWRLARSTAADAGSGVRRRGGPWHSPPRRAARSLLA

SEQ ID NO: 132547 - protein, 73 aa, Oryza sativa
  Clone ID: PAT_MRT4530_34505C.1.pep
MPPAQHPTFLCASSPAAPFPSSPSPIPSPSSPPPPGPRRPELPSPVLSLPAVLSSGVHQIRATRARGPPDPPS

SEQ ID NO: 132548 - protein, 39 aa, Oryza sativa
  Clone ID: PAT_MRT4530_34506C.1.pep
LSTETPEVRNPCGPKENGSNLKVRNTFPANRAAFSPAAS

SEQ ID NO: 132549 - protein, 59 aa, Oryza sativa
  Clone ID: PAT_MRT4530_34507C.1.pep
TRTFDQHQLHAERKEVTVTIAHNIWPLNHHVYNLLWLKSDINNMNRALHNAPSAARKPV

SEQ ID NO: 132550 - protein, 50 aa, Oryza sativa
  Clone ID: PAT_MRT4530_34508C.1.pep
MDGRGSQAGVGREPKAATSPGVERSGKRELVLEDVELAKVVEMETVFALV

SEQ ID NO: 132551 - protein, 739 aa, Oryza sativa
  unsure (1)..(739): unsure at all Xaa locations
  Clone ID: PAT_MRT4530_34509C.1.pep
PGLQALSPPLPWRWHHALSASSRAYSRLAAAASDALLLLPLRASTSTSRVVRLRAAAASAPSEVLDSTNGAIPSGKGGGGQQYGREYFPLAAVVGQDAIKTALLLGAIDREIGGIAISGKRGTAKTVMARGLHAMLPPMKWLWEEGLANQVQYDADGNLKTEIIKTPFVQIPLGITEDRLIGSVDVEASVKSGTTVFQPGLLAEAHRGVLYVDEINLLDEGVSNLLLNVLTEGVNIVEREGISFRHPCKPLLIATYNPEEGSVREHLLDRIAINLSADLPMSFDDRVAAVDIATQFQESSKEVFKMVEEETEVAKTQIILAREYLKDVAISTEQLKYLVMEAIRGGCQGHRAELYAARVAKCLAAMEGREKVXMTELVILPRSILSDNPQEQQDQQPPPPPPPPPPQDQDSQEDQDEDEEEDQELISCTLGQDDDEENEQQDQQIPEEFIFDAEVQAQRRRGKAGRAKNLIFSSDRGRYIGSMLPKGPIRRLAVDATLRAAAPYQKLRREKDRDKTRKVFVEKTDMRAKRMARKAGALVIFVVDASGSMALNRMQNAKGAALKLLAESYTSRDQVSIIPFRGDFAEVLLPPSRSIAMARNRLEKLPCGGGSPLAHGLSTAVRVGLNAEKSGDVGRIMIVAITDGRANVSLKKSTDPEATSDAPRPSSQELKDEILEVAGKIYKAGISLLVIDTENKFVSTGFAKEIARVAQGKYYYLPNASDAVISAATKTALSDLKSS

SEQ ID NO: 132552 - protein, 46 aa, Oryza sativa
  Clone ID: PAT_MRT4530_3450C.1.pep
LGATWMPTSPVSLDLLPLSFVSLFCHWVAHSTDFKPVSFGSSMITY

SEQ ID NO: 132553 - protein, 251 aa, Oryza sativa
  Clone ID: PAT_MRT4530_34510C.1.pep
HASGLRAAAASAPSEVLDSTNGAIPSGKGGGGQQYGREYFPLAAVVGQDAIKTALLLGAIDREIGGIAISGKRGTAKTVMARGLHAMLPPIEVVVGSIANADPNYPEEWEEGLANQVQYDADGNLKTEIIKTPFVQIPLGITEDRLIGSVDVEASVKSGTTVFQPGLLAEAHRGVLYVDEINLLDEGVSNLLLNVLTEGVNIVEREGISFRHPCKPLLIATYNPEEGSVREHLLDRIAINLSADLPMSFDD

SEQ ID NO: 132554 - protein, 98 aa, Oryza sativa
  Clone ID: PAT_MRT4530_34511C.1.pep
CRSSLCFTSFQLLFPLHRVHLYCLVLVILQRLAASAPAAGGGGGLACFCYPLYHACSSLSSIRSGQSKGETTVLAKYGSPPSDLHAPFLSQQELTKPS

SEQ ID NO: 132555 - protein, 283 aa, Oryza sativa
  unsure (1)..(283): unsure at all Xaa locations
  Clone ID: PAT_MRT4530_34512C.1.pep
QLKYLVMEAIRGGCQGHRAELYAARVAKCLAAMEGREKVYVDDLKKAVELVILPRSILSDNPQEQQDQQPPPPPPPPPPQDQDSQEDQDEDEEEDQEDDDEENEQQDQQIPEEFIFDAEGGIVDEKLLFFAQQAQRRRGKAGRAKNLIFSSDRGRYIGSMLPKGPIRRLAVDATLRAAAPYQKLRREKDRDKTRKVFVEKTDMRAKRMARKAGALVIFVVDASGSMALNRMQNAKGAALKLLAESYTSRDQVSIIPFRGDXAEVLLPPSRSIAMARNRLEKLP

SEQ ID NO: 132556 - protein, 742 aa, Oryza sativa
  Clone ID: PAT_MRT4530_34513C.1.pep
MTRCSYKCGGGCVGDGGGEGEERRGKGRRRKRRDMFRQKSAAKTYGILEFVRDKSRVWIKSTGTLTNLKARFWTCTEVKQIFQASEYYEMTGLSRSIVEHRLPIKPGYKPYQQPPRRCKADMYDAIKAEVTRLYDAGFIRPCRYAEWISNIVPVIKKNGKLRVCIDFQDLNKATPKDEYPMPIADQLVDAASGNKIISFMDGNVGYNQIFMVEEDIHNTAFRCPGAISLYEWVVMTFGLKSAGATYQRAMNYIFHDLIGLLVEVYIDDVVVKSKEVDDHVADLRKVFERTRKYGLKMNPTKCDFGVSAWQFLGFLVHERGIEVTQRSVNAIKKILPPEDKKQLQKLIGKIGVHSWLWYRLGYNFPLGASFEFAYTIKPYATNNQAEYEVVLKGLQLLREVEADAVEIMGDSLLVISQLAGEYECKNDVLMVYNEKCRELMDGFRLVTLKHVSREQNVEANDLARGASGYKPMVKDIEDCQKFRAIQRVPASAMNPIIKPWPFRGWGMDMIGQINPPSSKGHKFILVATDYFLKWVEAIPLKKVDSGDAIQFVKEHIIYRFGIPQTITTDQGSIFVSDELVQIADSMGIKLLNSSPYYAQANGQAEAYNKSLIKFMKRKISDYPRQWHTRLAEALWSYRMACHVSIQVPPYKLVYGHEAVLPGEIKIGSRRIGLQDEITADEYYNLMADEIEDLVQSRLRALSKVTMDKERVARHYNKKVVNKSFSEGELVWKLILPIGTRDS

SEQ ID NO: 132557 - protein, 333 aa, Oryza sativa
  Clone ID: PAT_MRT4530_34514C.1.pep
PPPARRTRLPASSRRTPRIGDGGRGHRATVRGGGAAPPASRRSSAGPRRRARAGRTHVVVLCDAPVQGPRRGSWEDVARRRSGRTEVASVDDDEACELVSGADLVIGGDVDEGDGVRAYLLKAVKNNNGTGVLLLSDVFGFEDSATRDFAYRVACHGYNVLVPDLFRGSPWKKAEKDGFDAWLAGHAPERVSGDIDACTNWLVDEFTAAGVSRKLGIIGFCYGGGRLVETLARDGGGGGGAYSAGVCFYGSRMDASLAPRLAAPVLFVCGDGDPLCGVETVRALEARARGARAAVYAGRGHGFAHRPQSLEDDGDAEDAFALMRGWLHDHLLA

SEQ ID NO: 132558 - protein, 37 aa, Oryza sativa
  Clone ID: PAT_MRT4530_34515C.1.pep
ASGCCRGICAVIICTYPEAVAVFIHHKRRFLYGVLVA

SEQ ID NO: 132559 - protein, 262 aa, Oryza sativa
  Clone ID: PAT_MRT4530_34516C.1.pep
MYVKVELKRFRIVKEVGTIVMNVRIFAYYQLMQVCQRDPTAFTGNPSFAYGHEADGYIANGPLGGMTSPQLRTSLGGFEFQPSKVCPRNFIIFDQTDDKGRIMCHPALVSKLNPSATNAFPSYPEPICRSSGQDNGNLEEVSSSFKEDTREIDALLSSDEESDEDDVKSTGRTPDCFESDSLDSSSPPRSRKMHHSSSQSSVFHGSMDTVTHERMRNMVTVLRGIIPGGDQLDTASVIEEAVRYLKFLKMEAKKLGVEVSDN

SEQ ID NO: 132560 - protein, 249 aa, Oryza sativa
  unsure (1)..(249): unsure at all Xaa locations
  Clone ID: PAT_MRT4530_34517C.1.pep
MQRDPTAFTGNPSFAYGHEADGYSARGPWGGQCNYRVPVSPAFGAPSGMTSPQLRTSLGGFEFQPSKVCPRNFIIFDQTDDKGRIMCHPALVSKLNPSATNAFPSYPEPICRSSGQDNGNLEEVSSSSKEDTREIDALLSXSDEESDEXDDVKSTGRTPGQLREWIPLDSSSPPRSRKMHHSSSXQSSVFHGSMDTVTHERMRNMVTVLRGIIPGGDQLDTASVIEEAVRYLKFLKMEAKKLGVEVSDN

SEQ ID NO: 132561 - protein, 698 aa, Oryza sativa
  Clone ID: PAT_MRT4530_34518C.1.pep
MDAPPLRLRLAVAFLSLLLTVSASAAAASGGGGGFNVSFDSAALAFSDLTLLGDSFLRNGSVGLTRDTAVPSSSAGSVLCSRAVAFGGGGGSAASFAARFSFVIAEQNAGSTGGDGIAFFISPDHATLGATGGYLGLFNSSSSAAKTNASIVAVEFDTMLNDEFGDPSDNHVGLDLGLPVSVNAVDLAAFGVVLNSGNLTTAWIDYHGADHLLQVSLSYSAAKPAKPVLSVAVDLSPYLRDAMYVGFSASTEGSTQQHTIKEWTFQTFGFPSATNSSSFSNTTGNASAQTVPGEAAAGGAASRKKRFGLALGILGPVALAVSFVFFAWVSIRKLIELTSRKNAGFLPELVKGPRKFSYKELSAATRGFHASRVIGKGAFGTVYKAAMPGTATASAVSYAVKRSTQAHQSRNEFVAELSVIACLRHKNLVQLEGWCDDKGELLLVYEYMPNGSLDKALYGEPCTLSWPERYTVASGIASVLSYLHQECEQRVIHRDIKTSNILLDGNLSPRLGDFGLARLMDHNKSPVSTLTAGTMGYLAPEYLQSGKATEQTDVFSYGVVVLEVCCGRRPIDKDDGGGKNVNLVDWVWRLHGEDRLIDAADPRLAGGFYRDEMLRLLLVGLSCANPNCDERPAMRRVVQILNREAEPVPVPRKKPLLVFSSSASIKLQEIAFACGDDVRGGLPAAATSPRSEGGDIER

SEQ ID NO: 132562 - protein, 147 aa, Oryza sativa
  unsure (1)..(147): unsure at all Xaa locations
  Clone ID: PAT_MRT4530_34519C.1.pep
IEDKSLLGWHXFEAEKTNIFDRIIHSIRSXIEHAESSTELGYWPMTTSTVIYLLQNTFKASSSTSKGPKSSLTTTSNLFSMMVHNGRSTSLGSCVLSGYSGMVGRADNASNVEGKXTRTTFIQEMTASVGQTYGMIRDNLMNDITRV

SEQ ID NO: 132563 - protein, 89 aa, Oryza sativa
  Clone ID: PAT_MRT4530_3451C.1.pep
PACFFEGFLKFRWIQALVERHLDVEVSGLDRNGRPIKVEASGWQARILQHECDHLEGTLYVDTMVPRTFRIVDNLDLPLPVGCPPIGAR

SEQ ID NO: 132564 - protein, 156 aa, Oryza sativa
  Clone ID: PAT_MRT4530_34520C.1.pep
MPLMHLLAPPAQAFVVAPPRVAPAFDGAAAPPREDDPAADQPPEREADADERRLRRKISNRESARRSRARKQRHLDELRARAERLRRCNRELAARGHAARGRAGLVRLANAWLRAEAAALTRRLAAARRAIALGQLYRPAAAAAAASGRSSRRSPR

SEQ ID NO: 132565 - protein, 130 aa, Oryza sativa
  unsure (1)..(130): unsure at all Xaa locations
  Clone ID: PAT_MRT4530_34521C.1.pep
FFFFFFFFFFLKRGEKTQKYFKSKQCXKTIYTKILILFYKXLMNVLGLXLSNNNKTNKKSSKENSPPRCSCAXEANHAXGGIPFHDMPRHVAGDPSXHDRXSAGSPPAPAPPSSYSSXAATAXSSTPTTS

SEQ ID NO: 132566 - protein, 57 aa, Oryza sativa
  unsure (1)..(57): unsure at all Xaa locations
  Clone ID: PAT_MRT4530_34522C.1.pep
KKPXPPPXPPPNNYYGSGCFPPFLGEVLRSSGVRTLRVGVRRRVVIVXGLFYXFPPN

SEQ ID NO: 132567 - protein, 113 aa, Oryza sativa
  Clone ID: PAT_MRT4530_34523C.1.pep
MAGSSSVGAVHRAGLAVGLLLLAAGAAACHGARAVPGEPEPATYRPQNVYGFGGFYPGPNINWVFPGPNGVTPQVGFGGMPGSSSSVFPGAGGASPLTPGGGVIGIHGATKKP

SEQ ID NO: 132568 - protein, 100 aa, Oryza sativa
  Clone ID: PAT_MRT4530_34524C.1.pep
MACEDRRRVGCRRPLPQPWPARREEEERAGGLLLPPPTAAAAARKRGRGGGQESRCHCRRQPLATAARERGRGGGQGGRCHCRRPPPPLRDTGCYRRGPR

SEQ ID NO: 132569 - protein, 88 aa, Oryza sativa
  Clone ID: PAT_MRT4530_34525C.1.pep
MACRRKPPGHLLQSLPSCTFFCHFFRHRPPGEERWLRQRPVKWVEDNNDWRNGWMMMTGVAGGGRQQPVPNNNDKAVGGDESNPTMKM

SEQ ID NO: 132570 - protein, 60 aa, Oryza sativa
  Clone ID: PAT_MRT4530_34526C.1.pep
TEWLQLKDKKYLVLRPKLFTAPDSCSINADQYLTTLAKSMHPNMAICWLEKKRHTTKLVN

SEQ ID NO: 132571 - protein, 145 aa, Oryza sativa
  Clone ID: PAT_MRT4530_34527C.1.pep
TARGRPFFLFLSRAGCCLFCSVAFPSLCSCSAKPRGLPGFLNRKAAPPRWPIAASGAPPPKKPGGPGGRPPEGAPPRGPPPAPLSPGPPGPRPPQRGPPKGPPPRGPPPAQGPPPEAGPLPTGGPPSPTGRPPGDPPPSPPPRGR

SEQ ID NO: 132572 - protein, 590 aa, Oryza sativa
  Clone ID: PAT_MRT4530_34528C.1.pep
MSLLLCFLLFSLYPPRISAATDTVSPGHALTGSDRLVSNNSKFVLGFFKTESKNSSYASHNSYLCIWYSKLPMITPLWSANGENPVVDPASPELAISSDGNMVILDQVTKNIIWSTHVNTRTNHTIVVLLNNGNLVLQSSSNSSKVFWQSFDYPTDSLFAGAKIFRNKVTGQKNRLVSRKNSIDQAAGLYSVEFDINGTGHLLWNSTVVYWSTGDWNGHFFGLAPEMIGATIPNFTYVNNDREVYLSYTLTKEKITHAGIDVNGRGLADFGMAKVLGREFSHALTTVRGTIGYLAPEWISGTVVTSKVDVYSYGMVLFEIISGRRNSNQEYCRGHSAYFPMQVARQLINGGIENLVDAKLHGDVNLEEVERVCKVACWCIQDSEFDRPTMGEVVQFLEGAAREETSSDHTLPPSSSFASPPPERPPAKPRGRKDSGGVGAPIAAGRWRREAYGDSGRPAVGSSGWRRCWRRLWLATAVADGGNGCECGVGCRWQHVEARKMTAFGRRGSGGRSAQRLAWCIEVPPVAAEAGTVQGEGTAGECGAVFGARRLAGGERSVKTQLNLGRAGNDDARSVIPLPRALSCRLIPHV

SEQ ID NO: 132573 - protein, 214 aa, Oryza sativa
  Clone ID: PAT_MRT4530_34529C.1.pep
MSKLANMFSVLNLDAEDDREEGAEPPTSSKAEAAAVTSSTEIDKIRLNHTMIVNHDGENLASSSSDYDKPLVWIDLEMTGLDITKDRILEIACIITDGLKEKVLQSDISENDAEKQVLDFIRKYIGSATPLIAGNSVYMDLLFLKKYMPHLAAIFSHVIVDVSSISALCSRWFPKERKHAPRKEKNHRAMDDIRESIKELQYYKENIFKSRKSK

SEQ ID NO: 132574 - protein, 99 aa, Oryza sativa
  Clone ID: PAT_MRT4530_3452C.1.pep
MEQRSAPPSEDEWRDEEHDGAAHVVAAGTRQTRASGIVGTPSAQGPHNETARGGDHLAGLNLLLDVNAPPPAYRSATPSLTLPQAAMLPTRTLVAAIMR

SEQ ID NO: 132575 - protein, 187 aa, Oryza sativa
  unsure (1)..(187): unsure at all Xaa locations
  Clone ID: PAT_MRT4530_34530C.1.pep
MSKLANMFSVLNLDAEDDREEGAEPPTSSKAEAAAVTSSTEIDKIRLNHTMIVNHDGENLASSSSDYDKPLVWIDLEMTGLDITKDRILEIACIITDGKLTKRIEGPDLVIRQSKECVNDMNEWCKVHHSASGLKEKVLQSDISENDAEKQVLDFIRKYIGSATPLIAGNSVYMXLLFLKEYMPHLA

SEQ ID NO: 132576 - protein, 85 aa, Oryza sativa
  Clone ID: PAT_MRT4530_34531C.1.pep
SFQCWMITAFNWTSRFTGKKDFHLPLGVPWFQYNLMALVKKVILGPIFPHKTCLVTQLFVTKFCCPPWIVGRPRELKRIRSHPIV

SEQ ID NO: 132577 - protein, 530 aa, Oryza sativa
  Clone ID: PAT_MRT4530_34532C.1.pep
MAAPSGSGEAAPAFSTYYDVYGPDDVQGLVTWVIGDGMLPSWVFVKNKPLIPKVVLLYVPGLDAALYMSQSRHLSSLKEFCGNPKPVLASSCIPDERHTIDALLTCRVKRKRALKTTDQSHESDGQEKLSSLDDLKDIPFPIKYYTLSEKDLEDNGYNFSLEGFVPTVSAPPGSSPYAILALDCEMCVTAAGFELTRVTLVDIKGEVVLDKLVKPANPITDYNTRFSGITAEMLADVTTTLQEIQEEFVGLVHKETVLVGHSLENDLMALRISHDLIIDTAVLYKHNRGHRFKIALRVLAKKFLNREIQNTGSGHDSVEDAKAALELALLKIKYGPDFGSPPSTSRRKLASILHESGKKCSLIDDASVLERYSDASCNSIAVFSDDDALSRSMKEVKNDKVSFVWTQFSKLISYLRTRAQDPDKVKSCVAEAIALQTCDRKTAQKRKKHQTCPELKEILIGLDKKIRKLYSILPDNAMLIICSGHGDTPLVQRHYSDDILADSVYCRKDGAPCIPLTLELLANMNFWIQF

SEQ ID NO: 132578 - protein, 107 aa, Oryza sativa
  unsure (1)..(107): unsure at all Xaa locations
  Clone ID: PAT_MRT4530_34533C.1.pep
RRRLSLLGVGSFENSPSCRLQLALLHCNLLLLLPESSAHTDLFDPILSAVECASAAALGFXCAVPGVNDGCCHRADEPTLFYMPHYEASLYDAFFAVNWEPPLLLRH

SEQ ID NO: 132579 - protein, 58 aa, Oryza sativa
  Clone ID: PAT_MRT4530_34534C.1.pep
PKPKLGSPWTKHAKVLGPPLEGGSPYENKALAKVAKTHPPVANIKGPKKEGPQFPTKK

SEQ ID NO: 132580 - protein, 55 aa, Oryza sativa
  Clone ID: PAT_MRT4530_34535C.1.pep
CETDGSTTLHYRGENCPLQLGSGVFVMIVKLLVLLSHTEKELLCFCGEYHRLHRL

SEQ ID NO: 132581 - protein, 197 aa, Oryza sativa
  Clone ID: PAT_MRT4530_34536C.1.pep
MAILLTDYRRVKQLGLLISYTFVFPLALHNMHFFDFGSKFLIRHSVHTLQVSQIDLKDKAKHEESKFQPNEFVRSSNDRCNLASSVKLKLNKLLQAITRAKSQLYIREQKMKRGGSSSSSATAVTMTMVVLLLVVAAASLRAADAAAAAPRRLLGADGGGGGGSPALVSESKASAGASTCTHDPNTPPSGTPCPPHN

SEQ ID NO: 132582 - protein, 67 aa, Oryza sativa
  Clone ID: PAT_MRT4530_34537C.1.pep
PDKDMLKRCDVVYPLNSLANQENTNEFFLSIGANGCAAIRFCHHTSILRRWVIFCCGSGVALAQYSD

SEQ ID NO: 132583 - protein, 453 aa, Oryza sativa
  Clone ID: PAT_MRT4530_34538C.1.pep
MASTAARRLRELQGQAGNKTCVDCAQRNPQWASVSYGVFMCLECSGKHRGLGVHISFVRSVTMDSWTEAQLRKMEAGGNDRLNAFLAARGVPKETPHVAKYNSNAAAAYRDRIVAVAEGRPWTDPPVVKETPGSGAPAPTRKPPLPAGGGGGGGGGWDDWDDDFRPDMRRNQSVGSFGESGAESGRQPPRSKSTQDMYTRQQLEASAANKDSFFARRMAENESKPEGIPPSQGGKYVGFGSSPAPSANRNGAAAQGDVMQVVSQGIGRLSLVAASAAQSAASVVQVGTKEFQSKMREGGYDQKVNETVNVVANKTAEIGSRTWGIMKGVMALASQKVEEYAKEGGNGWGDDWQRREQGSEPYHRFERETNGNGWNSSSHDGSSKNYNSNSWDDWDEPVKKDEPAKERQSSDSWAGWDDGKDDNFDSYNHSTPSKGSNQNGTTGGSYWTEGGFR

SEQ ID NO: 132584 - protein, 683 aa, Oryza sativa
  Clone ID: PAT_MRT4530_34539C.1.pep
MEPVNDFQEGISTEHAFEAEPVPSLSETITPRSMVVSFILSVTLSIVAMKVTLSSGFIPSFSIPAGLLGFCVSRASIRILDYFAVAQLPFTRQENTIIQTCVVACTSITFTGGFGTYILAMGKKAAVGDVNAQNNVEEPSFARMITFLFLISFAGMFIIMPFRKVMIIRHRLTFPSGTATAHLINSFHTPQGVKQARKQVTLLFKSFGGTIAWSLFQWFFASGPGCGFKFFPTFGLEAYKHGFFFDFTMANVGIGMMCPYMIVFSVFIGTIISCGVIWPYIESKEGIWYPSNLGPNSLNGIRGYKVFIGLSMIMADCLFVFLCIMVRTTCAMIKRRRQAMQGGGGNAQPFQGIDIADQPVKSFDDRRRAQVFLRDEIPDSVTIGCYVLLSIISIAAIPHLYPQMRYSHVALIYLAAPVFAFCNAYGFGVTDMNLASTYCKIAMFAFGSWVGIKSGGVVAALVAGGITMSILGNAADVAQDLKTGYLTLTSPRAVFISEAIGTALGCVVNPTVFWVFYRVYKMGSGDMGDMPYAKLYRGFAMLSVGDGEQGLPRHSMLLFKVFFVLALALSVFREVASRKEWRIRRYIPSTIGMAITFFMPPRVPVGMCIGSLVAYLWEKMDAGRGRMLSPALASGLICGDGVGSILLSMLTLMGARAPICIKFLSRGDNVKLDAFLATLHDMR

SEQ ID NO: 132585 - protein, 1308 aa, Oryza sativa
  Clone ID: PAT_MRT4530_3453C.1.pep
MVYTRTGNRTTGEGSNGEERADGVHPNSDSGNGPPPLPENPTLAQVMAHQTQMMAAMMQQMQQQHQQMHQRMMQHAEQQHQQFGPPPPQSKLPEFLRVRPPTFSSTTNPMEANDWLHAIEKKLNLLQCNDQEKVAFATHQLQGPASAWWDNHMATRPPGTEVTWAEFCRSFRKAQVPDGVVAQKKREFRALHQGNRTVTEYLHEFNRLARYAPEDVRTDAEKQEKFMAGLDDELTNQLISGDYADFERLVDKAIRQEDQRNKMDRKRKAAQFRSNQGSQHRPRFTPGQQGGPTTMIVRQHRPFNSSNFHQGTSGSQNHQGGQPNRGAAPRPPMAPAQSGQPAQAKKETGAKPGSCFNCGELGHFADKCPKPRRAGPRFIQARVNHASAEEAQAAPEVVLVTLTNEKGETVVYKSPDSPKQGVSLNQIETEIPVDTVEKNLRKLEDIPIVCEYPEVFPEDLTTMPPKREIEFRIDLAPGTAPIYKRPYRMAANELAEVKKQVDEQLQKGYVRPSTSPWGAPVIFVEKKDKTKRMCVDYRALNEVTIKNKYPLPRIDDLFDQLKGAKVFSKIDLRSGYHQLRIREEDIPKTAFTTRYGLYECTVMSFRLTNAPAFFMNLMNKVFMEFLDKFVVVFIDDILIYSKSGEEHEQHLRLVLEKLKEHQLYAKFSKCDFWLTEVKFLGHVITAQGVAVDPSNVESVTKWTPPKTVSQIRSFLGLAGYYRRFIENFSRIARPMTQLLKKDEKFKWTAECDKSFEELKKKLVSAPVLILPDPTKDFQVYCDASRHGLGCVLMQEGRVVAYASRQLRPHEGNYPTHDLELAAVVHALKIWRHYLIGNRCEVYTDHKSLKYIFTQPDLNLRQRRWLELIKDYDMSIHYHPGKANVVADALSRKSYCTALCIEGMCEELRQEFEHLNVGIVEHGFVAALEARPTLVDQVRAAQVNDPEIAELKKNMRVGKARDFFEDEHGTIWMGERLCVPDDKELKDLILTEAHQTQYSIHPGSTKMYQDLKEKFWWVSMRREIAEFVALCDVCQRVKAEHQRPAGLLQPLQIPEWKWEEIGMDFITGLPRTSSGHDSIWVVVDRLTKEELGTRLNFSTAYHPQTDGQTERVNQILEDMLRACALDFGGAWDKSLPYAEFSYNNSYQASLQMAPFEALYGRKCRTPLFWDQTGERQLFGTEVLAEAEEKVRTIRERLRIAQSRQKSYADNRRRELTFEAGDYVYLRVTPLRGVHRFQTKGKLAPRFVGPYKILERRGEVAYQLELPSNMIGIHDVFHVSQLKKCLRVPEEQADSEHIDIQEDLTYVEKP

SEQ ID NO: 132586 - protein, 150 aa, Oryza sativa
  Clone ID: PAT_MRT4530_34540C.1.pep
PNLALRAVATVVKMEDDRRLFHNAALRKHRKEVTERMDVLKSTGGSRGNGELVLDAENPTSPRGVQYPFVVGERVLIMGNRRTPDKFVGKEAVITSQCLNGWYLVKAVDSGESIRLQYRSLKKVSELQLQSEMRLQPLTFLHNKYPSSGS

SEQ ID NO: 132587 - protein, 371 aa, Oryza sativa
  Clone ID: PAT_MRT4530_34541C.1.pep
MIRRFLYIADHCFTGPSLSHRLRRVNPSHLFYPDGHPLATKPERATVEVEDARLPPPAMAFCSPGTTATAMGMEFMRRNDGSIVGIDHTGRAVLYDPAARAVRTLPALAAPKLMPVSAAVGDDLYVMETTPLPDGAGCFEALVRLEDNPAESDSDKWEVGDNYLWQPLPPPPPPPSPCVNAYAAGFEGSSRGMICGYAVAGDGDGGTRILVSTTTNGTYSFDTASSAWSKAGDWELPFRGRAEHVPEHGLWFGISDMDGTILGAWNLSSAFQQPQPPVASLQVKGFSVESHSDDRRRRELEVYASQVVHLGGGKLCVAKMFSVDRRERGEINFAMLTGVEVVRGRGGKLRVVKHKSRRYNFGQDYTPDYLL

SEQ ID NO: 132588 - protein, 64 aa, Oryza sativa
  unsure (1)..(64): unsure at all Xaa locations
  Clone ID: PAT_MRT4530_34542C.1.pep
LAQARPGDRXRITARALGHKGAYSATHVLISNAATGEVVAEGRHSLFGRMKVVSTSTATATSKL

SEQ ID NO: 132589 - protein, 143 aa, Oryza sativa
  Clone ID: PAT_MRT4530_34543C.1.pep
MRYTYPWWKEKVIDSNAKRKDELCPLTMEEAAMVLKALDIDRSYQIYIADGEIYGGQRRMAALTSAYPNVVRKETLLPSDISGFFQNHSSQMALGYQAQREEVAPVPMWHSPEGGRAREQQQQKQQQLQQQQQQQQLQQQQQQ

SEQ ID NO: 132590 - protein, 93 aa, Oryza sativa
  Clone ID: PAT_MRT4530_34544C.1.pep
MDQQENWHRRQGAGSRPASKDGMEMTNGQTIEKVADGRGVEDLTASKADTKEEEKGEKKRSVRAAICVDRHLREVLPSETRDVPGDVRYNYDE

SEQ ID NO: 132591 - protein, 451 aa, Oryza sativa
  unsure (1)..(451): unsure at all Xaa locations
  Clone ID: PAT_MRT4530_34545C.1.pep
MAQTCLPPGFRFHPTDVELVSYYLKRKIMGKKPLIQAISDVELYKFAPWDLPAQSCLQSRDLEWFFFCPRDKKYPNGSRTNRSTPNGYWKTSGKDRTIELNSRIVGSKKTLIFHEGKAPKGNRTDWVMYEYKMEDNQLVSAGFSKDDFVLSQXFSKKSGLGPGIGEQYGAXPFNEEEWEHADAEMFPLLPNVETSVFPLLPSSEVVNSTDDTRVQPSVAARAIEELPVQHLPHVCAGNGSTYQNITVTGESALMELPSQHSVESIGDEVVSVDNCSNVVNNADSPVIEGLVLEELSRFLTDSPHHGNPVGEHSGLPPMSEAEAHAFEVSTNDLYNEIAGLAELGVPNGDGFSPSNAGVTEQQPTYFGVPNSENYVNMDDIFAPDTRLSYAYPLPNNQFWHYPMDQFTYSTTLSAAFPSGDSRPTMRIVDDLPAAANNGGFASKPSMQFPLS

SEQ ID NO: 132592 - protein, 335 aa, Oryza sativa
  Clone ID: PAT_MRT4530_34546C.1.pep
MDTFFLSHGAPTLSIDDTIAAQGFFKSWLPAAVAGAELPRAILVVSGHWEAAAPTVNVIRGNNDTIHDFYGFPKAMYKNIWEEIDLSALVIGKPHYMVAETWFGNWSEFTRRQHHGSMIPFLRMLIALGRFTKSAVIARLLHLPPDMLKYPAPGAPDLAMKTKELLEQAGFGPVKENHSRGLDHGAWVPLMFMYPEANVPVCQLSLQSGRDGAYHYELGRALAPLRDDGVLVLGSGSATHNLRRMGPEGTPVPQWAAEFDGWLQEALLGGRHDDVKRYEEKAPHGRVAHPSPDHFLPLHVALGAAGEGAKAELIHRSWSNASLSYASYRFTTAKN

SEQ ID NO: 132593 - protein, 341 aa, Oryza sativa
  Clone ID: PAT_MRT4530_34547C.1.pep
MSPVRFNPWRAAEAEVQGVKRKGDSCYNKGSYGKAIKHYTRGAELDPSDISFLIKRAKALSGLGQECVRDCNDALRRGEELGSGSSGNKLISEALLWKASALEHLADCAADYEQVILLLRRSLETCHSEEAQIRLKGALFMREQYEELKSQKLECGAYPTYTQHLYPARLEERINMDKTRLNTLLKHATKKKKKNEDKLSEERSRRKEYEDMVMAIQASIEQLTMNHDAELKSVREDKANLECQLLQCTEKLERLQSILNREPPFTCPIFLHVMEDPYITADGHTYDGEAIRAWLDAGHDTSPVTNLPLEHMELIPNRALRSAIVWWHEQQNAAREHRDMA

SEQ ID NO: 132594 - protein, 71 aa, Oryza sativa
  Clone ID: PAT_MRT4530_34548C.1.pep
HNPIGGSFLTPGRYKRKKILKKRNKLSKTTVRQCYMENDQCTRHGTTKFNYAAQAVIHTTMLVTPRLAHLI

SEQ ID NO: 132595 - protein, 477 aa, Oryza sativa
  Clone ID: PAT_MRT4530_34549C.1.pep
MNRKGSDRLSKLPDDILLNILDRLHVRDAARTSVLSRRWRHLPSMLSQLVIDFVHFMPNGASMLSDDVLVWTNAAVVEATKSILERRNPDEYTIHLLRMLFYLNEGDCISIGQTVGHAMTTQKVEMAEFTIIVEKLPTRCTDDDLIDYGRRFMSFFDACPTAFGGLTRLIIGNLRFGESDIHNVLKTCQNLQYLRLFNCDSGNLTVLQLEHPQLNVLNIASCRFESIKLNCLPKLAQLMVEGWLSFQDPLTFGYVPSLEAVRLAGVGLKRHKLVKLSKILGKISVRDLRLNFKSEKIWVQPELPQKLASVFYKLRLVNLFRVPEGCDLTWTMFILEAAPFLKELRMTVWDHWCNMEKDEEMRASLYSSNKSVEWESSAEDFKHHNLSVLTIFCFQSEDFLVAFIKRIMEVAVNLEDVFLYNMLSCDTCKDIRRPCKFPRTKRQMCSLKKRINEGNSFAKFHFLTSVTADHVPISEYP

SEQ ID NO: 132596 - protein, 172 aa, Oryza sativa
  Clone ID: PAT_MRT4530_3454C.1.pep
MVVGAKGVQGSVGFGCWLADHTLAVGWGLPTNLTMRRCATRGPPGQLAWLLCLQDCDWGEAPSRGNRLVRRRRLRCVLPRWCVAVWGGWLETCAAGGFGGGWWDGESERERVCGREASAEPTLTVSRGQSVRRSVGRSIRYRPVFTHAPTPRSETLQECRTDPSGHQDNTMK

SEQ ID NO: 132597 - protein, 282 aa, Oryza sativa
  unsure (1)..(282): unsure at all Xaa locations
  Clone ID: PAT_MRT4530_34550C.1.pep
EIIALDFTKDETLNYFKIYKAGVENQLESKIKRLRYDXGGVYFXNELTSFREKSGIIHDRXMPPYSRQSNGVAKRKNHSLTELVNVMFDTTGLFKEWWGETILIVYHVLNKIPNKNKXIWGCLAMVNVPIVKKHKFGPKPVDCVFLGYAIHIIVYRFLISNSREPDMHVCKKFFSKDMVLYFLKMNTPNTSSQESILFPVSFVLIEHDVQTSIENPKEDHTVATRXDDYIVYLVDDTXTIQETYSSIDADYWKEAVXSEVTSVMSNGTWEVRRREACCGPAS

SEQ ID NO: 132598 - protein, 170 aa, Oryza sativa
  Clone ID: PAT_MRT4530_34551C.1.pep
MRMLCLGGTVPYSHIRTDSFGKFIKHNKCNHMVVWDTLAKGGKPGCGGRGILGVRNRGRHPGVLKGKPELARCWSGRPSMWHENQPKWQMDDLSGQKRICVIRDVCGHHRLGFPSGSGLLCCWAAGLWESTKMKRLWEPPNQVKWLWEPRSNDLTLEVGTLPIELLKSIS

SEQ ID NO: 132599 - protein, 169 aa, Oryza sativa
  unsure (1)..(169): unsure at all Xaa locations
  Clone ID: PAT_MRT4530_34552C.1.pep
MRVLCLGGTVPYSHIRTDSFGKFIKHNKCNHMVVWDTLAKGGKPGCGGRGILGVRNRGRHPGVLKGKPELARCWSGRPSMWHELLWIGNRNQNQPKWQMDDLSGQKRICVIRDVCGHHRLGFPSGSGLLCCWAAGLWESAKMKKAXEPLNNDLTLEVDILPFELLKSIS

SEQ ID NO: 132600 - protein, 131 aa, Oryza sativa
  Clone ID: PAT_MRT4530_34553C.1.pep
VPRRRQRGCGQWRCSAGATPAAGSTGSSMAANTAEAWGGQRAPSRGKGRVRVAAVAGEELEGRGPEVAVARRLPPLPISSPRRQTAAVPLHRAPGPRPPVRASGSPRVAPGTRAPPRRPGRLGLPLRGAEP

SEQ ID NO: 132601 - protein, 280 aa, Oryza sativa
  Clone ID: PAT_MRT4530_34554C.1.pep
MDTFFLSHGTPTLSIDDTMPAQHFFRSWLPAAVAGAQPPRAILIVSGHWETATPTVNVVRGNNDTIHDFEGYGFPKSMFQLEYPAPGAPDVAKKAKELLEQAGFGPVKEDHGRGLDHGAWVPLMFMYPEANVPVCQLSLQTGRDGAYHYDLGRALAPLRDDGVLILGSGNATHNLSCMAPVAEGTPVPQWAAEFDGWLQEALLAGGRHDDVKQYEEKAPNGKMAHPSPDHFLPLHVALGAAGEDAKAELIHHSWYNATLSHASYRFTTTTKNKPIAACKE

SEQ ID NO: 132602 - protein, 256 aa, Oryza sativa
  unsure (1)..(256): unsure at all Xaa locations
  Clone ID: PAT_MRT4530_34555C.1.pep
MKMIRTTRIVSILVSLVLFXXGDTYGYKYXAPXKKRGHKTIDQHTSXHTPDKPPDITLEIXLVVPIRYLRLPSRRIXTLSLISPDTDSRRNTTLLSTTCQHFRPPCRQKIDRLPQILYCLAYILVPTIPILCKCRNHDIKRRHTTTSSNPPMADPGMQSSARRPAPRAAAEGWIYCGSRRRHHSVRGSPPSPPRPPPMPDPSWKPPSPQLCPQEKPSPPTPTPAAAEFHRGSRRCHRSPREKSLSAVATPAAAKAA

SEQ ID NO: 132603 - protein, 43 aa, Oryza sativa
  unsure (1)..(43): unsure at all Xaa locations
  Clone ID: PAT_MRT4530_34556C.1.pep
YFNPLAASSSAIHNGVIEGWGDKNSSYHIVVYVWCXIXXSQAQ

SEQ ID NO: 132604 - protein, 422 aa, Oryza sativa
  Clone ID: PAT_MRT4530_34557C.1.pep
MVEGPKFAGMMGGVVGGAGGHDDIGGNFCDMAYYRKLGESSNMSIDSLNSLQTSTHGGGSVAMSVDNSSVGSSDSHTRMLNHPGLRGHVAANYSVGHSIFRPGRVSHALSEDALARALMDPRYPTETLKDYEEWTIDLGKLHMGMPFAQGAFGKLYKGTYNGEDVAIKLLERPEADPERAGLMEQQFVQEVMMLATLRHPNIVKFIGACRKPMVWCIVTEYAKGGSVRQFLMKRQNRSVPLKLAVKQALDVARGMAYVHALGFIHRDLKSDNLLISGDKSIKIADFGVARIEVKTEGMTPETGTYRWMAPEMIQHRPYDQKVDVYSFGIVLWELITGMLPFANMTAVQAAFAVVNKGVRPAIPQDCLPVLSEIMTRCWDPNPDVRPPFTEVVRMLEHAEVVILSTVRKARFRCCISQPMTTD

SEQ ID NO: 132605 - protein, 57 aa, Oryza sativa
  Clone ID: PAT_MRT4530_34558C.1.pep
YRRLPQRLSCAVSAPADHAGRVHARHPGRRRAAHAPTTSTCTDRTVQAPMSFSELAS

SEQ ID NO: 132606 - protein, 323 aa, Oryza sativa
  Clone ID: PAT_MRT4530_34559C.1.pep
MAGPADGAQCTVQPFAAGSQPWLLTGSTILTGSRFNATLMLEMLRGKRMMFVGDSLNRGQYVSLVCLLHRSIPESSKSMETFDSLTVFRAKNYNATIEFYWAPFLAESNSDDAVVHRIADRIVRGTALEKHARFWKGADILVFNSYLWWMTGQKMKILQAAAGCDGKDIVEMETEEAYGMVLNAVVRWVENNMNPRNSRVFFVTMSPTHTRSKDWGDDSDGNCYNQTTPIRDLSYWGPGTSKGLMRVIGEVFSTSKVPVGIVNITQLSEYRKDAHTQIYKKQWNPLTPEQIANPKSYADCTHWCLPGLQDTWNELLYSKLFFP

SEQ ID NO: 132607 - protein, 435 aa, Oryza sativa
  Clone ID: PAT_MRT4530_3455C.1.pep
MYATKPLSLFKSHPEAATQPPPDGRNSGYFVVKGPDDDGGGGDDETCCWGTCGGSRVRDLPFPQNRVLTVRYTEQHGESSTTYADAVVFVPVPDLPLASNRYYAVVAAGKHKGLVRACSREEDMTTLCFCRCINDAKPRVFDPADVYQQVEIVQRRRGRFTARSVAADGFPYFLYRKKYWRVYASKPKHFDLGEAPGLNAALRSRQLALDAFPVTTTAAVGKWYAPFFLVKESGVSPPEQMDRATFYEVSLEQRWEAAAHGHGDGYAGKLDSKRVLIGGSVEGRQEGGGRHGDDGYVWFRAAAAAGGGGQRVGLCASLWERMRWEEYRGGWVDEHEGAGEVAGGGSVLVERLYLSNAQLRIFRLNPSKTIKRKKKKKKKKKKKKKKKKKKKKKKKKKKKLRFVMIFFYQLCETVEKMYLLWFVNHLALSFRLVTI

SEQ ID NO: 132608 - protein, 111 aa, Oryza sativa
  unsure (1)..(111): unsure at all Xaa locations
  Clone ID: PAT_MRT4530_34560C.1.pep
PGLQEFGTRQPPKKENNIENTAENNNSDTVDSIRIEXMVMEKVSVDRNEMISEERXGTQTHNNLIEGIPVRQDTNCGQNVVVNSNVVNQDCSIVSKEIDLLKCGTRENQGK

SEQ ID NO: 132609 - protein, 252 aa, Oryza sativa
  unsure (1)..(252): unsure at all Xaa locations
  Clone ID: PAT_MRT4530_34561C.1.pep
LRKMMDFFSSCGWSRWRGDVSALEQAVSPGERGCGGGKRRRGQSAAGAGGAAASTGVGEXRGRGRGRGAAGERRRGVASFPLSRRPHLPPTPSAPDVAAPSSTCRARPLARRPLCPQPAALVFRSPAAVQRRSACRRAAXPPFVLWEEKLRPVPSKPGNLSFFDLMSIPGKLRAGLGALGIRPPPPXDSSATGGDISVGRGDPLPEQEPVPDLAPTSRRGRPQSAATLADRRARSCLLRLPRPRSPSAAAAA

SEQ ID NO: 132610 - protein, 42 aa, Oryza sativa
  Clone ID: PAT_MRT4530_34562C.1.pep
LYQKCQLVHRGNYVHLRVIITTRQHNNCICQTCLLNQTNYAS

SEQ ID NO: 132611 - protein, 145 aa, Oryza sativa
  unsure (1)..(145): unsure at all Xaa locations
  Clone ID: PAT_MRT4530_34563C.1.pep
IVFSYYILLGIEEVTVMVTVKAYLISYDLWNIRVXYTFMYMGCFRVHCRNPSRIMKNISTDRVIYKVLLGCLRGDQDDPQYKIDPXEECRASNLIANTPTTVYEARAHRGKSPGDLIESIDYDLILVPTYPNTLLIRSTCIIRRQ

SEQ ID NO: 132612 - protein, 115 aa, Oryza sativa
  unsure (1)..(115): unsure at all Xaa locations
  Clone ID: PAT_MRT4530_34564C.1.pep
MQGQSMSSSDSDVEPSADRSLSQVKAQPRFPVQPRPAVLFCSRGAISWGRSVRRTEGSSFXAQGSSRLGFTPDPNVRAPFYAIRRVQEDRFGSPVHPPVSGGRLVSSRAGNPRAM

SEQ ID NO: 132613 - protein, 182 aa, Oryza sativa
  unsure (1)..(182): unsure at all Xaa locations
  Clone ID: PAT_MRT4530_34565C.1.pep
MNGNEKTKRKEKSARETTARDRAGLAPDTKTAKRIRRNGGGEESRGTKRGXQRRRRGGGEAGRRSVGSEAGRKGGSGGEASATAEVHAGDGMRTTTDRDDQLARPDAHRHDALSAVELLAAARLREDSGLPILLDDLRSYRVAAAALLRLVPRAPSSRPAPPRRAPVLSRCRAARRYRRPSR

SEQ ID NO: 132614 - protein, 267 aa, Oryza sativa
  Clone ID: PAT_MRT4530_34566C.1.pep
MASWRKINSRFMTAKHIEDCFSSRWALLERVSYYRILDKNTSLEYEFSLFRATLSPSVGRAVVLHPPGAAVIRPPLLAPATSSPVRRCHRRTRWRAGGEGSSGGGQRVSSFGSGGRQRASSSVVWVADQSAPIADHPSSPASMLAIASDGNLVLSDGATGHALWSTNVTAGVNSSASGGGGGAMAVLANSSNLVLRLPDGTVLWETFEHPCNTFLPGMKIGVIYRTRGGVRLVSWKGTTDLSPGKFSFGGDPDQPLQVVIWKGSRVS

SEQ ID NO: 132615 - protein, 44 aa, Oryza sativa
  Clone ID: PAT_MRT4530_34567C.1.pep
VKSNARSQDLGFACNRQCGVTNELPIIVNTSIRIVTKNTVVAAY

SEQ ID NO: 132616 - protein, 87 aa, Oryza sativa
  unsure (1)..(87): unsure at all Xaa locations
  Clone ID: PAT_MRT4530_34568C.1.pep
APQLAVMAVVLGPDQVATEARRIVDMDCRPWVKKYHRTXETDCRTDYKVDLITTLTKSCSVAQNINYQGLHVLLSKRWTRLKRYRDG

SEQ ID NO: 132617 - protein, 44 aa, Oryza sativa
  Clone ID: PAT_MRT4530_34569C.1.pep
GYEFGYSSAMGGAGGPMSGLGPLGGGTFLKPGTAGGGDRPTAAQ

SEQ ID NO: 132618 - protein, 1799 aa, Oryza sativa
  unsure (1)..(1799): unsure at all Xaa locations
  Clone ID: PAT_MRT4530_3456C.1.pep
MAGHPPNHHGEGMIDFVAELARMTLVVGYPNAPEYTTVPPLSGELPHRVRLEVHGYVGTCLANMVVEASGGTADHACQEAAYLMMARLRECHNYIFHDTAYRFHPRRASGDDVSTFRPIAGENDTTFDHMCAVMRGMDRMHLDLHKTSKALNDGKLMRIVVLKDEIARLKRENAQLKGLPAPGGVRIHTTPRKSTTAPVRIQLAPRNPPPPAVPAAPPVPPAAPAVPAAPAPAPAHVPVSAPASALSFAPATAVRGPASGNGGXLICQAPGVAQRDVMVYTRTGTRTTGEGSNGEERADGVHPNSDSGNGPPPLPKNPTLAQVMAHQTQMMAAMMQQMQQQHQQMHQRMLHHAEQQHQQFGPPPPQSKLPEFLRIRPPTFSSTTNPMEANDWLHAIEKKPNLLQCNDQEKVAFATHQLQGPASAWWDNHMATRPPGTEVTWAEFCRSFRKAQVPDGVVAQKKREFRALHQGNRTVTEYLHXFNRLAXYAPEDVRTDAEKQEKFLAGLDDELTNQLISGDYADFERLVDKAIRQEDQRNKMERKRKAAQFRSNQGSHQRPRFTPGQQGRPTTLIVRQHRPFNASNFHQGASGCQNHHGGQPNRSAAPCPPMALAQSATSAQAKKETGTKPGSCFNCGELGHFADKCPKPRRAGPRFVXACVNHASAEEAQAAPEVVLGTFPVNSIPAIVLFDSGATRSFISKKFVGMHGLRKEELNTPMRVHTPGNSSTSVSFSPSVLIEIQRSPFLANLILLESKDLDVILGMDWLTKFKGVIDCVNRTVTLTNEKGETVVYKSLVSPKQGVSLNQIEAEIPVVTEEKNSRKLEEIPIVCEYPEVFPEDLTTMPPKREIEFRIDLAPGTAPIYKRPYRMAANELVEVKKQVDEQLQKGYIXPSTSHWGAPVIFVEKKDKTKRMCVDYRALNEVTIKNKYPLPRIDDLFDQLKGAKVFSKIDLRSGYHQLRIREEDIPKMAFTTRYGLYECTVMSFGLTNAPAFFMNLMNKVFMEFLDKFVVVFINDILIYSKSEKEHEQHLRLVLXKLKELQLYAKFSKCDFWLTEVKFLGHVITAQGVAIDPSNVESVTKWTPPKTVSQIXSFLGLAGYYRRFIENFSRIARPMTXLLKKDEKFKWTAECDKSFEEFKKKLVSAPVLILPDQMKDFQVYCDASRHGLGCVLMQEGRVVAYASRQLRLHEGNYPTHDLELAAVVHALKIWRYYLIGNRCEVYTDHKSLKYIFTQPDLNLQQRRWLELIKDYDMSIHYHPGKANVVADALSRKSYCTALCIEGMCEELQXEFEHLNVGIVEHGFVAALEARPTLVDQVRAAQVNDPEIAELKKNMXVGKARDFLEDEHGTNWMGXERLCVPDDKELKDMILTEAHQTQCSIHPGSTKMYQDLKEKFWWASMRREIAEFVALCDVCQRVKVEHQRPAGLLQPLQIPEWKWEEIGMDCITGLPRTSSGHDSIWVVVDRLTKVAHFIPVHTTYTGKKLAELYLARIMCLHGVPKKIVSDRESQFTSKFWQKLQEELGTRLNFSTAYHPQTDGQTEXVNQILEDMLRACALDFGGAWDKSLPYAEFSYNNSYQASLQMVPFEALYCRKCRTPLFWDQTGERQLFGTEVLAEAEEKVRTIRERLRIALSRQKSYTDNRRRELTFEAGDYVYLRVTPLRGVHRFQTKGKLAPRFVGLYKILERRGEVAYQLELPSNMIGIHDVFHVSQLKKCLRVPEEQADSEHIDIQEDLTYVEKPVRILDTSERRTRNKVTRFCRVQWSHHSEEEATWEREDELKAAHPHLFASSSESQGRDSV

SEQ ID NO: 132619 - protein, 344 aa, Oryza sativa
  unsure (1)..(344): unsure at all Xaa locations
  Clone ID: PAT_MRT4530_34570C.1.pep
AGADAVVNVSERAAVLVTDTXVRAMIGDRFEMRDEYLEGVAEVGKLLLGLSLGDLFPSSRLASLVSGTARRAAASHRKMFELMDCAIRHHQERKAAMDADEDILDVLLRIQKEGGHDAPLTMGDVKDTILDLFAAGTETSTATLQWAMSEVVRNPRIMQKAQAELRNKLQGKPSVTEDDLVGLTYLKLVIKETLRLHPAAPMLVPRECGESCKVLGYDVPRGTNVLINAWAIGRDPNYWDDTETFKPDRCENNKYNFRGTDFEYIPFGSRRKICPGPAFTHAILELALAALLYHFDWELPCGVAPGEVDMAEETGVVVRPKNDLYLRPVVRVPPGAASSGNGGT

SEQ ID NO: 132620 - protein, 101 aa, Oryza sativa
  unsure (1)..(101): unsure at all Xaa locations
  Clone ID: PAT_MRT4530_34571C.1.pep
LKLMLSTFEKLSGLKINFHKSKLFCYGKAKEVENEYVILFGCGKGNYPFKYLGIPIHHKKLSNKDWQRIEXRFQKKLSSWKGKFLSVGGRLVLINSWQCSR

SEQ ID NO: 132621 - protein, 197 aa, Oryza sativa
  unsure (1)..(197): unsure at all Xaa locations
  Clone ID: PAT_MRT4530_34572C.1.pep
RGTINPQRYTRGITLIALYYYTHAHTSSYESSSYGRNPPPPPPRPTPPPNPPNGPPPAPNPPKGPNPAAPPPSGPVYPPKSPPRPSLPPNAVLASPTPAAPAAFAVSPQSSSGXSSPPSPPRRRGRTVAGGQPPRAPPLPTSLISISIPAASSLSTPARWRSIDGGGAGGERRGGLKGRRRDDGELEEAINGGSKWF

SEQ ID NO: 132622 - protein, 113 aa, Oryza sativa
  Clone ID: PAT_MRT4530_34573C.1.pep
ETAMTMITPSYLGVPTDCSSFYACMHEVVRSATGGQFTMPSGMTRSDQSQMARLPNSQRHGHNEMTERKKHINKHTPSISTIDHLIRNLKRRVRLIAFFKPSTSLSSNTVICD

SEQ ID NO: 132623 - protein, 254 aa, Oryza sativa
  unsure (1)..(254): unsure at all Xaa locations
  Clone ID: PAT_MRT4530_34574C.1.pep
MYSSTNPEALASVLCYYLRCGRRAMICCCCSSMSCRCSAAASFCYSSFRSFSLLMASSTEAKGVTKSFRASSCAICSAAARSLARASSSVSAAAAFSATAXPSRAPRKTPAPVQLQPRPRRSPESSAAAAARRSASSACSARQDAAPPPSESPAAKEEAPQRCRTRSPAASAVLSAAARGSSTASAWRDAAPPPSASPAAKEEAPQRRRTRSPAASALPSSEARGSSTSAAWRDAAPPPPSSPAAKRRRHHRCN

SEQ ID NO: 132624 - protein, 151 aa, Oryza sativa
  Clone ID: PAT_MRT4530_34575C.1.pep
MPYTRSGNEGTDRVTPPQPAGARVKTMMTDRNSQPHTVGCVCVCVGVGGKPELAVRQRLGHGRLQEGIIEGESARTGQLARRIRRNHCWEELSLKWSCGAAKTQLYNSSTFCERAPPNSTPSLGGAEAVWLSSNSRRGGAGAGAGAVPNKP

SEQ ID NO: 132625 - protein, 79 aa, Oryza sativa
  Clone ID: PAT_MRT4530_34576C.1.pep
YQLQKRVSSGCLNSADWINGPPRPNYHALARIGARHSHWVEAGIQPKATFRILELAPLDSPTNETLTSHVARGLYPSAT

SEQ ID NO: 132626 - protein, 89 aa, Oryza sativa
  Clone ID: PAT_MRT4530_34577C.1.pep
KIKGRRTKRIGERCLRGVDEPSTSSALPPPTPPRPLPDMAGPSSATPLLPLQLPDMAGQSSATPLLPLQLLGLAGSSSAMSLPVLQLPG

SEQ ID NO: 132627 - protein, 327 aa, Oryza sativa
  Clone ID: PAT_MRT4530_34578C.1.pep
MAPAGGNGNGNSHRVVGRKRLLVAGGAGEEDRLRGKKRAAAGALVPYVAAASASAPIDAVPLAAVAPASSSSLAAGEVPNEPSWIRKIVFYRLGLPYDLPLVFIEEKTVTRTDLDSHQNRFRLACGGVGRSLIPMLTRREAIAASFLRKEEDEAQAAGLTPPQPEENNTAVVVEQQQEEEEEEAAVTTPPQPESDTAVAVAEQQQQQEEEETAGPGGRKKKKKKGRSHGGLPVTLVHLRGGMKRLLLTRWDSSGAAIIKGEGYLDFIARCGIKEKDVVHVWAFKQQGFRLFGATYPPGPLYILIAGTARLAAPPPPQPPVAQSPPSC

SEQ ID NO: 132628 - protein, 471 aa, Oryza sativa
  Clone ID: PAT_MRT4530_34579C.1.pep
MDAAATAATATAAAAMVWFRKGLRVHDNPALDAARRGGAAARLYPVFVLDPRYLRPDQAAPSPGSARAGVARVRFLLESLSDLDARLRRLGSRLLLLRARDDGDVAGTVCAALKDWNIGKLCFESDTEPYALARDKKVMDFAAASGIDVFSPVSHTLFDPAEIIEKNGGRPPMTYQSFVAIAGEPPEPIMEEYSELPPVGDTGEYELLPVPRVEELGYGDISQEDLSLFRGGETEALKRMRESLHDKEWVAKFEKPKGDPSAFLKPATTVLSPYLKFGCLSSRTNLNFALDMPKEYIYEPWTAPLSIQKKANCIIGKDYPKPEGMLRNFNLKFELYLFENTKCGCGKGAKEGNETFAPTLGWYCMLGQRLLGSSLELKVHASNLRIRQLWEDGKWVAIPKDSARFPGDSPRSQLRCGKVGHELVHTSRDNRLLLKKKKVYEGNTSQGLKRKSSALSAFPMQYSEMLLIPNA

SEQ ID NO: 132629 - protein, 93 aa, Oryza sativa
  Clone ID: PAT_MRT4530_3457C.1.pep
AAAAGGEEEEEEHPEAGGGGGSASAMYRMERGLREALRPKYAGFLEAMNAQPGGLKLLAVIRADLLALLGEENLPALRALDGYLKEKLVTWLS

SEQ ID NO: 132630 - protein, 125 aa, Oryza sativa
  Clone ID: PAT_MRT4530_34580C.1.pep
FYLKENDVFHRGIDVAKMGLELKDLVDITVETYNSADAFGLTNLTATYMLRHVLTLYYSVYDYDMLNSPDLDCILEQQASDYCIGVLDTVQNMAYLDSSSNIQAMSIKLSLWTARISEDVRVKTR

SEQ ID NO: 132631 - protein, 112 aa, Oryza sativa
  unsure (1)..(112): unsure at all Xaa locations
  Clone ID: PAT_MRT4530_34581C.1.pep
LPHIVKINIHTYFLNKVRVICLGMSKRPILDHVTDLHLSVTYVVEIGVVEEPQRSVHLLHGYTSGGVCARLVLVMAXLELDPFLNKPKILFFIAASADPWVRLNPRWVAPAP

SEQ ID NO: 132632 - protein, 61 aa, Oryza sativa
  Clone ID: PAT_MRT4530_34582C.1.pep
FEPAPVQVLLTEEISGSLRKLKGCCNLARDRYKSIEKRGILAPSRKISTNEEHGDPRRGAS

SEQ ID NO: 132633 - protein, 100 aa, Oryza sativa
  unsure (1)..(100): unsure at all Xaa locations
  Clone ID: PAT_MRT4530_34583C.1.pep
MTVVMVGMVGNTLQPSLGFHLNRPAKTWIQRRRGRFGRTSXFGRTWGWPNQPTIRLAASSIASLCRLVNFGPVCRVNSEFLAHSYISLIVDIVRLIYRPC

SEQ ID NO: 132634 - protein, 205 aa, Oryza sativa
  Clone ID: PAT_MRT4530_34584C.1.pep
MAPPPPPPPLHCYKAPEEQRLGPRPAARARPPPHLLPYSGGLDLLTEALGAESFDPDDDDDATAASPAMEDVGAAVAAVDFLAPPCKRPHHVLLSSSSEGVGHDDDDNQHAVMVLRRTRSGRAFPPPISVIGKGGRPWLSLRAHREAGRLVLREMRLPSQELLQPCKEDGRFKLLIHPEAGRRSGGAGAGPRVGSGREGHGALES

SEQ ID NO: 132635 - protein, 153 aa, Oryza sativa
  Clone ID: PAT_MRT4530_34585C.1.pep
SGFSNVGGAPSKSAQPLKEDAALKIHCIGISRNTDKTALAEIASPPVSEHVFYLSDYNELERAVEAITSTNRSYEECGKSKHPSGTSRIVGGSESHSGDWPWQAALYDEDSNQLLCGGSLIHKNWILTAAHCFIKDRTPVLSQNGTTVYLGRS

SEQ ID NO: 132636 - protein, 65 aa, Oryza sativa
  Clone ID: PAT_MRT4530_34586C.1.pep
DDRQAFLELDLKEINHGRPPMYAMHGWFVRAVVSGKGRLHKLPDRLADRVSNKAWVGATNLVRGK

SEQ ID NO: 132637 - protein, 191 aa, Oryza sativa
  Clone ID: PAT_MRT4530_34587C.1.pep
MKLGGRDDDKGLGELCLDEGRCEGGLGPMTPEEILNMDKLWHEEGQWRAVLARSLRSTRALCSTASAHVRRPSFAFFAVHSELTKQNSSAAIPNPRASRLPNRPSLAPVKSYPKSHTLTRAPHQRDGSVSLVWEMQRLADEEFGTNYRRHSHESLKVKAQFGVPEIAHVRGPWAYFWVRRPLALSAVANYP

SEQ ID NO: 132638 - protein, 94 aa, Oryza sativa
  unsure (1)..(94): unsure at all Xaa locations
  Clone ID: PAT_MRT4530_34588C.1.pep
TLLHLDDRTLPSAXTRXFTRSTLXAXTXXXXXXXXXYXXKXXXXXALHXQWSXSLLCPLDEXLTTXLIVERTXGXXCEXXLXXXNSXXLXXIKH

SEQ ID NO: 132639 - protein, 77 aa, Oryza sativa
  Clone ID: PAT_MRT4530_34589C.1.pep
SLPTRTIFHHGRRRSNYRAAQSMAAAEAEAAGPLRRALFVLAGLALLLEAAPEAEAWSGENRGHDVRHCCRDCGICP

SEQ ID NO: 132640 - protein, 1012 aa, Oryza sativa
  unsure (1)..(1012): unsure at all Xaa locations
  Clone ID: PAT_MRT4530_3458C.1.pep
MEANDWLHAIEKKLNLLQCNDQEKVAFATHQLQGPASAWWDNHMATRPPGTEVTWEEFCRSFRKAQGNRTVTEYLHEFNHLARYAPEDVRTDAEKQEKFLAGLDDELTNQLISGDYADFERLVDKAIRQDDQRNKMDRKRKAAQFRAPQGSHQRPRFAPGQQGGPTTMIVRQYRPFNPSNFPQGASGSQNHHGGQPNRGAAPRPPTAPAQSGPSAQAKRETGAKPGSCFNCGELGHFADKCPKPRRAGPRFIQARVNHASAEEAQAAPEVVLGTFPVNSIPATILFDSGATHSFISKKFVGMHGLRKEELSTPMRVHTSGNSSTSVSFSPSVLIEIQRSPFLANLILLESKDLDVILGMDWLTKFKGVIDCANRTVTLTNEKGETAVYKSPDSPKQGVSLNQIEAEIPVDTVKKNLRKLEDIPIVCEYPEVFPEDLTTMPPKREIEFRIDLAPGTAPIYKRPYRMAANELAEVKKQVDEQLQKGYIRPSTSPWGAPVIFVEKKDKTKRMCVDYRALNEVTIKNKYPLPRIDDLFDQLKGAKVFSKIDLRSGYHQLRIREEDIPKTAFTTRYGLYECTVMSFGLTNAPAFFMNLMNKVFMEFLDKFVVVFIDDILIYSKSEEEHEQHLRLVLEKLKEHQLYAKFSKCDFWLTEVKFLGHVITAQGVAVDPSNVESVTKWIPPKTVSQIRSFLGLAGYYRRFIENFSRIARPMTQLLKKDEKFKWTAECDKSFEELKKKLVSAPVLILPDQMKDFQVYCDASRHGLGCVLMQEGRVVAYASRQLRPHEGNYPTHDLELAAVVHALKIWRHYLIGNRCEVYTDHKSLKYIFTQPDLNLRQRRWLELIKDYDMSIHYHPGKANVVADALSRKSYCTALCIEGMCEELRQEFEHLNVGIVEHGFVAALEARPTLVDQVRAVQVNDSEIAELKKNMRVGKTRDFHEDEHGTIWLGERLCVPDDKELKDLILTEAHQTQYSIHPGSTKMYQDLKEKFWWVSMRREXAEFVALCDVCQRV

SEQ ID NO: 132641 - protein, 97 aa, Oryza sativa
  Clone ID: PAT_MRT4530_34590C.1.pep
MDSAPAATNTSIGRLPRVIRHRNAPAATLSFCRSAVARTLLPVVAVARTLLPVVAVAAALPRRHAAATAAKLLGQGRYYVSASRFPFKDTVNTRRPS

SEQ ID NO: 132642 - protein, 63 aa, Oryza sativa
  Clone ID: PAT_MRT4530_34591C.1.pep
MESMEERLMDAMKAVAAKVDGMDGIAKHLAQIDLKLAQQDELLDRVQTKVDRSMTSLGQVQQE

SEQ ID NO: 132643 - protein, 48 aa, Oryza sativa
  Clone ID: PAT_MRT4530_34592C.1.pep
MELIELDPEFRRLEIGLSSMALYCTKGGEDAYRHVEGGGVLGRELKVW

SEQ ID NO: 132644 - protein, 64 aa, Oryza sativa
  Clone ID: PAT_MRT4530_34593C.1.pep
MHTIRMELLNDASKEEMTLKNTAITHPREPEYVTVVDPKARPSTIAFLLSRVNKCPSESAATTS

SEQ ID NO: 132645 - protein, 104 aa, Oryza sativa
  Clone ID: PAT_MRT4530_34594C.1.pep
QRSAPPRRSSQVLPFPVRRHSSPGRRAVTKGYAPAIRGIHDVNFDANERIRREQCRDVTRHRLSFGYARGSEWVFFACSPYPNMNENPGALRQPIFREFSSLVV

SEQ ID NO: 132646 - protein, 35 aa, Oryza sativa
  Clone ID: PAT_MRT4530_34595C.1.pep
PNLPLNRLPCVLANGTQDSESVTSGLAWQIIKSPT

SEQ ID NO: 132647 - protein, 154 aa, Oryza sativa
  Clone ID: PAT_MRT4530_34596C.1.pep
MWKRATSVLLHHRSALTRRSPAIGGGVLPRALFFSTLDAAQARTRVEDVMPIATGLEREEIAAELQGKKRFDMDAPVGPFGTKEAPAVIQSYYNKRIVGCPGGEGEDEHDVVWFWLEKGKPHECPVCTQYFSLEVIGEGGDPDGHDDDDDHHHH

SEQ ID NO: 132648 - protein, 68 aa, Oryza sativa
  unsure (1)..(68): unsure at all Xaa locations
  Clone ID: PAT_MRT4530_34597C.1.pep
FFFFFFFTKTXITXIDXFGGXXXXXRIPNXXDKMLIXXQXSHXNNXLQCXTXHXYXXXXXKXNTLFXD

SEQ ID NO: 132649 - protein, 76 aa, Oryza sativa
  Clone ID: PAT_MRT4530_34598C.1.pep
TDSELPFQWPKWEHQTPKGGGGPKEPTHHHHGFLKLFSFPSHREVFLFPPPQKGKPPLLAPLVGVVVHPIFCSPRQ

SEQ ID NO: 132650 - protein, 94 aa, Oryza sativa
  Clone ID: PAT_MRT4530_34599C.1.pep
RGLWLAAVVRRGRRRGPRLTVYRVGVRSGVALLSSAPAPPAATAPPATGGLRRPSGHLASVGSYAAVLFWLPPPRCDLSSLFRVRRCALLRLVP

SEQ ID NO: 132651 - protein, 889 aa, Oryza sativa
  Clone ID: PAT_MRT4530_3459C.1.pep
MEANDWLHAIEKKLNLLQCNDQEKVAFATHQLQGPASPWWDNHMATRPPGTEVTWAEFCRSFRKAQVPDGVVAQKKREFRALNQGNRTVTEYLHEFNRLARYAPEDVRTDAEKQEKFLAGLDDELTNQLISGDYADFERLVDKAIRQEDQRNKMDRKRKAAQFRAHQGSHQRPRFAPGQQGGPTTMIVLQYRPFNPSNFPQGASGSQIHHGGQPNRSAAPRPPVAPAQSGPSAQAKKETGTKPGSCFNCGELGHFADKCPKPRRAGPRFVQARVNHASAEEAQAAPEVVLGTFPVNSIPTTVLFDSGATHSFISKKFVGMYGLIREELSTPMRVHTPGNSSTLVQFSPSITIEIQRSPFLANLILLEFKDLDVILGMDWLTKFKGVIDCANRTVTLTNEKGETRPYRMAANELAEVKKQVDEQLQKGYIRPSTSPWGAPVIFVEKKDKTKRMCVDYRALNEVTIKNKYPLPRIDDLFDQLKGAKVFSKIDLRSGYHQLRIREEDIPKTTFTTRYGLYECTVMSFGLTNAPAFFMNLMNKVFMEFLDNFVVVFIDDILIYSKSEEEHEQHLRLVLEKLKEHQLYAKFSKCDFWLTEVKFLGHVITAQGVAVDPSNVESVTKWTPPKTVSQIRSFLGLAGYYRRFIENFSRIARPMTQLLKKDEKFKWTAECDKSFEELKKKLVSAPVLILPDQMKDFQVYCDASRHGLGCVLMQEGRVVAYASRQLRPHEGNYPTHDLELAAVVHALKIWRHYLIGNRCEVYTDHKSLKYIFTQPDLNLRQRRWLELIKDYDMSVHYHPGKANVVADALSRKSYCTALCIEGMCEKLQQEFKRLNVGIVEHGFVAALEARPTLVDQVRAAQVNDPEIAELKKNMRVGKARDFLEDEYGTI

SEQ ID NO: 132652 - protein, 83 aa, Oryza sativa
  Clone ID: PAT_MRT4530_345C.1.pep
KQRHELKFKTNPKKDRKSNSTKSTQKPRLIQPNQGQSNLTNTTRTHKKTNTTTTFSLLRDSTTQNDRYRQKAKGNSTNLGKLA

SEQ ID NO: 132653 - protein, 34 aa, Oryza sativa
  Clone ID: PAT_MRT4530_34600C.1.pep
GSLSRAWTTVRRSYAQRSMAKRPSCARSPRPGLS

SEQ ID NO: 132654 - protein, 381 aa, Oryza sativa
  unsure (1)..(381): unsure at all Xaa locations
  Clone ID: PAT_MRT4530_34601C.1.pep
MIVTLMNLLRACWRPSSNQHARAGSDVAGRQDGLLWYKDTGXNNLLEDQCQIESGPLSFLDSGPYGTFVGVYDGHGGPETACYINDHLFHHLKRFASEQNSISADVLKKAYEATEDGFFSVVTKQWPVKPQIAAVGSCCLVGVICGGILYVANVGDSRVVLGRHVKATGEVLAVQLSAEHNVSIESVRKELQSMHPEDRHIVVLKHNVWRVKGLIQVCRSIGDAYLKRSEFNREPLYAKFRLREPFHKPILSSEPSISVQPLQPHDQFLIFASDGLWEHLTNQEDIDXVHSSPRNXGSARRLHKGCSQXAAKKRRNEVXSDLKKIDRDILRHFHDDITVIVVFLDSSLVSRASTYRGPSVSLRGGGVNLRSNTLAPYASQM

SEQ ID NO: 132655 - protein, 208 aa, Oryza sativa
  Clone ID: PAT_MRT4530_34602C.1.pep
MIVTLMNLLRACWRPSSNQHARAGSDVAGRQDGLLWYKDTGQHVNGEFSMAVVQANNLLEDQCQIESGPLSFLDSGPYGTFVGVYDGHGGPETACYINDHLFHHLKRFASEQNSISADVLKKAYEATEDGFFSVVTKQWPVKPQIAAVGSCCLVGVICGGILYVANVGDSRVVLGRHVKATGEVLAVQLSAEHNVSIESVRKELQSMH

SEQ ID NO: 132656 - protein, 86 aa, Oryza sativa
  Clone ID: PAT_MRT4530_34603C.1.pep
CPCVSALSTCTSCRRPRRAAGSSPVFSFDWLCRGLRGVRRRVVDHRVPARQRVVRGAPSVELVLGVVALLCVQVGVRVRLGRPWVP

SEQ ID NO: 132657 - protein, 141 aa, Oryza sativa
  unsure (1)..(141): unsure at all Xaa locations
  Clone ID: PAT_MRT4530_34604C.1.pep
FFFFFFGRRNPRHNDXTNWHRKCGTVPPHYTLASPTMGGSAQYFTKFFGFLSPGSNGPLLGAGGFTHPGQVAQATLPSXIFSSHLQHTATQHPRIKLGGQCKDLRLNCLFAAIQSPPIATVLRGELAPNFTKGKGCYFHLH

SEQ ID NO: 132658 - protein, 565 aa, Oryza sativa
  Clone ID: PAT_MRT4530_34605C.1.pep
MSYDIEHAKWSLANKNCLAAVKNTIEPTILGSIPEYDTVSNYLESIKSQFTGSSKFHATQLIKQLVTERYHGGGVKDYILRMSNMASKLKQKIMSSLPKNFDNLVVNYKISPEKWNLEELISNCVQEEERLKETNGGSINLVKDNKEKSQRSTWWIDSRATIHVCNCLKGFRSMRTTQRSEISIRVANGVEAKVEAVGDLCLELANGFTLLLPDVFMSLLCKEVSKLDFDRYDCYFGNGKCELWYNNACVGLALLQNQLYLLSLFENVNVVSSNASVPKTPYELWILRVWGSLAKDKVFNPNFGKLDPKTAPRRSERVRRSVIRDDYHVYNIEESHMEDDATSYEEAMRSARSSEWLEAMKDEMRSMILNDVWDLEKIPKGAKTVGCKWVYKTKYDSRGNIERKSESLQIVGYSDSDFAKDNTKLTSGYVLTLAVGAISWKRSKQTITAGSTIYAEFIACYEATGQVNWLKKFIPGLKVVDSIEKPLKLYCDREPAVMYSHNNQSSGAAKHIDIKYYVVKDEVWDQTINLKHIRTERMLADPLMKGQPPNMFKEHVACMGLREAL

SEQ ID NO: 132659 - protein, 74 aa, Oryza sativa
  Clone ID: PAT_MRT4530_34606C.1.pep
FGYHPTEGNTGRGAGHWPSPTLSVTEPGLHERQCDGAGTQARGLKNDPATGVAPVKLRLTGARARDPARDKDQD

SEQ ID NO: 132660 - protein, 1148 aa, Oryza sativa
  unsure (1)..(1148): unsure at all Xaa locations
  Clone ID: PAT_MRT4530_34607C.1.pep
MEKKLDLAFILGEVDWVLTTPCPIEPAELVRGENESDADWQKRQRDNAPLVMSYDIEQKKWSLANKKCLAVVKNTIEPTILGSIPECDVVSEYRERIKSQFTGSSKTYATQLIKQLVTERYHGGGVRDHILRMSNMASKLKPMDLGITDDFLVHLVMASLPKQFDNFIVNYNISPEKWNFEKLIANCVQEEERIKESNGGSINYVKDKKKNHKSPTSKGKQSQHLPQQQQFAVEKDQCLHCKKTGHYKKDCPDFLKMIMAKKGENIITFVNESHYVGYSRSTWWIDSGATIHACNCLKAFRSTRTTQGRESSIRVANGFEEKVEAVGDLPLELANGFTLLLRDVFYVPSLQRNLISVSKLDFDGYDCRFGSGKCELWHNNACIGLAVLRDELYLLSLSENVNVVSSLTKENKKRKRTSDVSSKLWHCRLGHISRGRIERLVKNEILSPLEFSDLEQCIECIKGKFVKSIKKGAKRSAGILEIIHTDICGPFPMKSMDGYDSFITFTDDYSRYGYIYPIKERSEALDKFKIFKAEVENQHDIKIKVVRSDRGGEYYGRHTPYGQVPGPFARFLLENGIVAQYSTPGEPQQNGVAERRNRTLMXWTGRVPSLTHLXYTKFVETRHAVFLEDGMIRGSSVVREIDLEERRVSVPAPSTQEPFFSLPADVVPAMPVIEVPAPVVTPPVATMNESEEPVIQDSTEMVATPEEELQQPQIDNVPVQETHQEPQVQDVPNVQAPRRSERVRRSAIRDDYKVYNIEESHMEDDPTSYEEAMRSARSSEWLEAMKDEMKSMKLNDVWDLEEIPKGAKTVGCKWVYKTKYDSRGNIEKFKARLVAKGFTQREGIDYNETFSPVSCKDSFRIIMALVAHYDLELHQMDVKMAFLNGDLEEKETKKFLSSNFDMKDLGEASYVLGIEIHRDRTKYALGLSQKTYIEKVLKKFNMYRCSATPAPIMKGEKYGASQCPRNKYELNEMKTKPYASAVGSLQRSESLQIVGYSDSDFAKDNTKSTSGYVFTLAGGAISWKSSKQTITGGSTMYAEFIACYEATGQVNWLKKFIPGLKVVDSIEKPLKLYCDNEPAVMYAHNNQSSGAAKHIDIKYYVVKDKVRDQTISLEHIKTERMLADPLTKGLPPNVFKEHVAGMGLREAL

SEQ ID NO: 132661 - protein, 607 aa, Oryza sativa
  unsure (1)..(607): unsure at all Xaa locations
  Clone ID: PAT_MRT4530_34608C.1.pep
ILKLAEFLRIRPPTFSSSHNPIDALDWLHAVGKKLDTVQCNDEEKVIFAAHQLQGPASLWWDHFQATQPEGQPITWARFTAAFRRTHVPAGVMALKKREFRELKQGNRSVMEYLHEFNNLARYAPEDVREDEEKQEKFLAGMNPELSVRLVSGDYPDFQRLVDKSIRLEAKQKELESHKRRLANFRNQXGANQRIRYTNPYPRGSSSQQQQQQPRSAPLPQFVVRVPQPHQQQNQQGTRAPRPPAPAVQPGQGHRDAQGQQRLCFNCFEPGHFADKCPKPRRQQGQAPPRPNNGGKDVIRGRPSGGGARTGSTGVGPTXGSLTVHGGPGAPGSHRPAPDVTISVPFVGRNQLGVERLMNPLLITTPGEIPIVNEFGDVFPEELPGMPPKREIEFRIDLAPGTTPLYKRPYRMAANKLAEVKKQLEELKEKGYIRPSTSPWGAPVIFVEKKDKTKRMCVDYRALNEVTIKNKYPLPRIDDLFDQLKGATVFSKIDLRSGYHQLRIREKDIPKTAFTTLYGLYEFTVMSFGLTNASAFFMNLMNKVFMEYLDKFVVVFIDDILVYSQSEEDHQQHQSLSSGSLEAHVVTPDQIKRRPRPRRKGGEKRGF

SEQ ID NO: 132662 - protein, 58 aa, Oryza sativa
  Clone ID: PAT_MRT4530_34609C.1.pep
GPHRRRTARSGRYHLCMAHLALGCVCQDTIDVSREQLNRVRSEKQTRASVQPVSPGRS

SEQ ID NO: 132663 - protein, 549 aa, Oryza sativa
  Clone ID: PAT_MRT4530_3460C.1.pep
MALVSTTATVASPSYHYCDLLFPPARRWCCRARRRGGGGGRVAVVAARAPREAAAAAVVVENGGHSYEVESLIDRLSNLPPRGSIARCLETARHRLTLQDFAAVYREFSRRGDWQRSLRLFKYMQRQSWCRPDEHIHAIVIGVLGRQGPALLDKCLEVFHDLPSESRTALSYTSLIAAYAHAAMYEEAYVAFNMMNEIGSLPTTATYNTVLAACARATDPPVPFDMLLGLFAEMRHDPSPSVRPDLTTYNTLLAAAAVRALSDQSEMLLRTMLEAGVLPDTASYRHIVDAFAGAGNLSRVAELFAEMSATGHTPDPSAYLGLMEAHTLVGATAEAVAVLRQMQADGCPPTAATYRVLLDLYGRQGRFDGVRELFREMRTTVPPDTATYNVLFRVFGDGGFFKEVVELFQDMLHSEVEPDIDTCENVMVACGRGGLHEDAREVLDYITTEGMVPTAKAYTGLVEALGHAAMYEEAYVAFNMMTEIGSLPTIETYNALANAFAKGGLFQEAEAIFSRMTKAAIDSSNGAAFDALVPTDKLSFAIPWFQIVH

SEQ ID NO: 132664 - protein, 499 aa, Oryza sativa
  Clone ID: PAT_MRT4530_34610C.1.pep
MVTPLTLLKITWKRATGHPPQKQNSLSICLRNNSSQLRQDQYIHCKKTRHSKKDRPDFLTVIIAKKGENIIAFNASVPKTPYELWILRVWESLAKNKVFNPNLGKLDPKTDSTEIIATPEEELQQSHIDNVPNEEAPIRSERVRRSAIRDDYHVYNIEESHMGDDPTSYEEAMRSARSSEWLEAMKDEMKSMKLNGVWDLEEIPKGVKTVGCKWVYKTKYDSRGNIEKFKALLVAKGFTQREGIDYNETFSPVSCKDSFRIIMALVAHYDLELHQIDVKTTFLNGDLEEKNDILLASSDVSLLQETKKFLSSNFDMKDLEKVLKKFNMYRCSATPAPIVKGEKYGASQCPRNQYELNEMKTKPNASAVGSLQYAQVCIRPDLAFVTWLLGRFQSNPGPEHWILEKKVLRYLQGTKGLMLSYRKSESLQTVGYSDSDFAKDNIKSTSGYVFTLAVGAISWKSSKQTITTGSTMYAEFIACYEDPGQVNWLKKFIPSFKGG

SEQ ID NO: 132665 - protein, 673 aa, Oryza sativa
  unsure (1)..(673): unsure at all Xaa locations
  Clone ID: PAT_MRT4530_34611C.1.pep
QILAQQANMMAAFLHHIQNLPQNNAPPPPPPPQHSKLAEFLRIRPPTFSSSHNPIDALDWLHAVGKKLDTVQCNDEEKVIFAAHQLQGPASLWWDHFQATQPEGQPITWARFTAAFRRTHVPAGVMALKKREFRELKQGNRSVMEYLHEFNNLARYAPEDVREDEEKQEKFLAGMNPELSVRLVSGDYPDFQRLVDKSIRLEAKQKELESHKRRLANFRNQXGANQRIRYTNPYPRGSSSQQQQQQPRSAPLPQFVPGQGHRDAQGQQRLCFNCFEPGHFADKCPKPRRQQGQAPPRPNNGGKDVIRGRVNHVTAEDVLTTPDVIVGTFLIHSIPATILFDSRASHSFISVPFVGRNQLGVERLMNPLLITTPGGVMTTKYYSPAVPIEIQGIPFPSDLILLDTKNXDVILGMNWLAQFQGVVDCARRTVTLYRGPDQPVVFFAPPTSAGSSVLHXLGLPEIPIVNEFGDVFPEELPGMPPKREIEFRIDLAPGTTPLYKRPYRMAANKLAEVKKQLEELKEKGYIRPSTSPWGAPVIFVEKKDKTKRMCVDYRALNEVTIKNKYPLPRIDDLFDQLKGATVFSKIDLRSGYHQLRIREKDIPKTAFTTLYGLYEFTVMSFGLTNASAFFMNLMNKVFMEYLDKFVVVFIDDILVYSQSEEDHQHGCRVGPGR

SEQ ID NO: 132666 - protein, 124 aa, Oryza sativa
  unsure (1)..(124): unsure at all Xaa locations
  Clone ID: PAT_MRT4530_34612C.1.pep
PSSPPTGVSAYTXLTYYAAGVGRLRLHRPTTRPASIAADXCLRLHGWLATPPLMGXLLTYTRRSPQLLAPVGAFIXLDGXLCSYIGYLCCHXGNTXKLSHHLFHSLYDIFXFPLPHYVNWFTVD

SEQ ID NO: 132667 - protein, 64 aa, Oryza sativa
  Clone ID: PAT_MRT4530_34613C.1.pep
YLKFDGTIKKFGFSRECRGQRKSESLQTVGYSDSDFAKDNTKSTSGYVFTLTVGAISWKSSKQT

SEQ ID NO: 132668 - protein, 224 aa, Oryza sativa
  unsure (1)..(224): unsure at all Xaa locations
  Clone ID: PAT_MRT4530_34614C.1.pep
TCGRTVVLCNRGPSLVLILAGVGPRWTGRTRLAPAGAVGPTRQPHPRARAADGRAPRGSHSARPRAATPALSAGGGAPAPRWSPPATTGAAERRPREGREGGKEXTVHGSPRGVGGDGGAGRSGGSRWRGSGRRGRRRSGGRRTGRGRGWGRRRCGEPGGGXRRRRTGARGRRRRERATARARFRRGGRXGGNGRRRSGEGLNRAGAREGGRGKEGNRRGRSAA

SEQ ID NO: 132669 - protein, 695 aa, Oryza sativa
  unsure (1)..(695): unsure at all Xaa locations
  Clone ID: PAT_MRT4530_34615C.1.pep
GYSLMGCIKDILTLKGDNYAEWKRKLDLAFILGDVDWVLTTPCPIEPAELIRGENESDADWQKRQRDNAPLVMSYDIEQKKWSLANKKCLAVVKNTIEPTILGSIPECDAVSEYLERIKSQFTGSSKTYATQLIKQLVTERYHGGGVRDHILRMSNMASKLKPMDLGITDDFLVHLVMASLPKQFDNFIVNYNISPEKWNFEKLIANCVQEEERIKESNGCSINYVKDNKKKNHKSSPTSKAKQSQHLPQQQQFAVEKDQCLHCKKTGHYKKDCPDFLKMIMARKDELYLLSLSENVNVVSSLTKENKKRKRTPDVSSKLWHCRLGHISRGRIERLVKNEILPPLEFSDLEQCIECIKGKFVKSIKKGAKRSTGILEIIHTDICGSFPVKSVDGYDSFITFTDHYFRYGYIYPIKERSEALDKFKIFKAEVENQHDIKIKVVRSNRGGEYYXRHTPYGQVHGPFAXGEPQQNGVAERRNRTLMDMVRSMMSYSTLPLGLWMEALKTAIHILNRVPSKSMPKTPYELWTGRVPSLAHLRVWGSPAEAKVFNPNIGKLDPKTVSCHFIGYPERSKGYRFYCPNSYTKFVETRHAVFLEDEMIRGSSVVREIDLEERRVSVPAPSTQEPFFSLPADVVPAIPVIDVPAPVVTSPVATMNENEEPVIQDSTEMVATPEEELQQPQIDNVPVQETQQEPQ

SEQ ID NO: 132670 - protein, 116 aa, Oryza sativa
  Clone ID: PAT_MRT4530_34616C.1.pep
MTVVRGGSKLRADLLGGGSWRLRLVAVVNSQGGLHKLSRCHLLMFVKHGGATVAVASWELLRHAMARALLGIADVHLRDGGGEGPLAMATSTAIQAHGAPFLPSPFELALATSAHL

SEQ ID NO: 132671 - protein, 384 aa, Oryza sativa
  Clone ID: PAT_MRT4530_34617C.1.pep
MGYIKDIPTLKGDNYEEWKRELDLAFILGEVDWVLTTPCPIEPVELFRGENESDAEWQKRERDNVSLILSYDIEHAKWSLANKNCLTAVKNTIEPTILGSILEYDTVSMYLESIKSQFTGSSKFYVTQVIKQLVTERYHGGGVKDHILRMSNIASKLKQKDLGISDDFLVHLEERLKETNGGSINLVKDNKEKSQKSPSSKAKQPQHLPQQQQFTVKTDDILLASSDVNLLQETKKFLSSNFDIKDLGETSYVLGIEIHRDRTKYALGFSQKAYIEKVLKKFNVYRCSATPAPIVKGEKYGASQCPRNQYELNEIKTKPNASAVGSLQYAQVCRRPDLAFVTGLLGRFQSNPGLEHWNWYRKSCVICKEQNASCCLTENQNRSK

SEQ ID NO: 132672 - protein, 115 aa, Oryza sativa
  Clone ID: PAT_MRT4530_34618C.1.pep
AFVHLTPFHRHQQRPGPVRPYNHPHAPHHTPAPPPSPHPNRFRPAPVRPLDRFPLPPGPHLVGPRAAPHRWPRGTRPPAAPTPRVRRGSPIPKLPPGTLGPRVPLPSPRSTSFLL

SEQ ID NO: 132673 - protein, 850 aa, Oryza sativa
  unsure (1)..(850): unsure at all Xaa locations
  Clone ID: PAT_MRT4530_34619C.1.pep
MAGASSSSNTSTGGYSLMGCIKNIPTLKGDNYTEWKRKLDLAFILGEVDWVLTTPCLIEPAALVRGENESDANRQKRQRDNAPLVMSYDIEQKKWSLANKKCLAVGKNTIEPTILGSIPECDAVSKYLERIKSQFTGSSKTNATQLIKQLVTERLISLSLNKEGLRMNNMASKLKPMDLGITDDLLVHLVMASLPKQFDNFIVNYNISPDKWKFEKLIANCVSTWWIDSGATIHACNCLKAFRSTRTTQRRESSIRVANGVEEKVEAVGDLPLELANGFTLLLRDVFYVPSLQRNLISVSKLDFDGYDCRFGNGKCELWYNNAWGRIERLVKNEILPPLEFSDIEQCIECIKGKFVKIIKKDAKRSAGILETIHTYICGPFPVKSVDGYDSFITFTDDYSRYGYIYPIKERSEALDKFKIFKAEVENQHDIKIKVVRSDRGGXYYGRHTPYGQVHGPFASXTKFVETRHAVFLEDKMIRGSSVVREIDLEERRVSVPAPSTQEPFFSLPADVVPAMPVIEVPAPVVTSPVATMNENEEPVIQDSTEMVATPEEELQHPQTDNVTVQETQQEPQVQDVPNVEAPRRSERVRRSAIRDDYKVYNIEESHMEDDPTSYEEAMRSARSSEWLEAMKDEMKSMKLNDVWDLEEIPNGAKTIGCKWVYKTKYDSRGNIEKFKARLVAKGFTQQEGIDYNEIFSPVSCKDSFRIIIALVAHYDLELHQMDVKTAFLNGDLEEKVYMAQPKGFVMKGNENMGCRLKRSIYGLKKASRQWYLKFDGTIKKFGFQENVKDNCIYSKFKNGRFIFLILYVDDILLASSDVSLRQEIKKFLSSNFDMKDLGEASYVLGIEIH

SEQ ID NO: 132674 - protein, 91 aa, Oryza sativa
  unsure (1)..(91): unsure at all Xaa locations
  Clone ID: PAT_MRT4530_3461C.1.pep
NGSINGPFFGNSNGTLSKNGGSSTGFPNRESIGTKETLSELNLYTPARYXALFFREDITNTNWLHNVYYKFYQSPVFYHRFXPLPKPFGPL

SEQ ID NO: 132675 - protein, 727 aa, Oryza sativa
  Clone ID: PAT_MRT4530_34620C.1.pep
MAEEKESFEGQWAPSDVTEENLKEMVAHGVLPAKEIIGWRPACGEIFPTPDTHEIVVFSHFFYGGFALPTSKFFRGILNFYGISLHHLNPNSIVHIANFVHVCEAFLGIKPHFALFRRIFFLKPQPNKSKPCVVGGAGFQLRGTLSQKYFSMPFKTSNKGWHANWFYVQNPEPALPGYSHQLPVVPYNAFNPPPQEYVLMKSDPPIAQRRSPRQHTIQGSGGPTIRSDPQPQTSKPAGQTGPRKRKLVLNDDEGDDSNKSGDKGTPNKLPKHTMPRKKLAGRQMPKIRTSSRKPSDIDPTGKDPDPAVTEPNLSKDAEPSSENQPTAESQPTGAHASDDKANPSDQPPTGDQSATAETATTQEPPTGNQSDVGPDEEIPEVEAQTTTSQGPEAGKDSMIGSLNKEQGPPHVQPGTSSGTLGDDEETIPRIKAADDSRPPILLKWWDENSQVAGIVINRQKEDEEVCQLKKALGEATRIVNRIHLRNEAKTTTLEKLVPHLGTLEAVRDQLHEAKEYAKKTEKELRDRIAQLQDSNFELSGSSKAQATRMAQMEKQIEALKRDKVELAVQRDSALKEVEDRKIKSQAQFDVLVGKIKKLEGARDEVANVATPLVQAMFLNDSGPSALDATEIFDKLRVAPDVYFKNIKKAGSMGASMALAMTKSLYPRIEIDAIDGFADGTSEEAALDLISNAQSAADKIASDVVEQFRNNDLQPSNNNSDDERTDSD

SEQ ID NO: 132676 - protein, 465 aa, Oryza sativa
  Clone ID: PAT_MRT4530_34621C.1.pep
MARRREEVDWVLTIPCPIEPAALVRGENESDADWEKRQRDNALLIMSYDIEHKKWFLANKKCLAVLIKQLVTERYHGGGVRDHILRMSNMASKLKPMDLGLTDDFLVHLVMASLPKQFDNFIVNYNISPEKWNFEKLIANCVQEEERIKESNGGSINYVKDNKKKNHKSTWWIDSGATIQACNCLKAFRSTRTTQRNESSIRVANGVEEKVEAVGDLCLELANGFTLLLRDVFYVPSLQRNLISVSKLDFDGYDCRFGSGKCELCVDGYDSFITFTDDYSRYGYIYPIKERSEALDKFKIFKAEVENQHDIKIKVVRSDCGGEYYGQHTPCGQVSRPFARFLLENGIVAQYSTPGEPQQNGVAERRNRTLMDMVRSMMSYSTLPLGLWMEALKTAIHILNRVPSKSVPKTPYELWTGRVPLLAYLRVWGSPAEPKDSTEIIATPEEELQQPQTDNVPVQETHQEP

SEQ ID NO: 132677 - protein, 805 aa, Oryza sativa
  Clone ID: PAT_MRT4530_34622C.1.pep
MAEEKESFEGQWATSDVTEENLKEMVAHGVLPAKEIIGWRPAHGEAFPSPDTHEVVVFSHFFYGGFALPTSKFFRGILNFYGISLHHLNPNSIVHIANFVHPQPNKSKPCVVGGAGFQLRGTLSQKYFSMPFKTSNKEWHANWFYVQNPEPALPEYSCLPPVYQETWNSLPIGDEAAQALELMDRMLKLKEQGLQGEQITRHFIKCRLAPIKERSRTAFEFDGKHDPNREEPDSLDFKIMKERMYKIFSNAIVVSYSHQLPVVPYNAFNPPPQEYVLMKSDPPITQRRSPRQHTVQGGGESTIRSDPQPQTSNPTGQTSSRKRKLVLDDDEGDDDNRSGDKGSPNKLPKRTMLRKKLANRPMPKIRTSSRKPSDIDPTGKDPDPAVTEPNSSKDSEPTAESQPTGESQPTGAHTSGDKADSSDQPPTGNQSAATETTTTQEPPTGNQSDVGPDQEIPEVEAQTTTSQGPEAGNDSMIGSPNKEQGSPHAQLGTSSGPPGDDEEEILRIKAADDSRPPILLKWWDENSQAAGIVINRQKEDEEVCQLKKALGEATRIVNRIHLRNEAKTVTLEKLVPHLGTLEAVRDQLHEAKELAKKTEKELRERITQLQDSNFELSGSSKAQAARMAQMEKQIEALKRDKAELAAQRDSALKEVEDRKIKSQAQFDVLVGKIKKLEGARDEVANVATPLIQAMFLNNSGPSALDATEIFDKLRVAPDVYFKNIKKAGSMGASTALAMTKSLYPRIEIDAIDGFADGTSVEAALDLISNAQNAADKIASDVVEQFRNNDLQPSNNNSDDERTDSD

SEQ ID NO: 132678 - protein, 82 aa, Oryza sativa
  Clone ID: PAT_MRT4530_34623C.1.pep
SPTSTSFKDGRGKDSSLQRFLHCNKTSSVFSGSYCFSFELRGAPQILNTWYTWYLQWMIVMSVSLHVQQDHMLIQKNQSDDL

SEQ ID NO: 132679 - protein, 503 aa, Oryza sativa
  Clone ID: PAT_MRT4530_34624C.1.pep
MAAAAAEFRGQARLPRFAAPRRYELRLRPDLAACVFSGEASVAVDVSAPTRFLVLNAADLAVDRASIRFQGLAPAEVSVFEEDEILVLEFAGELPLGEGVLAMRFNGTLNDQMRGFYRSKYEYKGETKNMAVTQFESVDARRCFPCWDEPSFKAKFKLTLEVPSELVALSNMPIVNEKIAGPIKTVEYEESPVMSTYLVAIVVGLFDYIEGVTSEGNKVRVYTQVGKSNQGKFALDVGVKSLNLYKEFFDTPYPLPKLDMVAIPDFTNGAMENYGLVTYREIYLLFDEQSSSASTKQNVAITVAHELAHQWFGNLVTMEWWTHLWLNEGFATWMSYLAVDSFFPEWNIWTQFLDSTTSALKLDSLAESHPIEVEIHHASEIDSIFDSISYDKGASVIRMLQSYLGAERFQIRWEFPEKLSRSALGEAKKGEKLGMITIREKALASYIKKYAYSNAKTEDLWAVLEEVSGEPVKNLMTTWTKKQGYPVIGVKLKGHDVELEQCG

SEQ ID NO: 132680 - protein, 412 aa, Oryza sativa
  unsure (1)..(412): unsure at all Xaa locations
  Clone ID: PAT_MRT4530_34625C.1.pep
MLMLGGAIHYAQLMDLQEWSCQHINDKQIQGGYSLMGCIKDIPTLKGDNYAEWKRKLDLAFILGEVDWVLTTPCPIEPADLVRGENESDADWQKRQRDNAPLVMSYDIEQKKWSLANKKCLAVVKNTIEPTILGSIPECDAVSEYLERIKSQFTGSSKTYATQLIKQLVTERYNGGGVRDHILRMSNMASKLKPMDLGITDDFLVHLVMASLPKQFDNFIVNYNISPEKWNFEKLIANCVQEEERIKESNGGSINYVKDKKKNHKSPTSKGKQSQHLPQQQQFAVEKDQCLHCKKTGHYKKDCPDFLKMIMAKKGXTQRRESTIRVANGVEEKVEAXGDLPXELANGFILLLRDVFYVPSLQRNLISVSKLDFDGYDXRFGSGKCELWHNNACIXLAVLRDELYLXSSFLRM

SEQ ID NO: 132681 - protein, 808 aa, Oryza sativa
  Clone ID: PAT_MRT4530_34626C.1.pep
MAEEKESFEGQWAPSDVTEENLKEMVAHGVLPAKEIIGWRPACGEAFPTPDIHEAVVFSHFFYGGFALPTSKFFRGILSFYGISLHHLNPNSIVHIANFVHVCEAFLGIKPHFALFRRIFFLKPQPNKSKPCVVGGAGFQLRGTLSQKYFSMPFKTSNKGWHANWFYIQNPEPALPEYSCLPPVYQDAWNSLPIGDEAAQALELMDRMLKLKEQGLQGEQITRHFIKCRLAPIKERSRTAFEFDGKHDPNREEPDSLDFKIMKERMCKIFSNAIVVSYSHQLPVVPYNAFNPPPQEYVLMKSDPPITQRRSPRQHTVQGGGGPTIRSDPQPQTSNPTGQTGDDGNKSGDKGSPNKLPKHTTPRKKLASRPRPKIRTSSRKPSDIDPTGKDPDPTVTEPSSSKDSEPTAESQPTGAHTSGDKANPSDQPPTGNQSAATETTTTQEPPTGNQSDVGPDQETPEVEAQTTTSQGPEAGNDSMIGSPDKEQGSPHAQLGTSSRPPGDDEEEIPRIKAADDSRPPILLKWWDENSQAAGIVINRQKEDEEVCQLKKALGEATRIVNRIHLRNEAKTATLEKLVPHLGTLEAVRDQLHEAKELAKKTEKELRDRIAQLQDSNFELSGSSKAQAARMAQMEKQIEALERDKVELAAQRDSALKEVEDRKIKSQAQFDVLVGKIKRLEGARDEVANVATPLVQAMFLNNSGPSALDATEIFDKLRVAPDVYFKNIKKAGSMGASTALAMTKSLYPRIEIDAIDGFADGTSVEAALDLISNAQNAADKIASDVVDQFRNTDLQPSSNNSDDERTDSD

SEQ ID NO: 132682 - protein, 50 aa, Oryza sativa
  Clone ID: PAT_MRT4530_34627C.1.pep
GQHVTTIHVNTAKFHHANTKVSNKGAHVISASYNHIFDRSSMRVQYGWFA

SEQ ID NO: 132683 - protein, 64 aa, Oryza sativa
  unsure (1)..(64): unsure at all Xaa locations
  Clone ID: PAT_MRT4530_34628C.1.pep
HTQKXFQFILSPVQNTWQKYRXIKVKLKYNSTTKCACINTSQKSISQYIIKILINKMQSINNRK

SEQ ID NO: 132684 - protein, 1198 aa, Oryza sativa
  unsure (1)..(1198): unsure at all Xaa locations
  Clone ID: PAT_MRT4530_34629C.1.pep
MIISGGYSLMGYIKDILTLTGDNYGEXKRELDLAFILGEVDWVLTTPCPVEPAKLFKGEKELDAEWQKRERDNASLIMSYDIEHAKWSSANKNCLAAVKNMIEPTILGSIPEYDTVSKYLESIKSQFTGSSKFYATQLIKQLVTERYHGDGVKDYILRMSNMASKLKQKDLGISDDFLVHLVITSLPKHFDNFVVNYKISPEKWNLEELISNCVQEEERIKETNGDSINLVKDIKEKSHRSPSSKAKQPQYLPQQQQFTVETGXCLHCKKTRHSKKDHPDFLIVIMAKKGENIITFVNESHYXSYYRSTWWIDSRATIHMCNCLKGFRSMRTMQRSERSIRVANGVKXKVEVAGDLCLELANGFTLLFRDVFYVPSLQRNXVPKLDFDGYDCHFGNGKCELWYNNACVGLALLQNQLYLLSLSENVNVVSSLTKEXRKRTPDVSSKLWHCRLGHISRGRIERLVKNVILPPLEFSVLEQCIQCIXPKTPYELWILRVWGSPAEVKVFNPNIGKLDPKTVSCHFIGYPERSKGYCFYCPNSYTKFVETRHAVFLEDEMIRGSSVVREIDLDERWVSEPSQSIQEPXFSLPVNVVLAMHDVAVPTPVVISPVATMNESEELVLQDSTEIIATPEEELQQPQTDNVPEXETPRRPERVRRSVIRDDYQVYNIEESHMEDDPTSYEEAMRSARSSEWLEAMKDEMKSMKLNGVWDLEEIPKGAKTVGCKWVYKAKYDSRGNIEKFKVRLVAKGFTQXREGIDYNETFSSVSCKVSFRIIMALVAHYDLELHQLDVKTTFLNGDLEEKXYMAQLKGFVMKGNKNMGCHLKRSIYGLEQASRQWYLKFDGTIKKFGFXQENIEDNCIDSKXKNGRFIFLIMYVDDILLASSDVSLLQETKKFLSSKFDMKDLGEASYVLGIEIHRDRTXYALGLSQKAYIEKVLKKFNMYRCSATPAPIVKGEKYGAQCPRNQYELNEMKTKPYASVVRSLQYAQVCTQPDLAFVTGLLGRFQSNPGPEHWKLVXKVLRYLQGTKGLMLSYRKSESLQIVGYSDFDFAKDNTKLTSGYVFTLAVGAISWKSSKQITTAGSTMYAEFIACYEATGQVNWLKKFIPGLKVVDSIEKPLKLYCDNEPTVMYSHNYQSSGAAKHIDIKYYVVKDKVRDQTISLEHIRTERMLADPLTKGLPPNMFKEHVACMGLREAL

SEQ ID NO: 132685 - protein, 1756 aa, Oryza sativa
  unsure (1)..(1756): unsure at all Xaa locations
  Clone ID: PAT_MRT4530_3462C.1.pep
RRSSPVRGPDPPWTALPEPLTGELPHRVRLEVHGYVGTCLANMVVEASGGPADHACQEAAYLMMARLRERHNYIFHDTVYRFHPRRASSDDVSTFRPTAGENDTTFGHMCAVMRGLDRMHSDLDKATKALNDGKLMRIVALKDEIARLKRENAQLKGLPAPGGVRIRTTPRKTMTAPVRIQLAPRNPPPSAAPAAPPVPPAVPAAPAPAPASALSFAPASAARGPARGNGGWLDLMVYTRNGSRATGEGSNGEERTEGVHPNSNSGNGPPPLPENPTLAQVMAHQTQMMAAMMQQMQQQHQQMHQRMLQHAEQQHQQFGPPPPQSKLPEFLRVRPPTFSSTTNPMEANDWLHAIEKKLNLLQCNDQEKVAFATHQLQGPASAWWDNHMATRPPGTEVTWAEFCRSFRKAQVPDGVVAQKKREFRALHQGNRTVMEYLHEFNRLARYAPEDVRTDAEKQEKFMAGLDDELTNQLISGDYADFERLVDKAIRQEDQRNKMDRKRKAAQFRAPQGSHQRPRFAPGQQGGPTTMIVRQYRPFNPSNFPHGAGGSQTHHRGQSNRGAAPRPPMAPAQSGPPAQAKKETGAKPGSCFNCGELGHFADKCSKPRRAGPRFIRARVNHASAEEAQAAPEVVLGTFPVNSIPATVLFDSGATHSFISKKFVGMHGLIREELSTPMRVHTPRNSSTSVQFSPSITIEIQRSPFLANLILLESKDLDVILGMDWLTKFKGVIDCANRTVTLTNEKGETVVYKSLDSSKRGVFLNQIETEIPVDTVEKNLRKWEDIPIVCEYPEVFPEDLTTMPPKREIEFRIDLAPGTAPIYKRPYRMAANELAEVKKQVDEQLQKGYIRPSTSPWGAPVIFVEKKDKTKRMCVDYRALNEVTIKNKYPLPRIDDLFDQLKGAKVFSKIDLRSGYHQLRIREEDIPKTAFTTRYGLYECTVMSFGLTNAPAFFMNLMNKVFMEFLDKFVVVFIDDILIYSKSEEEHEQHLRLVLEKLKEHQLYAKFSKCDFWSTEVKFLGHVITAQGVAVDPSNVESVTKXTPPKTVSQIRSFLGLAGYYHQFIENFSRIARPMTQLLKKDEKFKWTAECDKSFEELKKKLVSAPVLILPDQMKDFQVYCDASRHGLGCVLMQEGRVVAYASRQLRPHEGNYPTHDLELAAVVHALKIWRHYLIGNRCEVYTDHKSLKYIFTQPDLNLRQXRWLELIKDYDMGIHYHPGKANVVADALSRKSYCTALCIEGMCEELRQEFEHLNVGIVEHGFVAALEARPTLVDQVRAAQVNDSEIAELKKNMRVGKARDFHEDEHGTIWLGERLCVPDDKELKDLILTEAHQTQYSIHPGSTKMYQDLKEKFWWVSMRREIAEFVALCDVCQRVKAEHQRPAGLLQPLQIPEWKWEEIGMDFITGLPRTSSGHDSIXVVVDRLTKVSHFIPVHTTYTGKRLAELYLSRIMCLHGVPKKIVSDQGSQFTSKFWQKLQEELGTRLNFSTAYHPQTDGQTERVNQILEDMLRACALDFGGAWDKSLPYAEFSYNNSYQASLQMAPFEALYGRKCRTPLFWDQTGERQLFGTEVLAEAEEKVRIIRERLRIAQSRQKSYADNRRRELTFEAGDYVYLRVTPLRGVHRFQTKGKLAPRFVGPYKILERRGEVAYQLELPSNMIGIHDVFHVSQLKKCIRVPEEQADSEHIDIQEDLTYVEKPVRILDTSERRTRNKITRFCRVQWSHHSEEEATWEREDELKAAHPHLFTSSSESRGRDSV

SEQ ID NO: 132686 - protein, 821 aa, Oryza sativa
  Clone ID: PAT_MRT4530_34630C.1.pep
MAEEKESFEGQWAPSDVTEENLKEMVAHGVLPAKEIIGWRPACGEAFPSPDTHEVVVFSHFFHGGFALPTSKFFRGILNFYGISLHHLNPNSIVHIANFVHVCEAFLGIKPHFALFRRIFFLKPQPNKSKTCVVGGAGFQLRGTLSQKYFSMPFKTSNKGWHANWFYVQNPEPALPEYSCLPPVYQDTWNSLPIGDEAAQALELMDRMLKLKEQGLQGEQITRHFIKCRLAPIKERSRTAFEFDGKHDPNREEPDSLDFKIMKERMYKIFSNAIVVSYSHQLPVVPYNAFNPPPQEYVLMKSDPPITQRRSPRQHTVQGGGGPTIRSDPQPQISNPTGQTSSRKRKLVLDNDEGDDNNKSGDKGSPNKLPKRTMPRKKLASRPMPKIRTSSRKPSDIDPTGKDPDPAVTEPSSSKDPEPTAESQPTGVHASGDKADPSDQPPTGNQSAAAETATTQEPPTGNQSDVGPDQEIPEVEAQTTTSQGPEAGNDSMIGSLNKEQGSPHAQLGTSSGTPGEDEEAIPRIKAADDSRPPILLKWWDENSQVAGIVINRQKEDEEVCQLKKALGEATRIVNRIHLRNEAKTTTLEKLVPHLGTLEAVRDQLHEAKELAKKTEKELRDRIAQLQDSNFELSGSSKAQATRMAQMEKQIEALKRDKVELAAQRDSALKEVEDRKIKSQAQFDVLVGKIKRLEGARDEVANVATPLVQAMFLNNSGPSALDATEIFDKLRVAPDVYFKNIRKAGSMGASMALAMTKSLYPRIEIDTIDGFANGTSEEAALDLISNAQNAADKIASDVVEQFRNNDLQPSNNNSDDEKTDSD

SEQ ID NO: 132687 - protein, 48 aa, Oryza sativa
  Clone ID: PAT_MRT4530_34631C.1.pep
HTALVYVIKEAHMTLPFIVSSHLIVLGVKSILSPNTVLTCGGVKSHVR

SEQ ID NO: 132688 - protein, 62 aa, Oryza sativa
  Clone ID: PAT_MRT4530_34632C.1.pep
HEPAHPLWSFHSRPKKNEGRAELVTEVIGTTPCNKRSHQEPREKQKTIFDKHFISTKQGVKK

SEQ ID NO: 132689 - protein, 511 aa, Oryza sativa
  Clone ID: PAT_MRT4530_34633C.1.pep
MVEEKESFEGQWAPSDVTEENLKEMVAHGVLPAKEIIGWRPACGEAFPSPDTHEVAVFSHFFYGGFALPTSKFFRGILSFYGISLHHLNPNSIVHIANFIHVCEAFLGIKPHFALFRRIFFLKPQPNKSKPCVVGGAGFQLRGTLSQKYFSMPFKTSNKGWHANWFYVQNPEPALPEYSCLPPVYQDTWNSLPIGDEAAQALELMDRMLKLKEQGLQGEQITRHFIKCRLAPVKERSRTAFEFDDKHDPNREEPDSLDFKIMKERMYKIFSNAIVVSYSHQLPVVPYNAFNPPPQEYVLIKSDPPITQRRSPRQHTVQGGGGPTIRPDSQPQTSNPTGQTGSRKRKLVLDNDEGDDDNKSGDKGSPNKLPKRTMPRKKLANCPTPKIRTSSRKPSDIDPTGKDPDPAVTEPNLSKDPEPTAESQPTGAHASGDKADPSDQPPTGNQSAAAETATTQEPPTGNQSDVGLDQEIPEVEAQTTTSQGPEAGNDSMIGSPNKEQGSPHAQLGTSS

SEQ ID NO: 132690 - protein, 150 aa, Oryza sativa
  Clone ID: PAT_MRT4530_34634C.1.pep
MAAAHAHPLSLAVLPSSPAQATPLPLFLRYAALRRGGRCGGATRPLRLTRLRRGRAAVAAAGEVDAPMEQTEAMMRVAADDDSVTATVVSVLLTVAFVGLSILTIGVIYLSVTDFLQKREREKFEREEAERQKEEARKKRAKARGRKRKF

SEQ ID NO: 132691 - protein, 820 aa, Oryza sativa
  Clone ID: PAT_MRT4530_34635C.1.pep
MAEEKESFEGQWVPSDVTEENLKEMVAHGVLPAKEIIGWRPACGEAFPTPDTHEIVVFSHFFYGGFALPTSKFFRGILSFYGISLHHLNPNSIVHIANFIHVCEAFLGIKPHFALFRRIFFLKPQPNKSKPCVVGGAGFQLRGTLSQKYFSMPFKISNKGWHANWFYVQNPEPALPEYSCLPPVYQDTWNSLPIGDEAAQALELLDRMLKLKEQGLQGEQITRHFIKCRLAPIKERSRTAFEFDGKHDPNREEPESLDFKIMKERMYKIFSNAIVVSYSHQLPVVPYNAFNPPPQRRSPRQHTIQGSGGPTIRSDSQPQTSKPAGQTGPRKRKLVLNDDEGDDSNKSGDKGTPNKLPKHTMPRKKLAGRQMPKIRTSSRKPSDIDPTGKDPDPAVTEPNLSKDAEPSAENQPTAESQPTAESQPTGAHASDDKADPSDQPPTGDQSATAEIATTQEPPTGNQSDVGPDEEIPEVEAQTTTSQGPEAGKDSMIGSLNKEQGPPHVQLGTSSGTLGDDEETIPRIKAADDSRPPILLKWWDENSQVAGIVINRQKEDEEVCQLKKALGEATRIVNRIHLRNEAKTTTLEKLVPHLGTLEAVRDQLHEAKEYAKKTEKELRDRIAQLQDSNFELSGSSKAQATRMAQMEKQIEALKRDKVELAVQRDSALKEVEDRKIKSQAQFDVLVGKIKKLEGARDEVANVATPLVQAMFLNDSGPSALDATEIFDKLRVAPDVYFKNIKKAGSMGASMALAMTKSLYPRIEIDAIDGFADGTSEEAALDLISNAQSAADKIASDVVEQFRNNDLQPSNNNSDDERTDSD

SEQ ID NO: 132692 - protein, 58 aa, Oryza sativa
  unsure (1)..(58): unsure at all Xaa locations
  Clone ID: PAT_MRT4530_34636C.1.pep
STTCSTASQIEPIITVVPKKHRSPKGTTENDNSFSQPNSNNGVLXTWQSLIVPQGGRV

SEQ ID NO: 132693 - protein, 374 aa, Oryza sativa
  unsure (1)..(374): unsure at all Xaa locations
  Clone ID: PAT_MRT4530_34637C.1.pep
MGRQDQQLQVLNALDAAKTQWYHFTAIIVAGMGFFTDAYDLFCISLVTKLLGRIYYTDPASPTPGSLPPNIAAAVNGVALCGTLSGQLFFGWLGDKLGRKSVYGMTLLLMVICSIASGLSFSHTPTSVMATLCFFRFWLGFGIGGDYPLSATIMSEYANKKTRGAFIAAVFAMQGFGILAAGVVTLAMSAXFQAAFPAPAYEVNAAASTVPQADYVWRIILMLGALPAILTYYSHASAHMPETARYTALIARNAKQAAADMSKVLHTQIEESADRAETVAVGGESWGLFSRQFLRRHGLHLLATTSTWFLLDIAFYSQNLFQKDIFSKVGWIPPAKTMNALEELYRIARAQALIALCGTIPGYWFTVXFIEIMG

SEQ ID NO: 132694 - protein, 183 aa, Oryza sativa
  Clone ID: PAT_MRT4530_34638C.1.pep
PGCRLHRSPYHSRRWIEVPTSSAPRRGGSGTAAVWRVLLGGGSKVSGVVVLAEPGGAARSVAGARSAARSSSWSRAEQRGRRREHPHGAGSTAVSRRSRGDELGAIVDVDLDRRIWPGAGRPGRRSSSSAATWELPPVHGGDASSSLSLSRFSGSSLYFPTPPRLDRAEERTNKLKLVMWSST

SEQ ID NO: 132695 - protein, 859 aa, Oryza sativa
  Clone ID: PAT_MRT4530_34639C.1.pep
MAEERESFESQWAPSDVTEENLKEMVAHGVLPAKEIIGWRPACGEAFPTPDTHEVVVFSHFFYGGFALPTSKFFRGILNFYGISLHHLNPNSIVHIANFVHVCEAFLGIRPHFAMFRRIFFLKPQPNKNKPCVVGGAGFQLRGTLSQKYFSMPFKTSNKGWHANWFYIQNPEPALPEYSCLPPVYQDTWNSLPMGDEAAQALELMERMLKLKEQGLQGEQITRHFIKCRLAPIKERSRTAFEFDGKHDPNREDPDSLDFKIMKERMYKIFSNAIVVSYSHQLPVVPYNAFNPPPQEYVLMKSDPPTAQRRSPRQHTVQGSGGPTIRSDPQPQTSKPAGQTGSRKRKLVLNDDEDDDSNKSGDKGTPNKPPKHTMPRKKLAGRQMPKIRTSSRYKPLGTILFRHASLIEITLNIERTLCRKPSDIDPTGKEPDPAATEPNLSKDAEPTAESQPTAESQPTAESQPTGAQASDDKANPSDQPPTGNQSAATETATTREPPTGNQSDVDLNQEIPEAEAQTTSQGPEVGNDSVIGSPDKEQGSPHAQPGISSGPLGGDEEEILRIKAANDSRPPILLKWWDENSQVSGIVINRQKEDEEVCQLKKVLGEATRIVNRIHLRNEAKTATLEKLVPHLGTLEAVREQLHEAKEHAKKTEKELRERIAQLQDSNFELSGSSKAQATRMAQMEKQIEALKRDKVELAAERDSALKEVEDRKIKSQAQFDVLVGKIKKLEGARDEVANVATPLVQAMFLNNSGPSALDATEIFDKLRVAPDVYFKNIKKAGSMGASMALAMTKSLYPRIEIDTIDGFADGTSEEAALDLISNAQSAADKIASDVVEQFRNNDLQPSNNNSDDERTDSD

SEQ ID NO: 132696 - protein, 569 aa, Oryza sativa
  Clone ID: PAT_MRT4530_3463C.1.pep
MAHQTQMMAAMMQHQHQQMHQRMLQHAEQQHQQFGPPPPQSKLPEFLRVRPPTFSSTTNPMEANDWLHAIEKKLNLLQCNDQEKVAFATHQLQGPASAWWDNHMATRPPGNRTVTEYLHEFNRLARYAPENVRTDAQKQEKFMAEIHATKMDRKKKAAQFRAPQGSHQRPRFAPRQQGGPTTMIVGQHRPFNPSNFPQGASGSQNHHGGQSNRGAAPRPPMAPAQSGPPAQAKKETGAKPGSCFNCGELGHFADKCPKPRRAGPRFIQARVNHASAEEAQAAPEVVLVTLTNEKGETVVYKSLVSPKQGVSLNQIEAEIPVDTVEKNLRKLEDIPIVCEMAANELAEVKKQVDEQLQKGYIRPSTSPWGAPVIFVEKKDKTKRMCVDYRALNEVTIKNKYPLPRIDDLFDQLKGAKVFSKIDLRSGYHQLRIREEDIPKTAFTTRYGLYECTVMSFGLTNAPAFFMNLMNKVLMEFLDKFVVVFIDDILIYSTSEEEHEQHLRLVLEKLKEHQLYAKFSKCDFWLTEVKFLGHVITAQGVAVDPSNVESVTKWTPPKTVSQIRSFLGLA

SEQ ID NO: 132697 - protein, 529 aa, Oryza sativa
  Clone ID: PAT_MRT4530_34640C.1.pep
MLFRLSQEGGITYTNLIQQVSVSPNAILPSAEVAGGLPLLQNTYGSFMQLLQAPIESEKSSADVDNQAEMCRPTVQLKASSVEVIYNEMQTQTIEADACFDQHFEQATEEDLLSDHAIVTFQQVEEIEHDKSAQNPDHNFSEEDINIFLENEIAYTKKAVSNYRDFVRRESGKNDMMQCLDFFEKKRSEDPLFYFRFRTDENNVVKSLFWSDGNSRKFYEMFGDIVSFDMTYKTNRYFQLMWVTRKRWAPVYFKSNWCPLIQTTARSEGTNSSVSAFLAQYERIAETIYECFKEQESLTRNTVLDTWSEYQFEKQATKLYTRKIFWAFQRILQSYTKYDVTVKVRDSIFEVYKSEIHELQDFRKRKYIVVVDTISEEYECICSRFKKDGILCVHVLKVLIHLNITKLPEKYFIERWRLKDKNQELSVPNTLMSATVLECNPLLRFNILSQKMIKLASDASKTKQKFIYVMNESDKIEDGLKAMSDTAPNEATVHVQDAAAMSRPKNLKYINCCLIGIFRNYFKSLQAKP

SEQ ID NO: 132698 - protein, 789 aa, Oryza sativa
  Clone ID: PAT_MRT4530_34641C.1.pep
MAEEKENFEGQWAPSDVTEENLKEMVAHGVLPAKEIIGWRPACGEAFPTPDTHEVVVFSHFFYGGFALPTSTFFRGILNFYGISVHHLNPNSIVHIANFVHVCEAFLGIRPHFALFRRIFFLKPQPNKNKPCVVGGAGFQLRGTLSQKYFSMPFKTSNKGWHANWFYIQNPEPALPECSCLPPVYQDTWNSLPMGDEAAQALELMERMLKLKEQGLQGEQITRHFIKCRLAPIKERSRTAFEFDGKHDPNREDPDSLDFKIMKERMYKIFSNAIVVSYSHQLPVVPYNAFNPPPQEHVLMKSDPPIAQRRSPRQHTIQGSGGPTIRSDPQPQTSKPAGQTGSRKRKLVLNDDEGDDSNKSGDKGTPNKPPKHTMPRKKLAGRQMPKIRTSSRKPSDIDPTGKEPDPAATEPNLSKDAEPTAESQPTAESQPTAESQPTGAQASDDKANPSDQPPTGNQSAATETATTREPPTGNQSDVDLNQEIPEAEAQTTSQGPEVGNDSVIGSPDKEQGSPHAQPGTSSEDEEVCQLKKVLGEATRIVNRIHLRNEAKTTTLEKLVPHLGTLEAVRSQLHEAKEHAKKTEKELRERIAQLQDSNYELSGSSKAQAARMAQMEKQIEALRKDKAELAAERDSALKEVEDRKIKSQAQFDVLVGKIKRLEGARDEVANVATPLVQAMFLNNSGPSALDATEIFDKLRVAPDVYFKNIKKAGSMGASMALAMTKSLYPRIEIDSIDGFADGTSEEAALDLISNAQNAADKIASDIVYQFRNNDLQPSSNNSDDERTDSD

SEQ ID NO: 132699 - protein, 706 aa, Oryza sativa
  Clone ID: PAT_MRT4530_34642C.1.pep
MGALSSCKCHYIVQKKGCNAIFFIYPNVQGTEAESNEDYGMLFRLSQEGGITYTNLIQQVSVSPNAILPSAEVAGGLPLLQNTYGSFMQLLQAPIESESALYLTSNRFEYDNTFWGFDPHNGYQQNDLQNAQTDTSQMCNSLPQSVAVHPPMASLDMLYDEMQKSSADVDNQAEMCRPTVQLKASSVEVIYNEMQTQTIEADACFDQHFEQATEEDLLSDHAIVTFQQVEEIEQDKSAENPDQNFSEEDINIFLENESVAVVQRGGQDAKSAHVPSINKVFADENEAFDFYNGYAYMVGFSTCKASNYHSRKTDVVTRHTFKCNRWRKPSDPKEKDLPEVDEVENCLQTNTTNPLCLDFFEKKRSEDPLFYFRFRTDENNVVKSLFWSDGNSRKFYEMFGDIVSFDMTYKTNRYFQLMWVTRKRWAPVYFKSNWCPLIQTTARSEGTNSSVSAFLAQYERIAETIYECFKEQESLTRNTVLDTWSEYQFEKQATKLYTRKIFWAFQRILQSYTKYDVTVKVRDSIFEVYKSEIHELQDFRKRKYIVVVDTISEEYECICSRFKKDGILCVHVLKVLIHLNITKLPEKYFIERWRLKDKNQELSVPNTLMSATVLECNPLLRFNILSQKMIKLASDASKTKQKFIYVMNESDKIEDGLKAMSDTAPNEATVHVQDAAAMSRPKNLKYINCCLIGIFRNYFKSLQAKP

SEQ ID NO: 132700 - protein, 838 aa, Oryza sativa
  Clone ID: PAT_MRT4530_34643C.1.pep
MAEEKESFEGQWAPSDVTEENLKEMVAHGVLPAKEIIGWRPACGEIFPTPDTHEIVVFSHFFYGGFALPTSKFFRGILNFYGISLHHLNPNSIIHIANFIHVCEAFLGIKPHFALFRRIFFLKPQPNKNKACVVGGAGFQLRGTLSQKYFSMPFKTSNKGWHVNWFYVQNPEPALPEYSCLPPVYQDTWNSLPIGDEAAQALELMDRMLKLKEQGLQGEQITRHFIKCRLAPIKERSRTAFEFDGKHDPNREEPDSLDFKIMKERMYKIFSNAIVVSYSHQLPVVPYNAFNPPPQEYALMKSDPPITQRRSPRQHTVQGGGGSKIRPDPQPQTSNPTGQTGSRKRKLVLDNDEGDDDKSGDKGSPNKLPKRTMPKKKLAGRQMPKIRTSSRKPSDIDPTGKDPDPAVTEPNLSKDVEQTAENQPTAESQPTAESQPTAESQPTGAHASDDKADPSDQPPTGNQSEATETATTQEPPTGNQSDVGPDQEIPEVEAQTTTSQGPEAGNDSIIGSPNKEQGSPHAQLGTSSGPPGDDEEEILRIKAADDSRPPILIKWWDENSQAAGIVINRQKEDEEVCQLKKALGEATRIVNRIHLRNEAKTATLERLVPHLGTLEAVRDQLHEAKELAKKTEKELRERIAQLQDSNFELSGSSKVQAAKMAQMEKQIEALKRDKVELAAQRDSALKEVEDRKIKSQAQFDVLVGKIKRLEGARDEVANVATPLVQAMFLNNSGPSALDATEIFDKLRAAPDVYFKNIKKAGSMGASMALAMTKSLYPRIEVDTIDGFADGTSEEAALDLISSAQNAADKIASDVVDQFHNTNFQPSSNNSDDERTDSD

SEQ ID NO: 132701 - protein, 45 aa, Oryza sativa
  Clone ID: PAT_MRT4530_34644C.1.pep
LRSLWAVIHWGSLSLVSLVVDTSVHSGSTNLPTTNNYRKARGKSI

SEQ ID NO: 132702 - protein, 803 aa, Oryza sativa
  Clone ID: PAT_MRT4530_34645C.1.pep
MAEEKESFEGQWAPSDVTEENLKEMVAHGVLPAKEIIGWRPACGEAFPTPDTHEVVVFSHFFYGGFALPTSKFFRGILSFYGISLHHLNLNSIVHIANFVHVCEAFLGIKPHFTLFRRIFFLKPQPNKSKPCVVGGAGFQLRGTLSQKYFSMPFKTSNKGWHANWFYIQNPEPALPEYSCLPPVYQDTWNSLPIGDEAAQALALMDRMLKLKEQGLQGEQITRHFIKCRLAPIKERSRTASMILIERMYKIFSNAIVVNYSHQLPVVPYNAFNPPPQEYALMKSDPPITQRRSPRQHTVQGGGGPTIRSDPQPQTSNPTGQTGSRKRKLVLSDDEGDDGNKYGNKGLPNKLPKHTTPRKKLASRPMPKIRTSSRKPSDIDPAGKDPDPAVTEPSSSKDSEPTAESQPAGAHTSGDKAYPSDQPPTGNQSAATETTTTQEPPAGNQSDVGPDQEIPEVEARTITSQGPEAGNDSMIGSPNKEQGSPHAQLGTSSEPPGDDEEEILRIKAADDSRPPILLKWWDENSQAAGIVINRQKEDEEVCQLKKALGEATRIVNRIHLRNEAKTATLEKLVPHLGTLEAVRDQLHEAKELAKKTEKELRDQIAQLQDSNFELRGSSKAQATRMAQMEKQIEALKRDKVELAAQRDSALKEIEDCKIKSQAQFDVLVGKIKRLEGARDEVASVATPLVQAMFLNNSGPSALDATEIFDKLRVAPDVYFKNIKKAGSMGASMALAMTKSLYPRIEIDAIDGFADGTSEEAALDLISNAQNAADKIASDVVDQFRNTDLQPSSNNSDDEKTDSD

SEQ ID NO: 132703 - protein, 646 aa, Oryza sativa
  Clone ID: PAT_MRT4530_34646C.1.pep
MAVGATATKLHMPSAGGRRPSLFHLAAVAVLCTVSYLIGIWHHGGFSASPAGGVASSVSIATTASVSCVSPTPTLLGGGGGGGDSSSSAPLDFAAHHTAEGMEVASGQVHRTYEACPAKYSEYTPCEDVERSLRFPRDRLVYRERHCPSEGERLRCLVPAPQGYRNPFPWPTSRDVAWFANVPHKELTVEKAVQNWIRVEGEKFRFPGGGTMFPHGAGAYIDDIGKIIPLHDGSIRTALDTGCGVASWGAYLLSRNILAMSFAPRDSHEAQVQFALERGVPAMIGVLSSNRLTYPARAFDMAHCSRCLIPWQLYDGLYLAEVDRILRPGGYWILSGPPINWKKHWKGWQRTKEDLNAEQQAIEAVAKSLCWKKITLKEVGDIAIWQKPTNHIHCKASRKVVKSPPFCSNKNPDAAWYDKMEACITPLPEVSDIKEIAGGQLKKWPERLTAVPPRIASGSIEGVTDEMFVEDTKLWQKRVGHYKSVISQFGQKGRYRNLLDMNARFGGFAAALVDDPVWVMNMVPTVGNSTTLGVIYERGLIGSYQDWCEGMSTYPRTYDLIHADSVFTLYKDRCQMDNILLEMDRILRPEGTVIIRDDVDMLVKIKSITDGMRWNSQIVDHEDGPLVREKLLLVVKTYWTLGEEKE

SEQ ID NO: 132704 - protein, 187 aa, Oryza sativa
  Clone ID: PAT_MRT4530_34647C.1.pep
RLLQVASWGAYLLSRNILAMSFAPRDSHEAQVQFALERGVPAMIGVLSSNRLTYPARAFDMAHCSRCLIPWQLYDGLYLAEVDRILRPGGYWILSGPPINWKKHWKGWQRTKEDLNAEQQAIEAVAKSLCWKKITLKEVGDIAIWQKPTNHIHCKASRKVVKSPPFCSNKNPDAAWYDKMEACITPL

SEQ ID NO: 132705 - protein, 97 aa, Oryza sativa
  Clone ID: PAT_MRT4530_34648C.1.pep
VSLTVTLGDCLPWYWTDAVFVSCRCQMDNILLEMDRILRPEGTVIIRDDVDMLVKIKSITDGMRWNSQIVDHEDGPLVREKLLLVVKTYWTLGEEKE

SEQ ID NO: 132706 - protein, 164 aa, Oryza sativa
  unsure (1)..(164): unsure at all Xaa locations
  Clone ID: PAT_MRT4530_34649C.1.pep
RRPTTSNETXGAGDAAAAAAAAQQQEEXPPGHGQTGXXTGAAGXXAXGXXKRRRERGXTXKGTXRNPXDPKNAHXKAXDGADERXXXXKADPXDXDXIRAAXDGCHGXXHTASPXTXDPEQXXEPAXRGTEXXXKAAAEAGTXRRXXXTXXIGAGTRDPNRGPD

SEQ ID NO: 132707 - protein, 1495 aa, Oryza sativa
  Clone ID: PAT_MRT4530_3464C.1.pep
MVYTRNGSRATGEGSNGEERTDGAHPHSDSGNGPPPLPENPTLAHVMAHQTQMMAAMMQQMQQHQQMHQRMLQHAEQQHQQFGPPPPQSKLPEFLRVRPPTFSSTTNHMEANDWLHAIEKKLNLLQCNDQEKVAFATHQLQGPASAWWDNHMATRPPGTEVTWAEFCRSFRKAQVPDGVVAQKKREFRALHQGNGTVTEYLHEFNRLARYAPEDVHTDAEKQEKFMAGLDDELTNQLISGDYADFERLVDKAIRQEDQRNKMDRKRKAAQFRAPQGSHQRPRFASGQQGGPTTMIVRQYRPFNPSNFPQGARGSQNHHGGQPSRGAAPRPPTAPAQSGPSAQAKKETGTKPGSCFNCGELGHFADKCPKPRRAGTRFIQARVNHASAEEAQAAPEVVLGTFPVNSIPATVLFDSGATHSFISKKFVEMHGLIREELSTPMRVHTPGNSSTSVQFSPSITIEIQGSPFLANLILLESKDLDVILGMDWLTKFKGVIDCANRTVTLTNEKGETVVYESPDAPKRGVSLNQIEAEIPVDTVEKNLRKLEDIPIVCEYPEVFPEDLTTIAPKREIEFRIDLAPGTAPIYKRPYRMAANELAEVKKQKKDKTKRMCVDYRALNEVTIKNKYPLPRIDDLFDQLKGAKVFSKIDLRSSYHQLRIREEDIPKTAFTTRYGLYECTVMSFGLTNAPAFFMNLMNKVFMKFLDKFVVVFIDDILIYSKSKEEHEQHLRLVLEKLKEHQLYAKFSKCDFWLTEVKFLGHVITAQGVAVDPSNVESVTKWTPPKTVSQIRSFLGLAGYYRRFIENFSRIARPMTQLLKKDEKFKWTVECDKSFEELKKKLVSAPVLILPDQMKDFQVYCDASRHGLGCVLMQEGKVVAYASRQLRPHEGNYPTHDLELAAVVHALKIWRHYLIGNRCKVYTDHKSLKYIFTQPDLNLRQRRWLELIKDYDMSIHYHPGKANVVADALSRKSYCTALCIESMCEELRQEFEHLNVGIVEHGFVAALEARPMLVDQVRAAQVNDSEIAELKKNMRVGKARDFHEDEHGTIWLGERLCVPDDKELKDLILTEAHQAQYSIHPGSTKMYQDLKEKFWWVSMSKEIAEFVALCDVCQRVKAEHQRPAGLLQPLQIPEWKWEEIGMDFITGLPRTSSGHDSIWVVVDRLTKVAHFIPVHTTYTGKRLAELYLSRIMCLHGVPKKIVSDRGSQFTSKFWQKLQEELGTRLNFSTAYHPQTDGQTERVNQILEDMLRACALDFGGAWDKSLPYTEFSYNNSYQASLQVAPFEALYGRKCRTPLFWEQTGERQLFGTEVLAEAEEKVRTIRERLRIAQSRQKSYADNRRRELIFEAGDYVYLRVTPLWGVHRFQTKGKLVPRFVGPYKILERRGEVAYQLELPSNMIGIHDVFHVSQLKKCLRVPEEQADSEHIDIQEDLTYVEKPVRILDTSERRTRNKVTKFCRIQWSHHSKEEATWEREDELKAAHLHLFTSSSESRGRDSV

SEQ ID NO: 132708 - protein, 51 aa, Oryza sativa
  Clone ID: PAT_MRT4530_34650C.1.pep
NFLNYKQTKAHRSIARALASDKFVLYDIALVVLTVAADAAVYSGYRDKREY

SEQ ID NO: 132709 - protein, 76 aa, Oryza sativa
  Clone ID: PAT_MRT4530_34651C.1.pep
YIWIKRKIMKEQYTVLLTCNSDTYNKCIQIASCSVYLNLDPPPPPYARGVISLIYFSFYTLELKSKTLSYLPFSCM

SEQ ID NO: 132710 - protein, 101 aa, Oryza sativa
  Clone ID: PAT_MRT4530_34652C.1.pep
SCCIQQLYDREIRPIFKGVTIDIFHSASQRLTRRRRESHDATAFTDAHGRPARAHHGARRTRPTPYRPRHGFHAVAALRPVRACGPCCHGIQSDAIQPTSP

SEQ ID NO: 132711 - protein, 53 aa, Oryza sativa
  Clone ID: PAT_MRT4530_34653C.1.pep
AANSRRLPSSSGELDRSPDQRRADWDRRHYLERQAGLPKGYTLSQEAIYSGVI

SEQ ID NO: 132712 - protein, 36 aa, Oryza sativa
  Clone ID: PAT_MRT4530_34654C.1.pep
LAHSKCYVSSWRWLEVIITGLGNIFFRALFAFLNNI

SEQ ID NO: 132713 - protein, 102 aa, Oryza sativa
  Clone ID: PAT_MRT4530_34655C.1.pep
MPGHRFPVAFTRFYAAEVLLALEFLHMMGIAAEPVHARSSSFVGTHEYMAPDVARGGGHDVGMDWWSYGMEFPSAVAASPHDAATRDMICATKSLPPPAYSG

SEQ ID NO: 132714 - protein, 527 aa, Oryza sativa
  Clone ID: PAT_MRT4530_34656C.1.pep
MAPRGRRLTEQIHSEHQVVAALLDKAEALVMAARAKGAHGGAAAAGEQHPDHPSRGKKSGRFLRRQETPPEAATAIDGDVSPPEKRRKTTAASPIVEVEVEVIEPTMPKAQRDRLYGLLASLSADTPLPPHIVGLMRSQCCCVVDPNGEEMDVDLSSAKDAALFQLLNLLVEFAQQQTTKIIEEQEPPKIEASDATSSSSICDLLEDGEIADEGAAMGMDICGGVSPLIVDSAQLLPLPKQQEDDELIDIYGGVSPVSVNNFPDSPRSSSSRSDSSSSSSSSNGSGSSSSSSSGASSGSSSCAGSSSSSSGSDTDADADSASNRPDTTTDHPTEAEFPETPRSSSSDSSSSSSCSGSSSSSERNDSASSRPDTTADHPTEAEVKPMEEQKLIIERAASPHTEMQELITERAASPHTEMQELITERAASPRTEMQELIARAQERQKLQRELEREAARELERKAAREQLQEMKRTAQPVFDIIDPRDMKQLGISGEAQYIVSPVKSRDSLRRRGGGLLQRLGFFLKAEF

SEQ ID NO: 132715 - protein, 332 aa, Oryza sativa
  unsure (1)..(332): unsure at all Xaa locations
  Clone ID: PAT_MRT4530_34657C.1.pep
MADKPSRGLVLYAAGHAALLPPASGGGGGAGGGGGGSHLDAFASLASCGFLSLRSPPLASGEEKRDSTILELAQLLDVYDDLFPAXGLKNWSRDCPGGSTATSSSXLSERFMGIRAAMVTNCPLVSSFAANLGFHVSGTEDLVAQSGSSAASKEAGIISQALSLLGFSEGNVQETSEFDLVFLHVAMENTNSKLGKLGMKTDLNRLDKLVGAIMEAAPISSAIASRILVSVMLSYGSAAENKDEFSISKSSTEIDSDLNLLRPRQSYTMKAGNTLDDVRNHHPILLAQWQEGXVTRSDLTEXFSFEEFIKRGGNXAMLAEXFLHEXVAFKLX

SEQ ID NO: 132716 - protein, 444 aa, Oryza sativa
  Clone ID: PAT_MRT4530_34658C.1.pep
MGWKAPTRIQAEVIPFALQGRDVIGVGQTGSGKTAAFALPIIQALLEHEHRPCFFACVLAPTRELAIQIAKQFEALGSAISLQCSVLIGGIPRTSQTISLAKRPHVVVWWRSSRACLPEHLRKGFDSWQLWKERNSRVGTPGRLLDHLTNTKGFSFNKLKYLVLDEADDLLKVDFQKAVDDILNVIPKERRTFLFSATMTEKVKKLRRACLKNPVKVEVASKYSLVDTLRQDLYVVPAKYKDCYLIHVLNKMPGSMIMVFVRTCESTRLLALMLRNLRFKAISISGQMSQDKRLGALNRFRTRDCNILVCTDVASRGLDIQGVDVVINYDFPLNSKDYIHRVGRTARAGQSGYAVSLVNQFEGEFFKLTEQFLGGEEIPARKVDADEIMILHERIYDSKRIALKTMNESGYHKRMRRRMEDDEEEVEEAPVSSRSRSLKKSRRR

SEQ ID NO: 132717 - protein, 204 aa, Oryza sativa
  Clone ID: PAT_MRT4530_34659C.1.pep
LQGVSLHAGEDVRICSELSNVPIPSVKKLYLKNFNDRLRCVNWKFIWCNRAPLKVQFFAWLLAKERLPTKHNLIKKGIVSSATCDICNLEVEDGSHFCLNCPFAQGFWEAIGLSPRIHMVTDMANLKPDGNLPELHFRVFYLLCFWSLWKHRHDVVFRNMSPSLQSVLRKCMEECGLWLERLKFEHRSVITSWKLIFSAPLQTL

SEQ ID NO: 132718 - protein, 234 aa, Oryza sativa
  Clone ID: PAT_MRT4530_3465C.1.pep
MLRVSEDGGRRRRREAHAAGYGELGRALLDLQAAADQVFDAVTARTAEEREKLSAISRRISAAKAKIKTLSQSEEPLTIVSPAQHPSSCTNQEDFRPLFHDKYDDNSGGPSIATISVNGGFNREYGLEGTLELFQFFSEENCDYTPKEGRLKVKNKPAEAKDDTYLGSLMDKSNFPTPQNISMSGKDMKIEELPPPPPSLISKHLAKNQRSDDVRFESSWSPAHSDIPSAENRL

SEQ ID NO: 132719 - protein, 1127 aa, Oryza sativa
  Clone ID: PAT_MRT4530_34660C.1.pep
MSYDIEQKKWSLANKKCLAMVKNTIEPTILGSIPECDAVSEYLERIKRQFTGSSKTYATQLIKQLVTERYHGGGVRDHILRMSNMASKLKPMDLGITDDFLVHLVMASLPKQFDNFIVNYNISPEKWNFEKLIANCVQEEERIKESNGGSINYVKDNKKKNHKSPTSKAKQSQHLPQQQQFAVEKDQCLHCKKTGHYKKDCPDFLKMIMARKGENIVTFVNESHYVGYSRSTWWIDSGAIIHACNCLKAFRSTRTTQRRESSIRVANGVEKKVEAVGDLPLELANGFTLLLRDVFYVPSLQRNLISLSKLDFDGYDCRFGSGKCELCVDGYDSFITFTDDYSRYGYIYPIKERSEALDKFKIFKAEVENQHDIKIKVNGVAERRNRTLMDMVRSMMSYSTLPLGLWMEALKTAIHILNRVPSKSVPKTPYELWTGSVPSIAHLRVWGSPAEAKVFNPNIGKLDPKTVSCHFIGYPERSKGYRFYCPNSYTKFVETRHAVFLEDEMIRESSVVREIDLEERRVSVPAPSTQEPFFSLPADVVPAIPVIEEELQQPQIDNVLVQETQQEPQVQDVPNVQAPRRSERVKRSVIRDDYKVYNIEESHMEDDHTSYEEAMRSARSSEWLEVMKDEMKLMKLNNVWDLEEIPKGDKTVGCKWVYKTKYDSRGNIEKFKARLVAKGFTQREGIDYNETFSPVSCKDSFRIIMALVAHYDLELHQMDVKTTFLNGDLEEKVYMAQPKGFVMKGNGNMGCRLKRSIYELKQASRQWYLKFDGTIKKFGFQENVEDNCIYSKFKNGRFIFLILYVDDILLASSDVSLLQETKKFLSSNFDMKDLGEASYVLGIEIHRDRTKYALGLSQKTYIEKVLKKFNMYRCSATPAPIVKGEKYGASQCPRNQYELNEMKTKPYASAIGSLEYAQVCTRPNLAFVIGLLGRFQSNLGPEHWKLVKKVLHYFQGTKGLMLSYRRSESLQIMGYSDSDFTKDNTKSTSGYVFTLAGGAISWKSSKQTITAGSTMYAEFIACYEATGQVNWLKKFILSLKVVDSIEKPLKLYCDNEPAVMYAHSNQSSGAAKHIDIKYYVVKDKVRDQTISLEHIRTERMLADPLTKGLPPNVFKEHVAGMGLREAL

SEQ ID NO: 132720 - protein, 1407 aa, Oryza sativa
  Clone ID: PAT_MRT4530_34661C.1.pep
MARRREGRRRRRRRSARPRAREKRREARVFGGRPGEGGFDPPISAPGRPIETLADRTAGAGGYSLMGCIKDIPTLKGDNYAEWKRKLDLAFILGEVDWVLTTPCPIEPAELVRGENESDADWQKRQRDNAPLVMSYDIEQKKWSLANKKCLAVVKNTIEPTILGSIPECDTVSEYLERIKSQFTGSSKTYATQLIKQLVTERYHGGGVRDHILRMSNMASKLKPMDLGITDDFLVHLVMASLPKQFDNFIVNYNISPEKWNFEKLIANCVQEEERIKESNGGSINYVKDKKKNHKSPTSKGKQSQHLPQQQQFAVEKDQCLHCKKTGHYKKDCPDFLKMIMAKKGENIITFVNESHYVGYSRSTWWIDSGATIHACNCLKAFRSTRTTQRRESTIRVANGVEEKVEAVGDLPLELANGFILLLRDVFYVPSLQRNLISVSKLDFDGYDCRFGSGKCELWHNNACIGLAVLGRIERLVKNEILPPLEFSDLEQCIECIKGKFVKSIKKGAKRSAGILEIIHTDICGPFPVKSVDGYDSFITFTDDYSRYGYIYPIKERSEALDKFKIFKAEVENQHDIKIKVVRSDRGGEYYGRHTPYGQVPGPFARFLLENGIVAQYSTPGEPQQNGVAERRNRTLMDMVRSMMSYSTLPLGLWMEALKTAIHILNRVPSKSVPKTPYELWTGRVPSLTHLRVWGSPTEAKVFNPNIGKLDPKTVSCHFIGYPERSKGYRFYCPNSYTKFVETRHAVFLEDEMIRGSSVVREIDLEERRVSVPAPSTQEPFFSLPADVVPAMPVIEVPAPVVTPPVATMNESEEPVIQDSTEMVATPEEELQQPQIDNVPVQETHQEPQVQDVPNVQAPRRSERVRRSAIRDDYKVYNIEESHMEDDPTSYEEAMRSARSSEWLEAMKDEMKSMKLNDVWDLEEIPKGAKTVGCKWVYKTKYDSRGNIEKFKARLVAKGFTQREGIDYNETFSPVSCKDSFRIIMALVAHYDLELHQMDVKTAFLNGDLEEKVYMAQPKGFVMKGNENMGCRLKRSIYGLKQASRQWYLKFDGTIKKFGFQENVEDNCIYSKFKNGRFIFLILYVDDILLASSDVSLLQETKKFLSSNFDMKDLGEASYVLGIEIHRDRTKYALGLSQKTYIEKVLKKFNMYRCSATPAPIMKGEKYGASQCPRNQYELNEMKTKLYASAVGSLQYAQVCTRPDLAFVTGLLGRFQSNPGLEHWKLVKKVLRYLQGTKGLMLSYRRSESLQIVGYSDSDFAKDNTKSTSGYVFTLAGGAISWKSSKQTITAGSTMYAEFIACYEATGQVNWLKKFIPGLKVVDSFEKPLKLYCDNEPAVMYAHNNQSSGAAKHIDIKYYVMKDKVRDQTISLEHIKTERMLADPLTKGLPPNVFKEHVAGMGLREAL

SEQ ID NO: 132721 - protein, 119 aa, Oryza sativa
  unsure (1)..(119): unsure at all Xaa locations
  Clone ID: PAT_MRT4530_34662C.1.pep
MAAPNVKSRCFVGGLAWATNNRSFKAAFSTFGKILKSKIITNRKTGRSPGFGFGTFSTNQAMPNAIKGINGKELDGRNITRNKAQSPPSEGGGEARYGXQRGEGGGYGGGGGYGVAGGG

SEQ ID NO: 132722 - protein, 728 aa, Oryza sativa
  unsure (1)..(728): unsure at all Xaa locations
  Clone ID: PAT_MRT4530_34663C.1.pep
NASVPKTPYELWILRVWGSPAKDKVFNPXTVSCHFIGYSERSKGHRFYCPNSYTKFVETRHAVFLEDEMIRGSSVIREIDLEERRVSVPAPSTQEPFFSLPANVVPAMHALAVPAPVVTPPVATMNESEEPVIQDSTEMVATPEEELQQPQIDNVPVQETHQEPQVQDVPNVQAPRRSERVRRSAIRDDYKVYNIEESHMEDDPTSYEEAMRSARSSEWLEAMKDEMKSMKLNDVWDLEEIPKGAKTVGCKWVYKTKYDSRGNIEKFKVRLVAKGFTQREGIDYNETFSPVSCKDSFRIIMALVAHYDLELHQMDVKTAXFLNGDLEEKVYMAQPKGFVMKGNENMGCRIKRSIYGLKQXASRQCYLKFDGTIKKFGFXQENVEDNCIDSKXKNGRLIFLILYVDDVLLASSDVNLLQEIKKFLSSNFDMKDLGEASYVLGIEIHRNRTKYALGFSQKXIYIEKVLKKFNMYRCSATPAPIVKGEKYGASQCPRNQYELNKMKTKPYASAVGSLXYAQVCTRPDLAFVTGLFGRFQSNPGLEHWKLVXKVLRXLQGTKGLIMSYRKAESLQIVGYSDSDFAKDNTKLTSGYMFTLAVGAISWKSSKQTTTAGSTMYAEFIACHEATGQVNWLMKFIPGXLKVVDSIEKPLKLYCDKEPTVMYSHNNXSSGAAKHIDIKYYVVKDKVRDQTISLEHIRTERMLADPLMKGLPPNMFKEHVACMGFKGSL

SEQ ID NO: 132723 - protein, 1386 aa, Oryza sativa
  Clone ID: PAT_MRT4530_34664C.1.pep
MAGTSSSSNTSTGGYSLMGCIKDIPTLKGDNYAEWKRKLDLAFILGEVDWVLTTPCPIEPTELVRGENESDADWQKRQRDNAPLVMSYDIEQKKWSLANKKCLAVVKNTIEPTILGSIPECDAVSEYLERIKSQFTGSSKTYATQLIKQLVTERYHGGGVRDHILRMSNMASKLKPMDLGITDDFLVHLVMASLPKQFDNFIVNYNISPEKWNFEKLIANCVQEEERIKESNGGSINYVKDKKKNHKSPTSKGKQSQHLPQQQQFAVEKDQCLHCKKTGHYKRDCPDFLKMIMAKKGENIITFVNESHYVGYSRSTWWIDSGATIHACNCLKAFRSTRTTQRRESTIRVANGVEEKVEAVGDFPLELANGFILLLRDVFYVPSLQRNLISVSKLDFDGYDCRFGSGKCELWHNNACIGLAVLRDELYLLSLSENVNVVSSLTKENKKRKGRIERLVKNEILPPLEFSDLEQCIECIKGKFVKSIKKGAKRSAGILEIIHTDICGPFPVKSVDGYDSFITFTDDYSRYGYIYPIKERSEALDKFKIFKAEVENQHDIKIKVVRSDRGGEYYGRHTPYGQVPGPFARFLLENGIVAQYSTPGEPQQNGVAERRNRTLMDMVRSMMSYSTLPLGLWMEALKTAIHILNRVPSKSVPKTPYELWTGRVPSLTHLRVWGSPAEAKVFNPNIGKLDPKTVSCHFIGYPERSKGYRFYCPNSYTKFVETRHAVFLEDEMIRGSSVVREIDLEERRVSVPAPSTQEPFFSLPADVVPAMPVIEVPAPVVTLPVATMNESEEPVIQDSTEMVATPEEELQQSQIDNVPVQETHQEPQVQDVPNVQAPRRSERVRRSAIRDDYKVYNIEESHMEDDPTSYEEAMRSARSSEWLESMKDEMESMKLNDVWDLEEIPKGAKTVGCKWVYKTKYDSRGNIEKFKARLVAKGFTQREGIDYNETFSPVSCKDSFRIIMALVAHYDLELHQMDVKTAFLNGDLEEKVYMAQPKGFVMKGNENMGCRLKRSIYGLKQASRQWYLKFDGTIKKFGFQENVEDNCIYSKFKNGRFIFLILYVDDILLASSDVSLLQETKKFLSSNFDMKDLGEASYVLGIEIHRDRTKYALGLSQKTYIEKVLKKFNMYRCSATPAPIMKGEKYGASQCPRNQYELNEMKTKPYASAVGSLQYAQVCTRPDLAFVTGLLGRFQSNPGLEHWKLVKKVLRYLQGTKGLMLSYRRSESLQIVGYSDSDFAKDNTKSTSGYVFTLAGGAISWKSSKQTITAGSTMYAEFIACYEATGQVNWLKKFIPGLKVVDSIEKPLKLYCDNEPAVMYAHNNQSSGAAKHIDIKYYVVKDKVRDQTISLEHIKTERMLADPLTKGLPPNVFKEHVAGMGLREAL

SEQ ID NO: 132724 - protein, 354 aa, Oryza sativa
  Clone ID: PAT_MRT4530_34665C.1.pep
MTWRTPPAACLLRPSPSTLPHCPALETSISCTSTAVAAAATATTAFSALDVDGRGLLYSAASAAVRYMPDPCKPKIEPISFTADDGRLYVIERVPLSGNPGCFEALTYGLLPDDDDSLSSRMGWYWRSLPPPPFAKVGYDGDFRRHRQRREYDITASAVVNETELWVTAHGAGTFSFDTNSKVGEWRELGEKGMPFMGRGEYVEEHGQWFGLSSTPRLGLYLCSCDLSYLCCSYDAQVMVRCWLDGLDRLPAAAPPKQSFLMEAYAVHLGSGRFCIARFMEEEEEEEVEEEKDNISVHPFFHVAGVNNNKKKNDRFLLLTGVDVVGSDDAVVVHKSIRYAFQNGDFVRGYSRVF

SEQ ID NO: 132725 - protein, 698 aa, Oryza sativa
  unsure (1)..(698): unsure at all Xaa locations
  Clone ID: PAT_MRT4530_34666C.1.pep
LSITDPKTISCHFIGYPERSNGYRFYCPNSYTKFVETRHAVFLEDEMIRGSSVFREIDLEEWRGSVPALSTQEPFFSLPVDVVPTMHDVAVPAPVVTPPVATMNESEEPVLQDSTXIIATPEEELQQPXTDNVPVQETQQEPQVQNVPNVEAPRXSERVRRSAIHDDYQVYNIEESHMEDDPTSYEEAMRSARSSEWLETMKDEMKSMKLNDFWDLEEIXPKGAKTVGCKWVFKTKYDSRGNIEKFKARLVAKGFTQREGIDYNETFSLVSCKVSFRIIMALVAHYDLELHQMDVKTAFQNGDLEEKACIVQLKGFVMKGNENMGYRLKRSIYELKQALRXWYLKFDGTIKKFGFXENIEDNCIYSKFKNGRFIFLILYVDDILLASINVSLLQETKKFLSSNFDMKDLGEASYVLGIEIHQDRTKYALGLSQKAYIENVLKKFNMYRCSASPARIVKGERYGAWQSPTNQYELNEMKXKPYASAVGSLQYALLCTRPDLAFVTGLLGRFQSNPGPEHXKLVKKVLHYLQGTKGLMLSESLQIXGYSDSDFAKDNTKSISGYVFTLAGGALSWKSSKQAITAGSTMYAEFIACYEATGQVNLLKKFIPDLKVVNSIEKPLKLYCDNEPVVMXCHNNQSSGAAKHIDINYYVVKDKVRDQTISLEHIRTEMMLADLLMKGLPPNVFKEHVAGMGLREAL

SEQ ID NO: 132726 - protein, 1198 aa, Oryza sativa
  unsure (1)..(1198): unsure at all Xaa locations
  Clone ID: PAT_MRT4530_34667C.1.pep
MIISGGYSLMGYIKDIPTLTGDNYREWKRELDLAFILGEVDWVLTTPCPIEPAELFRGENESNAERQKRERDNASLIMSYEIEHAKWSLANKNCLAAVKNTIEPSILGSFLEYDTVSMYLKSIKSKFTGSSKFYATQLIKQLVTEWYHGGGVKDHILRMSNMASKLKXKDLGISDDFLVHLVMSSLPENFDNFVVNYKVSLEKWNLEELISNCVQEEERLKETNGGSINLVKDNKEKSHGSPSSKAKQPQHLPQQQQFTVEXDQCLHCKKTRHSKKDRPDFLTVIMAKKGENIITFINESHYXGYSRSTWWIYSRATIHICNCLKGFCSMRTTQRSERSIRVANGVEAKVEAIGDLLLELANGFTLLLRDXFYVRSLQRNLISVSKLDFDRYDCHFGNGKCELWYNNACIGLVVLQDQLYLLSLSENVNVVSLLTKEXRKRIPDVSSKLWHCRLGHISRGRIERLVKNVILPPLEFSVLEPCIQCIEXSVPKTLYELWILLVWGSPAEAKVFNPNIGKLDPKXVSCHFIGYPERSKGYHFYCPNSXTKFVETRXEMIRGXSSVVREIDLEERRVSVPAPLTQEPFFSLPADVVPAMHDVAVPTPIVISPVATMNESEEPVLQDSTEIIATPEEELQQPQTDNVPNEEAPRRSERVRRSAIRDDYEXYNIEESHMEDDPTSYEEAMRSARSSEWLEAMKDEMKSMKLNGVWDXLEEIPKGVKIVGCKWVYETKYDCRGNIEKFKARLVAKGFTQREGIDYNETFSPVSCKDSFRIIMALVAHYDLELHQKDVKREFLNRDLEEKXYMVQPKGFVMKRNENTGCRLKRSIYGLEHASRQWYLKFDGTIKKFXGFQENVEDNCIYSKFKNSRFIFLILYVDDVLLTSSDVSLLQETKKFLSSNFDMKDLCEASYVLSIEIHRDRTKYALGLSQKAYIENVLKKFNMYRCSATPAPIVKGKKYGASQCPKNQYELNEMKIKPYASAVGILQYAQVCTRPDLAFVTGILGRFQSNPGLEHWXLVKKVLRYLQGTKGLMLSYRKSESLQIVGYSDSNFAKDNTKSTSGYVFTLAVGAISWKSSKQITTSGSTMYTEFIACYEATGQVNWLKKFTPGLKVVDSIEKQLKLYCDSEPTVMYSHNNQSSGAAKHIDIKYYVVKDKVRDQTISLEHIRTERMLADPLMKGLPPNMFKEHVACMGLREA

SEQ ID NO: 132727 - protein, 1391 aa, Oryza sativa
  Clone ID: PAT_MRT4530_34668C.1.pep
MVAFPSLTPLCSLLGCRRRPFAPRHHQSSPPFSSFAPAAVFAGGYSLMGCIKDIPTLKGDNYAEWKRKLDLAFILGEVDWVLTTPCPIEPAELVRGENESDADWQKRQRDNAPLVMSYDIEQKKWSLANKKCLAVVKNTIEPTILGSIPECDAVSEYLERIKSQFTGSSKTYATQLIKQLVTERYHGGGVRDHILRMSNMASKLKPMDLGITDDFLVHLVMASLPKQFDNFIVNYNISPEKWNFEKLIANCVQEEERIKESNGGSINYVKDKKKNHKSPTSKGKQSQHLPQQQQFAVEKDQCLHCKKTGHYKKDCPDFLKMIMAKKGENIITFVNESHYVGYSRSTWWIDSGATIHACNCLKAFRSTRTTQGRESSIRVANGVEEKVEAVGDLPLELANGFTLLLRDVFYVPSLQRNLISVSKLDFDGYDCRFGSGKCELWHNNACIGLAVLRDELYLLSLSENVNVVSSLTKENKKRKRTSNVSSKLWHCRLGHISRGRIERLVKNEILSPLEFSDLEQCIECIKGKFVKSIKKGAKRSAGILEIIHTDICGPFPVKSMDGYDSFITFTDDYSRYGYIYPIKERSEALDKFKIFKAEVENQHDIKIKVNGVAERRNRTLMDMVRSMMSYSTLPLGLWMEALKTAIHILNRVPSKSVPKTPYELWTGRVPSLTHLRVWGSPTEAKVFNPNIGKLDPKTVSCHFIGYPERSKGYRFYCPNSYTKFVETRHAVFLEDEMIRGSSVVREIDLEERRVSVPAPSTQEPFFSLPADVVPAMPVIEVPAPVVTPPVATMNESEEPVIQDSTEMVATPEEELQQPQIDNVPVQETHQEPQVQDVANVQAPRRSERVRRSAIRDDYKVYNIEESHMEDDPTSYEEAMRSARSSEWLEAMKDEMKSMKLNDVWDLEEIPKGAKTVGCKWVYKTKYDSRGNIEKFKARLVAKGFTQREGIDYNETFSPVSCKDSFRIIMALVAHYDLELHQMDVKTAFLNGDLEEKVYMAQPKGFFMKGNENMGCRLKRSIYGLKQASRQWYLKFDGTIKKFGFQENVEDNCIYSKFKNGRFIFLILYVDDILLASSDVSLLQETKKFLSTNFDMKDLGEASYVLGIEIHRDRTKYALGLSQKTYIEKVLKKFNMYRCSATPAPIMKGEKYGASQCPINQYELNEMKTKPYVSAVGSLQYAQVCTRPDLAFVTGLLGRFQSNPGLEHWKLVKKVLRYLQGTKGLMLTYRRSESLQIVGYSDSDFAKDNTKSTSGYVFTLAGGAISWKSSKQTITAGSTMYAEFIACYEATGQVNWLKKFIPGLKVVDSIEKPLKLYCDNEPAVMYAHNNQSSGAAKHIDIKYYVVKDKVRDQTISLEHIKTERMLADPLTKGLPPNVFKEHVAGMGLREAL

SEQ ID NO: 132728 - protein, 832 aa, Oryza sativa
  Clone ID: PAT_MRT4530_34669C.1.pep
MAEERESFESQWVPSDMTEENLKEMVAHGVLPAKEIIGWRPACGEAFPTPDTHEIVVFSHFFYGGFALPTSKFFRGILNFYGISLHHLNPNSIVHIANFVHVCEAFLGIKPHFALFRRIFFLKPQPNKSKPCVVGGAGFQLRGTLSQKYFSMPFKTSNKGWHANWFYVQNPEPALPGYSCLPPVYQDTWNSLPIGDEAVQALELMDRMLKLKEQGLQGEQITRHFIKCRLAPIKERSRTAFEFDGKHDPNREEPDSLDFKIMKERMYKIFSNAIVVSYSHQLPVVPYNAFNPPPQKHLIQEYVLMKSDPPIAQRRSPRQHTVQGSGGPTIRSDPQPQTSQPTGQTGSRKRKLVLNDDEGDDGDKSGDKGSPHKLPKRTMPKKKLAGRQMPKIRTSSRKPSDIDPTGKDPDPAVAEPNISKDAEPTAESQPTAESQPTGAHASDDKANPSDQPPTGNQSATTETATTREPPTRNQSDVGLDQEIPEVEAQATASQGPEAGNDSMIGSPDKEQGSPRAQPGTSSGTLGDDEETIPRIKAADDFRPPILLKWWDENSQAAGIVINRQKEDEEVCQLKKALGEATRIVNRIHLRNEAKTTTLEKLVPHLGTLEAVRDQLHEAKEYAKKTEKELRDRIAQLQDSNFELSGSSKAQATRMAQMEKQIEALKRDKVELAVQRDSALKEVEDRKIKSQAQFDVLIGKIKKLEGARDEVANVATPLIQAMFLNNSGPSALDATEIFDKLRVAPDVYFKNIKKAGSMGASMALAMTKSLYPRIEIDTIDGFADGTSEEAALDLISNAQSAADKIASDVVEQFRNNDLQPSNNNSDDERTDSD

SEQ ID NO: 132729 - protein, 1347 aa, Oryza sativa
  Clone ID: PAT_MRT4530_3466C.1.pep
MVYTRTGNRTTGEGSNGEERVDGVHPNSDSGNGPPPLPENPTLAQVMAHQTQMMAAMMQQMQQQHQQMHQRMMQHAEQQHQQFGPPPPQSKLPEFLRVRPPTFSSTTNPMEANDWLHAIEKKLNLLQCNDQEKVAFATHQLQGPASAWWDNHMATRPPGTEVTWAEFCRSFRKAQVPDGVVAQKKREFRALHQGNRTVTEYLHEFNRLARYAPEDVRTDAEKQEKFMAGLDDELTNQLISGDYADFERLVDKAIRQENQRNKMDRKRKAAQFRAPQESHQRSRFTPGQQGGPTTMIVRQHRPFNPSNFHQGSSGSQNHHGSQPNRGTAPRPPMAPAQSGQPAQAKKETGAKPGSCFNCGELGHFADKCPKPRRAGPRFIQARVNHASAEEAQAAPEVVLVTLTNEKGETVVYKSLVSPKKGASLNQIETEIPVDAEEKNLRKLEDIPIVCEYPEVFPEDLTTMPPKREIEFRIDLAPGTAPIYKRPYRMAANELAEVKKQVDEQLQKGYIRPSTSPWGAPVIFVEKKDKTKRMCVDYRALNEVTIKNKYPLPRIDDLFDQLKGAKVFSKIDLRSGYHQLRIREEDIPKTAFTTRYGLYECTVMSFGLTNAPAFFMNLMNKVFMEFLDKFVVVFIDDILIYSKSEEEHEQHLRLVLEKLKEHQLYAKFSKCDFWLTEVKFLGHVITAQGVAVDPSNVESVTKWTPPKTVSQIRSFLGLAGYYRRFIENFSRIARPMTQLLKKDEKFKWTAECDKSFEELKRKLVSAPVLILPDQTKDFQVYCDASRHGLGCVLMQEGRVVAYASRQLRPHEGNYPTHDLELAAVVHALKIWRHYLIGNRCEVYTDHKSLKYIFTQPDLNLRQRRWLELIKDYDMSIHYHPGKANVVADALSRKSYCTALCIEGMCEELRQELEHLNMGIVEHGFVAALEARPTLVDQVRAAQVNDPEIAELKKNMRVGKARDFLEDEHGTIWMGERLCVPDDKELKDLILTEAHQTQYSIHPGSTKMYQDLKEKFWWVSMRREIAEFVALCDVCQRVKAEHQRPAGLLQPLQIPEWKWEEIGMDFITGLPRTSSGHDSIWEELGTRLNFSTAYHPQTDGQTERVNQILEDMLRACALDFGGAWDKSLPYAEFSYNNSYQASLQMAPFEALYGRKCRTPLFWDQTGERQLFGTEVLAGAEEKVRIIRERLRIAQSRQKSYADNRRRELTFEAGDYVYLRVTPLRGVHRFQTKGKLAPRFVGPYRILERRGEVAYQLELPSNMIGIHDVFHVSQLKKCLRVPEEQADSEHIDIQEDLTYVEKPEVPELVPPSSSSSVGRRRRPLSPPLPAAGRSPSVAALRRCRMRAAAV

SEQ ID NO: 132730 - protein, 282 aa, Oryza sativa
  unsure (1)..(282): unsure at all Xaa locations
  Clone ID: PAT_MRT4530_34670C.1.pep
GSSVIREIDLEERRVSVPAPSTQEPFXVVPAMHDVAVPTPVVISPVATMNESEEPILQDSTEIIATSEEELHQPQTYNVPXRRPLEGLKESHIEDDPISYEEAMRSXMKDEMKSMKLNDVWDLEEIPKGAKTVGCKWVYKTKYDSRGNIEKFKVRLVAXKGFTQQEGIDYNETFSPVSCKDSFRIIMALVAHYDLELHQMDVKTEFLNGDLEEKVYMAQPKGFVMKGNENMGCRIKRSIYGLKXASRQCYLKFDGTIKKFGFXQENVEDNCIDSKXKNGRLI

SEQ ID NO: 132731 - protein, 849 aa, Oryza sativa
  Clone ID: PAT_MRT4530_34671C.1.pep
MAEEKESFEGQWAPSDVTEENLKEMVAHGVLPAKEIIGWRPACGEAFPSPDTHEVVVFSHFFYGGFALPTSKFFRGILSFYGISLHHLNPNSIVHIANFVHVCEAFLGIKPHFALFRRIFFLKPQPNKSKPCVVGGAGFQLRGTLSQKYFSMPFKTSNKGWHANWFYIQNPEPALPEYSCLPPVYQDTWNSLPIGDEAAQALELMDRMLKLKEQGLQGEQITRHFIKCRLAPIKERSRTAFEFDGKHDPNREEPDSLDFKIMKERMYKIFSNAIVVSYSHQLPVVPYNAFNPPPQYEYVLMKSDPPITQRRSPRQHTVKGGGGPTIRSDSQPQTSNPTGQTGSRKRKLMLNDDEGDDDNKSGNKGLPNKLPKHTTPRKKLAGRPTPKIRTSSRHKPLGTILLQYASLMKIILNIERTLCRKPSDIDPTGKDPDPAVTEPSSSKDSEPTAENQPTSAHTSGDTANPSDQPPTGDQSAATETTTTQEPPTGNQSDVGPDQEIPEVEAQTTTSQGPEAGNDAMIGSSNKEQESPHAQLGTSSGPPGDDEEEIPRIKAADDSRPPILLKWWDENSQAAGIVINRQKEDEEVCQLKKALGEATRIVNRIHLRNEAKTATLEKLVPHLGTLEAVRDQLHEAKELAKKTEKELRDRIAQLQDSNFELSGSSKAQAIRMAQMEKQIEVLKRDKVELAAQRDSALKEVEDRKIKSQAQFDVLVGKIKRLEGARDEVANVATPLVQAMFLNNSGPSALDATEIFDKLRVAPDVYFKNIKKAGSMGASMALAMTKSLYPRIEIDAIDGFADGTSEEAALDLISNAQNAADKIASDVVEQFRNTDLPPSSNNSDDEKTDSD

SEQ ID NO: 132732 - protein, 169 aa, Oryza sativa
  unsure (1)..(169): unsure at all Xaa locations
  Clone ID: PAT_MRT4530_34672C.1.pep
DTINMSGNKQASKSTDPQNKLPNSTGSEVHEGNIIPVTLDKLMAEHRQELEQMMSSVKDKFMNSFKETRQGTIVXKYKLKVVAADEVGSSSSGKVTAGELGDKGDGFQEGVVQDLGPDGNGLQPQFNNFQDQIDYAVQHALINQSRILVNTLTNVTPENSLVISELICA

SEQ ID NO: 132733 - protein, 379 aa, Oryza sativa
  unsure (1)..(379): unsure at all Xaa locations
  Clone ID: PAT_MRT4530_34673C.1.pep
MILQSFSIYGLEQASRQXYLKFDGTIKKFGFXQENVEDNCIYSKFKNGRFIFLILYVDDILLASSDVSLLQETKKFLSSNFDMKDLGEDSHVLGIEIHRDRTKYALGLSQKAYIEKVLKKFNMNRCSAAPAPIVKGEKYGASQCPRNQCELNEMKTKPNASVVGSLQYAQLCTRPDLAFVTGLLGRFQSNPGPEHWKLVXKVLCYLQGIKGLMLSYRKSESLQTVGYSDSDFAKDNTKSTSGYVFTLTVGAISWKSSKQTITAGSTMYAEFIACYEATGQVNWLKKFIPGFKXVDSIEKPLKLYCDSKPTVMFSHNNPSSGAAKHIDIKYYVVKDKVWDQTISLEHIRTERMLADPLMKGLPPNMFKEHVACMGLREAL

SEQ ID NO: 132734 - protein, 826 aa, Oryza sativa
  Clone ID: PAT_MRT4530_34674C.1.pep
MAEEKESFEGQWAPSDVTEENLKEMVAHGVLPAKEIIGWWPACGEAFPTPDTHEIVVFSHFFYGGFALPTSKFFRGILNFYGISLHHLNPNSIVHIANFIHVCEAFLGIRPHFSLFRRIFFLKPQPNKSKPCVVGGAGFQLRGTLSQKYFSMPFKTSNKGWHANWFYVQNPEPALPEYSCLPPVYQDTWNSLPIGDEAAQALELMERMLKLKEQGLQGEQITRHFIKCRLAPIKERSRTAFEFDGKHDPNREEPDSLDFKIMKERMYKIFSNAIVVSYSHQLPVVPYNAFNPPPQEYALMKSDPPITQRRSPRQHTVQGGGGPKIRPDPQPQTSNPTRQTGSRKRKLVLDNDEGDDDKSGDKGSPNKFPKRTMPKKKLAGRQMPKIRTSSRKPSDIDPTGKDPNPAVTEPNLSKDAEPTAENQPTAESQPTGAHALGDKADPSDRPPTGDQSATAETATTQEPPTGNQSDVGPDEEIPEVEAQTTTSQGPEAGKDSMIGSLNKEQGSPHVQPGTSSGTLGDDEEAIPRIKAADDSRPPILLKWWDENSQVAGIVINRQKEDEEVCQLKKALGEATRIVNRIHLRNEAKTTTLEKLVPHLGTLEAVRDQLHEAKEYAKKTEKELRDRIAQLQDSNFELSGSSKAQATRMAQMEKQIEALKRDKVELAAQRDSALKEVEDRKIKSQAQFDVLVGKIKKLEGARDEVANVAAPLVQAMFLNNSGPSALDATEIFDKLRVAPDVYFKNIKKAGSMGASMALAMTKSLYPRIEIDTIDGFADGTSEEAALDLISNAQSAADKIASDVVEQFRNNDLQPSDNNSDGERTDSD

SEQ ID NO: 132735 - protein, 1310 aa, Oryza sativa
  Clone ID: PAT_MRT4530_34675C.1.pep
MGCIKDIPTLKGDNYAEWKRKLDLAFILGEVDWVLTTPCPIEPAELVRGENESDADWQKRQRDNAPLVMSYDIEQKKWSLANKKCLAVVKNTIEPTILGSIPECDAVSEYLERIKSQFTGSSKTYATQLIKQLVTERYHGGGVRDHILRMSNMASKLKPMDLGITDDFLVHLVMASLPKQFDNFIVNYNISPEKWNFEKLIANCVQEEERIKESNGGSINYVKDKKKNHKSPTSKGKQSQHLPQQQQFAVEKDQCLHCKKTGHYKKDCPDFLKMIMAKKGENIITFVNESHYVGYSRSTWWIDSGATIHACNCLKAFRSTRTTQRRESTIRVANGVEEKVEAVGDLPLELANGFILLLRDVFYVPSLQRNLISVSKLDFDGYDCRFGSGKCELWHNNACIGLAVLRDELYLLSLSENVNVVSSLTKENKKRKRTPDVSSKLWHCRLGHISRGRIERLVKNEILPPLEFSDLEQCIECIKGKFVKNIKKGAKRSAGILEIIHTDICGPFPVKSVDGYDSFITFTDDYSRYGYIYPIKERSEALDKDIKIKVVRSDRGGEYYGRHTPYGQVPGPFARFLLENGIVAQYSTPGEPQQNGVAERRNRTLMDMVRSMMSYSTLPLGLWMEALKTAIHILNRVPSKSVPKTPYELWTGRVPSLTHLRVWGSPAEAKVFNPNIGKLDPKTVSCHFIGYPERSKGYRFYCPNSYTKFVETRHAVFLEDEMIRGSSVVREIDLEERRVSVPAPSTQEPFFSLPADVVPAMPVIEVPAPVVTPPVATMNESKEPVIQDSTEMVATPEEELQQPQIDNVPVQETHQEPQVQDVPNVQAPRRSERVRRSAIRDDYKVYNIEESHMEDDPTSYEEAMRSARSSEWLEAMKDEMKSMKLNDVWDLEEIPKGAKTMDVKTAFLNGDLEEKVYMAQPKGFVMKGNENMGCRLKRSIYGLKQASRQWYLKFDGTIKKFGFQENVEDNCIYSKFKNGRFIFLILYVDDILLASSDVSLLQETKKFLSSNFDMKDLGEASYVLGIEIHRDRTKYALGLSQKTYIEKVLKKFNMYRCSATPAPIMKGEKYGASQCPRNQYELNEMKTKPYASAVGSLQYAQVCTRPDLAFVTGLLGRFQSNPGLEHWKLVKKVLRYLQGTKGLMLSYRRSESLQIVGYSDSDFAKDNTKSTSGYVFTLAGGAISWKSSKQTITAGSTMYAEFMACYEATGQVNWLKKFIPGLKVVDSIEKPLKLYCDNEPAVMYAHNNQSSGAAKHIDIKYYVVKDKVRDQTISLEHIKTERMLADPLTKGLPPNVFKEHVAGMGLREAL

SEQ ID NO: 132736 - protein, 832 aa, Oryza sativa
  Clone ID: PAT_MRT4530_34676C.1.pep
MAEEKESFEGQWAPSDVTEENLKEMVAHGVLPAKEIIGWRPACGETFPTPDTHEIVVFSHFFYGGFALPTSKFFRGILSFYGISLHHLNPNSIVHIANFIHVCEAFLGIRPHFALFCRIFFLKPQPNKNKPCVVGGAGFQLRGTLSQKYFSMPFKTSNKGWHANWFYVQNPEPALPEYSCLPPVYQDTWNSLPIGDEAAQALELLDRMLKLKEQGLQGEQITRHFIKCRLAPIKERSRTAFEFDGKHDPNREEPDSLDFKIMKERMYKIFSNAIVVSYSHQLPVVPYNAFNPPPQEYALMKSDPPITQRRSPRQHTVQGSGGPTIRSDPQPQTSKPAGQTGPRKRKLVLNDDEGDDSNKSGDKGTPNKLPKHTMPGKKLAGRQIPKIRTSSRKPSDIDPTGKDPDPAVTEPNLSKDAEPTAENQPNAESQPTAESQPTGAQASDDKANPSDQPPTGNQSAATETATTREPPTGNQSDVDLNQEIPEAEAQTTSQGPKVGNDSVIGSPDKEQGSPHAQPGTSSGPLGGDEEEILRIKAANDSRPPILLKWWDENSQVSGIVINRQKEDEEVCQLKKVLGEATRIVNRIHLRNEAKTATLEKLVPHLGTLEAVREQLHEAKEHAKKTEKELRERIAQLQDSNFELSGSSKAQATRMTQMEKQIEALKKDKVELAAERDSALKEVEDRKIKSQAQFDVLVGKIKKLEGARDEVANVATPLVQAMFLNNSGPSALDATEIFDKLRVAPDVYFKNIKKAGSMGASMALAMTKSLYPRIEIDTIDGFADGTSEEAALDLISNAQSAADKIASDVVEQFRNNDLQPSNNNSDDERTDSD

SEQ ID NO: 132737 - protein, 47 aa, Oryza sativa
  Clone ID: PAT_MRT4530_34677C.1.pep
CEPLYFYSTFQILNLAEILFFFFLRINRQFIIINIKTIQYKSTKQFL

SEQ ID NO: 132738 - protein, 646 aa, Oryza sativa
  Clone ID: PAT_MRT4530_34678C.1.pep
NPEPALPEYSCLPPVYLDTWNSLPIGDEAAQALELMDRMLKLKEQGLQGEQITRHFIKCRLAPIKERSRTAFEFDGKHDPNREEPDSLDFKIMKERMYKIFSNAIVVSYSHQLPVVPYNAFNPPPQEYVLMKSDPPITQRRSPRQHTVQGGGGPTIRSDPQPQTSNPTGQTGSRKRKLVLDNDEGDDDNKSGDKGSPNKLPKRTMPRKKLANRPTPKIRTSSRKPSDIDPTGKDPDPAVTEPNLSKDPEPTGAHASGDKADPSDQPPTGNQSAAAETATTQEPPTGNQSDVGLDQEIPEVEAQTTTSQGPEAGNDSMIGSPNKEQGSPHAQLGTSSGPPGDDEEEIPRIKAADDSRPPILLKWWDENSQAAGIVINRQKEDEEVCQLKKALGEATRIVNRIHLRNEAKTATLEKLVPHLGTLEAVRDQLHEAKELAKKTEKELRDRIAQLQDSNYELSGSSKAHAARMAQMEKQIEALERDKVELAAQRDSALKEVEDRKIKSQAQFDVLVGKIKRLEGARDEVANVAAPLVQAMFLNNSGPSALDATEIFDKLRVAPDVYFKNIKKAGSMGASMALAMTKSLYPRIEIDAIDGFADGTSEEAALDLISNAQNAADKIASDVVDQFRNTDLQPSSNNSDDEKTDSE

SEQ ID NO: 132739 - protein, 82 aa, Oryza sativa
  Clone ID: PAT_MRT4530_34679C.1.pep
PDSWPSFRGDVSILLLLTWKPFSVCGYSELAVLSLSRGSPGHRLAHVSRATSAISTRDRQQIFIESSFSCFFFLLLIMEMDY

SEQ ID NO: 132740 - protein, 1154 aa, Oryza sativa
  Clone ID: PAT_MRT4530_3467C.1.pep
MEANDWLHDIEKKLNLLQCNDQEKVAFATHQLQGPASAWWDNHMATRPPGTEVTWAEFCRSFRKAQVPDGVVAQKKREFRALHQGNRTVTEYLHEFNRLARYAPEDVRTDAEKQKKFMAGLDDELTNQLISGDYADFERLVDKAIRQEDQRNKMDRKRKAAQFRSNQGNHQRPRFAPGQQGGPTTMIVRQYRPFNPSNFHQGASGSQNHHGGQPNRGAAPRLPVAPAQSGPSAQAKKETGTKPGSCFNCGELGHFADKCPKPRCAGPRFVQARVSHASAEEAQAAPEVVLGTFPVNSIPATVLFDSGATHSFISKKFVGMHGLRKEELNTPMRVHTPGNSSTSVSFSPSVLIEIQRSPFLANLILLESKDLDVILGMDWLTKFKGVINCANRIVTLTNEKGETAVYKSLVSPKQGVALNQMEAEIPVVTEEKNPRKLEEIPIVCEYPEVFPEDLTTMPPKREIEFRIDLAPGTAPIYKRPYRMAANELAEVKKQVDEQLQKGYIRPSTSPWGAPVIFVEKKDKTKRMCVDYRALNEVTIKNKYPLPRIDDLFDQLKGAKVFSKIDMRSGYHQLRIREEDISKTAFTTRYGLYECTVMSFGLTNAPAFFMNLMNKVFMEFLDKFVVVFIDDILIYPKSEEEHEQHLHLVLEKLKEHQLYAKFSKCDFWLTEVKFLGHVITAQVQQTEPQTKPYPLDMWKYGSALQQRPELNPYSTRAQGVAVDPSNVESVTKWTPPKTVSQIRSFLGLVGYYRRFIENFSRIARPMTQLLKKDEKFKWTAECDKSFEELKKKLVSAPVLILPDQMKDFQVYCDASRHGLGCVLMQEGRVVAYASRQLRPHEGNYPTHDLELAAVVHALKIRRHYLIGNRCEVYMDHKSLKYIFTQPDLNLRQRRWLELIKDYDMSIHYHPEKANVVADALSRKSYCTALGIEGMCEELRQELERLNVGIVEHGFVAALEARPTLADQVRAAQVNDPEIAELKKNMRVRKARDFHEDEHGTIWLGERLCVPDDKELKDLILTEAHQTQYSIHPGSTKMYQDLKEKFWWVSMRREIAEFVALCDVCQRVKAEHQRPVGLLQPLQIPEWKWEEIGMDFITGLPRTSSGHDSISVVNVTLLPFAPFVEVRRSTFGIGTSTSVSSNIMCTKGSPLLVIAI

SEQ ID NO: 132741 - protein, 847 aa, Oryza sativa
  Clone ID: PAT_MRT4530_34680C.1.pep
MAEEKESFEGQWAPSDVTEENLKEMVAHGVLPAKEIIGWRPACGEAFPSPDTHEVVVFSHFFYGGFALPTSKFFRGILNFYGISLHHLNPNSIVHIANFVHVCEAFLGIKPYFALFRRIFFLKPQPNKNKPCVVGGAGFQLRGTLSQKYFSMPFKTSNKGWHANWFYVQNPEPALPEYSCLPPVYQDTWNSLPIGDEAAQALELMDRMLKLKEQGLQGEQITRHFIKCRLAPIKERSRTAFEFDGKHDPNREEPDSLDFKIMKERMYKIFSNAIVVSYSHQLPVVPYNAFNPPPQEYVLMKSDPPIAQHRSPRQHTVQGGGGPTIRLDPHPQISNPTGQTGSRKRKLVLDNDEGDDNKSEDKGSPNKPPKRTMPRKKLAGRPMPKIRTSSRYKPLGTISLRHASLIEIILNIERTPCRKPSDIDPTGKDPDQAATEPNLSKDPEPTTESQPTDAHASGDKDDPSDQPPTGNQSAAAETATTQEPPTGNQSDAGPDQEIPEVETQTTTSQGPEAGNDPIIGSPNKEQRSPHAQLGTSSGAPGDDEEAIPRIKAADDSRPPILLKWWDENSQVAGIVINRQKEDEEVCQLKKVLGEATRIVNRIHLRNEAKTTTLEKLVPHLGTLEAVRDQLHEAKEHAKKTEKELRERIAQLQDSNFELSGSSKAQAARMAQMEKQIEALKKDKIELAAQRDSALKEVEDRKIKSQAQFDVLVGKIKRLEGARDEVANVATPLVQAMFLNNSGPSALDATEIFDKLRVAPDVYFKNIKKAGSMGASMALAMTKSLYPRIEIDTIDGFADGTSEEAALDLISSAQNAADKIASDVVEQFRNNDLQPSNNNSDDERTDSD

SEQ ID NO: 132742 - protein, 853 aa, Oryza sativa
  unsure (1)..(853): unsure at all Xaa locations
  Clone ID: PAT_MRT4530_34681C.1.pep
MAEEKESFEGQWAPSDVTEENLKEMVAHGVLPAKEIIGWRPACGEIFPTPDTHEIVVFSHFFYGGFALPTSKFFRGILSFYGISLHHLNPNSIVHIANFVHVCEAFLGIKPHFALFRRIFFLKPQPNKNKPCVVGGAGFQLRGTLSQKYFSMPFKTSNKGWHANWFYVQNPEPALPEYSCLPPVYQDTWNSLPIGDKAAQALELMDRMLKLKEQGLQGEQITRHFIKCRLAPIKERSRTAFEFDGKHDPNREEPDSLDFKIMKERMYKIFSNAIVVSYSHQLPVVPYNAFNPPPQEYALMKSDPPITQRRSPRQHTVQGGGGPKIRPDPQPQTSNPTGQTGSRKRKLVLDNDEGDDDKSGDKGSPNKLPKRTMPKKKLAGRQMPKIRTFSRYKPLGTISLRHASLIEIILNIERTLCRKPSDIDPTGKDSDPTVTEPNLSKDPEPTAESQPTAESQPTGAHALGDKANPSDRPPTGDQSATAETATTQEPPTGNQSNVGPDEEIPEVEAQTTTSQGPEAGKDSMIGSLNKEQGXPHVQPGTSSGTLGDDEEAIPRIKAADDSRPPILLKWWDENSQVAGIVINRQKEDEEVCQLKKALGEATRIVNRIHLRNEAKTTTLERLVPHLGTLEAVRDQLHEAKEYAKKTEKELRDRIAQLQDSNFELSGSSKAQATRMAQMEKQIEALKRDKVELAAQRDSALKEVEDRKVKSQAQFDVLVGKIKRLEGARDEVANVATPLVQAMFLNNNGPSALDATEIFDKLRVAPDVYFKNIKKAGSMGASMALAMTKSLYPRIEIDTIDGFADGTSEEAALDLISNAQSAADKIASDVVDQFRNNDLQPSNNNSDDERTDSD

SEQ ID NO: 132743 - protein, 832 aa, Oryza sativa
  Clone ID: PAT_MRT4530_34682C.1.pep
MAEEKESFEGQWAPSDVTEENLKEMVAHGVLPAKEIIGWRPACGEAFPSPDTHEVVVFSHFFYGGFALPTSKFFRGILNFYEISLHHLNPNSIVHIANFVHVCEAFLGIKPHFALFRRIFFLKPQPNKSKPCVVGGAGFQLRGTLSQKYFSMPFKTSNKGWHANWFYVQNPEPALPEYSCLPPVYQDTWNSLPIGDEAAQALKLMDRMLKLKEQGLQGEQITRHFIKCRLAPIKERSRTAFEFDGKHDPNREEPDSLDFKIMKERMYKIFSNAIVVSYSHQLPVVPYNAFNPPPQEYVLMKSDPPITQRRSPRQHTVQGSGGPTIRPDPQPQTSNPTGQTGFRKRKLVLDNDEGDDNKSGDKGSPNKLPKRTMPKKKLAGRQMPKIRTSSRKPSDIDPTGKDPDPAATEPNLSKDAEPTAESQPTAESQPTAESQPTGAHASDDKANPSDQPPTGNQSAATETATTQEPPTGNQSDVGLNQEIPEAEAQATTSQGPEAGNDSVIGSPDKEQGSPHAQLGTSSGPLGGDEEEILRIKAANDSRPPILLKWWDENSQVSGIVINRQKEDEEVCQLKKALGEATRIVNRIHLRNEAKTTTLEKLVPHLGTLEAVRGQLHEAKEHAKKTEKELRDRIAQLQDSNYELSGSSKAQAARMAQMEKQIEALERDKVELAAQRDSALKEVEDRKIKSQAQFDVLVGKIKRLEGARDEVANVATPLVQAMFLNNSGPSALDATEIFDKLRVAPDVYFKNIKKAGSMGASMALAMTKSLYPRIEIDSIDGFADGTSEEAALDLISNAQNAADKIASDVVDQFRNNDLQPSNNNSDDERTDSD

SEQ ID NO: 132744 - protein, 144 aa, Oryza sativa
  Clone ID: PAT_MRT4530_34683C.1.pep
RTCGREANTQTPNYHRAHSTACRRGPPPPSPRPSRPRPRRRRRTRAEQAAVASARAAQRRAPGPTSEAPPPAAAAWSPGAPSCGPAPLSSRSASSTPGTAATGHASAPSPRTPRRRSSWPPTPSCLSASPSCSRHRRKTAVTTP

SEQ ID NO: 132745 - protein, 677 aa, Oryza sativa
  Clone ID: PAT_MRT4530_34684C.1.pep
MASLTGARRGWVSGGEPQRGRGGRGFSPDFTCIFLGSFENYNFGLGGKLRGVTAAQALELMDRMLKLKEQGLQGEQITRHFIKCRLAPIKERSRTAFEFDGKHDPNREEPDSLDFKILKERMYKIFSNAIVVSYSHQLPVVPYNAFNPPPQEYVLMKSDPPITQRRSPRQHTVQGGGGPTIRSDPQPQTSNPTGQTGSRKRKLVLNDDEGDDGNKSGNKDLPKKLPKHTTPRKKLAGRPMPKIRTSSRKPSDIDPTGKDLDPAVTEPSSSKDSEPTAESQPTGAHTSGDKANPSDQPPTGNQSAATETTTTQEPPTGNQSDVGPDQEIPEVEAQTTTSQGPEAGNDSMIGSPNKEQGSPHAQLGTPSGPPGDDEEEIPRIKAADDSRPPILLKWWDENSQAAGIVINRQKEDEEVCQLKKALGEATRIVNRIHLRNEAKTATLEKLVPHLGTLEAVRDQLHEAKELAKKTEKELRDRIAQLQDSNFELSGSSKAQATRMAQMEKQIEALKRDKVELAAQRDSALKEVEDRKIKSQAQFDVLVGKIKRLEGARDEVANVATPLVQAMFLNNSGPSALDATEIFDKLRVAPDVYFKNIKKAGSMGASMALAMTKSLYPRIEIDAIDGFADGTSEEAALDLISNAQNAADKIANDVVEQFRNTDLQPSSNNSDDEKTDSD

SEQ ID NO: 132746 - protein, 325 aa, Oryza sativa
  Clone ID: PAT_MRT4530_34685C.1.pep
MPAPPAASWRRHAAAAAASSSTRKTLLLLLPVFLLLLLFVLSRAPDLTLSPAAASSRHLSAGVRPFDCYASQQASPVFASLVEGVPHPFFYSLADMGALPDHPHKNIARILKGKRFRKPDISETIQQLLGGKVGIGSRGVVVDVGANVGMASFAAAVMGFRVVAFEPVLENLQRICDGVYLNRVQDQVVVYHAAASDRVGNITMHKVIGRLDNSAISATGAKLAFKANEEIAVEVATIPLDEVILDAERVVLIKIDVQGWEYHVLRGASKLLSRRKGDAPYLIYEEDERLLQASNSSAREIRAFLSSVGYNHCTRHGTDAHCTKN

SEQ ID NO: 132747 - protein, 790 aa, Oryza sativa
  Clone ID: PAT_MRT4530_34686C.1.pep
MAEEKESFEGQWAASDVTEENLKEMVAHGVLPAKEIIGWRPACGEAFPTPDTHEIVVFSHFFYGGFALPTSKFFRGILNFYGISLHHLNPNSIVHIANFIHVCEAFLGIRPHFALFRRIFFLKPQPNKSKPCVVGGAGFQLRGTLSQKYFSMPFKTSNKGWHANWFYVQNPEPALPEYSCLPPVYQDTWNSLPIGDEAAQALELMERMLKLKEQGLQGEQITRHFIKCRLAPIKERSRTAFEFDGKHDPNREDPDSLDFKIMKERMYKIFSNAIVVSYSHQLPVVPYNAFNPPPQEYALIKSDPPITQRRSPRQHTVQGSGGPTIRSDPQPQTSKPAGKTGPRKRKLVLNDDEGDDSNKSEDKGTPNKLPKHTMPRKKLAGRQIPKIRTSSRKPSDIDPTGKDPDPAVTEPNSSKDAEPTVENQPTAESQPTGAHASDDKADPSDQPPSGNQSEATETATTREPPTGNQSDVDLKDQNQGCPPGGDEEEILRIKVASDSRPPILLKWWDENSQVAGIVINRQKEDEEVCQLKKALGEATCIVNRIHLRNEAKTTTLEKLVPHLGTLEAVRDQLHEAKEYAKKTEKELRDRIAQLQDSNFELSGSSKAQATRMAQMEKQIEALKEDKVELAAERDSALKEVEDRKIKSQAQFDVLVGKIKKLEGAIDEVANVATPLVQAMFLNDSGPSAFDATEIFDKLRVAPDVYFKNIKKAGSMGASMALAMTKSLYPRIEIDAIDGFADGTSEEAALDLISNAQSAADKIASDVVEQFRNNDLQPSNNNSDDERTDSD

SEQ ID NO: 132748 - protein, 116 aa, Oryza sativa
  Clone ID: PAT_MRT4530_34687C.1.pep
MAASSYDGVVALWLLWYYDEEAWECGHRYGVYNLRRGEVVAAGRELGGGDDVILATQYVYQESFASPVARRGVGDGAPSPRGELAAGAGEASSSSLIRNSPGFYGVLIFSLLSLKY

SEQ ID NO: 132749 - protein, 91 aa, Oryza sativa
  Clone ID: PAT_MRT4530_34688C.1.pep
TLTSPFQERAARAQTIPENTIRWVMGPKGTVVSFPEEVGLPSIFNSKPCNYPPPREKCAGPSCTNAYRYRDSKLNLPLCSLKCYKAVNGNA

SEQ ID NO: 132750 - protein, 211 aa, Oryza sativa
  Clone ID: PAT_MRT4530_34689C.1.pep
MEWRKAEEAARPRYEAANWLRRVVGVVCGKDLAEEPSEEEFRLGLRNGIVLCNALNKVQPGSVPKVVEAPSDSADGAALCAYQYFENVRNFLMGLQDLGLPTFEASDLEKGGKGVRVVDCVLSLRSFSESKQVGRSAPLKYGGILKPSMSGKHFIRKNSEPFVKTMVRSYSAELLRDGVSLEQSLGLDFSLEHVERTTPDSIRMACPNNAL

SEQ ID NO: 132751 - protein, 65 aa, Oryza sativa
  Clone ID: PAT_MRT4530_3468C.1.pep
HNIPNLLFLSSIACCLPLPAFSPCMVAVSALLPALFSQCRLLRRAAATASRRRAAAPPTRAFART

SEQ ID NO: 132752 - protein, 208 aa, Oryza sativa
  Clone ID: PAT_MRT4530_34690C.1.pep
MARSPSRSEGGAEDGGTGGGGRGGEVRALLLEPVAVAVVFDDGDDGGRGSKGSRAERTRERRQAGEQQAIVVALIPRLSHSPRSLHEFLSQMRHGEAEGARPLAARVWGKLGDRDEEEGGRDEGVILRLLVSSPILSFYPICNGMNQLILGIKLDDGSVGSELLFADSEQWKSIKRKKGQQTCVQKDNKVLAQYGIACDVNIENLELA

SEQ ID NO: 132753 - protein, 93 aa, Oryza sativa
  Clone ID: PAT_MRT4530_34691C.1.pep
ENAGHYVLIANMYAAAGCWDELATVRKLMRDLGVTKAPGLAWTDLGNGFTPFLVGDRSNPLAPEIYVVLDELSEQMRNINNCSDLDILAENIE

SEQ ID NO: 132754 - protein, 109 aa, Oryza sativa
  unsure (1)..(109): unsure at all Xaa locations
  Clone ID: PAT_MRT4530_34692C.1.pep
PRPPLRSIPPPLLWSVLAVNPPLICPVNSCEIIFLFFFGAVGLGFGLAGSFSDLCGRVSGDYYKHRGALTYFRSVFHPGSNLATKSLGANLLNRPXTNSSTVYNWVYSD

SEQ ID NO: 132755 - protein, 52 aa, Oryza sativa
  Clone ID: PAT_MRT4530_34693C.1.pep
MAWRGVSRGRGHRIRDDSCRDADARALRWGGGGWMEWIGPVMMGCGAATSGH

SEQ ID NO: 132756 - protein, 57 aa, Oryza sativa
  Clone ID: PAT_MRT4530_34694C.1.pep
GAGRGSLGPVTGAIVTGRDSPDVVYTPTPEAAMPRGKAAQEMGSNATGTGGGRARAR

SEQ ID NO: 132757 - protein, 133 aa, Oryza sativa
  unsure (1)..(133): unsure at all Xaa locations
  Clone ID: PAT_MRT4530_34695C.1.pep
LARRSSRTGGRILAHLNSHQPLTHFASLEENLVSHSALLDKALAAAXTYTSESLVVLEAHEAAVPACLDKTEAVLSTDPPLTDFQGTLQXMCGFMDAAAXRFMAACQRELVAVWKEVGPXIVTTSVDPSRLML

SEQ ID NO: 132758 - protein, 76 aa, Oryza sativa
  Clone ID: PAT_MRT4530_34696C.1.pep
QLLTSTRVFTELFERGGGKYTSLISSSSSVRFRLKPSSSRAYNESSSSSLRVSSFFDSPNWDTSSFAKEPLKIGQF

SEQ ID NO: 132759 - protein, 200 aa, Oryza sativa
  unsure (1)..(200): unsure at all Xaa locations
  Clone ID: PAT_MRT4530_34697C.1.pep
WRRRRRRSPTRSSSMPACRRRHRPGRRPAAACRRSATTTSGGSTARPATSRGCCTTAAACPAGARTSSASPASSATSRPASRRGRCPCAALSNSRPAPPTATPSCTRRTARTCSTXATSTRGASRSASSPSAARAPSRATPTRTAASGSTPAPAASARCPGRPASAAPARSACGASSRGTNATVTAKAACLPEMETLPRH

SEQ ID NO: 132760 - protein, 449 aa, Oryza sativa
  unsure (1)..(449): unsure at all Xaa locations
  Clone ID: PAT_MRT4530_34698C.1.pep
IAKVGRAFIRSNSDKYCSPNHSLPSXEGNDVGILYSPTVGVNLISESFAFAYLSDKAVTPTNKFFKHPNGNIIEGFGIVQYVPVRFEDREAVLNFHVFXIQDFDILIGLPIEQLLINMPKLDSLKITLGGNEFSVPFSRARFALTGSLLEIESAEEVTVVPPHKSHETLLENEIPDFIKEEAEPGETLDLPILXENLXFEFILSICNDXKLSEDETQRLLSVLEKHHAALGYSLQDLRGINPALCAHRIPINPESTPSREPQRRLNNAMXEVVKKEVLKLLHAGIIYPVPYSEWVSPVQVVPKKGGMTVVANAQNELIPQRTITGWRMCIDYRKLNKATKKDHFLLPFIDEMLERLANHSFFYFLDGYSGYHQIPIHPEDQSKTTFTCPYGTYAYRRMSFGLCXAPASFQTCMMSIFSDMIEDXYGKTFGHYLQNLDKVLQRCQEKDLL

SEQ ID NO: 132761 - protein, 126 aa, Oryza sativa
  Clone ID: PAT_MRT4530_34699C.1.pep
MGLWKNRRRDMRDGGKGGASNNDQIPGTNRRDEDQELPSCTASHGNRRSARGQRTHFTADTAPTHRHDGCRGPRGKREPIHRASRGGSRRVDARLDLSGLKTTDFNTPARSTLTHLHPLPLSNSER

SEQ ID NO: 132762 - protein, 1819 aa, Oryza sativa
  Clone ID: PAT_MRT4530_3469C.1.pep
MAGHPPNHRGEGMIDFVAELARMTLVVGYPDAPEYTTIPPLSGELPHRVRLEVHGYVGTCLANMAVEASGGTADHACQEAAYLMMARLRERHNYIFHDTAYRYHPSRAHGDGVSSFRPTAGENDTTFGHMCAVMRGLDRMHSDLHKATKALNDGKLMRIVALKDEIARLKKENAQLKGLPAPGGVRIRTTPRKTTKAPVRIQLAPRNPPPAAAPAAPPVPPAAPAAPVPAAPAPAPAFVLSFAPASAVRGPASGIGGWLPATPSGSRDRSSSGSQTGSSETYLPGSRSRSEGPGCLFGMVNTRTGNRTTGEGSNGEERVDGMHPNGDPGNGPPPLPENPTLAQVMAHQTQMMAAMMQQMQQQHQQMHQRMMQYAEQQHQQFGPPPPQSKLPEFLRVRPPTFSSTTNPMEANDWLHAIEKKLNLLQCNDQEKVAFATHQLQGPASAWWDNHMATRPPGTEVTWAEFCRSFRKAQVPDGVVAQKKREFRALHQGNRTVTEYLHEFNRLARYAPEDVRTDAEKQEKFMAGLDDELTNQLISGDYADFERLVDKAIRQEDQRNKMDRKRKAAQFRAHQGSHQRPRFTPGQQGGPTTMIVRQHRPFNPSNFHQGTSGSQNHHGGQPNRGAAPRPPMAPAQSGQPTQAKKETGAKPGSCFNCGELGHFADKCPKPRRAGPRFIQARVNHASAEEAQAAPEVVLGTFPVNSIPATVLFDSGATHSFISKKFVGMHGLIREELSTPMRVHTPGNSSTSVQFSPSITIEIQRSPFLANLILLDSKGLDVILGMDWLTKFKGVIDCANRTVTLTNEKGETVVYKSLVSPRKGVSLNQIETEIPVDTVEKNSRKLDDIPIVCEYPEVFPEDLTTMPPKREIEFRIDLAPGTAPIYKRPYRMAANELAEVKKQVDEQLQKGYIRPSTSPWGAPVIFVEKKDKTKRMCVDYRALNEVTIKNKYPLPRIDDLFDQLKGAKVFSKIDLRSGYHQLRIREEDIPKTAFTTRYGLYECTVMSFGLTNAPAFFMNLMNKVFMEFLDKFVVVFIDDILIYSKSEEEHEQHLRLVLEKLKEHQLYAKFSKCDFWLTEVKFLGHVITAQGVAVDPSNVESVTKWTPPKTVSQIRSFLGLAGYYRRFIENFSRIARPMTQLLKKDEKFKWTAECDKSFEELKKKLVSAPVLILPDQMKDFQVYCDASRHGLGCVLMQEGRVVAYASRQLRPHEGNYPTHDLELAAVVHALKIWRHYLIGNRCEVYTDHKSLKYIFTQPDLNLRQRRWLELIKDYDMSIHYHPGKANVVADALSRKSYCTALCTEGMCEELRQEFEHLNIGIVEHGFVAALEARPTLVDQVRAAQVNDPEIAELKKNMRVGKARDFLEDEHGTIWMGERLCVPDDKELKDLILTEAHQTQYSIHPGSTKMYQDLKEKFWWVSMRREIAEFVALCDVCQRVKAEHQRPAGLLQPLQIPEWKWEEIGMDFITGLPRTSSGHDSIWVVVDRLTKVAHFIPVHTTYTGKRLAELYLARIMCLHGVPRKIVSDRGSQFTSKFWQKLQEELGTRLNFSTAYHPQTDGQTERVNQILEDMLRACALDFGGAWDKSLPYAEFSYNNSYQASLQMAPFEALYGRKCRTPLFWDQTGERQLFGTEVLAEAEEKVRIIRERLRIAQSRQKSYADNRRRELTFEAGDYVYLRVTPLRGVHRFQTKGKLAPRFVGPYKILERRGEVAYQLELPSNMIGIHDVFHVSQLKKCLRVPEEQADSEHIDIQEDLTYVEKPVRILDTSERRTRNKVTRFCRVQWSHHSEEEATWEREDELKAAHPHLFTSSSESRGRDSV

SEQ ID NO: 132763 - protein, 295 aa, Oryza sativa
  unsure (1)..(295): unsure at all Xaa locations
  Clone ID: PAT_MRT4530_346C.1.pep
IYTTNHLSQEFRNGVVEFLNVVDNDKRXLRNGYMVCPCVDCRNEKMFLERVLVQSHLIHRGFIKDKTCWTRHREQEPSNIPVTEVRDVXNMEQDRDYMFVPSPLGGDIINVIPDTLGNIKESAYNERDYEKFSTLVTDSKKPLYPGXQAKHTKLYDMLDHMKLKANNGWLHKSFSELFXFMDLLDLLKDLLPEGNKMPXTTYDAKQVLCPLEAGXLIRRIHVCXMTYCSTNXYTNFDACSVSAISQYKXNNGSAEGKKLKMISLAKVVWYLPITDHIKKMFANPTEVELVCWHKR

SEQ ID NO: 132764 - protein, 385 aa, Oryza sativa
  Clone ID: PAT_MRT4530_34700C.1.pep
MGEEEKKEAAKAKEEEKPKQEEKPKEQEEGKKEEKPKEEGEKGKDGGGGEEKKDGEAAAAADAPPPPPPPEEVVMRVYMHCEGCARKVRKILKGFDGVEDVIADSKAHKVLVKGKKAAADPMKVVERVQKKTGRKVELLSPMPPPPEEKKEEEKKEEPEPPKPEEKKEPPVIAVVLKVHMHCEACAQGIRKRILKMKGVQSAEPDLKASEVTVKGVFEEAKLAEYVHKRTGKHAAIIKSEPVAPPEKVAAEGGDEKKAAEGGDEKKDEKEEKKDGKEEGGNGGGDEKKEEKEKEKEGGNADGEEKDKDKEKDPAAIAAANLYLHYPRFAFPAGYYPPGPGYAYPPPYPPSYPPPYQPSYPPYPSHPSHHPSQIFSDENPNACSVM

SEQ ID NO: 132765 - protein, 44 aa, Oryza sativa
  Clone ID: PAT_MRT4530_34701C.1.pep
LFQSMKSTVFLFLLVCLVYGGGACLLGKTPRLPIVADAAERQVM

SEQ ID NO: 132766 - protein, 147 aa, Oryza sativa
  unsure (1)..(147): unsure at all Xaa locations
  Clone ID: PAT_MRT4530_34702C.1.pep
PGCRNRHERVPFPPGSHGADRARPPPPAASPSPXLPPQQESPPIRSPARPPHQPSLLRPPPPXPVSRPPPNTAPRARPPLAPXDDCLTPPPQPASPLSPRSPPQSGLPPPSLHRRNRFGDFLPTLNAAALRSSLPPSPMPVASPRIP

SEQ ID NO: 132767 - protein, 148 aa, Oryza sativa
  Clone ID: PAT_MRT4530_34703C.1.pep
MAAISTTTAAYFSSQPQLPATAAAKSGGRQQQRRRSSFVMLEAAAASGSGGGGGGAVGRTRSLTEEDLEELKGCLDLGFGFAYHEIPELCGTLPALELCYSMTRRFLDEQRAPGQEPESPATPPLPNWRISGPGAPIAVLYRVGRGFG

SEQ ID NO: 132768 - protein, 421 aa, Oryza sativa
  unsure (1)..(421): unsure at all Xaa locations
  Clone ID: PAT_MRT4530_34704C.1.pep
MGVQHAIGTEHTVAAVHVKPATTTTMAGRTSSSSTTTLGTAHARKRKERAPRHNRSTAAHSPLSGYSLMGYIKDIPTLKGDNYEEWKRELDLAFILGEVDWVLTTPCPIEPAEIFRGEKESDAEWQKRERDNASLIMSYDIEHAKWSSANKNCLAAVKNTIEPTILGSIPEYDTVSKYLESIKSQFSGSSKFYATQLIKQLVTERYHGGGVKDHILRMSNMASKLKQKDLGISDDFLVHLVLSSLPKNFDNLVVNYKISTENWNIEELISNCVQEEERHKETNGDSINLVKDNKEKSHRSPSSKEKQPQHLPQKQQFTVETRSVSTLQEDKTFQERSSXLPDSDHGKERSTWWIDSGATIHVCNCLKGFRSMRTMQRSERSIRVANGVEAKVEAGDLRLELANGFTLLLPDVFMFLLCKET

SEQ ID NO: 132769 - protein, 100 aa, Oryza sativa
  Clone ID: PAT_MRT4530_34705C.1.pep
ALFRSQLFLQNSIFSITSKLSYTHKLPTFPITSFPISTKFSILGELNTPIVLGPVSISTILGVRCSFNDTVCTSFLQSHTRSHFHCNSQHASAMFQIALV

SEQ ID NO: 132770 - protein, 330 aa, Oryza sativa
  unsure (1)..(330): unsure at all Xaa locations
  Clone ID: PAT_MRT4530_34706C.1.pep
MAPTSWSADAAGTPRARWCAWLDAKPARSVVYVCFGSLTWFPHEQVAKARHGAHGLRRELHEVGEERHEEVDGDSEDPASSQLGRSSALSCLPVSPAASAGQGDIHANTTCTSSLVEHLNILARMLETATDFLNWDGSGRGPRERGGSAELNGSAGPRRRPKARAGGEERGSRWAGSIPRGPGWDPLVGGSAYPTRAGERKTKAPAANGRRAAAVSPGRRATTRGDGVYTGMARENERERANGLDSPEGARRRRIAAAATGGEXKGKRRRGHEGPIPGGESIYAATGIHPLRRIRQSYAERGRRRETLSSSGXDGGKHIASGGSSRGGAS

SEQ ID NO: 132771 - protein, 521 aa, Oryza sativa
  Clone ID: PAT_MRT4530_34707C.1.pep
MARTSSSSNASTGHIPKPFSLNLYFFQSFNPNRTTQLDLNLGDPIDNPNNGGYSLMGYIKDIPTLKGYNYEEWKRELDLAFILGEVDWVLTTPCPIEPADLVRGEKESDAEWQKRERDNAPLIMSYDIEHVKWSLANKNCLAAVKDTIEPTILGSIPEYDTVSKYLESIKSQFTGSSKFYATQLIKQLVTERYHGGGVKDHILRMSDMASKLKPMDLGISDAFLVHLVMTSLPKNFDNFVVNYKISPEKWNLEELISNCVQEEERIKETNGASNNLVKDNKEKSHWGSSVVREIDLEERRVSVPAPSTQEPFFSLPADVVPPMHDVAVPTHVVISPVATMNESEEPILQDSTEIIATLEEELQQPQTDNVPEQEAPRRSEIDRRSAIHDDYHVHNIEESHMEDDPTSYEEAMRSARSSEWLEAMKDEIKLMKLNNVWDLEEIPKEAKTVGCKWVYKTKYDSRGHMEKFKARLVAKGFTQREGIDYNETFSLVSCKDSLRITMALVAHYDLELHQMDVKRHF

SEQ ID NO: 132772 - protein, 264 aa, Oryza sativa
  unsure (1)..(264): unsure at all Xaa locations
  Clone ID: PAT_MRT4530_34708C.1.pep
IYIEKVLKKFNMYICSATPAPIVKGEKYGASQCPRNQYELNEIKIKPYASTVGSLQYAQVCTRPDLAFVTGLFGRLQSNPGLEHWNXKDYLQRTKXLMLSYRKSESLHIVGYSNSDFAKDNTKLTSGYMFTLAVGAISWKSSKQTTTAGSTMYAEFIACHEATGQVNWLMKFIPGXLKVVDSIEKPLKLYCDKEPTVMYSHNNXSSGAAKHIDIKYYVVKDKVQDQTISLEHIRTERMLADPLMKGLPPNMFKEHVACMGFKGS

SEQ ID NO: 132773 - protein, 1370 aa, Oryza sativa
  Clone ID: PAT_MRT4530_34709C.1.pep
MGCIKDIPTLKGDNYAEWKRKLDLAFILGEVDWVLTTPCPIEPADLVRGENESDADWQKRQRDNAPLVMSYDIEQKKWSLANKKCLAVVKNTIEPTILGSIPECDAVSEYLERIKSQFTGSSKTYATQLIKQLVTERYHGGGVRDHILRMSNMASKLKPMDLGITDDFLVHLVMASLPKQFDNFIVNYNISPEKWNFEKLIANCVQEEERIKESNGGSINYVKDKKKNHKSPTSKGKQSQHLPQQQQFAVEKDQCLHCKKTGHYKKDCPDFLKMIMAKKGENIITFVNESHYVGYSRSTWWIDSGATIHACNCLKAFRSTRTTQRRESTIRVANGVEEKVEAVGDLPLELANGFILLLRDVFYVPSLQRNLISVSKLDFDGHDCRFGSGKCELWHNNACIGLAVLRDELYLLSLSENVNVVSSLTKENKKRKRTPDVSSKLWHCRLGHISRGRIERLVKNEILPPLEFSDLEQCIECIKGKFVKSIKKGAKRSAGILEIIHTDICDDYSRYGYIYPIKERSEALDKFKIFKAEVENQHDIKIKVVRSDRGGEYYGRHTPYGQVPGPFARFLLENGIVAQYSTPGEPQQNGVAERRNRTLMDMVRSMMSYSTLPLGLWMEALKTAIHILNRVPSKSVPKTPYELWTGRVPSLTHLRVWGSPAEAKVFNPNIGKLDPKTVSCHFIGYPERSKGYRFYCPNSYTKFVKTRHAVFLEDEMIKGSSVVREIDLEERRVSVPAPSTQEPFFSLPADVVPAMPVIEVPAPVVTPPVATMNESEEPVIQDSTEMVATPEEELQQPQIDNVPVQETHQEPQVQDVPNVQAPRRSERVRRSAIRDDYKVYNIEESHMEDDPTSYEEAMRSARSSEWLEAMKDEMKSMKLNDVWDLEEIPKGAKTVGCKWVYKTKYDSRGNIEKFKARLVAKGFTQREGIDYNETFSPVSCKDSFRIIMALVAHYDLELHQMDVKTAFLNGDLEEKVYMAQPKGFVMKGNENMGCRLKRSIYGLKQASRQWYLKFDGTIKKFGFQENVEDNCIYSKFKNGRFIFLILYVDDILLASSDVSLLQETKKFLSSNFDMKDLGEASYVLGIEIHRDRTKYALGLSQKTYIEKVLKKFNMYRCSATPAPIMKGEKYGASQCPRNQYELNEMKTKPYASAVGSLQYAQVCTRPDLAFVTGLLGRFQSNPGLEHWKLVKKVLRYLQGTKGLMLSYRRSESLQIVGYSDSDFAKDNTKSTSGYVFTLTGGAISWKSSKQTITAGSTMYGEFIACYEATGQVNWLKKFIPGLKVVDSIEKPLKLYCDNEPAVMYAHNNQSSGAAKHIDIKYYVVKDKVRDQTISLEHIKTERMLADPLTKGLPPNVFKEHVAGMGLREAL

SEQ ID NO: 132774 - protein, 136 aa, Oryza sativa
  unsure (1)..(136): unsure at all Xaa locations
  Clone ID: PAT_MRT4530_3470C.1.pep
MQDIHDFSMNGVGGGGXRRGRFXXGXIXXGGGGDRRMRAHXNNILNHHQSLKCPRCNSLNTKFCYYNNYNLSQPRHFCKNCRRYWTKGGVLRNVPVGGGCRKAKRSKTKQVPSSSSADKPTTTXDDHHGEEKSSPG

SEQ ID NO: 132775 - protein, 486 aa, Oryza sativa
  unsure (1)..(486): unsure at all Xaa locations
  Clone ID: PAT_MRT4530_34710C.1.pep
SRNFQFFGNHRNSGATEIANSDHAIWKARILVIVRGARLEGXIGADQAPVVILREKEGEKEIIINKPDCDEWISTNQQVLSYLLSSMTKDLLVQVATCSTTASAWSMIQEMFGSMTRARTINTRLSLTTLQKGDMNITTFVGKVRPLANELAIIGKPIDDDDLISYIIAGLDEEYVPVISSIVGRPDQVTVSEAFAXLISFKQRLALCQSGEWRILASANSASCVQGQQQGVRGGGGQQSMTENVNXERSRNGGNXSRGRGSPSGGRRNIGGVDNRPKCQLCYKRGHTVKDCXYRFDEDYVPXDERFAGSAAFYGIDFNWYLDTGATNHVTGELEKLIVRGKYHGNDQIHIASGACMEISHMVILLFRSLVEIYSXKSVLYVPKAKKNLVSSHRLTCDXLAYIVIELVYRKFFFIKDLAMRRTLLXGRCHKGLYALPSSSSNQTHTRSSPGMPTPRRLPPFGQWKTMSWDYITCVIRHQVLNPNLP

SEQ ID NO: 132776 - protein, 999 aa, Oryza sativa
  unsure (1)..(999): unsure at all Xaa locations
  Clone ID: PAT_MRT4530_34711C.1.pep
MSYDIEYKKWSLTNKKCLAVVKNTIEPTILGSIPECDAVSEYLERIKSQFTGSSKTYATQLIKQLVTERYHGGGVRDHILRMSNMASKLKPMDLGITDDFLVHLVMASLPKHFDNFIVNYNISPEKWNFEKLIANCVQEEEKIKESNGGSINYVKDNKKKNYKSPSSKAKQPQHLPQQQQFAVEKDQCLHCKKTGHYKKDCPDFLKMIMAKKGKNIITFVNESHYVGYSRSTWWIDSGATIHACNCLKAFRSMRTTQRSESSIRVANGVEEKVDAVGDLSLELANGFTLLLRNVFYVPSFQRNLISVSKLDFDGYDCRFGSGECELWGRIERLVKNEILPPLEFSDLEQCIECIKGKFVKNIKKGAKRSAGFLEIIHTDICGPFPVKSVDGYDSFITFTDDYSRYSYIYPIKERSEALDKFKIFKAEVENQHDMGKSLDLFLLQAERRNRTLMDMVRSMMSYSTLSLGLWMEALKTAIHILNRVPSKSVPKTPYELWTGRVPSLAHLRVWGSPAEAKIFNPDLRKLDPKTDSTEIIATPEEELQQPQTDNVPVQETQQEPHIQNVPNVEAPRRSERVRRSAIRDDYQVYNIEESHMEDDPTSYKEAMRSARSSEWLEAMKDEMKSMKLNDVWDLEEIPKGAKTVGCKWVYKTKYDSRGNIEKFKARLVAKGFTQREGIDYNETFSPVSCKDSFRIIIALMAHYDLELHQMDVKTTFLNGDLEEKETKKFLSSNFDMKDIGEASYVLGIEIHRDRTKYALGLSQKAYIEKVLMKFNMYRCSATPAPIVKGEKYGASQCPRNQYELNEMKTKPYASAVGSLQYAQVCTRPDLAFVTELLGRFQSNPGPKHWKLVKKVLCFWKGTKGLMMSYRRLESLQIVGYSDSDFAKDNTKSTSGYVFTLAGGAISWKSSKQTITAGSTMYAEFIACYEATGQVNWLKKFISGLKVVDSIEKPLKLYCDNEPAVMYAHNNQSSGAAKHIDIKYYVVKDXRDQTISLEHI

SEQ ID NO: 132777 - protein, 1335 aa, Oryza sativa
  Clone ID: PAT_MRT4530_34712C.1.pep
MSGASSSTNSSTGGYSLMGCIKDIPTLKGDNYAEWKRKLDLAFILGEVDWVLTTPCPIEPAELVRGENESDADWQKRQRDNAPLVMSYDIEQKKWSLANKKCLAVVKNTIEPTILGSIPECDAVSEYLERIKSQFTGSSKTYATQLIKQLVTERYHGGGVRDHILRMSNMASKLKPMDLGITDDFLVHLEERIKESNGGSINYVKDKKKNHKSPTSKGKQSQHLPQQQQFAVEKDQCLHCKKTGHYKKDCPDFLKMIMAKKGENIITFVNESHYVGYSRSTWWIDSGATIHACNCLKAFRSTRTTQGRESTIRVANGVEEKVEAVGDLPLELANGFTLLLRDVFYVPSLQRNLISVSKLDFDGYDCRFGSGKCELWHNNACIGLAVLRDELYLLSLSENVNVVSSLTKENKKRKRTPDVSSKLWHCRLGHISRGRIERLVKNEILPPLEFSDLEQCIECIKGKFVKSIKKDDYSRYGYIYPIKERSEALDKFKIFKAEVENQLDIKIKVVRSDRGGEYYGRHTPYGQVPRPFARFLLENGIVAQYSTPGEPQQNGVAERRNRTLMDIVRSMMSYSTLPLGLWMEALKTAIHILNRVPSKSVPKTPYELWTGRVPSLTHLRVWGSPAEAKVFNPNIGKLDPKTVSCHFIGYPERSKGYRFYCPNSYTKFVETRHAVFLEDEMIRGSSVVREIDLEERRVSVPAPSTQEPFFSLPADVVPAMPVIEVPAPVVTPPVATMNESEEPVIQDSTEMVVTPEEELQQPQIDNVPVQETHQEPQVQDVPNVQAPRRSERVRRSAIRDDYKVYNIEESHMEDDPTSYEEAMRSARSSEWLEAMKDEMKSMKLNNVWDLEEIPKGAKTVGCKWVYKTKYDSRGNIEKFKARLVAKGFTQREGIDYNETFSPVSCKDSFRIIMALVAHYDLELHQMDVKTAFLNGDLEEKVYMAQPKGFVMKGNENMGCRLKRSIYGLKQASRQWYLKFDGTIKKFGFQENVEDNCIYSKFKNGRFIFLILYVDDILLASSDVSLLQETKKFLSSNFDMKDLGEASYVLGIEIHRDRTKYALGLSQKTYIEKVLKKFNMYRCSATPAPIMKGEKYGASQCPRNQYELNEMKTKPYASAVGSLQYAQVCTRPDLAFVTGLLGRFQSNPGLEHWKLVKKVLRYLQGTKGLMLTYRRSESLQIVGYSDSDFAKDNTKSTSGYVFTLAGGAISWKSSKQTITAGSTMYAEFIACYEATGQVNWLKKFIPGLKVVDSIEKPLKLYCDNEPTVMYAHNNQSSGAAKHIDIKYYVVKDKVRDQTISLEHIKTERMLADPLTKGLPPNVFKEHVAGMGLREAL

SEQ ID NO: 132778 - protein, 175 aa, Oryza sativa
  Clone ID: PAT_MRT4530_34713C.1.pep
MARRREEVDWVLTIPCPIEPAALVRGENESDADWEKRQRDNALLIMSYDIEHKKWFLANKKCLAVLIKQLVTERYHGGGVRDHILRMSNMASKLKPMDLGLTDDFLVHLVMASLPKQFDNFIVNYNISPEKWNFEKLIANCVQEEERIKESNGGSINYVKDNKKKNHKSPTSKAK

SEQ ID NO: 132779 - protein, 832 aa, Oryza sativa
  Clone ID: PAT_MRT4530_34714C.1.pep
MTEEKESFEGQWAPSDVTEENLKEMVAHGVLPAKEIIGWRPACGEAFPTPDTHEVVVFSHFFYGGFALPTSKFFRGILNFYGISLHHLNPNSIVHIANFVHVCEAFLGIRPHFALFRRIFFLKPQPNKNKPCVVGGAGFQLRGTLSQKYFSMPFKTSNKGWHANWFYIQNPEPALPEYSCLPPVYQDTWNSLPIGDEAAQALELMERMLKLKEQGLQGEQITRHFIKCRLAPIKERSRTAFEFDGKHDPNREDPDSLDFKIMKERMYKIFSNAIVVSYSHQLPVVPYNAFNPPPQEYVLMKSDPPTAQRRSPRQHTVQGSGGPTIRSDPQPQTSKPAGQTGSRKRKLVLNDDEDDDSNKSGDKGTPNKPPKHTMPRKKLAGRQMPKIRTSSRKPSDIDPTGKEPDPAATEPNLSKDAKPTAESQPTAESQPTAESQPTGAQASDDKANPSDQPLTGNQSAATETATTREPPTGNQSDVDLNQEIPEAKAQTTSQGPEVGNDSVIGSPDKEQGSPHAQPGTSSGPLGGDEEEILRIKAADDSRPPILLKWWDENSQVSGIVINRQKEDEEVCQLKKVLGEATRIVNRIHLRNEAKTTTLEKLVPHLGTLEAVRSQLHEAKEHAKKTEKELRERIAQLQDSNFELSGSSKAQATRMTQMEKQIEALKRDKVELAAERDSALKEVEDRKIKSQAQFDVLVGKIKKLEGARDEVANVATPLVQAMFLNNSGPSALDATEIFDKLRVAPDVYFKNIKKAGSMGASMALAMTKSLYPRIEIDTIDGFADGTSEEAALDLISNAQSAADKIASDVVEQFRNNDLQPSNNNSDDERTDSD

SEQ ID NO: 132780 - protein, 271 aa, Oryza sativa
  unsure (1)..(271): unsure at all Xaa locations
  Clone ID: PAT_MRT4530_34715C.1.pep
MQALIHRRCTSAPRRRPPPPHSXRPAVVRAAAARPRPAVVNADLGGRGGREPPPPQHGRGSPSSTWIWEGGAAGSRRRRSTAAARRRPRRRRTAPARCRQRGSGREGRPGAAAARRRPRRRRXPRPAVVTPDLGGRGGREPPSPPHGRGPPASAPPLHGHGPPSSLQIWEGGAAGSSHRRLNRPRRRGRAAASTLLATTARRRAPPAPLRPDMGGRGQERAAAALHRHRPPPAAAAGRGERRTSNFTSIYIFVGGHLVLKRHAARCPHRRT

SEQ ID NO: 132781 - protein, 55 aa, Oryza sativa
  Clone ID: PAT_MRT4530_34716C.1.pep
HELHVSFRPCLSHQYSSADVFFCPTNHVSSIVASSSANRASHDVSVNEDTQNPPC

SEQ ID NO: 132782 - protein, 1374 aa, Oryza sativa
  unsure (1)..(1374): unsure at all Xaa locations
  Clone ID: PAT_MRT4530_34717C.1.pep
MIISGGYCLMGCIKDIPTLKGDNYAEWKRKLDIAFILGEVDWVLTTPCPIEPAALVRVENESDADWQRRQRDNAPLIMSYYIEQKKWSLVNKKCLAVVKNTIEPTLLGSIPECDTISKYLERIKSQFTGSSKTYATQLIKQLVTERYHGGGVRDHILRMSNMASKLKPMDLGISDDFLVHLVMASLPKHFDNFVVNYNISPEKWNFEKLIANCVQEEERIKESNGDSINYVKDNKKKNYKSPSSKAKQPQHLPXQQQFTVEKDQCLHCKKTGHYKNDCPDFLKIIMAKKGENIITFVNESHYVGYSRSTWWIDSGATIHVSNCLKGFRSTRTTXRSESSIRVANGVEAKVEAVGDLRLELANGFTLLLRDDFYVPSLQRNLISVSKLDFGGXDCHFGNGKCKLWYNNACIGLAVLQDELYLLSLPENVNVVSSLTKENKKRKRTPDVSSKLWHCRLGHISRGRIERLVKNEILPPLELSDLEQCIECIKRKFVKSIKKCAKRSVGIFEIIHTDICGPFPVKSVDGYDSFITFTDDYSRYGYIYSIKERSEALDKFKIFKAEVENQHDIKIKVVRSDRGGXYYGRHTPYGQFHGPFARFLLENGIVAQYSTPGEPQQNGVXERCNRTLMDMVRSMMSYSTLPLGLWMEALKTSIHILNIVPSKLVPKTPYELWTGRVPSLAHLHVWGSPAEAKIFNPNLGKLDPKTVSCHFIGYPERSKGYRFYCPNSYTKFVEMRHAVFLEDEMIRRSSVVREIDLEERQVSVPAPSTQEPFFSLPADVVPAMHDVAVLAPIVTPPVATLNESEEPVLQDSTKIIAIQEEEVQQPQTENVPNVEAPRRSERVRRSAICDDYEVYNIDXSHMEDDPTSYEEAMRSVRSSEXLEAMKDEMKSMKLNDVWDLEEIPKGAKTVGCKWVYKTKYESRGNIEKFKTRLVAKVFTQREEIDYNETFSPVSCKDSFRIIMALVAHYDLELHQMDIKTVFLNGDLKEKVYMAQPKGFVVKGNENMGCRLKRSIYGLKQASRQWYLKFDGTIKKFGFRENIEDNCIYTKFKNGRFIFLVLYVNDILLASSDVSVLQETKKFLSSNFDMKDLGEASYVLGIEIHRDKTKYVLGLSQKTYIEKVLKKFNMYRCSATPAPIVKGEKYGTWRCPKNQYELNEMKTKPYASAVGSLQYAXVCTRPDLAFITGLLGRFQSNPGPEHWKLVKKVLRYLQGTKGLMLSYRRSEPLRIVGYSGSDFAKDNTKSTSGYVFTLAGGAISWKSSKQTITAGSTMYAEFIACYEATGQVNXRKKFIPGLKVVDSIEKPLKLCCDNEPTVMYAHNNQSSGAAKHIDIKYYFVKDKVRDXTISLEHIRTERMLVDPLTKGLPPNVFKEH

SEQ ID NO: 132783 - protein, 817 aa, Oryza sativa
  Clone ID: PAT_MRT4530_34718C.1.pep
MAEEKESFEGQWAPSDVTEENLKEMVAHGVLPAKEIIGWRPACGEAFPTPDTHEAVVFSHFFYGGFALPTSKFFRGILSFYGISLHHLNPNSIVHIANFIHVCEAFLGIKPHFALFRRIFFLKPQPNKRWHANWFYIQNPEPALLEYSCLPPVYQDTWNSLPIGDEEAQALELMDRMLKLKEQGLQGEQITRHFIKCRLAPIKERSRTAFEFDGKHDPNREEPDSLDFKIMKERMYKIFSNAIVVSYSHQLPVVPYNAFNPPPQEYVLMKSDPPITQRRSPRQHTVQGGGGPTIRSDPQPQTSNPTGQTGSRKRKLVLNDDEGDDGNKSGDKGSPNKLPKHTTPRKKLASRPRPKIRTSSRYKPLGTISLRHASLMEIVLNIERTLCRKPSDIDPTGKDPDPTVTEPSSSKDSEPTAESQPTGAHTSGDKANPSDQPSTGNQSAATKTTTTQEPPTRNHSDVGPDQETPEVEAQTTTSQGPEAGNDSMIGSPDKEQGSPHAQLGTSSRPPGDDEEEIPRIKAADDSRPPILLKWWDENSQAAGIVINRQKEDEEVCQLKKALGEATRIVNRIHLRNEAKTATLEKLVPHLGTLEAVRDQLHEAKELAKKTEKELRDRIAQLQDSNFELSGSSKAQAARMAQMEKQIEALERDKVELAAQRDSALKEVEDRKIKSQAQFDVLVGKIKRLEGARDEVANVAIPLVQAMFLNNSGPSVLGATEIFDKQRVAPDVYFKNIKKAGSMRASTALAMTKSLYPRIEIDAIDGFADGTSVEAALDLISNAQNAADKIASDVVDQFRNTDLQPSSNNSDDERTDSD

SEQ ID NO: 132784 - protein, 83 aa, Oryza sativa
  Clone ID: PAT_MRT4530_34719C.1.pep
MGPTWQCLLHSSLLDPGDGEAVGKKRKTSPRRERNGEVVGEPIQAQARPASMRGRWTEERESPDPTEHVEAQRSTPDQLPANK

SEQ ID NO: 132785 - protein, 246 aa, Oryza sativa
  Clone ID: PAT_MRT4530_3471C.1.pep
LSIGLVVSGGTVLLLLALCAPLATHLEKATNNFDKSREVGGGGHGIVYKGILDLHVVAIKKSKIVVQREIDQFINEVAVLSQINHRNVVKLLGCCLETEVPLLVYEFVSNGTLYDHLHVEGPMSVPWDDRLRIALEVARAVAYLHSASSMPIFHRDIKSSNILLDDSLTAKVSDFGASRYIPIDQTGVTTAVQGTFGYLDPMYYYTGRLTDRSDVFSFGVLLVELLTRKKPFILKSWKREMEKSKK

SEQ ID NO: 132786 - protein, 1340 aa, Oryza sativa
  unsure (1)..(1340): unsure at all Xaa locations
  Clone ID: PAT_MRT4530_34720C.1.pep
GYSLMGCIKDIPTLKGDNYAEWKRKLDLAFILGEVDWVLTTPCPIEPADLVRGEKCDAVSEYLERIKSQFTGSSKTYATQLIKQLVTERYNGGGVRDHILRMSNMASKLKPMDLGITDDFLVHLVMASLPKQFDNFIVNYNISPEKWNFEKLIANCVQEEERIKESNGGSINYVKDKKKNHKSPTSKGKQSQHLPQQQQFAVEKDQCLHCKKTGHYKKDCPDFLKMIMAKKGENIITFVNESHYVGYSRSTWWIDSGATIHACNCLKAFRSTRTTQRRESTIRVANGVEEKVEAVGDLPLELANGFILLLRDVFYVPSLQRNLISVSKLDFDGYDCRFGSGKCELWHNNACIGLAVLRDELYLLSLSENVNVVFSLTKENKKRKRTPDVSSKLWHCRLGHISRGRIERLVKNEILPPLEFSDLEQCIECIKGKFVKSIKKGAKRSAGILEIIHTDICGPFPVKSVDGYDSFITFTDDYSRYGYIYPIKERLEALDKFKIFKAEVENQHDIKIKVVRSDRGGEYYGRHTPYGQVPGPFARFLLENGIVAQYSTPGEPQQNGVAERRNRTLMDMVRSMMSYSTLPLGLWMEALKTAIHILNRVPSKSVPKTPYELWTGRVPSLTHLRVWGSPTEAKVFNSNIGKLDPKTVSCHFISYPERSKGYRFYYPNSYTKFVETRHAVFLEDEMIRGSSVVREIDLEERRVSVPAPSTQEPFFSLPADVVPAMPVIEVPAPVVTPPVATLNESEEPVIQDSTEMVATPEEELQQPQINNVPVQETHQEPQVQDVPNVQAPRRSERVRRSAIRDDYKVYNIEESHMEDDPTSYEEAMRSARSSEWLESMKDEMKSMKLNDVWDLEEIPKGAKTVGCKWVYKTKYDSRGNIEKFKARLVAKGFTQREGIDYNETFSPVSCKDSFRIIMALVAHYDLELHQMDVKTAFLNGDLEEKVYMAQPKGFVMKGNENMGCRLKRSIYGLKQASRQWYLKFDGTIKKFGFQENVEDNCIYSKFKNGRFIFLILYVDDILLASSDVSLLQETKKFLSSNFDMKDLGEASYVLGIEIHRDRTKYALGLSQKTYIEKVLKKFNMYRCSTTPAPIMKGEKYGASQCPRNQYELNEMKTKPYASAVGSLQYAQVCTRPDLAFVTGLLGRFQSNPGLEHWKLIKKVLHYLQGTKGLMLSYRRSESLQIVGYSDSDFAKDNTKSTSGYVFTLAGGAISWKSSKXTITAGSTMYAEFIACYETTGQVNWLKKFIPGLKVVDSIEKPLKLYCDNEPAVMYAHNNQSSGAAKHIDIKYYIVKDKVRDQTISLEHIKTERMLADPLTKGLPPNVFKEHVAGMGLREAL

SEQ ID NO: 132787 - protein, 816 aa, Oryza sativa
  Clone ID: PAT_MRT4530_34721C.1.pep
MAEEKESFEGQWAPSDVTEENLKEMVAHGVLPAKEIIGWRPACGEAFPTPDTHEIVVFSHFFYGGFALPTSKFFRGILNFYGISLHHLNPNSIVHIANFVHVCEAFLGIKPHFALFRRIFFLKPQPNKSKPGTLSQKYFSMPFKTSNKGWHANWFYVQNPEPALPGYSCLPPVYQDTWNSLPIGDEAVQALELMDRMLKLKEQGLQGEQITRHFIKCRLAPIKERSRTAFEFDGKHDPNREEPDSLDFKIMKERMYKIFSNAIVVSYSHQLPVVPYNAFNPPPQEYVLMKSDPPIAQRRSPRQHTIQGSGGPTIMSDPQPQTSKPAGQTGPRKRKLVLDDDEGDDSNKSGDKGTPNKLPKHTMPRKKLAGRQMPKIRTSSRKPSDIDPTGKDPDPAVTEQNISKDAEPTAESQPTAESRPTGAHASDDKANPSDQPPTGNQSATTETATTREPPTGNQSDVGPDQEIPEVEAQATSSQGPEAGNDSVVGSPDKEQGSSRAQPGTSSGTLGDDEETIPRIKAADDSRPPILLKWWDENSQVSGIVINRQKEDEEVCQLKKALGEATRIVNRIHLRNEAKTATLEKLVPHLGTLEAVREQLHEAKEYAKKTEKELRERIAQLQDSNFELSGSSKAQATRMAQMEKQIEALKRDKVELAAKRDSALKEVEDRKIKSQAQFDVLVGKIKKLEGARDEVANVATPLVQAMFLNNSGPSALDATEIFDKLRVAPDVYFKNIKKAGSMGASMALAMTKSLYPRIEIDTIDGFADGTSEEAALDLINNAQNAADKIASDVVDQFRNNNLQPSNDNSDDERTDSD

SEQ ID NO: 132788 - protein, 130 aa, Oryza sativa
  unsure (1)..(130): unsure at all Xaa locations
  Clone ID: PAT_MRT4530_34722C.1.pep
FLAPCRRQQFPSIFDILHPSSLAIVNAGKGGMGEGTGRRQGAPRRPCAHQRVHARAGEGARGGAAISFGRPSLSLHSVEGWRARDGEGKEKRWRRGEALPGRRRCKARRREGRRRRRPRVXAVVREREKS

SEQ ID NO: 132789 - protein, 832 aa, Oryza sativa
  Clone ID: PAT_MRT4530_34723C.1.pep
MAEERESFESQWAPSDVTEENLKEMVAHGVLPAKEIIGWRPACGEAFPTPDTHEVVVFSHFFYGGFALPTSKFFRGILNFYGISLHHMNPNSIVHIANFVHVCEAFLGIRPHFALFRRIFFLKPQPNKNKPCVVGGAGFQLRGTLSQKYFSMPFKTSNKGWHANWFYIQNPEPALPEYSCLPPVYQDTWNSLPMGDEAAQALELMERMLKLKEQGLQGEQITRHFIKCRLAPIKERSRTAFEFDGKHDPNREDPDSLDFKIMKERMYKIFSNAIVVSYSHQLPVVPYNAFNPPPQKYVLMKSDPPIAQRRSPRQHTIQGSGGPTIRSDPQPQTSKPAGQTGPRKRKLVLDDDEGDDSNKSGDKGTPNKLPKHTMPRKKLAGRQMPKIRTSSRKPSDIDPTGKDPDPAVTEPNISKDAEPTAESRPTAESQPTAESQPTGAQASDDKANPSDQPPTGNQSAATETATTREPPTGNQSDVDLNQEIPEAEEQTTSQGPEAGNDSVIGSPDKEQGSPRTQPGTSSGPLGGDEETIPRIKAADDSRPPILLKWWDENSQVSGIVINRQKEDEEVCQLKKVLGEATRIVNRIHLRNEAKTTTLEKLVPHLGTLEAVRSQLHEAKEHAKKTEKELRERIAQLQDSNFELSGSSKAQATRMAQMEKQIEALKRDKVELAAQRDSALKEVEDRKIKSQAQFDVLVGKIKKLEGARGEVANVATPLVQAMFLNDSGPSALDATEIFDKLRVAPDVYFKNIKKAGSMGASMALAMTKSLYPRIEIDTIDGFADGTSEEAALDLISNAQSAADKIASDVVDQFRNNNLQPSNDNSDDERTDSD

SEQ ID NO: 132790 - protein, 189 aa, Oryza sativa
  Clone ID: PAT_MRT4530_34724C.1.pep
MWIRRGGVREDPWASWHTWRSPDVADPHGLGDPVAEEDEADPADEEFFQEQPGFDDCELGICPQPNMTVNLERHGLVPVGMVRMAGVDREWLHSMAHALALDTWTWPREDVPGLGLIEGASISLKGVRVCKWARPGGDGTLHVNTVAVVEWKAPVFCFEGGQGMAAGGVLVRQGTHVCTGHGLWEISLR

SEQ ID NO: 132791 - protein, 86 aa, Oryza sativa
  Clone ID: PAT_MRT4530_34725C.1.pep
MVGWSMTRKAARSSGISKQQWRLAWPPLNGGYGILRERWEDHGQRLRRLLDLAKPATTHRVVVGIAISLGYFNTNQCDGGAIYLDE

SEQ ID NO: 132792 - protein, 832 aa, Oryza sativa
  Clone ID: PAT_MRT4530_34726C.1.pep
MAEERESFESQWAPSDVTEENLKEMVAHGVLPAKEIIGWRPACGEAFPTPDTHEVVVFSHFFYGGFALPTSKFFHGILNFYGISLHHMNPNSIVHIANFVHVCEAFLGIRPHFALFRRIFFLKPQPNKNKPCVVGGAGFQLRGTLSQKYFSMPFKTSNKGWHANWFYIQNPEPALPEYSCLPPVYQETWNSLPMGDEAAQALELMERMLKLKEQGLQGEQITRHFIKCRLAPIKERSRTAFEFDGKHDPNREDPDSLDFKIMKERMYKIFSNAIVVSYSHQLPVVPYNTFNPPPQEYALMKSDPPITQRRSPRQHTVQGGGGPKIRPDPQPQTSNPAGQTGSRKRKLVLDNDEGDDDKSGDKGSPNKFPKRTMPKKKLAGRQMPKIRTSSRKPSDIDPTGKDPDPAMTEPNLSKDADPTIESQPTAESQPTAENQPTGAHASDDKANPSDQPPTGNQSATTETATTREPPTGNQSDVGPDEEIPEVEAQTTTSQGPEAGKDSMIGSLNKEQGSPHVQPGTSSGTLGDDEETIPRIKAADDSRPPILLKWWDENSQAAGIVINRQKEDEEVCQLKKALGEATRIVNRIHLRNEAKTTTLEKLVPHLGTLEAVRDQLHEAKEYAKKTEKELRDRIAQLQDSNFELSGSSKAQATRMAQMEKQIEALKRDKVELAAQRDSALKEVEDRKIKSQAQFDVLVGKIKKLEGARDEVANVATPLVQAMFLNNSGPSALDATEIFDKLRVAPDVYFKNIKKAGSMGASMALAMTKSLYPRIEIDTIDGFADGTSEEAALDLISNAQSAADKIASDVVDQFRNNDLQPSNNNSDDERTDSD

SEQ ID NO: 132793 - protein, 58 aa, Oryza sativa
  Clone ID: PAT_MRT4530_34727C.1.pep
MVSGPADRRWILKRRCNCQGYGEAFAVIVITGGSYLTVSSLLRMRKLVGGRGRKGLAG

SEQ ID NO: 132794 - protein, 827 aa, Oryza sativa
  Clone ID: PAT_MRT4530_34728C.1.pep
MAEEKESFEGQWAPSDVTEENLKEMVAHGVLPAKEIIGWRPACGEAFPTPDTHEIVVFSHFFYGGFALPTSKFFRGILSFYGISLHHLNPNSIVHIANFVHVCEAFLGIKPHFALFRRIFFLKPQPNKRKPCVVGGAGFQLRGTLSQKYFSMPFKTSNKGWHANWFYVQNPEPALPEYSCLPPVYQDTWNSLPIGDEAAQALELLDRMLKLKEQGLQGEQITRHFIKCRLAPIKERSRTAFEFDGKHDPNCEEPDSLDFKIMKERMYKIFSNAIVISYSHQLPVVPYNAFNPPPQEYVLMKSDPPIAQRRSPRQHTIQGSGGPTIRSDPQPQTSKPAGQTGPRKRKLVLYDDEGDDSNKSGDKGTPNKLPKHTMPRKKLAGRQMPKIRTSSRKPSDIDPTGKDPDPAVTEQNISKDAEPTAESQPTAESQPTGAHSSDDKANPSDQPSTGNQSATTETATTREPPTGNRSDVGPDQEIPEVEAQATASQGPEAGNDSVVGSPDKEQGSSRAQLGTSSGTLGDDEETIPRIKAADDSRPPILLKWWDENSQVSGIVINRQKEDEEVCQLKKALGEATRIVNRIHLRNEAKTTTLEKLVPHLGTLEAVRDQLHEAKECAKKTEKELRDRIAQLQDSNFELSGSSKAQATRMAQMEKQIEALKRDKVELAAERDSALKEVEDRKIKSQAQFDVLVGKIKKLEGARDEVANVATPLVQAMFLNDSGPSALDATEIFDKLRVAPDVYFKNIKKAGSMGASMALAMTKSLYPRIEIDTIDGFADGTSEEAALDLINNAQSAADKIASDVVEQFRNNDLQPSNNNSDDERTDSD

SEQ ID NO: 132795 - protein, 670 aa, Oryza sativa
  Clone ID: PAT_MRT4530_34729C.1.pep
MPFKTSNKGWHANWFYVQNPEPALPEYSCLPPVYQDTWNSLPIGDEAAQALELMDRMLKLKEQGLQGEQITRHFIKCRLAPIKERSRTAFEFDGKHDPNREEPDSLDFKIMKERMYKIFSNAIVVSYSHQLPVVPYNAFNPPPQEYALMKSDPPITQRRSPRQHTVQGGGGPTIRSDPQPQTSNPTGQTGSRKRKLVLDNDEGDDDNKSGDKGSPNKLPKRTMPRKKLANRPTPKIRTSSRKPSDIDPTGKDPDPAVTGPSSSKDPEPTAESQPASAHASGDKADPSDQPPTGNQSAAAETATTQEPPTGNQSDVGPDQEIPEVEAQTTTSQGPEAGNDSMIGSPNKEQGSRHAQLGTSSGTPGDDEEAIPRIKAADDSRPPILLKWWDENSQVAGIVINRQKEDEEVCQLKKALGEATRIVNRIHLRNEAKTTTLEKLVPHLGTLKAVRDQLHEAKELAKKSEKELRDRIAQLQDSNFELSGASKAQAARMAQMEKQIEALKKDKAELAAQRDSALKEVEDRKIKSQAQFDVLVGKIKRLEGARDEVANVATPLVQAMFLNNSGPSALDATEIFDKLRVAPDVYFKNIKKAGSMGASMALAMTKSLYPRIEIDAIDGFADGTSEEAALDLISNAQNAADKIAGDVVDQFRNTDLQPSSNNSDDEKTDSD

SEQ ID NO: 132796 - protein, 148 aa, Oryza sativa
  unsure (1)..(148): unsure at all Xaa locations
  Clone ID: PAT_MRT4530_3472C.1.pep
PTPHLPQKPTQNHFHNHHLQPKPSAPIKKPHFPSLHRRPPPTKRRRRPSTKXRRNGLQQRTHCTRCPPPQAAFQYQRPCWSVHRPGGRRRPRAPWRWPAVAAWTSERPTSSGGYSGSSGPTRAPACSNMPSMFVVCSTFWCNLYTCPK

SEQ ID NO: 132797 - protein, 66 aa, Oryza sativa
  Clone ID: PAT_MRT4530_34730C.1.pep
MESTMDSGEEEEEEEDTPREQLWSHDAVVIEMERNRNAAKADISINGSITALHVLRIQDYSTGWLE

SEQ ID NO: 132798 - protein, 813 aa, Oryza sativa
  Clone ID: PAT_MRT4530_34731C.1.pep
MAEEKESFEGQWAPSDVTEENLKEMVAHGVLPAKEIIGWRPACGEIFSTPDTHEIVVFSHFFYGGFALPTSKFFRGILSFYGISLHHLNPNSIVHIANFIHVCEAFLGIRPHFALFRRIFFLKPQPNKNKPCVVGGAGFQLRGTLSQKYFSMPFKTSNKGWHANWFYVQNPEPALPEYSCLPPVYQDTWNSLPIGDEAAQALELLDRMLKLKEQGLQGEQITRHFIKCRLAPIKERSHTAFEFDGKHDPNREEPDSLDFKIMKERMYKIFSNAIVVSYSHRLPVVPYNAFNPPPQHTVQGSGGPTIRSDPQPQTSKPAGQIGPRKRKLVLNDDEGDDSNKSGDKGTPNKLPKHTMPRKKLAGRQIPKIRTSSRKPSDIDPTGKDPDPAVTEPNLSKDAEPTAENQPTAESQPTAESQPTGTQASDDKANPSDQPPTGNQSATTETATTREPPTGNQSDVDLNQEIPEAEAQTTSQGPKVGNDSVIGSPDKEQGSPHAQPGTSSGPLGGDEEEILRIKAANDSRPPILLKWWDENSQVSGIVINRQKEDEEVCQLKKVLGEATRIVNRIHLRNEAKTATLEKLVPHLGTLEAVREQLHEAKEHAKKTEKELRERIAQLQDSNFELSGSSKAQATRMTQMEKQIEALKKDKVELAAERDSALKEVEDRKIKSQAQFDVLVGKIKKLEGARDEVANVATPLVQAMFLNNSGPSALDATEIFDKLRVAPDVYFKNIKKAGSMGASMALAMTKSLYPRIEIDTIDGFADGTSEEAALDLISNAQSAADKIASDVVEQFRNNDLQPSNNNSDDERIDSD

SEQ ID NO: 132799 - protein, 816 aa, Oryza sativa
  Clone ID: PAT_MRT4530_34732C.1.pep
MAEEKESFEGQWAPSDVTEENLKEMVAHGVLPAKEIIGWRPACGEIFPTPDTHEIVVFSHFFYGGFALPTSKFFRGILNFYGISLHHLNPNSIVHIANFVHVCEAFLGIKPHFALFRRIFFLKPQPNKSKPCVVGEAGFQLRGTLSQKYFSMPFKTSNKGWHANWFYVQNPEPALPEYSCLPPMYQDTWNSLPIGDEAVQALELMDRMLKLKEQGLQGEQITRHFIKCRLAPIKERSRTAFEFDGKHDPNREEPDSLDFKIMKERIYSHQLPVVPYNAFNPPPQEYTLMKSDPPVTQRRSPRQHTVQGGGGPAIRPDPQPQTSQPTGQTGSRKRKLVLNDDEGDDGDKSGDKGSPHKLPKRSMPKKKLAGRQMPKIRTSSRKPSDIDPTGKDPDPAVTEPNISKDAEPTAESQSTAESQPTGAHASDDKANPRDQPPTGNQSATTETATTREPPTGNQSDVGPDEEIPEVEAQTTTSQGPEAGKDSMIGSLNKEQGPPHVQPGTSSGTLGDDEETIPRIKAADDSRPPILLKWWDENSQVAGIVINRQKEDEEVCQLKKALGEATRIVNRIHLRNEAKTTTLEKLVPHLGTLEEVRDQLHEAKEYAKKTEKELRDRIAQLQDSNFELSGSSKVQATRMAQMEKQIEALKRDKVELAAERDSALKEVEDRKIKSQAQFDVLVGKIKKLEGARDEVANVATPLVQAMFLNNSGPSALDATKIFDKLRVAPDVYFKNIKKAGSMGASMALAMTKSLYPRLEIDTIDGFADGTSEEAALDLISNAQSAADKIASDVVEQFRNNDLQPSNNNSDDERTDSD

SEQ ID NO: 132800 - protein, 378 aa, Oryza sativa
  Clone ID: PAT_MRT4530_34733C.1.pep
PSQRPNPSFSSSSFQITPFVLGILCAAAPASRKSNHPYLFWFSCLAAAAAAVDFDLGRGGGGGVGLVGVAAAAEPPVMEERQAVNPACPNAANPFHRCADYCPVPAPAAATAKPPPPPPSSRPAQNGTAAPQNGTAAAQNGIAEQNGSTHSDGELQAKPRRRDRAGGSGGLPFYVFLREGADGDGKKVDPRCPNAPNPFHVCTEHCAAKMAEVSRSSEGGKSPMSLFSRHSRRSSSSEDGSVRSGSSKKVDPKCPNAGNPFHECTEHCAAKMKEVGQQNKTVKKSSSRKKGGKEISVVQNWKVDPRCPNASNPFHICAQYCFDHLNETGQKDTSKPDSRKGKAVVKAEQTGEINPDCVNASNPYHKCGEHCKRKGDRC

SEQ ID NO: 132801 - protein, 800 aa, Oryza sativa
  Clone ID: PAT_MRT4530_34734C.1.pep
MAEEKESFEGQWAPSDVTEENLKEMVAHGVLPAKEIIRWRPACGEAFPTPDTHEAVVFSHFFYGGFALPTSKFFRGILSFYGISLHHLNPNSIVHIANFVHVCEAFLGIKPHFALFRRIFFLKPQPNKSKPCVVGGAGFQLRGTLSQKYFSMPFKTSNKGWHASWFYIQNPEPALPEYSCLPPVYQDTWNSLPIGDEAAQALELMDRMLKLKEQGLQGEQITRHFIKCRLAPIKERSRTAFEFDGKHDPNREEPDSLDFKIMKERMYKIFSNAIVVNYSHQLPVVPYNAFNPPPQEYVLMKSDPPITQRRSPHQHTVQGGSRKRKLVLNDDEGDDGNKSGNKGLPNKLPKHTTPRKKLASRPMPKIRTSSRKPSDIDPTGKDPDPAVTEPSSSKDSEPTAESQPTGAHTSGDKADPSDQPPTGNQSAATETTTTQEPPAGNQSDVGPDQEIPEVEVRTTTSQGPEAGNDSMIGSPNKEQGSPHAQLGTSSGPPGDDEEEIPRIKAADDSRPPILLKWWDENLQAAGIVINRQKEDEEVCQLKKALGEATRIVNRIHLRNEAKTATLEKPVPHLGTLEAVRDQLHEAKELAKKTEKELRDQIAQLQDSNFELSGSSKAQAARMAQMEKQIEALERDKVELAAQRDSALKEVEDRKIKSQAQFDVLVGKIKRLEGARDEVANVATPLVQAMFLNNSGPSALDATEVFDKLRVAPDVYFKNIKKAGSMGASTALAMTKSLYPRIEIDAIDGFADGTSVGAALDLISNAQNTADKIASDVVDQFRNTNLQPSSNNSDDEKTDSD

SEQ ID NO: 132802 - protein, 72 aa, Oryza sativa
  Clone ID: PAT_MRT4530_34735C.1.pep
PEHTSRCSGKITRKHNSDSQMWVPSRPARSKPEGVTAARHADLVVNLRAHYHASFLLFRPEQRLSVQGSRPA

SEQ ID NO: 132803 - protein, 863 aa, Oryza sativa
  Clone ID: PAT_MRT4530_34736C.1.pep
MENMLDRDNMVSEQSIHGIPIREMQWTTHGGSDDCWGQDLSHGGDTVRGARQVFDEMPSRLGSAAGAALHVQVNHLIYPVSTNVMHQVFNPYGAVAVQMLAVDAWRVEAIVWFRTTCDAEWAQDELHGRNIYDGGCVLDVQHVPTSLEDRADTAPTKCLMQVPGCATTKSDTESTPTTLEHVFPATMSLSAAKSAVTTTSVSLTEAMEAEASMDKVVENAGKAIQDLCTRIDRILEAFHDTKVDLSENKDSTRDVAELSANTSPTTIALEVSAEAGPTNHVDLAKLGMGTTIECSMKGKNQLVDDDGKDMANDERTELIEVDTKFTSVNLCFRDPWLALNAIPSRILIGCLSHDLGVNNLSLVPSTLEVPYHCFVLGSVCRASSPPVPLWRVAVPWYSDQVFSGSRPSPWPDPWLYSGNGSVVVFQPLQPWPPPLQAKSKGSIVERQLEPWHDPQIKQDNRGVVVNLLQPRLSPDRWNESWFSCDNAWELTQSHCKLLLTEHMALMAHNEENRLEQNLSLCVVSKRASSLQFNADFWKSAWCVQLVFKQTFAIQKVMFSNEAIMKSWDHVAAKRDTDYDISPMFDVSTMTRLLARINLLDSNFGQVDMQTFQASANVVTVVGLKYSPLVVRMAFANHLHAPWDPGGSNLDTLLHVRKDRQQPQLQPLQNAFPDSVRADMKPLLQIMALMTKLIKLYSWPASGRWGDQVLNQVHELCKCSQDQSLFQFTISTEMKMTWLGDLETIKPTLCMSIKLPDCSFGRMELPWDPGGMNFVPHLHQLEGKLIFKGRGMSCAGHGLHSGPDVGCHRKGGLAQEQVIQSISTHSNKRKGAMNYFEPMVAASSSSSSFSVSSSSSLEFSHPQL

SEQ ID NO: 132804 - protein, 66 aa, Oryza sativa
  Clone ID: PAT_MRT4530_34737C.1.pep
MTMSPSTPWAMFSSTAGAASSSDPPLGEVAHGEDDGASSQAGTDESTSRLRFVVLEYVTSMYEVVG

SEQ ID NO: 132805 - protein, 393 aa, Oryza sativa
  Clone ID: PAT_MRT4530_34738C.1.pep
MAAADLLPDDVLEEILRRLAPSPRSLAACRVVCKAWRAAVDTRCPPPRPDLLPLSLAGIFFSGFYFAHEYLPGFFARRGHHHCDRIFPKLDYLDDAPISKLEAIDHCNGLLLMQEYIVNPATRRWARLPPTPEWSPAGSDLEAVVTDSCREEYLVFDPTVSPHYEVFSIPELVFCRGDDKDNAESVVRQHEWPPSPFVVQVYSSATGRWEKRSLVRRGEAAGTIADVHYSSWMASHHLYGVYWRGALHVQMKNNDVIRITLLDDKYQVIKSPSDINLNNHPYIYLGRSKKGVWLLHEVLLGGGQMEWMLIHDVSLEQIMADFRWNPEAVKPWIKHNTYRGENKNNEEISEDESPGWDSEDDSIVVYTEDMVYDWLWASCTWRRYMGRDDDGVL

SEQ ID NO: 132806 - protein, 93 aa, Oryza sativa
  Clone ID: PAT_MRT4530_34739C.1.pep
MADPASQGPLPPPHLLPARRRQPNLLCLRNNPKLCPSMTDVTRALEHPSPPSQLSRSSRKAPGRQGGDEVTLADGGHGDAEAGFAISVVAENL

SEQ ID NO: 132807 - protein, 696 aa, Oryza sativa
  Clone ID: PAT_MRT4530_3473C.1.pep
MRVVFSLSVLAVLLLQLLLGVATAAAANCSTHCGNIGISYPFGVEPGCYHEGFNLTCDRSHKPPKLFLGDGSVEVLEISIPSGTVRINSSSIVPVSTSSAVGTGSVNKTGKYHTWGGLRKGGPFFISPYKNKFLVLSCSNVQVLLLGGDNSTVNACATYCPPAPKKGQPFQFPMRNECSGIGCCSAAIPKGYTSYSIQIQPANEISEFDAESSVYIAEEGSYNATRLIFETVSALPALLDWAISNSTCGTKPSAAPAPACRSSNSYCQNYTSYVYNGYQCRCNAGYQGNPYIPNGCQGLSIGLVVSGGTVLLLLALCAPLATRKIKLRKMKKTKERFFKQNHGLLLQQLISQKVDIGERMIITLSDLEKATNNFDKSREVGGGGHGIVYKGILDLHVVAIKKSKIVVQREIDQFINEVAVLSQINHRNVVKLLGCCLETEVPLLVYEFVSNGTLYDHLHVEGPMSVPWDDRLRIALEVARAVAYLHSASSMPIFHRDIKSSNILLDDSLTAKVSDFGASRYIPIDQTGVTTAVQGTFGYLDPMYYYTGRLTDRSDVFSFGVLLVELLTRKKPFVHTSSNGDALVLHFVSLHTENNLVDILDPQVMEEGDGEVQEVAALAATCIKLKGDDRPTMREVEMALENIRVKKKHATLGTTSNRCDGDQIVCDYLSTRGITDESTRQYTMEEEILSSGTYPR

SEQ ID NO: 132808 - protein, 138 aa, Oryza sativa
  Clone ID: PAT_MRT4530_34740C.1.pep
MAATTTAPCAARSASRRVAWHIALLFLWTQTKSKTIEQGVGLVSWFGVQTIDRFEITDDQNIFPLANTCDGEDRRYARDRQRITSPVFWRLGGMEIAGEMLTRRRRMLYRVVASPVLPIPSEGVMDVLGYDMVLRVKH

SEQ ID NO: 132809 - protein, 233 aa, Oryza sativa
  Clone ID: PAT_MRT4530_34741C.1.pep
VVVVVAGDGEGRRAEQAEVHDQEVALVEPHRAGAAVGGGAGGGLCGGGGEGGVVPRRGRGAQGAPPGVRRQVAAAVPHRRGARRPPAVPEPRRPHRRRRRRRRRDRRRLRGRAVRAPALDAGERRPAAGVPRRARRVLRLLRKAAAPRRAAYLPPPPPAVTAAATRRSWKLPEAAVKSFEKKNLCFGRGRSEISDAGVEVKSTKRQLAFFFYLTPASVLIGEFTICYCAVNSL

SEQ ID NO: 132810 - protein, 211 aa, Oryza sativa
  unsure (1)..(211): unsure at all Xaa locations
  Clone ID: PAT_MRT4530_34742C.1.pep
AQVCTRPNVALVTGLLGRFQSNPGLEHWXFVKKVLRYLQGTKGLMLSHRKSESLQIVGYSDSDFAKDNTKSTSGYVFTLVVGAISWKSSKQTITAGSTMYAEFIACYEATGQVNWLKKFIPGLKVVDSIVKPIKLYCNNEPAVMYSHNNQSSGTAKHIDIKYYVVRDKVRDQTISLEHIITERMLADPLTKGLPPNMFKEHVACMCLREAL

SEQ ID NO: 132811 - protein, 492 aa, Oryza sativa
  unsure (1)..(492): unsure at all Xaa locations
  Clone ID: PAT_MRT4530_34743C.1.pep
MDMLVSLYTILKEREGVGHGAAARRLPVSATPLGTAHARKRKKEGAPRHNRSTAAHSPSSGYSLMGYIKDIPTLKGDNYEEWKRELDLAFILGEVDWVLTTPCPIEPAEIFREYDTVSKYLESIKSQFSGSSKFYATQLIKQLVTERYHGGGVKDHILRMSNMASKLKQKDLGISDDFLVHLVLSSLPKNFDNLVVNYKISTENWNIEELISNCVQEEERHKETNGDSINLVKDNKEKSHRGSSVIREIDLEERQVSVPAPSTQEPFFSLPANVVPAMHAVAVPTPVVISPVATMNESEEPVLQDSREIIATSEEELKQPQTDNVPEXRLLEGLKESHMEDDPTSYEEAMRSARSSEWLEAMKDEMKSMKLNDVWDLEEIPKGAKTVGCKWVYKTKYDSRGNIEKFKVRLVAKXFTQREGIDYNETFLXVSCKIPSDLMALVAHYDLKLHQMDGKTAFLNGNLEEKYTWRTQKVCHESETKMGWRIKNPLMG

SEQ ID NO: 132812 - protein, 142 aa, Oryza sativa
  unsure (1)..(142): unsure at all Xaa locations
  Clone ID: PAT_MRT4530_34744C.1.pep
SPFWNTNPPRVVFFIQARARVQVFTTNEKKVFXGEFSPGQFFFFPPPFPVLKKAQKKGCVFFAFKTLPFFLVTPLPGKGSFFRVFPKNFLAKAFRFSKKKVQGLQHKKGNGLGAFPPIQNKSSQRFFNGAKSFLGGLGVKKN

SEQ ID NO: 132813 - protein, 1030 aa, Oryza sativa
  Clone ID: PAT_MRT4530_34745C.1.pep
MTTMADASSSSNTSTGGYSLMGCIKDIPTLQGDNYAEWKRKLDLAFIMGEVDWVLTTPCPVEPVELIKGENESDADWQKSQRDNAPLVMSYDIEQKKWSLANKKCLAVVKNTIEPTILGSIPECDAVSEYLERIKSQFTGFSKTYATQLIKQLVTERYHGGGVRDHILRMSNMASKLKPMDLGITDDFLVHLVMASLPKQFDNFIINYNISLEKWNFEKLIANYVQEEERIKESNGGSINYVKDNKKKNHKSPTSKAKQSQHLPQQQQFAVEKDQCLHCKKIGHYKKDCPDFLKMIMARKDENIITFVNESHYVGYSRSTWWIDSGATIHACNCLKAFRSTRTMQRSESSIRVANGVEEKVEAVGDLPLELANGFTLLLRNVFYVPSLQRNLISVSKLDFDGYDCRFGSGKCELWGRIERLVKNEILRPLEFSDLEQCIECIKGKFVKSIKKGAKRSAGILEIIHTDICGPFLVKSVDGYDSFVTFTDDYSRYGYIYPIKERSEALDKFKIFKVEVENQHVIKIKVNGVAERRNRTLMDMVHSMMSYSTLPLGLWMEALKTAIHILNRVPSKSVPKTPYELWTGRVPSLAHLRVWGSPVEAKVFNPNIGKLDPKTVSCHFIGYPGISKGYRFYCPNSYTKFVEMRHAIFLEDEMIRGSSVVREIDLEERRVSIPAPSTQEPFFSLPADVVPTMPVIAEELQQPQTDNVLVQETQQEPQVQDVPNVEAPRRSERVRRSAIRDDYNVYNIEESHVEDDPTSYEEAMRSARSSKWLEAMKDEMKSMKLNDVWDLEEIPKGAKTIDVKTAFINGDLEEKVCMAQPKGFVMKGNENMGCRLKRSIYGLKFQSNPGPEHWKLVKKVLRYLQGTKGLMLSYRRSESLQIVGYSDFDFEKIIQRSTMYAEFIACYEANEATGQVNWLKKFIPGLKVVDSIKKPLKLYCDNKPAVMYAHNNQSSGAAKHIDIKYYVVKDKVWDQTISLEHIRTERMLADPLTKGLPPNMFKEHIDLPSVGPNGTTDLDRALFGGGQSNS

SEQ ID NO: 132814 - protein, 36 aa, Oryza sativa
  Clone ID: PAT_MRT4530_34746C.1.pep
FFSWGPYVPEEDLLCHPFLLLKALSQNQCPQWQQTK

SEQ ID NO: 132815 - protein, 83 aa, Oryza sativa
  unsure (1)..(83): unsure at all Xaa locations
  Clone ID: PAT_MRT4530_34747C.1.pep
AAAXPGTEAQQXSXDRKSRKXRTKGGTAGXXXNXKPXPTQREETRXXDQDXXXSXRATXKXNGRTPEGXARGEXTEQXXXXRP

SEQ ID NO: 132816 - protein, 1265 aa, Oryza sativa
  Clone ID: PAT_MRT4530_34748C.1.pep
MARRREGGYSLMGCIKDIPTLKGDNYAEWKRKLDLTFILGEVDWVLTTPCPIEPAELVRGENESDADWQKRQRDNAPLVMSYDIEQKKWSLANKKCLAVVKNTIEPTILGSIPECDAVSEYLERIKSQFTGSSKTYATQLIKQLVTERYHGGGVRDHILRMSNMASKLKPMDLGITDDFLVHLVMASLPKQFDNFIVNYNISPEKSTWWIDSGATIHACNCLKAFRSTRTTQRRESSIRVANGVEEKVEAVGDLPLELANGFTLLLRDVFYVPSLQRNLISVSKLDFDGYDCRFGSGKCELWYNNACIGLAVLRDELYLLSLSENVNVVSSLTKENKKRKRTPDVSSKLWHYRLGHISRGRIERLVKNEILPPLEFSDLEQCIECIKGKFVNSIKKGAKRSAGILEIIHTDICGPFPVKSVDGYDSFITFTDDYSRYGYIYPIKERSEALDKFKIFKAKVENQHDIKIKVVRSDRGGEYYGRHTPYGQVPGPFARFLLENGIVAQYSTPGEPQQNGVAERCNRTLMDMVRSMMSYSTLPLGLWMEALKTAIHILNRVPSKSMPKTPYELWTGRVPSLAHLRVWGSPVEAKVFNPNIGKLDPKTISCHFIGYPQRSKGYRFYCPNSYIKFVETRHAVFLEDEMIRGSSVVREIALEERRVSVPAPSTQEPFFSLPADVVPAMPVIEVPAPVVTPPVATMNEKEELQQPQTDNVPVQETQQEPQVQDVPNVQAPRRSERVRRSAIRDDYKVYNIEESHMDDDPTSYEEAMRSARSSEWLEAMKDEMKSMKLNDVWDLEEIPKGAKTVACKWVYKTKYDSKGNIEKFKARLVAKGFTQREGIDYTETFSPVSCKDSFRIIMALVAHYDLELHQMDVKTAFLNGDLEEKVYMAQPKGFVMKGNENMGCRLKRSIYGLKQASRQWYLKFDGTIKKFGFQENVEDNCIYLKFKNGRFIFLILYVDDILLASSDVSLLQEIKKFLSSNFDMKDLGEASYVLGIEIHRDRTKYTLGLSQKTYIEKVLKKFNMYRCSATPAPIVKGEKYGASQCPRNQYELNKMKTKPYASAVGSLQYAQVCTRPDLAFVTGLLGRFQSNPGLEHWKLVKKVLRYFQGTKGLMLSYRRSKSLQIVGYSDSDFAKDNTKSTSGYVFTLAGGAISWKSSKQTITAESTMYAEFIACYEATGQVNWLKKFIPGLKVVDSIEKPLKLYCDNEPAVMYAHNNQSSGAAKHIDIKYYVVKDKVRDQTISLEHIRPERMLADPLTKGLIVR

SEQ ID NO: 132817 - protein, 1229 aa, Oryza sativa
  unsure (1)..(1229): unsure at all Xaa locations
  Clone ID: PAT_MRT4530_34749C.1.pep
GVKDHILRMRDMAFKLKPMDLGISDAFLVHLVMTSLPKNFDNFVVNYKISPEKWNLEELISNCVQEEERIKETNGASNNLVKDTKEKSHWSPPPXSKAKQPQHLPQXNSSQLRQDQCPHYKKTGHCKKVRPDFLIVIMAKKGENIITFVNESHYXGYSRSTXWIDSGATIHVCNCLKGFRSMRTTQRSESSIRVANGVEXKVEAVGDLLLELANGFTLLLRVVFYVPSLQRNLISVSKLDFDGYDYHFGNVKCELWYNNACNGLAVLQDELYLLSLYENVNVVSSLTKENKKRKRTPDVSSKLWHFRLCHISRGRIERLVKNDILPPLEFSDLEQCIECIKGKFVKSIKKGAKRSAGILEIIHTDICDPFPVKSMDGYDSFITFTHNYSRYGYIYPIKERSEALDKFKIFKAEVENQHDVKIKIVXSDRGGEYYGRHTPYGQVPRPFARFLLENGIVAQYSTPGEPRQNGVAERRNRTLMDMVRSMMSYSTLPLGLWIEALKTAIHILNRVPSKSVPKHXYELWTGRVPSLAHLHVWGSPAEAKIFNPNLGXLDPKIVSCHFIRYPERSKGYRFYYPNNYTKFVETRHAVFLEDEMIRGSSVVREIDLEERRVFVPAPSTQEPFFSLPAAIVRAMHDVAVPAPVVTPPVATMNESEEPFLQDSTEIIATPEEELQQPQTYNVPELAPRRSERVRRSAIRDDYEVHNIEESHMEDDPTSYEEAMRSARSSEWLEAMKDEMKSMKINDVWDLEELPKGTKIVGCKWVYKTKYDSRGNTEKFKARLVAKGFMQRERIDYNETFSPVSCKDSFRIIMALVAHYDLEMXNDTSKCLEEKVYMAQPKGFVVKGNENIGCRXKRSIYGLKQASRQWYLXFDGTIKKFGFQENIEDNYIYTKFKNGRFIFLILYVDDILLASSDVSLLQETKKLLSSNFDMKDLVEASYVLGIEIYRDRTKYTLGLSQKAYIAKVLKKFNMYRCSATLGPMVKGLKYGAXQCPRNQYELHEMKTKPXASAVGSVQYAQVCTRPDLAFITGLLGRFQSNSGPEHWKLVKKVLRYLQGTKGLMLSYRRSESLXIVGYLDSDFAKDNTKSTLGYMFTFAGGAISWKSFKQTITAGSTMYAEFIACYEATGQVNWLKMFVSSLKVVDSIEKPLKLYCDNEPAVIYAHNNQSSGAAKHIDMKYYVVKDKVRDQTINLEHIRTKRMVVDPLTKGLPPNVSKEHVAGIGLREAL

SEQ ID NO: 132818 - protein, 30 aa, Oryza sativa
  Clone ID: PAT_MRT4530_3474C.1.pep
RSFHACRAIVHWRHSEHASLHFKLTAVTWV

SEQ ID NO: 132819 - protein, 300 aa, Oryza sativa
  Clone ID: PAT_MRT4530_34750C.1.pep
MLYTFDSDGTKATGLYSLVEKKAYVLPLQDLPNRHIIVSCYGWIVNADERSELHLVNPITGEQIALPSVTTIEQVKPIYDDDAAAANGYKYLWHTGEVTVSDSSSILYYKAFVSCDPSMGGGYTVVLIHNPYCQLSFARAGDDKWTWLPPYSDYEDCFFKDGLLYAATLLGEIHMFDLTDPKVAPKIVMGKVKDFLYENIYIVEASCGNLLQIWRSDDLPKWDVPEGDEDDDHSFDSESEFDSESYVCDTNTIKNNHRDIGVLDLENFRREEIVSPQIWSNWPPPIWLIPNPRRMKLASH

SEQ ID NO: 132820 - protein, 1693 aa, Oryza sativa
  Clone ID: PAT_MRT4530_34751C.1.pep
MAGTSSSSNTSTGGYSLMGCIKDIPTLKGDNYAEWKRKLDLAFILGEVDWVLTTPCPIEPTELVRGENESDADWQKRQRDNAPLVMSYDIEQKKWSLANKKCLAVVKNTIEPTILGSIPECDAVSEYLERIKSQFTGSSKTYATQLIKQLVTERYHGGGVRDHILRMSNMASKLKPMDLGITDDFLVHLVMASLPKQFDNFIVNYNISPEKWNFEKLIANCVQEEERIKESNGGSINYVKDKKKNHKSPTSKGKQSQHLPQQQQFAVEKDQCLHCKKTGHYKRDCPDFLKMIMAKKGENIITFVNESHYVGYSRSTWWIDSGATIHACNCLKAFRSTRTTQRRESTIRVANGVEEKVEAVGDFPLELANGFILLLRDVFYVPSLQRNLISVSKLDFDGYDCRFGSGKCELWHNNACIGLAVLRDELYLLSLSENVNVVSSLTKENKKRKGRIERLVKNEILPPLEFSDLEQCIECIKGKFVKSIKKGAKRSAGILEIIHTDICGPFPVKSVDGYDSFITFTDDYSRYGYIYPIKERSEALDKFKIFKAEVENQHDIKIKVVRSDRGGEYYGRHTPYGQVPGPFARFLLENGIVAQYSTPGEPQQNGVAERRNRTLMDMALKTAIHILNRVPSKSVPKTPYELWTGRVPSLTHLRVWGSPAEAKVFNPNIGKLDPKTVSCHFIGYPERSKGYRFYCPNSYTKFVETRHAVFLEDEMIRGSSVVREIDLEERRVSVPAPSTQEPFFSLPADVVPAMPVIEVPAPVVTLPVATMNESEEPVIQDSTEMVATPEEELQQSQIDNVPVQETHQEPQVQDVPNVQAPRRSERVRRSAIRDDYKVYNIEESHMEDDPTSYEEAMRSARSSEWLESMKDEMESMKLNDVWDLEEIPKGAKTVGCKWVYKTKYDSRGNIEKFKARLVAKGFTQREGIDYNETFSPVSCKDSFRIIMALVAHYDLELHQMDVKTAFLNGDLEEKVYMAQPKGFVMKGNENMGCRLKRSIYGLKQASRQWYLKFDGTIKKFGFQENVEDNCIYSKFKNGRFIFLILYVDDILLASSDVSLLQETKKFLSSNFDMKDLGEASYVLGIEIHRDRTKYALGLSQKTYIEKVLKKFNMYRCSATPAPIMKGEKYGASQCPRNQYELNEMKTKPYASAVGSLQYAQVCTRPDLAFVTGLLGRFQSNPGLEHWKLVKKVLRYLQGTKGLMLSYRRSESLQIVGYSDSDFAKDNTKSTSGYVFTLAGGAISWKSSKQTITAGSTMYAEFIACYEATGQVNWLKKFIPGLKVVDSIEKPLKLYCDNEPAVIIVLEKKTFLVERFDKYVKTLGSGIHVLAPLVDHIAYVHSLKEEAIPIPDQSAITKDNISIQIDGVLYVKNFWGNFKLHVLDEALLAFKKAVTTSDGIFLNWREQDVDPCNWKDVRCDSHTKRLKARRGSVSWESGVRCFSIGPSELVARGSKVWLSTRAGGHLEAGGVDDAEGGDGDPGGPAGRLPLAARGGEGDEQCAGGEEAKLGDEEGARLGYDPLHGHHGRAPEEEGRHQRRPLPPLPPHECRRGRDAILLLGDPREAFDEALDVRARADAVNRVRRGGRHRLAAEGFRTWAVVDVALNVGGPCRRSQPRHRVRRRVAGRGRRREPPRDVARHGHRAGRSRQWRAGGWSTAGRGKTEYGGAGVRRGGAALTEGGGGREWRQRREWTG

SEQ ID NO: 132821 - protein, 107 aa, Oryza sativa
  Clone ID: PAT_MRT4530_34752C.1.pep
MAATSSPGKVAADPRLPSLDLACPRLDSTEAGGAVAWRDGGGVADDKGGRCKMAREAGTQVAEGGTREVAPTVTPSPAAKAVWREPACEARMREAVPTVALSGAAVG

SEQ ID NO: 132822 - protein, 399 aa, Oryza sativa
  Clone ID: PAT_MRT4530_34753C.1.pep
METYGLVKDELLHGIGGGQGRLYCEVKPTAAPAVITAAGGGAKSVKRRKREPSAAAMSAVTVAGNGKEAGGSNAANKRSSRFRGVSRHRWTGRFEAHLWDKGTWNPTQKKKGKQVYLGAYNEEDAAARAYDLAALKYWGPTTYTNFPVADYEKELKLMQGVSKEEYLASIRRKSNGFSRGVSKYRGVARHHHNGRWEARIGRVFGNKYLYLGTYSTQEEAARAYDIAAIEYRGINAVTNFDLSTYIRWLKPPSSSSAAGTPHHHGGGMVVGADRVLAPAQSYPISAAADDDVAGCWRPLPSPSSSTTTALSLLLRSSMFQELVARQPVVEGDDGQLAVVSGDDADADADSDVKEPPPESEYGEVFASDEAAAAAAYGCSMYELDDSFALIDDSVWNCLI

SEQ ID NO: 132823 - protein, 908 aa, Oryza sativa
  unsure (1)..(908): unsure at all Xaa locations
  Clone ID: PAT_MRT4530_34754C.1.pep
MPVPVYAAAAMLPPSPCPSLAAAVLVYKGWLQGADRACRGAPPAMGCPAISSRNHLIPGRYHPIPRKYHAIHGRNRLIPDKYHMIPRENHAIRGRNRLIHDRFHMIPREYHAIRGRNRMIPDKYHLKRGYSLMGCIKDIPTLKEDNYAQWKRKLNLAFILGEVDWVLTTPCPIEPAALVRGENKSDADWKKRQRDNAPLVMSYDIEQKTWSLANKKCLAVVKNTIEPTILGSILECDAVSEYLERTKSQFTGSSKTYATQLIKQLVTERYHGGGVRDHILRMSNMASKLKPMDLGITYDFLVHLVMASFPKQFDNFIVNYNISPEKWNFEKLIANCVQEEERIKESNGGSINYVKDKKKNYKSPTSKAKQSQHLPQQQQFAVEKDQCLHCKKTGHYKKDCPDFLKMIMARKGENIITFVNESHYVGYSRSTWWIDSGATIHACNCLKAFRSTRTTQRRESSIRVANGVEEKVEAVGDLPLEIANGFTLLLRDVFYVPSLQRNLISVSKLDFDGYDCRFGSGKCELCVDGYDSFITFTDDYSRYGYIYTIKERSEALDKFKIFKAEDENQHDIKIKVVRSDRGGEYYGRHTPYGQVPGPFARFLLENGIVAQYSTPGEPQQNGVAERRNRTLMYMVRSMMSYSTLPLGLWMEALKTAIHILNRVPSKSVTKTPYELWIGRVPSLAHLRVWGSPVQTPVVTSPVATINENEEPVIQDSIEMVATPEEELQQPQTDNVPVQETQQEPQDDPTSYEEAMRSARLSEWLEAMKDEMKSMKLNDVWDLEEIPKGAKIVGXDVKTTFLNGDLEEKVYMAQPKGFVMKGNENMGCRXKRSIYGLKQASRQWYLKFDGTIKKFGFQENVEDNCIYSKFKNGRFIFLILYVDDILLASSDVSLLQETKNLNSCPQTLT

SEQ ID NO: 132824 - protein, 819 aa, Oryza sativa
  Clone ID: PAT_MRT4530_34755C.1.pep
MAEEKESFEGQWAPSDVTEENLKEMVAHGVLPAKEIIGWRPACGEAFPTPDTHEAVVFSHFFYGGFALPTSKFFRGILNFYGISLHHLNPNSIVHIANFVHVCEAFLGIRPHFALFRRIFFLKPQPNKNKPCVVGGAGFQLRGTLSQKYFSMPFKTSNKGWHANWFYIQNPEPALPEYSCLPPVYQDTWNSLPMGDEAAQALELMERMLKLKEQGLQGEQITRHFIKCRLAPIKERSRTAFEFDGKHDPNREDPDSLDFKIMKERMYKIFSNAIVVSYSHQLPVVPYNAFNPPPQEYTLMKSDPPVTQRRSPRQHTVQGGGGPAIRPDPQPQTSNPTGQTGSRKRKLVLDNDEGDDDKSGDKGSPNKLPKRTMPKKKLAGRQMPKIRTSSRKPSDIDPTGKDPDPAATEPNLSKDAEPTAESQPTGAHASDDKANPSDQPPTGNQSAATETATTREPPTGNQSDVGLNQEIPEAEAQTTSQGPEVGNDSVIGSPDKEQGSPHAQLGTSSGPLGGDEEEILRIKAADDSRPPILLKWWDENSQVSGIVINRQKEDEEVCQLKKVLGEATRIVNRIHLRNEAKTATLEKLVPHLGTLEAVRGQLHEAKEHAKKTEKELRERIAQLQDSNYELSGSSKAQATRMAQMEKQIEALKKDKAELAAERDSALKEVEDRKIKSQAQFDVLVGKIKRLEGARDEVANVATPLVQAMFLNNSGPSALDATEIFDKLRVAPDVYFKNIKKAGSMGASMALAMTKSLYPRIEIDTIDGFADGTSEEAALDLISNAQNAADKIASDVVEQFRNNDLQPSNNNSDDERTDTD

SEQ ID NO: 132825 - protein, 1479 aa, Oryza sativa
  Clone ID: PAT_MRT4530_34756C.1.pep
MAGAAKASWMVAMSVGAVEALKDQGGLCRWNYALRSIHKAAKANAAGVSQGKKLPASAAAVAERRRAEKAEEGLRTVMYLSCWGPNCGYSLMGCIKDIPTLKGDNYAEWKRKLDLAFILGEVDWVLTTPCPIEPADLVRGENESDADWQKRQRDNAPLVMSYDIEQKKWSLANKKCLAVVKNTIEPTILGSIPECDAVSEYLERIKSQFTGSSKTYATQLIKQLVTERYHGGGVRDHILRMSNMASKLKPMDLGITDDFLVHLVMASLPKQFDNFIVNYNISPEKWNFEKLIANCVQEEERIKESNGGSINYVKDKKKNHKSPTSKGKQSQHLPQQQQFAVEKDQCLHCKKTGHYKKDCPDFLKMIMAKKGENIITFVNESHYVGYSRSTWWIDSGATIHACNCLKAFRSTRTTQRRESTIRVANGVEEKVEAVGDLPLELANGFILLLRDVFYVPSLQRNLISVSKLDFDGYDCRFGSGKCELWHNNACIGLAVLRDELYLLSLSENVNVVSSLTKENKKRKRTPDVSSKLWHCRLGHISRGRIERLVKNEILPPLEFSDLEQCIECIKGKFVKSIKKGAKRSAGILEIIHTDICGPFPVKSVDGYDSFITFTDDYSRYGYIYPIKERSEALDKFKIFKAEVENQHDIKIKVVRSDRGGEYYGRHTPYGQVPGPFARFLLENGIVAQYSTPGEPQQNGVAERRNRTLMDMVRSMMSYSTLPLGLWMEALKTAIHILNRVPSKSVPKTPYELWTGRVPSLTHLRVWGSPAEAKVFNPNIGKLDPKTVSCHFIGYPERSKGYRFYCPNSYTKFVETRHAVFLEDEMIRGSSVVREIDLEERRVSVPAPSTQEPFFSLPADVVPAMPVIEVPAPVVTPPVATMNESEEPVIQDSTEMVATPEEELQQPQIDNVPVQETHQEPQVQDVPNVQAPRRSERVRRSAIRDDYKVYNIEESHMEDDPTSYEEAMRSARSSEWLEAMKDEMKSMKLNDVWDLEEIPKGAKTVGCKWVYKTKYDSRGNIEKFKARLVAKGFTQREGIDYNETFSPVSCKDSFRIIMALVAHYDLELHQMDVKTAFLNGDLEEKVYMAQPKGFVMKGNENMGCRLKRSIYGLKQASRQWYLKFDGTIKKFGFQENVEDNCIYSKFKNGRFIFLILYVDDILLASSDVSLLQETKKFLSSNFDMKDLGEASYVLGIEIHRDRTKYALGLSQKTYIEKVLKKFNMYRCSATPAPIMKGEKYGASQCPRNQYELNEMKTKPYASAVGSLQYAQVCTRPDLAFVTGLLGRFQSNPGLEHWKLVKKVLRYLQGTKGLMLSYRRSESLQIVGYSDSDFAKDNTKSTSGYVFTLAGGAISWKSSKQTITAGSTMYAEFIACYEATGQVNWLKKFIPGLKVVDSIEKPLKLYCDNEPAVMYAHNNQSSGAAKHIDIKYYVVKDKVRDQTISLEHIKTERMLADPLTKGLPPNVFKEHVAGMGLREAL

SEQ ID NO: 132826 - protein, 826 aa, Oryza sativa
  Clone ID: PAT_MRT4530_34757C.1.pep
MAEEKESFEGQWAPSDVTEENLKEMVAHGVLPAKEIIGWRPACGEIFPTPDTHEIVVFSHFFYGGFALPTSKFFRGILNFYGISLHHLNPNSIVHIANFIHVCEAFLGIKPHFALFRRIFFLKPQPNKNKPCVVGGAGFQLRGTLSQKYFSMPFKTSNKGWHANWFYVQNPEPALPEYSCLPPVYQDTWNSLPIGDEAAQALELMDRMLKLKEQGLQGEQITRHFIKCRLAPIKERSRTAFEFDGKHDPNREEPDSLDFKIMKERMYKIFSNAIVVSYSHQLPVVPYNAFNPPPQEYALMKSDPPITQRRSPRQHTVQGGGGPKIRPDPQPQTSNPTGQTGSRKRKLVLDNDEGDDDKSGDKGSPNKLPKRTMPKKKLAGRQMPKIRTSSRKPSDIDPTGKDPDPAVTEPNLSKDVEPTAENQPTAESQPTSAHASDDKADPSDQPPTGNQSEATETATTQEPPTGNQSDVGLNQEIPEAEAQATTSQGPKAGNDSVIGSPDKEQGSPHAQLGTSSGPLGGDEEEILRIKAADDSRPPILLKWWDENSQVSGIVINRQKEDEEVCQLKKVLGEATRIVNRIHLRNEAKTATLEKLVPHLGTLEAVRGQLHEAKEHAKKTEKELRNRIAQLQDSNYELSGSSKAQATRMAQMEKQIEALKRDKVELAAQRDSALKEVEDRKIKSQAQFDVLVGKIKRLEGARDEVANVAAPLVQAMFLNNNGPSALDATEIFDKLRVAPDVYFKNIKKAGSMGASMALAMTKSLYPRIEIDAIDGFADGTSEEAALDLISNAQNAADKIASDVVDQFRNNDLQPSNNNSDDERTDSD

SEQ ID NO: 132827 - protein, 826 aa, Oryza sativa
  Clone ID: PAT_MRT4530_34758C.1.pep
MAEEKESFEGQWAPSDVTEENLKEMVAHGVLPAKEIIGWRPACGEAFPTPDTHEAVVFSHFFYGGFALPTSKFFRGILSFYGISLHHLNPNSIVHIANFVHPQPNKSKPCVVGGAGFQLRGTLSQKYFSMPFKTSNKGWHANWFYIQNPEPALPEYSCLPPVYQDTWNSLPIGDEAAQALELMDRMLKLKEQGLQGEQITRHFIKCRLAPIKERSRTAFEFDGKHDPNREEPDSLDFKIMKERMCKIFSNAIVVSYSHQLPVVPYNAFNPPPQEYVLMKSDPPITQRRSPRQHTVQGGGGPTIRSDPQPQTSNPTGQTGSRKRKLVLNDNEGDDGNKSGDEGSPNKLPKHTTPRKKLASRPRPKIRTSSRYKPLGTISLRHASLMEIILNIERTLCRKPSDIDPTGKDPDPTVTEPSSSKDSEPTAESQPTGAHTSGDKANPSDQPPTGNQSAATETTTTQEPPTGNQSDVGPDQETPEVEAQTTTSQGPEAGNDSIIGSPDKEQGSPHAQLGTSSRPPGDDEEEIPRIKAADDSRPPILLKWWDENSQAAGIVINRQKEDEEVCQLKKALGEATRIVNRIHLRNEAKTATLEKLVPHLGTLEVVRDQLHEAKELAKKTEKELRDRIAQLQDSNFELSGSSKAQAARMAQMEKQIEALERDKVELAAQRDSALKEVEDRKIKSQAQFDVLVGKIKRLEEARDEVANVATPLVQAMFLNNSGPSALDATEIFDKLRVAPDVYFKNIKKAGSMGASTALAMTKSLYPRIEIDAIDGFADGTSVEAALDLISNAQNAANKIASDVVDQFRNTDLQPSSNNSDDERTDSD

SEQ ID NO: 132828 - protein, 58 aa, Oryza sativa
  Clone ID: PAT_MRT4530_34759C.1.pep
SGVRHTCGPITTIGDFMSQDTTPGPQEIKKTNKGYNPAHMADEKRLKEFIGYVKQIHK

SEQ ID NO: 132829 - protein, 84 aa, Oryza sativa
  Clone ID: PAT_MRT4530_3475C.1.pep
MATASKAVAMTATTGRPNDAGGACVDGGKDDTGAAQLLPATVARMADSMTTAADEASMAVVDGGLNLGDEGSRGGRGRVAPRIN

SEQ ID NO: 132830 - protein, 173 aa, Oryza sativa
  Clone ID: PAT_MRT4530_34760C.1.pep
MSRVLEPLVVGKVIGEVIDNFNPTVKMTATYSSNKQVFNGHELFPSAVVSKPRVEVQGGDLRSFFTLVMTDPDVPGPSDPYLREHLHWIVTDIPGTTDASFGREVVSYESPKPNIGIHRFVLVLFKQKRRQAVTPPSSRDYFSTRRFAADNDLGLPVAAVYFNAQRETAARRR

SEQ ID NO: 132831 - protein, 848 aa, Oryza sativa
  Clone ID: PAT_MRT4530_34761C.1.pep
MAEEKESFEGQWAPSDVTEENLKEMVAHGVLPAKEIIGWRPACGEAFPTPDTHEVVVFSHFFYGGFAPPTSKFFRGILSFYGISLHHLNPNSIVHIANFVHVCEAFLGIKPHFALFRRIFFLKPQPNKSKPCVVGGAGFQLRGTLSQKYFSMPFKTSNKGWHASWFYIQNPEPALPEYSCLPPVYQDTWNSLPIGDEAAQALELMDRMLKLKEQGLQGEQITRHFIKCRLAPIKERSRTAFEFDGKHDPNREEPDSLDFKIMKERMYKIFSNAIVVNYSHQLPVVPYNAFNPPPQEYVLMKSDPPITQRRSPRQHTVQGGGGPTIRSDPQPQTSNPTGQTGSRKRKLVLSDDEGDDGSKSGNKGLPDKLPKHTTPRKKLASRPMQKIRTSSRYKPLDTISLRHAALMKIILNVERTLCRKPSDIDPTGKDPDPAVTEPSSSKDSEPTAESQPTGAHTSGDKADPSDQPPTGNQSAATETTTTQEPPAGNQSDAGPDQKIPEVEARTTTSQGPEAGNDSMIGSPNKEQGSPHAQLGTSSGPPGDDEEEIPRIKAADDSRPPILLKWWDENSQAAGIVINRQKEDEEVCQLKKALGEATRIVNRIHLRNEAKTATLEKLVPHLGTLEAVRDQLHEAKELAKKTEKELRDQIAQLQDSNFELRGSSKAQTTRMAQMEKQIEALERDKVELAAQRDSALKEVEDCKIKSQAQFDVLVGKIKKLEGARDEVANVATPLVQAMFLNNSGPSALDATEIFDKLRVAPDVYFKNIKKAGSMGASTALAMTKSLYPRIEIDAIDGFADGTSVEAALDLISNAQNAADKIASDVVDQFRNADLQPSSNKSDDEKTDSD

SEQ ID NO: 132832 - protein, 827 aa, Oryza sativa
  Clone ID: PAT_MRT4530_34762C.1.pep
MAEEKESFEGQWAPSDVTEENLKEMVAHGVLPGKEIIGWRPACGEAFPTPDTHEVVVFSHFFYGGFALPTSKFFRGILNFYGISLHHLNPNSIVHIANFVHVCEAFLGIRPHFALFRRIFFLKPQPNKNKPCVVGGAGFQLRGTLSQKYFSMPFKTSNKGWHANWFYIQNPEPALPEYSCLPPVYQDTWNSLPMGDEAAQALELMERMLKLKEQGLQGEQITRHFIKCRLAPIKERSRTAFEFDGKHDPNREDPDSLDFKIMKERMYKIFSNAIVVSYSHQLPVVPYNAFNPPPQEYVLMKSDPPIAQRRSPRQHTIQGSGGPTIRSDPQPQTSKPAGQTGPRKRKLVLNDDEGDDSNKSGDKGTPNKLPKHTMPRKKLAGRQMPKIRTSSRKPSDIDPTGKDPDPAVTEPNLSKDTEPTAENQPTAKNQPTGAHASDDKADPSDQPPTGNQSEATETATTQEPLTGNQSDVGLNQEIPEAGAQATTSQGPKAGNDSVIGSLDKEQRSPHAQLGTSSGPLGGDEEEILRIKAADDSRPPILLKWWDENSQVSGIVINRQKEDEEVCQLKKVLGEATRIVNRIHLRNEAKTTTLEKLVPHLGTLEAVREQLHEAKEHAKKTEKELRDRIAQLQDSNFELSGSSKAQATRMAQMEKQIEALKKDKAELAAERDSALKEVEDRKIKSQAQFDVLVGKIKKLEGARDEVANVATPLVQAMFLNNSGPSALDATEIFDKLRVAPDVYFKNIKKAGSMGASMALAMTKSLYPRIEIDTIDGFADGTSEEAALDLISNAQSAADKIASDVVEQFRNNDLQPSNNNSDDERTDSD

SEQ ID NO: 132833 - protein, 145 aa, Oryza sativa
  Clone ID: PAT_MRT4530_34763C.1.pep
MTLVKIGPWGGNGGSAQDISVPPKKLLGVTIYSSDAIRSIAFNYIGVDGQEYAIGPWGGGEGTSTEIKLGSSEQIKEISGTHGPVYDLADIVTYLKIVTSANNTYEAGVPNGKEFSIPLQDSGHVVGFFGRSGTLIDAIGIYVHP

SEQ ID NO: 132834 - protein, 776 aa, Oryza sativa
  Clone ID: PAT_MRT4530_34764C.1.pep
DTHEIVVFSHFFYGGFALPTSKFFRGILSFYGISLHHLNPNSIVHIANFIHVCEAFLGIKPHFALFRRIFFLKPQPNKSKPCVVGGAGFQLRGTLSQKYFSMPFKTSNKGWHANWFYVQNPEPALPEYSCLPPVYQDTWNSLPIGDEAAQALELLDRMLKLKEQGLQGEQITRHFIKCRLAPIKERSRTAFEFDGKHDPNREEPDSLDFKIMKERMYKIFSNAIVVSYSHQLPVVPYNAFNPPPQEYVLMKSDPPIAQRRSPRQHTIQGSGGPTIRSDSQPQTSKPAGQTGPRKRKLVLNDDEGDDSNKSGDKGTPNKLPKHTMPRKKLAGRQMPKIRTSSRKPSDIDPTGKDPDPAVTEPNISKDAEPTAESQPTAESQPTGAHASDDKANPSDQPPTGNQSATTETATTREPPTGNQSDVDLNQETPEAEAQTTSRGPEAGNDSVIGSPDKEQGSPHAQPGTSSGPLGGDEEEILRIKAADDSRPPILLKWWDENSQVSGIVINRQKEDEEVCQLKKVLGEATRIVNRIHLRNEAKTATLEKLVPHLGTLEAVRSQLHEAKEHAKKTEKELRERIAQLQDSNFELSGSSKAQATRMAQMEKQIEALKKDKVELAAERDSALKEVEDRKIKSQAQFDVLVGKIKKLEGARNEVTNVATPLVQAMFLNNSGPSALDATEIFDKLRVAPDVYFKNIKKAGSMGASMALAMTKSLYPRIEIDTIDGFADGTSEEAALDLISNAQSAADKIASDVVEQFRNNDLQPSNNNSDDERTDSD

SEQ ID NO: 132835 - protein, 37 aa, Oryza sativa
  unsure (1)..(37): unsure at all Xaa locations
  Clone ID: PAT_MRT4530_34765C.1.pep
MPRESIADDGPGVDLEIRRXSGRSDIMRDTXARVQCT

SEQ ID NO: 132836 - protein, 831 aa, Oryza sativa
  Clone ID: PAT_MRT4530_34766C.1.pep
MAKEKESFEGQWAPSDVTEENLKEMVAHGVLPAKEIIGWRPACGEVFPSPDTHEVVVFSHFFYGGFALPTSKFFRGILNFYGISLHHLNPNSIVHIANFIHVCEAFLGIKPHFALFRRIFFLKPQPNKNKPCVVGGAGFQLRGTLSQKYFSMPFKTSNKGWHANWFYIQNPEPALPEYSCLPPVYQDTWNSLPIGDEAAQALELMDRMLKLKEQGLQGEQITRHFIKCRLAPIKERSRTAFEFDGKHDPNREEPDSLDFKIMKERMYKIFSNAIVVSYSHQLPVVPYNAFNPPPQEYVLIKSDPPITQRRSPRQHTVQGGGGPTIRPDSQPQTSNPTGQTGSRKRKLVPNDDEGDEKSGDKGSPNKLPKRTMPRKKLAGRPMPKIRTSSRKPSDIDPTGKDPDPAATEPNLSKDAEPTAESRPIAESQPTAESQPTGAHASDDKAHPSDQPPTGNQSAATETVTTQEPPTGNQSDVSLNQEIPEAEAQATTSQGPKAGNDSMIGSPNKEQGSPHAQLGTSSGPPGDGEEEIPRIKAADDSRPPILLKWWDENSQVAGIVINRQKEDEEVCQLKKALGETTRIVNRIHLRNEAKTATLEKLVPHLGTLEAVRDQLHEAKELAKKTEKELREQIAQLQDSNFELSGSSKAQATRMVQMEKQIEALKKDKVELAAQRDSALKEVEDRKIKSQAQFDVLVSKIKRLEGARDEVANVAIPLVQAMFLNNSGPSALDATEIFDKLRVAPDVYFKNIKKAGSMGAGMALAMTKSLYPRIEIDAIDGFADGTSEEAALDLINNAQNAADRIASDVVEQFRNNDLQPSNNNSDDERTDSD

SEQ ID NO: 132837 - protein, 128 aa, Oryza sativa
  Clone ID: PAT_MRT4530_34767C.1.pep
LNDRLPDPARGKPGKGGGGEARRRASHGRRRRRGSPPLPSKTGRREGGGGEARDGGGGSGAAPLPSPPRFSRREAGGRRRLPSPPLPDPAGGRPGEGGGGEARGRRGTGRRPWLRRGSPMFHAPNGEL

SEQ ID NO: 132838 - protein, 142 aa, Oryza sativa
  unsure (1)..(142): unsure at all Xaa locations
  Clone ID: PAT_MRT4530_34768C.1.pep
MGVGWRRGGGGFIGRGRGAAAATRRARRHGARSDGTGGASATATSGXGGRAQATVTRGSAVARGSERRRDGRAAWXAQGSARRRQATRRRRGAAVARGARRRDGAWRDSGDGDGARRQAAMGQREATATRRRRRRGARGRLG

SEQ ID NO: 132839 - protein, 827 aa, Oryza sativa
  Clone ID: PAT_MRT4530_34769C.1.pep
MAEERESFESQWAPSDVTEENLKEMVAHGVLPVKDIIGWRPACGEAFPTPDTHEVVVFSHFFYGGFALPTSKFFRGILNFYGISLHHLNPNSIVHIANFVHVCEAFLGIRPHFALFRRIFFLKPQPNKNKPCVVGGAGFQLRGTLSQKYFSMPFKTSNKGWHANWFYIQNPEPALPEYSCLPPVYQDTWNSLPMGDEAAQALELMERMLKLKEQGLQGEQITRHFIKCRLAPIKERSRTAFEFDGKHDPNREDPDSLDFKIMKERMYKIFSNAIVVSYSHQLPVVPYNAFNPPPQEYVLMKSDPPIAQRRSPRQHTIQGSGGPTIRSDPQPQTSKPAGQTGPRKRKLVLNDDEGDDSNKSGDKGSPNKLPKHTMPRKKLAGRQMPKIRTSSRKPSDIDPTGKDPDPAVTEPNISKDAEPTAESQLTAESQPTGAHASDDKANPSDQPPTGNQSATTETATTREPPTGNQSDVGPDQEIPEVEAQATASQGPEAGNDSMIGSPDKEQGSPRTQPGTSSGPLGDDEEEILRIKAANDSRPPILLKWWDENSQVSGIVINRQKEDEEVCQLKKVLGEATRIVNRIHLRNEAKTATLEKLVPHLGTLEAVREQLHEAKEHAKKTEKELRERIAQLQDSNFELSGSSKAQATRMAQMEKQIEALKKNKAELAAERDSALKEVEDRKIKSQAQFDVLVGKIKKLEGARDEVANVATPLVQAMFLNNSGPSALDATEIFDKLRVAPDVYFKNIKKAGSMGASMALAMTKSLYPRIEIDTIDGFADGTSEEAALDLISNAQSAADKIASDVVEQFHNNDLQPSNNNSDDERTDSD

SEQ ID NO: 132840 - protein, 78 aa, Oryza sativa
  Clone ID: PAT_MRT4530_3476C.1.pep
RAAGIRHEGCFPVLHLAPYLVPTLVLLLTLLPLAICRTHGHSGRPTLVLVLMLLPLAICRTHGHSGREESKEIDGRSP

SEQ ID NO: 132841 - protein, 803 aa, Oryza sativa
  Clone ID: PAT_MRT4530_34770C.1.pep
MAEEKESFEGQWAPSDVTEENLKEMVAHGVLPAKEIIGWRPACGEAFPTPDTHEIVVFSHFFYGGFALPTSRFFRGILSFYGISLHHLNPNSIVHIANFIHVCEAFLGIKPHFALFRRIFFLKPQPNKSKPCVVGGAGFQLRGTLSQKYFSMPFKTSNKGWHANWFYVQNPEPALPEYSCLPPVYQDTWNSLPIGDEAAQALELLDRMLKLKERGLQGEQITRHFIKCRLAPIKERSRTAFEFDGKHDPNREEPDSLDFKIMKERMYKIFSNAIVVSYSHQLPVVPYNAFNPPPQEYVLMKSDPPIAQRRSPRQHTIQGSGGPTNRSDPQPQTSKPAGQTGPRKRKLVLNDDEGDDSNKSGDKGTPNKLPKHTMPRKKLAGCQMPKIRTSSRKPSDIDPTGKDPDPAVTEPNLSKDAKPSAENQPTAESQPTAESQPTGAHASDDKADPSDQPPTGDQSATAETATTQEPPTGNQSDVGPDEEIPHVQPGTSSGTLGDDEETIPRIKAADDSRPPILLKWWDENSQVAGIVINRQKEDEEVCQLKKALGEATRIVNRIHLRNEAKTTTLEKLVPHLGTLEAVRDQLHEAKEYAKKTEKELRDRIAQLQDSNFELSGSSKAQATRMAQMEKQIEALKRDKVELAAQRDSALKEVEDRKIKSQAQFDVLVGKIKKLEGARDEVANVATPLVQAMFLNNSGPSALDATEIFDKLRVAPDVYFKNIKKAGSMGASMALAMTKSLYPRIEIDTIDGFADGTSEEAALDLISNAQSAADKIASDVVEQFRNNDLQPSNNNSDDERTDSD

SEQ ID NO: 132842 - protein, 858 aa, Oryza sativa
  Clone ID: PAT_MRT4530_34771C.1.pep
MEEEKESFEGQWTPSDVTEENLKEMVAHGVLPVKEIIGWRPACGEIFPTPDTHEIVVFSHFFYGGFALPTSKFFRGILSFYGISLHHLNPNSIVHIANFIHVCEAFLGIKPHFALFRRIFFLKPQPNKSKPCVVGGAGFQLRGTLSQKYFSMPFKTSNKGWHANWFYVQNPEPALPEYSCLPPTYQDTWNSLPIGDEAAQALELMDRMLKLKEQGLQGEQITRHFIKCRLAPIKERSRTAFEFDGKHDPNREDPDSLDFKIMKERMYKIFSNAIVVSYSHQLPVVPYNAFNPPPQEYALMKSDPPITQRRSPRQHTVQGGGGPKIRPDPQPQTSNPTGQTGSRKRKLVLDNDEGDDDKSGDKDSPNKPPKRSMPKKKLAGRQMPKIRTSSRYKPLGTILFRHASLMKIILKVKRTLRRKPSDIDPTGKDPDPAATEPNLSKDAEPTAENQPTAESQPTAESRPTGAHASDDKANPSDQPPTGNQSAAAETATTQEPPTGNQSDANLNQEIPEAEAQTTSQGPEVGNDSMIGSPDKGQKTPHAQLGTSSGSLGGDEEEILRIKAADDSRPPILLKWWDENSQVSGIVINRQKEDEEVCQLKKVLGEATRIVNRIHLRNEAKTATLEKLVPHLGTLEAVRGQLHEAKEHAKKTEKELRDRIAQLQDSNYELSGSSKAQATRMAQMEKQIEALKKDKAELAAERDSALKEVEDRKIKSQAQFDVLVGKIKRLEGARDEVANVATPLVQAMFHNNSGPSALDATEIFDRLRVAPDVYFKNIKKAGSMGASMALAMTKSLYPRIEIDTIDGFADGTSEEAALDLISNAQNAADKIASDVVEQFRNNDLQPNNNNSDDERTDSD

SEQ ID NO: 132843 - protein, 153 aa, Oryza sativa
  unsure (1)..(153): unsure at all Xaa locations
  Clone ID: PAT_MRT4530_34772C.1.pep
MAHARGGARAPVKVAALPAVPATRPLHRAFRPPARTRSPSPPALPGVPAVPLADEREEREGGERVFSRKRAAAAASTPSDEDASSSASAPAVAAVXTRTRDNVLASLPXVFVMRSSGGEKAECAVCITELRDRPSLGSCSQRARTGPPIFRGP

SEQ ID NO: 132844 - protein, 115 aa, Oryza sativa
  Clone ID: PAT_MRT4530_34773C.1.pep
GPPKEGHILNFFTRKTQKNKIPFPFRKKKKKRALQKTFFFKKKKKGKSLCKKTSHLGGRGGRKLPQGSMKPNNKGGQKKKGSKLCFEKGSPKGGISFGNLGPTENKLFNTFRDGV

SEQ ID NO: 132845 - protein, 1085 aa, Oryza sativa
  Clone ID: PAT_MRT4530_34774C.1.pep
MADPEDAAAAAAAGNEDDVEDLYADLDDQVAAALAAAGESGGSNPATDGEAEAEAPGAHHTEADANEAVDLGDGTAGYISSDEESEDDLHIVLNEDGAAPPPPPPAGRCEEGSEEGEVSGSCVKGLSTDGGRGKLIPPHKGIERDLEGNKLGELHRKGLFEKTTAPITGQGDRSHQHAFQKEFNFFLPRNRTVFDVDIEAFQEKPWRQHGVDLTDYFNFGLDEESWRKYCFDMEHFRHGTRTLANELSGLQQEFHYNLGLSKSVPKSEIYSVLKEGNGIAKPKGRAIHVEGGMHERLPSADMWPPRQRDSDVIQVNMMFPPSNRSSSDDRSTVNDKCITTKRCGPSNNHPGVDEYLKETSSVVDRVVDKEVHKRGSSECTRSKTVLGDSACAGAQSSTPDNSDMLSEESTEDFHFKRKRGKSNSNAFYVETNRKDEHVLSDFCRHASKSDQESSKGESHRYTPSPADDRYHKATKRQRMDEAGACISSRSLNNCQSDHHLHESGHRAKKELKRQSLAGGKHALFERQENTTDNYSSRYARKHKHKRSSSTFLGTNYRVHNQLCEKQEYLPLGRAALRNDEQCSADYNQRHRRSWREINDDEDIVGCYSARRWQQRHDDLHGSHSMLKAEVCDDIDGHMYRERRYEETRKIRHDRNGDDEFFHYTDYRFGKVLDPEDRRRCRSQSAESCDEHFRRSEHLVFDHFTHPDQLMLSHQANDNHRKSEKGWPGPAASLTFMRSRNRFIDNERIQNGKMKYNHDGYYEKKRQHDSVFDVDDIQQPALYTGSVAETGQCIRPVKRRVHADHSMNRKDRFNSSYQKGRRLMHGWSMISDRDLYVAEMHNSPKDIDVEAMCSPNDMRNSNNIPNIYDKIRHEVVNLQPRDTDNMLLIHRKRKFKRQGIEIRRVVESDSEGCLPADSDLHGSKHKNIHQKVRKPRAFRISRNQASEKSEQQKQQHVSNNQEYEEIEEGELIEQDHQDTASRSKSNHQRKVVLKSVIEASSACQGGVINATSKDADCSNGATGECDNKHILEVMKKMQKRSERFKASIATQKEEDEDRKESLAVTCDVDDIKNQRPARKRLWGCSG

SEQ ID NO: 132846 - protein, 78 aa, Oryza sativa
  unsure (1)..(78): unsure at all Xaa locations
  Clone ID: PAT_MRT4530_34775C.1.pep
IDSRGVALKLPKLETAVQAVHGNLDVXSRSKESDMRDVSDWTNFKFTWLSLMSLSVCVIASIAQLWHLKRFFRKKKLI

SEQ ID NO: 132847 - protein, 44 aa, Oryza sativa
  Clone ID: PAT_MRT4530_34776C.1.pep
MVQLHDSVKLSGPARWRSGSSTALSSRGVAMESSFNSTSKDFFG

SEQ ID NO: 132848 - protein, 52 aa, Oryza sativa
  Clone ID: PAT_MRT4530_34777C.1.pep
FLLERIQLKPQRPQMYITNRQIKTICSSGDITSPIFETIHPFRPGRIAGHPR

SEQ ID NO: 132849 - protein, 105 aa, Oryza sativa
  unsure (1)..(105): unsure at all Xaa locations
  Clone ID: PAT_MRT4530_34778C.1.pep
MLARIRIVPICVKEIYHVIETESTDGRNPTRTRLGLYHIVRGPISPNPTWRSTDPRYKRXTPRQDLSHRISPLTHPPXPTKPEPTGAKLPGDLVEPTRLRSHRYH

SEQ ID NO: 132850 - protein, 68 aa, Oryza sativa
  unsure (1)..(68): unsure at all Xaa locations
  Clone ID: PAT_MRT4530_34779C.1.pep
FLWKQYVSLCEHDWCCIRLYLVDLPKITPEILSVCFGELRILFIRIRLXSYFYGLPSCHCPWLDTITW

SEQ ID NO: 132851 - protein, 67 aa, Oryza sativa
  Clone ID: PAT_MRT4530_3477C.1.pep
MAGRRQHERRRIGVTAMASARSRYLRRMCGGALATLWSGGEGPGGGAQGIGVGLGFAGGGGRGKEQR

SEQ ID NO: 132852 - protein, 65 aa, Oryza sativa
  Clone ID: PAT_MRT4530_34780C.1.pep
KYQNHQSLHLPDTRPPSGDPQQNMWLEAILVLLHLQIILQIQLIDQIIISIVEISITLPTTGLCS

SEQ ID NO: 132853 - protein, 92 aa, Oryza sativa
  Clone ID: PAT_MRT4530_34781C.1.pep
MAKQLSLPPLTSATTSISAAAASHLLGRLRAAEQDGAGRGGRCGESTAAARCVDCGGGVKREVVRARGYRGPETEPNVLENFVAHQKIYRPT

SEQ ID NO: 132854 - protein, 719 aa, Oryza sativa
  Clone ID: PAT_MRT4530_34782C.1.pep
MTGIDLNTVEEDQEEAAEEVAANGSSPAPAKAGAVCLELWHACAGPVAPLPRKGGVVVYLPQGHLEHLGDAPAAAAAAAAVPPHVFCRVVDVTLLANAATDEVYAQLSLVPEKEEVARRADHGEGEDGDGMKQRFARMPHMFCKTLTASDTSTHGGFSVPRRAAEDCFPPLDYSQQRPSQELVAKDLHSTEWRFRHIYRGQPRRHLLTTGWSAFVNKKKLVSGDAVLFLRGDDGELRLGVRRAAQLKNGSAFPALYNQCSNLGTLANVAHAVATESVFNIYYNPRLSQSEFIVPYWKFMKSLSQPFSVGLRFKMRYESEDATERRYTGIITGSGDTDPMWHGSKWKCLLVRWDDDAEFRRPNRVSPWEIELTSSVSGSHLSTPHSKRLKPCLPHVNPEYMVPRGGGCPDFAESAQFHKVLQGQELLGFKSHGGTAAATSQPCEARHLQYIDERSCSSDASNSILGVPRLGDRAPLGNPGFSYHCSGFGESHRLQKVLQGQELFRPYRGTLVDASMGSNGFHQQDSPRAPGVVNKWQAQLHGRAAFHGPPALALPSQSSSPPSVLMFQQANSKMPRLEFGHGQLDKHENDRRVRFGPSEGIERREQRIPLQPYPTSGEVIDGQVTVEKSHSPGRHGKDGPDNKAVGTNSCKIFGISLTEKVPAREELDDGDANYSLQSLKQVPKSLGNSCATMVAEYQGDGGTDDSDIFILDVGVGALIM

SEQ ID NO: 132855 - protein, 712 aa, Oryza sativa
  Clone ID: PAT_MRT4530_34783C.1.pep
MTGIDLNTVEEDEEEAAEEVAANGSSPAPARAGAVCLELWHACAGPVAPLPRKGGVVVYLPQGHLEHLGDAPAAAAAAAAVPPHVFCRVVDVTLLADAATDEVYAQLSLVPEKEEVARRADDGEGEDGDGMKQRFARMPHMFCKTLTASDTSTHGGFSVPRRAAEDCFPPLDYSQQRPSQELVAKDLHSTEWRFRHIYRGQPRRHLLTTGWSAFVNKKKLVSGDAVLFLRGDDGELRLGVRRAAQLKNGSAFPALYNQCSNLGTLANVAHAVATESVFNIYYNPRLSQSEFIVPYWKFMKSLSQPFSVGLRFKMRYESEDATERRYTGIITGSGDTDPMWHGSKWKCLLVRWDDDAEFRRPNRVSPWEIELTSSVSGSHLSTPHSKRLKPCLPHVNPEYMVPRGGGCPDFAESAQFHKVLQGQELLGFKSHGGTAAATSQPCEARHLQYIDERSCSSDASNSILGVPRLGDRAPLGNPGFSYHCSGFGESHRLQKVLQGQELFRPYRGTLVDASMGSNGFHQQDSPRAPGVVNKWQAQLHGRAAFHGPPALALPSQSSSPPSVLMFQQANSKMPRLEFGHGQLDKHENDRRVRFGPSEGIERREQRIPLQPYPTSGEVIDGQVTVEKSHSPGRHGKDGPDNKAVGTNSCKIFGISLTEKVPAREELDDGDANYSLQSLKQVPKSLGNSCATVHEQRPVVGRVIDISTMDMMI

SEQ ID NO: 132856 - protein, 274 aa, Oryza sativa
  unsure (1)..(274): unsure at all Xaa locations
  Clone ID: PAT_MRT4530_34784C.1.pep
EVSLREWLDRPGRAVEAPECLHVFRQVAESVAIAHAQGVAVGSARPSCFVVSPPFARVAFIESASGSDVSGSCSGSDGSEEADPEPSPPRRRRDGASGGEDRGGKTFPLRSVLAMELTWYTSPEEADDRGGATFASDVYRLGVLLFELFCTFETMEEKMRAMANLRHRVLPPQLLLKWPKEASFCQLLMHPVPETRPKMSDVLQSEFLNRSRNSLEEREAALRLREEIEEQELLXLDFFLQLQRRKQDXADHLQDTVAFLSSDINEAHQQSALG

SEQ ID NO: 132857 - protein, 348 aa, Oryza sativa
  unsure (1)..(348): unsure at all Xaa locations
  Clone ID: PAT_MRT4530_34785C.1.pep
MVALGRRSWLVPLAMVLAVSSCLRRSPRTPLHLAAPRLFYVVANHRLPKAQPRCGSYCSRAAPAPAGXPGDPTVFWGRNKNQGRRVXTLKETGXGLYTQPSGTLVISFYTVFRHARNWASPSGPDPRVIAADIKHCQTKNIFVFPSIGGGXKDYSLPTSKXAAADVADNIWNAHMDGRRPGVFRPFGDAAVDGIDFFIDQGAPDHYDDLARNLYAYNKMYRARTPVRLTATVRCAFPDPRMKKALDTKLFERIHVRFYDDATCSYNHAGLAGVMAQWNKWTARYPGSHVYLGLAAANVPGKNDNVFIKQLYYDRLPNVQKAKNYGGIMLWDRFYDKQTGYGKTVKYWA

SEQ ID NO: 132858 - protein, 118 aa, Oryza sativa
  unsure (1)..(118): unsure at all Xaa locations
  Clone ID: PAT_MRT4530_34786C.1.pep
LNPNSIAFLSIFAHLCEAXIRVVPLLDLFHFFYELRWMEANRVSGCCEFRLRDGMEAKYIPLQCHTSRSQWRSRWLYLELKELDPILVVPEVQPERSEDDYEVVEDFVSRRIQPLQAH

SEQ ID NO: 132859 - protein, 105 aa, Oryza sativa
  Clone ID: PAT_MRT4530_34787C.1.pep
MSGSDRALRRWGFSLGDRLGWCQRVAVRTSSVGKLGGGVGEALGGDGASPPSFSLSTPPFVTGGDGGGRGSWKRHSRDGNCQASVSTKVWLRIGVDDGGASPTSS

SEQ ID NO: 132860 - protein, 47 aa, Oryza sativa
  Clone ID: PAT_MRT4530_34788C.1.pep
MMQLLRGSLKLWTACEKPHSPEAALLWRKPGHTEGAHGGNPAYRPAQ

SEQ ID NO: 132861 - protein, 109 aa, Oryza sativa
  Clone ID: PAT_MRT4530_34789C.1.pep
MAISSGNQLQSSPVPCSALASQTNKQLVEEEEGTFLPTGEVRRRQRRLGKCSGCGGPSGWRRRRQLGKCGGGGWGSAAAVAALAVGGGGGSWGSAAVAAAGEVRRRRRP

SEQ ID NO: 132862 - protein, 631 aa, Oryza sativa
  Clone ID: PAT_MRT4530_3478C.1.pep
MQPALRRRRRRQGFLLPFACLSAALIAAALLPGAAFADGVTPSEARRLRDEVKDMFYHAFDGYMQHAFPLDELRPLSCQGEDSLGGYALTLIDSLDTLALLGDKERFDAAVEWVGKNVRFDINKTVSVFETNIRILGGLLSAHLIASDYATFSLQITSTAGGGTLTLEFGVLSRLTNDSVYERVTKNSVRGIWARRSKLDLVGAHINVFTGEWTQKDAGIGTSIDSFYEYLLKAYLLFGDEEYLYIFQEAYKAAMHYLHHDPWYVEVNMNSGATVWPLFNSLQAFWPGLQVLAGDVDPAIRTHAAFFSVWKKYGFTPEGFNLATSTVQNGQRSYPLRPELIESTYWLFKATRDYRYLDVGRDILASLQYGAKCPCGYCHISDVETHQQDDHMESFFLAETVKYLWLLFDLAAGPDNIVENGPYKYIFSTEGHLLPATPQITLLDEHCLYAGAFCNGTAGHGYGTGDSSNKHQNANSVPFDDSRTPSDQSLSNILSTTRGYIKGVCPGLTHAQKLGISYSAEEDNSIQQNSGSSENLDESHVIKSSVQAQSSSVILISHPVASQTEEPTSGRSQYNANIVATAESVGTDTAGASSHPEDLVKETESVSEQKEINDKEIASQGSQPTEGRYLT

SEQ ID NO: 132863 - protein, 141 aa, Oryza sativa
  unsure (1)..(141): unsure at all Xaa locations
  Clone ID: PAT_MRT4530_34790C.1.pep
LWAFFCPPALAPFPPFFGGGPPPLRNWVRWAPGSPPLPQGVVPPGGRAPVTLXYPGPILGEPGGGFKMVLPKRAPRGGFPXPTLGVLQTPRPGFWGRNPGPPPPVVSPGWPPPGRGGAGLPGVRPFVFPKKGPVNDKTNPN

SEQ ID NO: 132864 - protein, 83 aa, Oryza sativa
  unsure (1)..(83): unsure at all Xaa locations
  Clone ID: PAT_MRT4530_34791C.1.pep
WRHHLHRSACLRRRRLVSPPSRLAYYAAIVGRLRLHRRPSXAADWCLCGWLVTPPFLSVHVFTAGLPSPPPTGVSAPPFMGVH

SEQ ID NO: 132865 - protein, 803 aa, Oryza sativa
  Clone ID: PAT_MRT4530_34792C.1.pep
MAEEKESFEGQWAPSDVTEENLKEMVAHGVLPAKEIIGWRPACGEAFPSPDTHEVVVFSHFFYGGFALPTSKFFRGILSFYRISLHHLNPNSIVHIANFVHVCEAFLGIKPHFALFRRIFFLKPQPNKSKPCVVGGAGFQLRGTLSQKYFSMPFKTSNKGWHANWFYVQNPEPALPEYSCLPPVYQDTWNSLPIGDEAAQALELMDRMLKLKEQGLQGEQITRHFIKCRLAPIKERSRTAFEFDGKHDPNREDPDSLDFKIMKERMYKIFSNAIVVSYSHQLPVVPYNAFNPPPQEYVLMKSDPPITQRRSPRQHTVQGGGGPTIRSDPQPQTSKPTGQTGSRKRKLVLNDDEGDDGNKSGDKGTPNKLPKHTIPRKKLAGRQMPKIRTSSRKPSDIDPTGKDPDPAVTEPNLSKDPEPTAESQPTGAHASGETTTTQEPPTGNQSDVGPDQEIPEVEAQTTTSQGPEAGKDSMIGSPNKEQGSPHAQLGTSSGPPGDDEEEIPRIKAADDSRPPILLKWWDENSQAAGIVINRQKEDEEVCQLKKALGEATRIVNRIHLRNEAKTATLEKLVPHLGTLEAVRDQLHEAKEHAKKTEKELRDRIAQLQDSNFELSGSSKAQATRMAQMEKQIEALKRDKVELAAQRDSALKEVEDRKIKSQAQFDVLVGKIKRLEGARDEVANVATPLVQAMFLNNSGPSALDATEIFDKLRVAPDVYFKNIKKAGSMGASMALAMTKSLYPRIEIDAIDGFADGTSEEAALDLISNAQNAADKIASDVVDQFRNNDLQPSNNNSDDERTDSD

SEQ ID NO: 132866 - protein, 833 aa, Oryza sativa
  Clone ID: PAT_MRT4530_34793C.1.pep
MAEEKESFEGQWAPSDVTEENLKEMVAHGVLPAKEIIGWRPACDEAFPTPDTHEAVVFSHFFYGGFALPTSKFFRGILNFYGISLHHLNPNSIVHIANFVHVCEAFLGIRPHFALFRRIFFLKPQPNKNKPCVVGGAGFQLRGTLSQKYFSMPFKTSNKGWHANWFYIQNPEPALPEYSCLPPVYQDTWNSLPMGDEAAQALELMERMLKLKEQGLQGEQITRHFIKCRLAPIKERSRTAFEFDGKHDPNREDPDSLDFKIMKERMYKIFSNAIVVSYSHQLPVVPYNAFNPPPQEYVLMKSDPPIAQRRSPRQHTVQGSGGPTIRSDPQPQTSKPAGQTGSRKRKLVLNDDEGDDSNKSGDKGTPNKLPKHTMPRKKLAGRQMPKIRTSSRKPSDIDPTGKNPDPAATESNLSKDADPTAENQPTAESQPTAESQPTGAHASDDKANPSDQPPTGNQSAATETATTQEPPTGNQSDVGLNQEIPEAEAQATTSQGPEAGNDSVIGSPDKEQGSPHAQLGTSSGPLGGDEEEILRIKAADDSRPPILLKWWDENSQVSGIVINRQKEDEEVCQLKKVLGEATRIVNRIHLRNEAKTTTLEKLVPHLGTLEAVRSQLHEAKEHAKKTEKELRERIAQLQDSNYELSGSSKAQATRMAQMEKQIEALRKDKTELAAERDSALKEVEDRKIKSQAQFDVLVGKIQRLEGARDEVANVATPLVQAMFLNNSGPSALDATEIFDKLRVAPDVYFKNIKKAGSMGASMALAMTKSLYPRIEIDTIDGFADGTSEEAALDLINNAQNAADKIASDVVEQFHNNDLQPSNNNSDDERTDSD

SEQ ID NO: 132867 - protein, 831 aa, Oryza sativa
  Clone ID: PAT_MRT4530_34794C.1.pep
MAEEKESFEGQWAPSDVTEENLKEMVAHGVLPAKEIIGWRPACGEAFPTPDTHEIVVFSHFFYGGFALPTSKFFRGILNFYGISLHHLNPNSIVHIANFVHVCEAFLGIKPHFALFRRIFFLKPQPNKSKPCVVGGAGFQLRGTLSQKYFSMPFKTSNKGWHANWFYIQNPEPALPGYSCLPPVYQDTWNSLPIGDEAVQALELMDRMLKLKEQGLQGEQITRHFIKCRLAPIKERSRTAFEFDGKHDPNREEPDSLDFKIMKERMYKIFSNAIVVSYSHQLPVVPYNAFNPPPQEYVLMKSDPPIAQRRSPRQHTIQGSGGPTIRSDPQPQTSKPAGQTGPRKRKLVLNDDEGDDSNKSGDKGTPNKLPKHTMPRKKLAGRQMPKIRTSSRILRRKPSDIDPTGKDPDPAVTEPNLSKDAEPTAESQPTAESQPTGAHASDDKANPSDQPSTGNQSATTETATTREPPTGNQSDVGPDQEIPEVEAQATSSQGPKAGNDSVVGSPDKEQGSSRAQPGTSSGTLGDDEETIPRIKAADDSRPPILLKWWDENSQVSGIVINRQKEDEEVCQLKKALGEATRIVNRIHLRNEAKTATLEKLVPHLGTLEAVREQLHEAKEYAKKTEKELRERIAQLQDSNFELSGSSKAQATRMAQMEKQIEALKRDKVELAAERDSALKEVEDRKIKSQAQFDVLVGKIKKLEGARDEVANVATPLVQAMFLNNSGPSALDATEIFDKLRVAPDVYFKNIKKAGSMGASMALAMTKSLYPRIEIDTIDGFADGTSEEAALDLINNAQNAADKIASDVVDQFRNNDLQPSNNNSDDERTDSD

SEQ ID NO: 132868 - protein, 479 aa, Oryza sativa
  Clone ID: PAT_MRT4530_34795C.1.pep
MAFSVEKWVGFGSAMAGVGLLWSRMPEHVHEEARYIISSLVPMAMSYFNPYEQITVSDKLRAQLRNNSNDDPLISLEENQEVADSFEGARMWWRLFPKTSKKRGGTIISFLPGDSDEPRSLRLVFHKRHRQLVLNSYLPGVVRQWRELIAKNRQRLLFTNHVKDGKSMWSNVPYNPPSTFDLLAMEPAKKVEIMDDLRAFQKGKEYHSKVGKAWKRGYLLHGPPGTGKTTMIGAMANFLDYDVYDLDLISVLNNADLRKLFLDTTDKSIIVIEDIDAIEVELTTNRKGKKAANGDDKHVVIGLSDKNHDKSKVTLSGLLNFIDGLWSACGSERIFVFTTNHVDHLDPALTRRGRMDMDIEMSYCRFEAFKMLAKNYLNITEHSLFSEIEGLLSETNTTPADVADKLMPRNGEIGPLLDEIDEEPVDRDSIMLRCNRKRHADECLESLVETLIMKRAKMNSATSPMEEAKEEEQPNAEES

SEQ ID NO: 132869 - protein, 833 aa, Oryza sativa
  Clone ID: PAT_MRT4530_34796C.1.pep
MAEEKESFEGQWAPSDVTEENLKEMVAHGVLPAKEIIGWRPACGEAFPTPDTHEIVVFSHFFYGGFALPTSKFFRGILSFYGISLHHLNPNSIVHIANFIHVCEAFLGIKPHFALFRRIFFLKPQPNKSKPCVVGGAGFQLRGTLSQKYFSMPFKTSNKGWHANWFYVQNPEPALPEYSCLPPVYQDTWNSLPIGDEAAQALELLDRMLKLKEQGLQGEQITRHFIKCRLAPIKERSRTAFEFDGKHDPNREEPDSLDFKIMKERMYKIFSNAIVVSYSHQLPVVPYNAFNPPPQEYVLMKSDPPIAQRRSPRQHTIQGSGGPTIRSDPQPQTSKPAGQTGPRKRKLVLNDDEGDDSNKSGDKGTPNKLPKHTMPRKKLAGRQMPKIRTSSRKPSDIDPTGKDPDPAVTEPNLSKDAEPSAENQPTAESQPTAESQPTGAHASDDKADPSDQPPTGDQSATAETATTQEPPTGNQSDVGPDEEIPEVEAQTTTSQGPEAGKDSMIGSLNKEQGPPHVQPGTSSGTLGDDEETIPRIKAADDSRPPILLKWWDENSQVAGIVINRQKEDEEVCQLKKALGEATRIVNRIHLRNEAKTTTLEKLVPHLGTLEAVRDQLHEAKEYAKKTEKELRDRIAQLQDSNFELSGSSKAQATRMAQMEKQIEALKRDKVELAVQRDSALKEVEDRKIKSQAQFDVLVGKIKKLEGARDEVANVATPLVQAMFLNDSGPSALDATEIFDKLRVAPDVYFKNIKKAGSMGASMALAMTKSLYPRIEIDAIDGFADGTSEEAALDLISNAQNAADKIASDVVEQFRNNDLQPSNNNSDDEKTDSD

SEQ ID NO: 132870 - protein, 821 aa, Oryza sativa
  Clone ID: PAT_MRT4530_34797C.1.pep
MAEEKESFEGQWAPSDVTEENLKEIVAHGVLPAKEIIGWRPACGEAFPSPDTHEVVVFSHFFYGGFALPTSKFFHGILSFYGISLHHLNPNSIVHIANFIHVCEAFLGIKPHFALFRRIFFLKPQPNKSKPCVVGGAGFQLRGTLSQKYFSMPFKTSNKGWHANWFYVQNPEPALPEYSCLPPVYQDTWNSLPIGDEAAQALELMDRMLKLKEQGLQGEQITRHFIKCRLAPVKERSRTAFEFDGKHDPNREEPDSLDFKIMKERMYKIFSNAIVVSYSHQLPVVPYNAFNPPPQEYVLIKSDPPITQRRSPRQHTVQGGGGPIIRPDSQPQTSNPTGQTGSRKRKLVLDNDEGDDDNKSGDKGSPNKLSKRTMPRKKLAGRQMPKIRTSSRKPSDIDPTGKDPDQAVTEPNLSKDPEPTAESQPTGAHASGDKADPSDQPPTGNQSTAAETATTQEPPTGNQSDAGPDQEIPEVGAQTTTSQGPETSKDSMIGSPNKEQGSPHAQLGTSSGPPGDGEEEIPRIKAADDSRPPILLKWWDENSQVAGIVINRQKEDEEVCQLKKALGEATRIVNRIHLRNEAKTATLEKLVPHLGTLEAVRDQLHEAKEHAKKTEKELRDRIAQLQDSNFELSGSSKAQATRMAQMEKQIEALKKDKVELAAQRDSALKEVEDCKIKSQAQFDVLVGKIKRLEGARDEVANVATPLVQAMFLNNSGPSALDATEIFDKLRVAPDVYFKNIKKAGSMGASMALAMTKSLYPRIEIDAIDGFADGTSEEAALDLITNAQNAADKIASDVVEQFRNNDLQPSNNNSDDERTDSD

SEQ ID NO: 132871 - protein, 860 aa, Oryza sativa
  Clone ID: PAT_MRT4530_34798C.1.pep
MAEERESFESQWAPSDVTEENLKEMVAHGVLPAKEIIGWRPACGEIFPTPDTHEIVVFSHFFYGGFALPTSKFFRGILNFYGISLHHLNPNSIVHIANFVHVCEAFLGIKPHFALFRRIFFLKPQPNKSKPCVVGGAGFQLRGTLSQKYFSMPFKTSNKGWHANWFYVQNPEPALPEYSCLPPVYQDTWNSLPIGDEAAQALELLDRMLKLKEQGLQGEQITRHFIKCRLAPIKERSRTAFEFDGKHDPNREEPDSLDFKIMKERMYKIFSNAIVVSYSHQLPVVPYNAFNPPPQDYVLMKSDPPIAQRRSPRQHTIQGSGGPTIRSDPQPQTSKPAGQTGPRKRKLVLNDDEGDDSNKSGDKGTPNKLPKHTMPRKKLAGRQMPKIRTSSRYKLLGTILFRHASLIEIMLSIERTLCRKPSDIDPTGKDPDPAVTEPNLSKDTEPSAENQPTAESQPTAENQPAGAHASDDKADPSDQPPTGDQSATAETATTQEPPTGNQSDVGPDEEIPEVEAQTTTSQEPEAGKDSMIGSLNKEQGPPHVQPGTSSGTIGDDEEIIPRIKAADDSRPPILLKWWDENSQVAGIVINRQKEDEEVCQLKKALGEATRIVNRIHLRNEAKTTTLEKLVPHLGTLEAVRDQLHEAKECAKKTEKELRDRIAQLQDSNFELSGSSKAQATRMAQMEKQIEALKKDKAELAAERDSALKEVEDRKIKSQAQLDVLVGKIKRLEGARDEVANVAAPLIQAMFLNNSGPSALDATEIFDKLSVAPDVYFKNIKKAGSMGASMALAMTKSLYPRIEVDTIDGFANGTSEEAALDLISSAQNAADKIASDVVEQFRNNDLQPSNNDSDDEMTDSD

SEQ ID NO: 132872 - protein, 831 aa, Oryza sativa
  Clone ID: PAT_MRT4530_34799C.1.pep
MAEEKESFEGQWAPSDVTEENLKEMVAHGVLPAKEIIGWRPACGEAFPSPDTHEVVVFSHFFYGGFALPTSKFFRGILSFYGISLHHLNPNSIVHIANFVHVCEAFLGIKPHFALFRRIFFLKPQPNKSKPCVVGGAGFQLRGTLSQKYFSMPIKTSNKGWHANWFYIQNPEPALPEYSCLPPVYQDTWNSLPIGDEAAQALELMDRMLKLKEQGLQGEQITRHFIKCRLAPIKERSRTAFEFDGKHDPNREEPDSLDFKIMKERMYKIFSNAIVVSYSHQLPVVPYNAFNSPPQEYVLMKSDPPITQRRSPRQHTVKGGGGPTIRSDSQPQTSNPTGQTGSRKRKLMLNDDEGDDGNKSGNKSLPNKLPKHTTPRKKLAGRPTPKIRTSSRHKPLGTISLRKPSDIDPTGKDPDPVVTEPSSSKDSEPTAENQPTGAHTSGDTADPSDQPPTGDQSAATETTTTQEPPTGNQSDVGPDQEIPEVEAQTTTSQGPEAGNDAMIGSSNKEQESPHAQLGTSSGPPGDDEEEIPRIKAADDSRPPILLKWWDENSQAAGIVINRQKEDEEVCQLKKALGEATRIVNRIHLRNEAKTATLEKLVPHLGTLEAVRDQLHEAKELAKKTEKELRDRIAQLQDSNFELSGSSKAQATRMAQMEKQIEVLKRDKVELAAQRDSALKEVEDRKIKSQAQFDVLVGKIKKLEGARDEVANVATPLVQAMFLNNSGPSALDATEIFDKLRVAPDVYFKNIKKAGSMGASMALAMTKSLYPRIEIDAIDGFADGTSEEAALDLISNAQNAADKIASDVVEQFRNTDLQPSSNNSDDEKTDSD

SEQ ID NO: 132873 - protein, 98 aa, Oryza sativa
  Clone ID: PAT_MRT4530_3479C.1.pep
RGGNLSKKHRGKKMGFEQTPRTRNENLRFRWGNDKGAKTPKRKILIGTKKRREKPPESYRGEGGFMPSAKAKGGAKGTTGKKDTRGSLFSKEKWHEGQ

SEQ ID NO: 132874 - protein, 265 aa, Oryza sativa
  Clone ID: PAT_MRT4530_347C.1.pep
MTISRERTRRLFAMQIAIVSPVAIVLYASAIAGGTPFITTAALVFVFQLIAGGLIAIYLDDLLRKGYGFLSGLSLFSAANCCACIFWKALNHAYPWMMMLATLAFFLLVLIILGDHHITLPPMLSIKYGETNKVVNMLGIWKEMRQYPGHYWPVSGIASYITTPLTVCSRSKRYLVRLLKKTQRTRVSPEQLLQEHDEDESISPRRCRHYMTMAAYIVGICVGLLNLLAGFMGLGGSGPAIMLAVTVIHNLVEGRNTGHVAAFGL

SEQ ID NO: 132875 - protein, 848 aa, Oryza sativa
  Clone ID: PAT_MRT4530_34800C.1.pep
MAEEKESFEGQWAPSDVTEENLKEMVAHGVLPAKEIIGWRPACGEAFPTPDTHEAVVFSHFFYGGFALPTSKFFRGILSFYGISLHHLNPNSIVHIANFVHVCEAFLGIKPHFALFRRIFFLKPQPNKSKPCVVGGAGFQLRGTLSQKYFSMPFKTSNKGWHANWFYIQNPEPALPEYSCLPPVYQDTWNSLPIGDEAAQALELMDRMLKLKEQGLQGEQITRHFIKCRLAPIKERSRTAFEFDGKHDPNREEPDSLDFKIMKERMYKIFSNAIVVSYSHQLPVVPYNAFNPPPQEYVLMKSDPPITQRRSPRQHTVQGGGGPTIRSDPQPQTSNPTGQTGSRKRKLVLNDDEGDDGNKSGDKGSPNKLPKHTTPRKKLASRPRPKIRTSSRYKPLGTISLRHASLMEIILNIERTLCRKPSDIDPTGKDPDPTVTEPSSSKDSEPTAESQPTGAHTSGDKANPSDQPPTGNQSAATETTTTQEPPTGNQSDVGPDQETPEVEAQTTTSQGPEAGNDSMIGSPDKEQGSPHAQLGTSSRPPGDDEEEIPRIKAADDSRPPILLKWWDENSQATGIVINRQKEDEEVCQLKKALGEATRIVNRIHLRNEAKTATLEKLVPHLGTLEAVRDQLHEAKELAKKTEKELRDRIAQLQDSNFELSGSSKAQAARMAQMEKQIEALERDKVELAAQRDSALKEVEDRKIKSQAQFDVLVSKIKRLEGARDEVANVAIPLVQAMFLNNSGPSVLDATEIFDKLRVAPDVYFKNIKKAGSMGASTALAMTKSLYPRIEIDAIDGFADRTSVEAALDLISNAQNAADKIASDVVDQFRNTDLQPSSNNSDDERTDSD

SEQ ID NO: 132876 - protein, 87 aa, Oryza sativa
  Clone ID: PAT_MRT4530_34801C.1.pep
MVQQQCKQAMLIRVGMGEFKSLCHAGFFFPEAKIKGHWKWSKTIKVVESETLGSATYGKNRKILQSNSGRSGSATSMQLIIRTSNFY

SEQ ID NO: 132877 - protein, 821 aa, Oryza sativa
  Clone ID: PAT_MRT4530_34802C.1.pep
MAEEKESFEGQWAPSDVTEENLKEMVAHGVLPAKEIIGWRPACGEAFPTPDIHEAVVFSHFFYGGFALPTSKFFRGILSFYGISLHHLNPNSIVHIANFVHVCEAFLGIKPHFALFRRIFFLKPQPNKSKPCVVGGAGFQLRGTLSQKYFSMPFKTSNKGWHANWFYIQNPEPALPEYSCLPPVYQDAWNSLPIGDEAAQALELMDRMLKLKEQGLQGEQITRHFIKCRLAPIKERSRTAFEFDGKHDPNREEPDSLDFKIMKERMCKIFSNAIVVSYSHQLPVVPYNAFNPPPQEYVLMKSDPPITQRRSPRQHTVQGGGGPTIRSDPQPQTSNPTGQTGSRKRKLVLNDDKGDDGNKSGDKGSPNKLPKHTTPRKKLASRPRPKIRTSSRKPSDIDPTGKDPDPTVTEPSSSKDSEPTAESQPTGAHTSGDKANPSDQPPTGNQSAATETTTTQEPPTGNQSDVGPDQETPEVEAQTTTSQGPEAGNDSMIGSPDKEQGSPHAQLGTSSRPPGDDEEEIPRIKAADDSRPPILLKWWDENSQAAGIVINRQKEDEEVCQLKKALGEATRIVNRIHLRNEAKTATLEKLVPHLGTLEAVRDQLHEAKELAKKTEKELRDRIAQLQDSNFELSGSSKAQAARMAQMEKQIEALERDKVELAAQRDSALKEVEDRKIKSQAQFDVLVGKIKRLEGARDEVANVATPLVQAMFLNNSGPSALDATEIFDKLRVAPDVYFKNIKKAGSMGASTALAMTKSLYPRIEIDAIDGFADGTSVEAALDLISNAQNAADKIASDVVDQFRNTDLQPSSNNSDDERTDSD

SEQ ID NO: 132878 - protein, 41 aa, Oryza sativa
  Clone ID: PAT_MRT4530_34803C.1.pep
QSETPRCRVVDGILAAVTHLVGLWPINGTRRPVWQQSRAAG

SEQ ID NO: 132879 - protein, 151 aa, Oryza sativa
  unsure (1)..(151): unsure at all Xaa locations
  Clone ID: PAT_MRT4530_34804C.1.pep
MACQVPTRSPASANGWLCWILXPGLHAAPGANRHTASGNDTKKNNSGQGTGGTKTNYNGTTASTNGRKKRRKRKDQRRQDENREREDNARTDGNRPAHRSGKKKNRARGKKRPQHQPNRHEKGXXXGTQSSLGPKSSLLYACMRVGCIDHA

SEQ ID NO: 132880 - protein, 67 aa, Oryza sativa
  Clone ID: PAT_MRT4530_34805C.1.pep
RHGLAHPGLGDSGVQRKPLQRLQPRAARGGLRLRLRFRRRRHRDGLDALRGVRVQNGDNTRRIEKLE

SEQ ID NO: 132881 - protein, 97 aa, Oryza sativa
  Clone ID: PAT_MRT4530_34806C.1.pep
MSMSPSHIGVPQPFTVFGPYRPSHTWLPYATQHAGVLQHLDIGGKPAWVLVQPCRQCGLQEWSGGGGTRSVVTNKAEVSMGEKGSRPGVVLLSLLLA

SEQ ID NO: 132882 - protein, 78 aa, Oryza sativa
  Clone ID: PAT_MRT4530_34807C.1.pep
GHHAPLKSLQVVGPYDDSHGRIFRVVFQTVPDLAALASCQGLGLRISHLGRMSCSSHCSFTGLPLELTSPGRQQRTRN

SEQ ID NO: 132883 - protein, 107 aa, Oryza sativa
  Clone ID: PAT_MRT4530_34808C.1.pep
LTLAPLEPMGHILYNLPRQGIGKNEHLFLHSIFSYAAGKFFTLPAPKNPQNKQRIPHRFTTVSSQTKISSAQHPNFPLFWGNHSESNKQFKARDFFFLPSGGQMASH

SEQ ID NO: 132884 - protein, 193 aa, Oryza sativa
  Clone ID: PAT_MRT4530_34809C.1.pep
MGCANIKYNRHNLLNLLKLCGSQRYKEYGRQIHGHAIKTINKMNVVLETELIDMYAKCGCIEVARLLFLRMNERNLISWNALLSGYAADGQPVATINIYRQMELACIRPDKYTLAGLLSLCRYQGLLHYGRQIHAHLIKMGSEMNVVMQTILVHMYIKCMRQQDAENVCIMIEERNSYVLDAFSKVYGDDYLI

SEQ ID NO: 132885 - protein, 91 aa, Oryza sativa
  unsure (1)..(91): unsure at all Xaa locations
  Clone ID: PAT_MRT4530_3480C.1.pep
RLLLPFASXLPRXSHRRVIFSPPIFEPNSQPPPPPPXPPPRPRPRFLLPADPAAINXSQPXGSETRSRLXXSWLLCSTXXGGRRGRERRWR

SEQ ID NO: 132886 - protein, 645 aa, Oryza sativa
  Clone ID: PAT_MRT4530_34810C.1.pep
MRVGISEFPCRISGRPRQKWRRMERFVDDLLRSLKKNATLKIESIYRICNACVNPKRIPDLIEKVLATAIHEKLIEITSSLEIKTNAAQLKIPHVGRSERREAVGWNLFRNYLTGPIPSFIGKFTSMQYLSLSFNPLSGLLPKELGNLTNLLSLGISSDNFTGSLPEELGNLTKLQQLSASDNVFKGKIPAYLGTMTNLVGRWIGDIINGVSPLAFISNMASLSTLILRNCKISSDLGAVEFSMFKQLKLLFLGNNSLTGKLPDGISSSLKVIDFSYNQLTGSIPSWARQNNLQLNLVANNFLLDTTSESTLPWGINCLQQDTPCFRGSPEYYSFAVDCGSNASIRGSDDTIYEADPTNLGAATYYVTGQTRWGVSSVGNAIDAKNIIYSSQPFQNVVDSELFETARMSSSSLRYYGLGLENGNYTVLLQFAELAFPDSQTWLSLGRRVFDIYIQGALKQKDFDIRKTAGGKSFTVVNRSFMVTVSKNFLEIHLFWAGKGTVDIPTKDNYYGPMISALSVTPNFTPTVRNGIPKRKSKAGAISGILIGAIVLVLAALFGVFTLVKKRRALAQQKEELYNLVGRPDVFSYAELKLATDNFSSQNILGEGGFGPVYKLVINLSDLALKCCVLATFVYAQNTHVKTLA

SEQ ID NO: 132887 - protein, 48 aa, Oryza sativa
  Clone ID: PAT_MRT4530_34811C.1.pep
NFQPRMGQMYLQQKTHWPGSHSNNTIPRAVPALLLRPKHLKRTSWSLH

SEQ ID NO: 132888 - protein, 256 aa, Oryza sativa
  unsure (1)..(256): unsure at all Xaa locations
  Clone ID: PAT_MRT4530_34812C.1.pep
MSNTTMAIXSTILLFLLAGLAAAHGDGDTIIRLPSDGAKAPPRPPKPWDCCDNIEISPLVIFPPLYRCNDEVKQCSAACKECVEAPGDFPGGAFVCRDWFSTVLDPGHMCTAAWIGRRRRGPWKCCDSIVQRXRRCYPPYWRCDDEXLEPGQCTAACKSCREAPGPFPGTLICEDIYWGADPGPLCTPXRPWGDCCDKAFXNKMNPPTCRCMDEVNKCAAACKDCQRVESSEPPRYVCKDRFTGQPGPMCKPRAEN

SEQ ID NO: 132889 - protein, 46 aa, Oryza sativa
  Clone ID: PAT_MRT4530_34813C.1.pep
FFSTFTTKTTLEYCYSAQFGWARTYLNKCHFYHVLIYQSLLQVTIP

SEQ ID NO: 132890 - protein, 180 aa, Oryza sativa
  Clone ID: PAT_MRT4530_34814C.1.pep
RIQQQKLLPTATVIVYEVLTPIVTNTGDCHVANKVVTPVILVLCAFFCAFSQFTDSYVGADGKVRYGLVTARGLLPFSGGGGADGGDAAGRDFSKYRLRFGDFVHAFFSVAVFAAVALLADANTVSCFYPSLKDQQKKVVMALPVVVGALASVVFVVFPSTRHGIGYPPAKPATASLASL

SEQ ID NO: 132891 - protein, 32 aa, Oryza sativa
  Clone ID: PAT_MRT4530_34815C.1.pep
GLGRQKLKTTHQVKNKFQNLLETKLNCKDSVP

SEQ ID NO: 132892 - protein, 70 aa, Oryza sativa
  Clone ID: PAT_MRT4530_34816C.1.pep
SMWDLLDLDRLVRTKQRPGTENPTVLVFLWLVPLSIYAASGLSPAHEPVARTKRYNLLCLNSDRSSYTYR

SEQ ID NO: 132893 - protein, 187 aa, Oryza sativa
  Clone ID: PAT_MRT4530_34817C.1.pep
MVCKNGSYLCNVISTTTGHPVFYLASPCGRLVLMKLLLVDLSFSSQLASYFVIICVIVAVFYCFLKQLAEFSDTDHQTVRDQDARNNETEPILPRKRVVFSYGATEEQPESSMCSSEDMCSENVCKICYDAPRSCFFIPCGHGFACFTCARRIAEDKNQACPICRRLIHRVRRLVEPLGSSCGKDFQ

SEQ ID NO: 132894 - protein, 609 aa, Oryza sativa
  Clone ID: PAT_MRT4530_34818C.1.pep
RHHRRRRLGGSTARTAQAHRRTAVLRHERSPFRLLRSFSPLPGRPLARWADAAITVVVVVLPASGFNTQNSLEIWVKFLGVTKWYQSQLDFVKPWRINRQLRVCSEVKSSIKLHAAKSGKQMVSVRGNFNGSGSRQFHGSTQLNSISFPRQPLKDQPQSQVMANQTQTVEELLQQMRRRYQIYLMQQMQRQCQEPRQVHQPQMQVQVPARNLNQSQEFPISAPKTPVKMMSRSPKITSANSPSDQRKISATCYDCGEQGHYVRNCPWKVFARSPEKDEKQCPGSNQAPSQSTDKKDGTLQRNSGANRTVIWKMDNGRTMIITGSEFTPEDAARIPKRRRGRNTFRGARQLTRHLIKYGPPRPEDDESGERFSADDNDDNDDDNDDNDDATLDSFRERELKCKACARCGIVGHTASLCLPTCRCGEYTHYSDACPLRKVTCFLCEGTDHVPKDCQLNAVLAMTKKEQGATVQPIRQPMVVDNNSLNPSTLSPTTAPVEANLGRSNVARDVHESLCVPVSAAKVHNQKPAPRDPASRFCRNCRKPGHRFSDCPLPRAAKAVRRDSQVTSTAHDTNRHLNVQPPPQRIIVKGTVKGHIVPPAIVSSLQHQHQ

SEQ ID NO: 132895 - protein, 478 aa, Oryza sativa
  unsure (1)..(478): unsure at all Xaa locations
  Clone ID: PAT_MRT4530_34819C.1.pep
MPLTFKTMADKTLREFVAPSADNVAIGSQINMGDVDFDLKSSLITMAQASPYCGKPNEDANAYLQQFLEIYNTYTMKEVSPDAIRLRLFPVSLLWNAKQWFYANCATINTCDKCSTAFLLMFFPRGKSNALRGRISSFQQTTDESIPKAWERLQEYVAACPHHGMDDWLILQNFYIGFTPMSRDHLNMVAGGAFFSKTVREAIDLIEKMVSNMGWSEERLQTRQRGVHTIKEMEILAAKLDFLMKRLDDHDKRPQGTVKALDSHVTCEVRGSTGHPRNDCPETHEEAMYMGNNNNGYRPQGGQGWNQPCPYYQGARIFRRNVKVIITRGGKSTRDPPYPNLTRTSSITREAPSGNTTDEEVQQEKTMPQEYYDTRLLPFPERSRKPSVDEQFTHFVEVIQKIHINVPLLDAMQVPTYACYLEDILNNKRSLPTTKVVKLMEQCSNAILQKLLEKKDPXCPTITCSIGTQQFDQALCDL

SEQ ID NO: 132896 - protein, 276 aa, Oryza sativa
  Clone ID: PAT_MRT4530_3481C.1.pep
WRAQPHSASRCSASSRRPRPRRRRPPPPPRRRPPRHRPPPRRRPRPPRRPPPPPRPPPPPRPPRRRPPPPPRPPPRRPPPRLRPKRHPPSPPRHPPRRPRRPRPPRRRPRLPRSRLPSRRLLPPPPRRPPPSPPSPTHPRRRRPRRRSPPRHPRRRRRAPRPPPRPPSPSPSPPSTPRRLRPPPPRPRPTPPAPPATVSPPTPREPQGGPACRRSRRRAPWRSASSPSSPKQNGVVQRREQRRRRRWQRPVRPTTFCAVFCSSILLRDGREEEEGP

SEQ ID NO: 132897 - protein, 606 aa, Oryza sativa
  Clone ID: PAT_MRT4530_34820C.1.pep
MARTTANATASMARLGAAASGDQSSGGGGGEEGDGARVIESMGGLSEMGKKRKGMAVQLVSMRDNFIGSGSQQFHGSTQHNSMSFPCQPFEDQPQSKVMANQTQTVEELLRQMRRRYQIYQMQQMQRQCQEPRQGHQPQMQVQVPTRNLNQSQSQEFPISAPKTPVKMLSRSPKITSANSPSDQRKISATCYDCGEQGHYPNSGANRTVKWKMDNGRTMFITSSEFTPEDVARIPKRQRGRNTFRGARQLTRHLIKYGPPRPEDDESGERFSADDDDDDDDDDDDDDDATLNSFMERGLEFKACTRCGIVGHTASLCLPTCRCGEYTHYSDACPLRKVTCFLCEGTDHVPKDCQLNAVIAKTKKEQGTTVQPIRQPMAVDNNSHNPSALPPTPAPVETNHGRSNVTKDVHKSLLVPVSAVNVHNQKLAPQDQASRFCLNCRKPGHCFSDCPLPRAAKAVHRDSQVTSTAHDTNRHLNVQPPPQRIIVKGTVRGRIVPPAIVSSLQHQRQQGKQCQENNSSLQLQRGGTLLRQHPQQVSPAPGRSTIVSSSNAPRIAPIRRSIGKSPLGNPTGKKILPVTAVKTVATPPSKISKQGNVPGEASASRS

SEQ ID NO: 132898 - protein, 297 aa, Oryza sativa
  unsure (1)..(297): unsure at all Xaa locations
  Clone ID: PAT_MRT4530_34821C.1.pep
NHSTIVLQSCSNLDKETFTFLQPATGDIAGGCKVIWTRTCMPTKQGGLGVPNLAKFTRALRLRWLWHEWKEPSKHWVGLEMLCXDKTLFAAATNFSISDGNTTRFWNSPWVDGRRPKDAMPLVYAISMKKRKSLHQGKKNDAWVXDLDLEANPLMSLELIDQLLALWTMVHNVHLSDEXPHQINWKLTSHGHYSASLAYEAQCFGXPSTTFNLLIWKVWAPGKCKLQAXLIIQNRVWTSDRLATRGWQNNGCCPLCIREVEMALHLIAECHYLKRIWTFVASWVGNQHLELGHYGRP

SEQ ID NO: 132899 - protein, 716 aa, Oryza sativa
  Clone ID: PAT_MRT4530_34822C.1.pep
MGQLSAILIVFHVSLLKISLNPKSWLIKLRQWKSCYNRYDVGVPNIGIEDPCQNAVQIPEDNDSQVNVFARSPEKDEKQCPGSNQAPSQSTDKKDGTLQPNSGVNRTVIWKMDNGRTMIITGSEFTPEDAARIPKRERFSADDDDDNDDDNDDNDDATLDSFRERELKFKAYHVPKDCQLNAVIAKTKKEQGTTVQPIRQPMTIDNSGHNPSALPPTPAPVEANHGRSNVTKDVHKSLLVPVSAAKVHNQEPAPRDQASRFCRNCRKPGHRFSDCPLPRAAKAVRRDSQVTSTAHDTNRHLNVQPPPQRIIVKGTVKGRIVPPAIVSSLQHQRQQGKQCQENNSSLQLQRGGTLLRQHPRQVLSAPGRATVVRSSNAPRIAPIWRPIDKSPLGNPTGKKILPVTADKTVAPPPSKINKQSNVPEVEGVLTQSGTSPDYKVGNRITDISQKMVEELKESVKEEQAEKKEEAAKEKPDEPQEIVLKVDMHCEGCAKKVEKSLLRFEGVENVKADSRSKTVVVKSRAADPSKVCERVQRKTKRRVELIFPLPPPPEEEKKEEAPAPPPEEKKEEPPKTITVILKVQMHCDACAQILQKRISRTEGVESVETDLLNGLVVVKGVMDPAVLIESIQRKTRRPAVIVEEVKPREEEKKAEEEEKKPDEDKKADGIEDVKKYDFWPPVQYYVEYVYPYPLPPPPTALVSEEFNDENPNACTVA

SEQ ID NO: 132900 - protein, 204 aa, Oryza sativa
  unsure (1)..(204): unsure at all Xaa locations
  Clone ID: PAT_MRT4530_34823C.1.pep
EGWTAGIVPVYGPRCGADRKRKKRRITPXNYYGRPNYPSKPXNRTSFTPNYANRMNYPPRPNLRWFWSTXRTRGSPEERGXDGVRXVAKRGEXAXVRRARRRRRQGGGGRARWSRSPPPSLLRPSRRSARLPSKAAASSAAAGSPRLTSPPQPPLPQQPPLASPHRRSLLRQCSPPPLPQPLAPPSPRLASPRRCSLLCLCCGM

SEQ ID NO: 132901 - protein, 95 aa, Oryza sativa
  Clone ID: PAT_MRT4530_34824C.1.pep
LYFQKLIIITNINKVLTTMSCHYCETMVHLTNIGKVRGYFASPGKFRGPLKMFSPGSQFSNSIKKAIFLTCVYPISNLLQVGKHEAPLVRIPAAR

SEQ ID NO: 132902 - protein, 118 aa, Oryza sativa
  Clone ID: PAT_MRT4530_34825C.1.pep
VKTHNYHGFIAQELLLREMLNYPPYGKLILLRCLGTNEREVEKTIQAIAVLCEQLLPKTVEILGPAPASILRIAQRYRWQLLVKYPSFIKVILPLERIKQICPSSVYLDIDVDPLSID

SEQ ID NO: 132903 - protein, 506 aa, Oryza sativa
  Clone ID: PAT_MRT4530_34826C.1.pep
MSGVTSMSPTAGARSDASPEPESESESGVPNIGTEDPCQNAVQIPEDNDSQVNVRPKESHYVRNCPWKVFARSPEKDEKQCPGSNQAPSQSTDKKDGTLQPNSGANRTVIWKMDNGRTMIITGSEFTPEDAARIPKRQRGRNTFRGARQLTRHLIKYGPPRPEDDESGERFSADDDDDNDDDNDENDDATLDSFRERELKFKACARCGIVGHTASLCLPTCRCGEYTHYSDACPLRKVTCFLCEGTDHVPKDCQLNAVIAKTKKEQGTTVQPIRQPMTIDNSGHNPSALPPTPAPVEANHGRSNVTKDVHKSLLVPVSAAKVHNQKPAPWDQASRSCRNCRKPGHCFSDCPLPRAAKAVRRDSQVTSTAHDTNRHLNVQPPPQRIIVKGTVKGRIVPPAIVSSLQHQRQQGKQCQENNSSLQLQRGSTLLRQHPRQASSAPGHPAVVSSSNAPRIAPIQRPIGKSPLGNPASKKFLPAAAVKRVVTPPSKINKQSNIPGETSASRN

SEQ ID NO: 132904 - protein, 560 aa, Oryza sativa
  Clone ID: PAT_MRT4530_34827C.1.pep
MERGGPCDGLCRFQIHLGTRGDCPLPAGDGEDQPSTSCLFGSQVKSSLKLHARSEKISSKSSFREDQVNAILIVFHVSLLKISLNPKSWLIKLRQWKSCYNRCDVGVPNIGTEDPCQNAVQIPEDNDSQVNVRPKERSNQAPSQSTDKKDGTLQPNSGANRTVIWKMDNGRTMIITGSEFTPEDAARIPKRERFSADDDNDNDDDNDDNDDATLDSFRERELKFKAYHVPKNCQLNAVIAKTKKEQGTIVQPIRQPMTIDNSGHNPSALPPTPAPVEANHGRSNVTKDVHKSLLVPVSVAKVHNQKPAPRDQAAMAVRRDSQVTSTAHDTNRHLNVQPPPQRIIVKGTVKGRIVPPAIVSSLQHQRQQGRPTVVSSSNAPRIAPIWRPIDKSPLGNPTGKKILPVTADKTVAPPPSKINKQSNVPVNKVYGIESLFNKSSLPKIWMRSGYDQRAETLGSIKRPGQPRLVRCLVFVFRRSNPSSKFAGQERPRPPSVLASRHQAIVVAVIFLRAGRRFRPIWAVHVVDTHPRPRVDHVHRAPSPFESLTCGARVSAPAAPC

SEQ ID NO: 132905 - protein, 127 aa, Oryza sativa
  unsure (1)..(127): unsure at all Xaa locations
  Clone ID: PAT_MRT4530_34828C.1.pep
VPCNNSKINPHTGVGYYAPQRLELGCQIGRRARLIPAGELRRLHRLAVRPDARPVRQKVRRXAPERQAFIHKEVTXLLEAGFIREVIHPGWLANPVVVAKANGKLRMCIDYTDLHKACPKDPFPEPH

SEQ ID NO: 132906 - protein, 369 aa, Oryza sativa
  Clone ID: PAT_MRT4530_34829C.1.pep
MARVSAAAVAVLVVAFAAAAAAQESCNTELPGVLVGNYSGLNCQPVWNNFVLRYHQDKNNVLRVVLSTMYSTGWVGMGFSRDGLMVGSSAMVGWIGRKGLPHVKQFALRGKTSGKVVVNRGFLVSNSNNHDHTVVVQQARIYLAFQLQFSYRLTHQHIILAFGSSIPVNNKLTKHQDKTSFTFDFTTGKAFVDGSFPYGLRRAHGALNLFAWGVLMPIGAILARYFRRMDPLWFYLHVGVQFVAFIIGLAGVVAGVALYNKIQADIPAHRGLGIFILVLGILQILAFFLRPNTDSKYRKYWNWYHHWSGRLVLFFAAVNIVLGIHVGGGDNSWKIGYGFNLAIILLAVIGLEFMLRTRWSKESEPTPTY

SEQ ID NO: 132907 - protein, 131 aa, Oryza sativa
  Clone ID: PAT_MRT4530_3482C.1.pep
FFFFFFFFFFFFFFFFFFLQAHPLSYISVYSIYITPQVHPPIPGHVHSYKHPKVQVITPIIASPMAHIPHTKHYLAGRQAYAYICTQGRITEDTLDCGARLQRIALFITCRSCTRRRSSRWCTCTRLSFSL

SEQ ID NO: 132908 - protein, 322 aa, Oryza sativa
  unsure (1)..(322): unsure at all Xaa locations
  Clone ID: PAT_MRT4530_34830C.1.pep
MGVAAAAGRLLAAVDWEPPLSILLHPASRPARRRRDRFLAPTRFGLRRRMGVAAAAGRLLAAVDWEREVYPAYRDFFALPLFAVFFLVVRYLLDSFVFEWIGRKLIFGKEKVDYEKEETRKKIRKFKESAWXKCVYFLSGEILSLSVTYNEPHIPNTXLMLWETRRSDFGVSMSQNFATVALIYVSYVFRFARVGSVVLAIHDASDVFLEVGKMAKYSHCDLLANVAFLLFVVSWVLLRLTYFPFWILRSTSYEVLLTLDKKKHNFDGPIYYYVFNSLLFSLLVLHIYWWVLIYRMLVRQIKTRNVGDDVRSDSEGEDEHED

SEQ ID NO: 132909 - protein, 109 aa, Oryza sativa
  Clone ID: PAT_MRT4530_34831C.1.pep
ALTRDESLEFSFSILVATLSLVDPPVEINYTKSKPEIASLPHIFISPFLPTPPPPPLLSFSWYACYCQLFFQSLHSFKRLTVVIIKVCAQLRLTGESLAQNEAFANHNA

SEQ ID NO: 132910 - protein, 140 aa, Oryza sativa
  unsure (1)..(140): unsure at all Xaa locations
  Clone ID: PAT_MRT4530_34832C.1.pep
LELYLRVPEGLKIPNPKGNCNIYIVRLQRXSMYGSKQSGRMXFNQLNRYXLLKRGFPNNYDCPPVFIKKSLNAFCIISVYVNYLNILGTTQDIKQAMAYLNIELEMKDLGKAXFCLGLLLKHLPKGVFMDRLIYLHKILN

SEQ ID NO: 132911 - protein, 79 aa, Oryza sativa
  Clone ID: PAT_MRT4530_34833C.1.pep
ARRTGTTTLARHHAMTRVPICCRAARRLPPGSRASPPPPHGSAGRRGLPPPSLAVAGTRSRRLCLLRGFASPSHKRQTH

SEQ ID NO: 132912 - protein, 104 aa, Oryza sativa
  unsure (1)..(104): unsure at all Xaa locations
  Clone ID: PAT_MRT4530_34834C.1.pep
RIEPAPCSLSRRGWSLQQLDVQNAXLYGVIEEEVYMRQPPDFALKDLGELHYFLALRLTRCKLARCLDDRRSTGGFAVYXGSNLVSWSARKQATVSSPVQKQNI

SEQ ID NO: 132913 - protein, 61 aa, Oryza sativa
  Clone ID: PAT_MRT4530_34835C.1.pep
MGLRGWSGAGVWWVDPPRRLSLVCVYCINGQPATGEAVNTQDRDPNVSASVRANAWRLPAT

SEQ ID NO: 132914 - protein, 290 aa, Oryza sativa
  Clone ID: PAT_MRT4530_34836C.1.pep
MASDAIVSGVVADMVGRLMSLVAGQLRDRRGDAEEKLRRLRRLVVRIESAVEAAEARRITGRALLAWLSELVDGALQGRYFLDAFPVATDHDGGGRGEAAVANPLNPAKRLRVAARRLVFWDGGAAAELDGVLADLESVSGDLTGFITMLQSCPPALHRPLNTNIYADNQMFGRQVERRRVFDFLLHDSDGDGGGEPAGAELAVLSIVGRQGLGKTTLVQHVCNDLEVRRRFSLIIELDFHCLSLMAAGETALLLRSMFAGTGGAASATTTSVFGDSGETLALLERRLRG

SEQ ID NO: 132915 - protein, 553 aa, Oryza sativa
  Clone ID: PAT_MRT4530_34837C.1.pep
MASSKSLSFPVAAASKSLSFPAAAQSNKGTPAARKRIKSGGGAREKKENSGGAREEQGKDDSVGEEQVQRRRDGRRRRRGTGLMEMRERQILGFLSIYRLLSLSLARGITLLPFHLHSTRGTASGLELVPRSTNLCQPLDLPGSNGRESVPQARSLVLSNEDDLALERELMMLNKPYVKSFKDSYGVVFDCVDIYRQPAFDHPLLKNHKLQIPPRSYSKSLITHFGLQESCPDGTVLIRRTLKEDLLRARAFRGPLKPQKDQSFTPMSYTSTIPGQHFALLLINSEEGSKFQATGAVLEVYPLNVQQGQSSSAQILLVDDSSNAVSVIQSGWHVDPDRESDTQTRLVTYWTADDYHKTGCMNMLCPGFVLLSRTTSPGMVLTTGSIPLNMTKVINAVHHIALNLFNVKKGACSVCCQNQPYHLLVKPNFSNANILDIQTGNWQVVVGDEVVGYFPKEIINGMSGGTEVQMGGIVYASPGQKSPPMGNGIQPVHGGNYRAARFTWVAAQGARIANWTVARDVADINIYDATVTSSSGTGPEGAVFEYGGPGGQP

SEQ ID NO: 132916 - protein, 110 aa, Oryza sativa
  Clone ID: PAT_MRT4530_34838C.1.pep
MELEAKLNDRDLFRSNQKYMEAPVPYVIKPRYVYSDAVSDLLAYRGQQSLTRQPCSHVRSGGGASHDAESEGGGMRWALVGEGRGSCAACGESGGEGERPTEASYSSELM

SEQ ID NO: 132917 - protein, 113 aa, Oryza sativa
  unsure (1)..(113): unsure at all Xaa locations
  Clone ID: PAT_MRT4530_34839C.1.pep
KGLARPGPAQARQGTAQQPSGRHGPIGTACRAVPAHGHFFVYRAXAAGPSCRAXPIVPGRRNMPVEGPRHDPVVGRGRHGPYLRRAVPCLGRAKMPCHGPGRRASGLGPLGHL

SEQ ID NO: 132918 - protein, 109 aa, Oryza sativa
  unsure (1)..(109): unsure at all Xaa locations
  Clone ID: PAT_MRT4530_3483C.1.pep
KPTTGAPXXKSTFCXWXXXXQTRRGXLRXXXDTSXXXTXXRWIXLHRXPCLRIAWTKPPGXPPKTWESXXDPAPAGGXTXGXFXXXXEXWXXXLLPXKGXPXPGARTPP

SEQ ID NO: 132919 - protein, 64 aa, Oryza sativa
  unsure (1)..(64): unsure at all Xaa locations
  Clone ID: PAT_MRT4530_34840C.1.pep
KXMQVLETPFQRTKWCQVGIVTLRFFSDHFLSMTKIGGITLFCKGHKQDFGTNDYFHCTKWECP

SEQ ID NO: 132920 - protein, 74 aa, Oryza sativa
  Clone ID: PAT_MRT4530_34841C.1.pep
GMPLSLMSPEPSLSLANLNSKPPANLGPWLWLTCVNFWRWHCGFGHRQPRVLTEKPPSHNNLISQWPYWKNWPF

SEQ ID NO: 132921 - protein, 55 aa, Oryza sativa
  Clone ID: PAT_MRT4530_34842C.1.pep
VMRSQPGPPHERRSGEGPVASRRWRTRRSRPVEPGVASSREPGTGDAWATGFRPA

SEQ ID NO: 132922 - protein, 1926 aa, Oryza sativa
  Clone ID: PAT_MRT4530_34843C.1.pep
MSSSSSRRRPPRPERVMDNWERLVRAALKHQHRAPSATASSAAGIGLASAVPPSLGKTTNIEHILQAADDIEDDDPNVARILCEQAYTMAQNLDPDSDGRGVLQFKTGLASVIKQKLAKKDGAPIDRQNDIQVLWNFYLQYKSRRRVDDMQREQERLRESGTFSTDMGSRAVEMKKIYATLRALLDVLEILIGQSPSDRLGRQILDEIRRIKRSDAALRGELMPYNIVPLDAPSSVANTIGFFPEVRAAIAAIQNCEDLPRFPSDALQLQLRHKDVFDLLQFVFGFQEDNVRNQRENVVLALANAQSRLGLLDVTEPKIDERAVTEVFLKVLDNYMKWCRYLGKRVAWTSLEAVNKNRKIILVALYFLIWGEAANVRFLPECLCYIFHNMAKELDGILDSSEAERAKSCTITNDSASYLEKIITPIYQTMEAEAQNNNNGKAAHSAWRNYDDFNEYFWSRSCFNLGWPPAEGSKFLRKPAKRKRTGKTNFVEHRTFLHLYRSFHRLWIFLILMFQCLTIIAFHHGKIDIGTIKILVSAGPAFFILNFIECCLDVLLMFGAYKTARGFALSRLVIRFIWLTAVSTFVTYLYLKVLDEKNARSSDSIYFRIYVLVLGGYAAVRLVFALMAKIPACHRLSNFSDGSQFFQFFKWIYQERYYIGRGLYESIGEYTRYVVFWLVILACKFTFAYFLQIRPLVDPTNVIVTLRNLHYSWHDLVSSGNKNALTILSLWAPVLAIYLMDIHIWYTLLSALVGGVMGARDRLGEIRSIEMLHKRFESFPEAFAKTLSPLRISNGPVAQGPEITKMHASIFSPFWNDIIKSLREEDYISNSIMTKFSFREMDLLMMPSNCGNLRLVQWPLFLLTSKIMLANDYASDCKDSQYELWDRISRDEYMAYAVKECYFSAERILHSLVDGEGQRWVERLFRDLNESIAQGSLLVTINLKKLQLVQSRLTGLTGLLIRDETADRAAGVTKALRELYEVVTHEFLAPNLREQFDTWQLLLRARNEGRLFSRIFWPKDLEMKEQVKRLHLLLTVKDSAANIPKNLEAQRRLQFFTNSLFMDMPAAKPVSEMIPFSVFTPYYSETVLYSMSELCVENEDGISILFYLQKIYPDEWNNFLERIGRGESSEDDFKESPSDMLELRFWVSYRGQTLARTVRGMMYYRRALMLQSYLEKRYLGGIEDGYSAAEYIDTQGYEVSPDARAQADLKFTYVVSCQIYGQQKQRKAPEAADIALLMQRNEALRVAFIHEEDVSSDGRKEYYSKLVKADVHGKDQEIYSIKLPGNPKLGEGKPENQNHAIIFTRGDAIQTIDMNQDNYLEEAMKMRNLLEEFRGKHGIRPPTILGVREHVFTGSVSSLASFMSNQETSFVTLGQRVLAYLKVRMHYGHPDVFDRIFHITRGGISKASGVINISEDIYAGFNSTLRQGNITHHEYIQVGKGRDVGLNQIALFEGKVAGGNGEQVLSRDVYRLGQLFDFFRMLTFFFTTVGYYVCTMMTVLTVYIFLYGRVYLALSGLDYEISRQFRFLGNTALDAALNAQFLVQIGIFTAVPMIMGFILELGLLKAIFSFITMQLQFCSVFFTFSLGTRTHYFGRTILHGGAKIFSDAWPFMQYHATGRGFVVRHIKFAENYRLYSRSHFVKALEVALLLIIYIAYGYTRGGSSSFILLTISSWFLVVSWLFAPYIFNPSGFEWQKTVEDFDDWTNWLLYKGGVGVKGENSWESWWDEEQAHIQTLRGRILETILSLRFLIFQYGIVYKLKIASHNTSLAVYGFSWIVLLVLVLLFKLFTATPKKSTALPTFVRFLQGLLAIGMIAGIALLIALTKFTIADLFASALAFVATGWCVLCLAVTWKRLVKFVGLWDSVREIARMYDAGMGALIFVPIVFFSWFPFVSTFQSRFLFNQAFSRGLEISLILAGNKANQEA

SEQ ID NO: 132923 - protein, 86 aa, Oryza sativa
  Clone ID: PAT_MRT4530_34844C.1.pep
MLKSPKPDEASGGGGGARLRPAMAAAVSELRETLKQAIVAYTGLSPAAFFTDVAVEAALYHVVSGIFAGSTAAPPWTMDEPKAESI

SEQ ID NO: 132924 - protein, 37 aa, Oryza sativa
  Clone ID: PAT_MRT4530_34845C.1.pep
MAMEALGDGILGKVGYFSLKAAATLNLIGICIVAYSG

SEQ ID NO: 132925 - protein, 94 aa, Oryza sativa
  Clone ID: PAT_MRT4530_34846C.1.pep
SQWDIHVSDLRSPDIGNQHLGDHGHSNKIVHDAAGGNDALRAPSSGAPAGVLFKQQGNECEEDSCVDEGERTSTALRRRGHDRQGDDVQASRRH

SEQ ID NO: 132926 - protein, 77 aa, Oryza sativa
  Clone ID: PAT_MRT4530_34847C.1.pep
TMSSACLLYRPPFHTLCSRSAVSSSIGRSRHLSRRGRWTRRRIQRARRSLDRRLAWPSISSYFLHRRCDHRCELATA

SEQ ID NO: 132927 - protein, 54 aa, Oryza sativa
  Clone ID: PAT_MRT4530_34848C.1.pep
MAATAVQQQQHARRGRWSGGVLAFVFSNGGNGKPSHVNFGAPTAHSIYYHDDLV

SEQ ID NO: 132928 - protein, 173 aa, Oryza sativa
  Clone ID: PAT_MRT4530_34849C.1.pep
MEKALTKIGSFTISRKAKQELSAIGGDISRLSSTVEEKAKWVFDKLKGKPNKSLSDLLREYNLPPGLFPRNIICYEYDQTSSKLVVHLSKPCEVSFKDSSVIRYAPRVKVTLSRGKLSAIEGMKTKVVVWVKVASISLESFRSDKICFIAGVKKLRQKDAYEVPREGIAVEEF

SEQ ID NO: 132929 - protein, 74 aa, Oryza sativa
  Clone ID: PAT_MRT4530_3484C.1.pep
LHFYCNLIVLTDCNMLMHSLPWIDGMGSYVPLHPAGEKKGHCIVCYDKVSISTLHCICLKFILPALMPRSMEKL

SEQ ID NO: 132930 - protein, 126 aa, Oryza sativa
  Clone ID: PAT_MRT4530_34850C.1.pep
PRVREKARGRSKEKVINGMAVGKNKENTLTDYEIRRKGVIAANNEMLQSLNLPPMGSNTHVQQRPKKIPKVTDGRNMVPCGDHNLRSRSRNNLEENVDENVGDDPEYQPEEDAMDDNEDVEEILEL

SEQ ID NO: 132931 - protein, 492 aa, Oryza sativa
  Clone ID: PAT_MRT4530_34851C.1.pep
MAAATVWRCAVVVGVVIMAAAAVVDGLGVNWGTMATHRLPPKVMARLLKDNGFKKVKIFDADATTMSGLAGTGIEAMIAVPNDMLAAVGDYGRAREWVKENVTRYSFDGGVDIRYVAVGNEPFLKAYNGQFDRATVPALRNIQRALDEAGYGKRIKATVPVNADVYDSPASNPVPSAGRFRDDVAGTMADMVRFLNRSGAPLTVNIYPFLSLYGNDDFPLDYAFFDGGPPPRPVVDNGINYTNVFDANFDTLVSALKRIGFGSLPIVIGEVGWPTDGDKHATVPYAQRFYSGLLKRLAARRGTPLRPRARIEVYLFGLMDEDTKSVAPGNFERHWGIFTFDGRPKFPLDLRGAGRPAMPVPAKGVKYLPRRWCVLNPNVTDDDAGRLADNVGYACSHSDCTALGYGCSCGALDARGNASYAFNVYYQAQGQADAACDFQGLAVVTEDDRDVAQGACNFSVQVAAAALVGAAVAAAAAVACAAAVVAALLALV

SEQ ID NO: 132932 - protein, 49 aa, Oryza sativa
  Clone ID: PAT_MRT4530_34853C.1.pep
GLTEVLVLPAVQVFFFRTSQAAFIEVNAACFFCNLQIKHPLFFVGFIKI

SEQ ID NO: 132933 - protein, 176 aa, Oryza sativa
  Clone ID: PAT_MRT4530_34854C.1.pep
HECNHAPSREGYIELNDFLNSDSSASTSEYSSQRTMISEEYFDSDAFLREIRNDHDAADEEHTDSKFSVAAASKSDSVVISPPEQGFVNNLDNHATIAGDSPQKSVKNDKVDEHSSEEHPQHSPTTSCFPSHVKRSLSSSSSSSQGTSNSKSPQRQRERSNKKIGKLGKYWCCGSL

SEQ ID NO: 132934 - protein, 49 aa, Oryza sativa
  Clone ID: PAT_MRT4530_34855C.1.pep
MEDKGKAVKGELKPLQQINSAQIAGEYNNCATTLVTQGGTEIGRRTVRK

SEQ ID NO: 132935 - protein, 119 aa, Oryza sativa
  Clone ID: PAT_MRT4530_34856C.1.pep
IEPTETKKKKKRGKNKKKTPANPPQKKKEMEARASGPPLPPGGPLRGTQDRGPRTRKETGPPGHPPNQKNGRGNPTKRAGKTPPIAQPGGLAKKPPWPGGPKTKQPRAVGGPAQGGAQK

SEQ ID NO: 132936 - protein, 397 aa, Oryza sativa
  Clone ID: PAT_MRT4530_34857C.1.pep
MAPLLLLLPPLRLLPATLLRATSRPASPRRGLSYSYPRRVAAVLRQCRAAAPPPPAPPDAVPRWHAALAAAAGLYPAYVTAGAAVAVARPDAFRWFVALAPGSYTFALGLIMLAMGLTLELREFLALLRERPLSILFGCAAQYTIMPAFGAIVSRVLGLSPPISVGLILLGCCPGGTASNVVTLVAKGDVPLSIVMTVCSTLGAVFLTPLLTKILAGAYVPVDAVKLSLSTLQVVVAPILLGSSIQSAFPSVVKFVTPFAPLLAVLTSSLLACSVFSENFVRLRSTIADASYGNGGLFSGDIGVVMLSVFLLHCAGFVVGYTTAAIGGFKERQRRAISIEVGMQNSSLGVVLATAHFSSSLVALPAALSAVIMNIMGSTLGLVWQFMTPPDSKNENR

SEQ ID NO: 132937 - protein, 88 aa, Oryza sativa
  Clone ID: PAT_MRT4530_34858C.1.pep
MARAATVAAVAAACVLALAAGAGQAPASWERERELGIGGINNPRMNGTKWKDGKGKVAEQKQSSAKKDALESSKKKKQNRKKKRKRKA

SEQ ID NO: 132938 - protein, 124 aa, Oryza sativa
  Clone ID: PAT_MRT4530_34859C.1.pep
MRAIHSLAAAPAAPAPATETATRPLRRRTSAARASRESSRQPQALPDLPSRRAALLALVLAGSTPRPPTAAAAFSLGIPGPKELLREQKKKSARFLLAPIAASREILLKAQSLLASANVGADYI

SEQ ID NO: 132939 - protein, 197 aa, Oryza sativa
  Clone ID: PAT_MRT4530_3485C.1.pep
MKIKLDFHMIKGDGDSSYAKNSSTQGKAILSTKPMVEKATKEICMDLQPRSMVVADLGCSSGANTLLFISEVIAIISEETPANNNNRECPMEVQFFLNDLPNNDLNHNFQLLEQFKQSIVRDCARRGLQHPPYYVAGVPGSFYTRLFPCNSVHIFHSSFSLMWLSQVPDLLGSSMNKGNIYSDFASHYLFTDHKITY

SEQ ID NO: 132940 - protein, 82 aa, Oryza sativa
  Clone ID: PAT_MRT4530_34860C.1.pep
GTNKQDAKTLTKTNTLKNTPPPQTTTYKTKAKLKTNPNPEKKHPKKHSKPPTILAPQSNWDKNLGTYTKNSKPGKTPQAPSP

SEQ ID NO: 132941 - protein, 318 aa, Oryza sativa
  Clone ID: PAT_MRT4530_34861C.1.pep
MKAHTKTKQIPELPMSGPMRAIHSLAAAPAAPAPATETATRPLRRRTSAARASRESSRQPQALPDLPSRRAALLALVLAGSTPRPPTAAAAFSLGIRTNTSLDSALVAARRRPCSHLFSSPVVLAVVVCWDAAAGPKELLREQKKKSARFLLAPIAASREILLKAQSLLASANVGADDVEEVGRMLAAAGRDCVPRQRNSLVSLQSRSGVEVFDGITLQVCTFSLILKNAASLLTDKDPLKVEADARLAELIQSFSDLGTVVDNSNIELTADREKMKDGLLSTVSAIDKFEQSVKDCLDEMLEYSSAIAVLAIPDKFI

SEQ ID NO: 132942 - protein, 119 aa, Oryza sativa
  Clone ID: PAT_MRT4530_34862C.1.pep
LPCFTQKQNKYLRILNFTRVILYGIICTYLLSTDLHRHRFATGHACRVSPIGLVARDNGRTYAFAADIVGVLQGTVAIADGDGPAVECVCRTIIRRRLSIRRSRSRSRKRRRRRRRRRR

SEQ ID NO: 132943 - protein, 126 aa, Oryza sativa
  unsure (1)..(126): unsure at all Xaa locations
  Clone ID: PAT_MRT4530_34863C.1.pep
MEVCNAQGFVYGIIPEKGKPVSSASDNLRSWWKEKVRFDRNGPAAIXQHCDPPQRRFLLEKGVPPPWWPXGQAWWPESVVPSPSRPPPPFPPSSTPPSDLDGILAMGGDGILSRRRRRAPLPLRHA

SEQ ID NO: 132944 - protein, 302 aa, Oryza sativa
  unsure (1)..(302): unsure at all Xaa locations
  Clone ID: PAT_MRT4530_34864C.1.pep
MALSSLQDSALGGGGGTSSSRSASSSTHSPARVWCMTASWPSPASAARDCSADLSRNGQACGPVAGNFKGSYLAMLSSGGLVFGIINIVGNFGTVFVDNILRVSRSAVLSFGFFMGEQDGILKYMLKMMEVCNAQGFVYGIIPEKGKPVSSASDNLRSWWKEKVRFDRNGPAAIVKYQADNLLATMPCRGXDGNVGGAAPAGPHFLHELQDTTLGSLLSALMQHCDPPQRRFLLEKGVPPPWWPEGTGVVARIRRALTIAAPAPVSTVLHAALRPRRHPRHGRRRHPLPSAPARAAPSPSRL

SEQ ID NO: 132945 - protein, 75 aa, Oryza sativa
  Clone ID: PAT_MRT4530_34865C.1.pep
QSPPPPLPSDAFEQPPPPPEHPPPPESTSPPPPPTSDPPPVPPPPPTTGSFMPIPSAPFAGPAPPPPPPPPMNRK

SEQ ID NO: 132946 - protein, 82 aa, Oryza sativa
  Clone ID: PAT_MRT4530_34866C.1.pep
MAVVARPQVGYGSGTWATRQRWQRWASDGSGGNTTSVTSWLWVGDGSCTRATGWRQQQEAGHAPEASAVDDSAKRAKRRATA

SEQ ID NO: 132947 - protein, 93 aa, Oryza sativa
  Clone ID: PAT_MRT4530_34867C.1.pep
HRLFQQPQRNSKFWTPKKDKRLRPSRTTENRDHNHKSSGNHVDLFTALHQCLTVHLYWNLRAARGKKSRRMREIYTYSLRPKKRQTMGFRANV

SEQ ID NO: 132948 - protein, 291 aa, Oryza sativa
  Clone ID: PAT_MRT4530_34868C.1.pep
MGDRAYVPASKPVPVAAARAANGVANGGGGGVGGGGGGGAARPPPMVPGRVPPPPMYRPKPMQAPARRRRSRRGWCCACCLWMTLVVVGLVFLGAIAAGVFYVAYHPQLPTFAVTSLRLAALNVSDSDAVTSRIEFTVTARNPNDKIAFAYGDIAAAFAADGADVGDGTVPGFVHPAGNTTVIKGDASAAAATVDPLVANGLRSRKSHAMSVEMDSKVGFQIGRFKSKRINVRVLCAGFTAALAKNTPSAPPIVVAAAPSPVRSVVKASSSSSSTTDAKCKLRVKIWIWTF

SEQ ID NO: 132949 - protein, 40 aa, Oryza sativa
  Clone ID: PAT_MRT4530_34869C.1.pep
ENLNGQKEPQNQDILLADNKIIPQTLRLILTLPWGPAIPT

SEQ ID NO: 132950 - protein, 99 aa, Oryza sativa
  unsure (1)..(99): unsure at all Xaa locations
  Clone ID: PAT_MRT4530_3486C.1.pep
HPLVRKQLLTYCTFLRQVLVIAXXWPVTGLSVHFHECNGXLFFLLLILGRVLVLWSYVCDVLVSPLTSNLLVMYEMNASSRSSGYQSIDESIYLKKXXK

SEQ ID NO: 132951 - protein, 44 aa, Oryza sativa
  Clone ID: PAT_MRT4530_34870C.1.pep
MKKFHILANYPCVTMESKGMLGIESSGGRIEDMAKLETGTPEKK

SEQ ID NO: 132952 - protein, 787 aa, Oryza sativa
  Clone ID: PAT_MRT4530_34871C.1.pep
MGSSGCSSEIVEFTEEFDDNAPVSCPNLMHIRVKPEEKDGRCYPVEDDLEQLLKAIDSRTFRRTLSPGQAGADALRKNGQKKSSRSGPAQAAGIGISSKPVNMKQALRRLCISQASEMAAMKRLSMSPGSSSSSEVGTIHRLYASLMVQSNGESHLHDDEKMNLIEISITPEKFSKNSSRATSEFSEDCDFETADGSAVTSLHSASSTSAEIQKIRIQDVISGDPIDSESSMVENEKLNKKVSTATDGSSPRAPILSKPITTSRLVKPVFRCKTIGKKKLKEEPPSLGTSSNSTKFCSSKESISLASTSCSSTSSITNPTSCADDEKTNLGPEKSGDKSPEWLRSEEKGECSQNSNSISEYGCSTSISDESQFGLCSYNNRPHMAKDLRWITIRELALQQGSLGLDNFKLLKRLGCGDIGTVYLAELVDSECLFALKVMDIEYLINRKKMLRAQAEREILEMLDHPFLPTLYAHFTTDNLSCLVMEYCPGGDLHVLRQRQPGRSFPEPAARFYVAEVLLALEYLHMLGVIYRDLKPENILVREDGHIMLSDFDLSLRCSVNPVLLRSSSVAANHQPRKLAGPCAESSCISSSCQPSCAQTSCFMARPPLPKPRKPKSSHRKLPQLVVEPIDARSNSFVGTHEYLAPEIIKGDGHGSAVDWWTFGVFLYELLYGKTPFRGPGNDETLANVVSQNLKFPENPSVSSNAKDLIKGLLVKEPENRLGSLRGAAEIKQHPFFEGLNWALIRSAAPPETRPCDVVTLTTAKKKKEGKCLEFRSNSEDLEFEVF

SEQ ID NO: 132953 - protein, 142 aa, Oryza sativa
  Clone ID: PAT_MRT4530_34872C.1.pep
LSLCSHPATPFALPLTLSDLSRSLSHTSPAPSSSSFASPLQISGGGATAGGSSGGGGSQTVGGLHGDERWQPPFNRRKPPWWRGAASPPRGPISGGQPSGGARWVASGLTSGGARAGGLHNGAAEDLPTTARRSLRSVRPPH

SEQ ID NO: 132954 - protein, 295 aa, Oryza sativa
  Clone ID: PAT_MRT4530_34873C.1.pep
MATTTAAAMVVAMSVLLLGGGEAAAPRKPVDVAFEKNYVPTWAEDHIHYVDGGREVQLYLDKSTGTGFQTRGSYLFGHFSMHIKLVAGDSAGTVTAFYLSSQNSEHDEIDFEFLGNRTGEPYILQTNVFSGGKGDREQRIYLWFDPTKDYHSYSVLWNLYMIAFFVDDTPIRVFKNSKDLGVRYPFNQPMKLYSSLWNADDWATRGGREKTDWSRAPFVASYRGFHVDGCEASAEARYCATQGARWWDQPEFRDLDADQYRRLAWVRKTHTIYNYCDDRERYPAMSPECHRDRDA

SEQ ID NO: 132955 - protein, 402 aa, Oryza sativa
  Clone ID: PAT_MRT4530_34874C.1.pep
MLSLRIAAASRLRGLLGGGAATGARTRAFSYGRVVDAAARDGELRVFVVAGEVSGDSLASRLMASLRALSPRKIEDTADAAVLFQPHAVVTVDSKGFSFRLLKQLKCRYNQVARPLHVHYVAPSFWAWKDGERRLAKLHNFVDHLLCILPFEEEICRLNGLPATYVGHPLLDDAIGLNMEKELSSVNSMHQRSGEDFRQEHEISPVAPHRDVRVYVDNVVRSGPFPVVLITGETLKERYDAFNVCSRFLAVSRIHASRAALCTSGTAVMELMLAKLPCVVAYRAHFITECLIHLRKKIDFISLPNILLNSPIVPEILFGACTAENLAAKLSEVICNDEARQLQVESAEQLLEMLYEPIKQRGGLFQEELHNSSLPSNIYSPSTIAALTVLYTDNHQQAVHQN

SEQ ID NO: 132956 - protein, 357 aa, Oryza sativa
  unsure (1)..(357): unsure at all Xaa locations
  Clone ID: PAT_MRT4530_34875C.1.pep
MAAAGHGPSGRRRVWHRHPPWPPPPPATAAAGHRMGSEEGEERGEEGEEGGGGVRSVKRKGKGSVKCRSGXQPLASDSDRLATFVAAVFAGVQDIAGCAAGXPLSLLKLQLTFVLXKKQDHQISGGGATAGGSSGGGGSQTVGGLHGDERWQPPFNRRKPPWWRGAASPPRGPISGGQPSGGARWVASGLTSGGARAGGLHNGAAEDLPTTARXCFGDVDGLGYLLCVDALGMLMWMMVSVLKPTPIISGIGAKNKTGTVLTKYYAMASEDKFNNLLRRIEEFEWTQVEVDKRSDESLSQDGGSIMDTQIQKNAKDLQISVEKKQTKVLKELDVGADTTCTTNIDVPDHPKETVVGP

SEQ ID NO: 132957 - protein, 91 aa, Oryza sativa
  Clone ID: PAT_MRT4530_34876C.1.pep
MLLPPTSGVTHVAKGDEEEVSSTCGILYPLSSRLGILALLQHEALVGNISSHGEGAKRVRILPTQQSGCRKPPRPRRIGGSDGTLGVEDSG

SEQ ID NO: 132958 - protein, 136 aa, Oryza sativa
  Clone ID: PAT_MRT4530_34877C.1.pep
MRPGAEAVAAAVVAGRGGGGGGCGRGRRRQCRMWPGQRRRTVYVAVKERGDGNTSPLPLPSCPQRQRPRRCCGLRLLASAREAGGGRVDLTVAAEIGGDDDIEGPQLLLTPSRCGGNDDSDGGSSAPSPSAPLLRG

SEQ ID NO: 132959 - protein, 143 aa, Oryza sativa
  Clone ID: PAT_MRT4530_34878C.1.pep
HASAHASAPLFFFSPSVSSPNAKLSSLLSLLALSIHGHEGLNAKAVKLIRPREKGVPFRPRTPRLRFSAPAMPPPPRLLFLLVMLLVVAAPGAPVFGANAPPEVKAEIDALLMFRSGLRDPYAAMSGWNRVFAAGPWSWRGVA

SEQ ID NO: 132960 - protein, 59 aa, Oryza sativa
  Clone ID: PAT_MRT4530_34879C.1.pep
SVFRGGFEAVLVVCGGVRSGVSVFLHGLRAWGSLVRLWRVDRLPVLLVPWVVLLPSGYC

SEQ ID NO: 132961 - protein, 328 aa, Oryza sativa
  unsure (1)..(328): unsure at all Xaa locations
  Clone ID: PAT_MRT4530_3487C.1.pep
SPGVRWSGCRLFTVSYFIFFFSYLSSPFNTYISFIFFSFFFFFVSFSVFLFSFPFLCAFYFLLFFPFYFLLSFSVSFVCIWLCLFCYFFFVFLFCPVIFFLFLFFCYFLCSLSLFYSVCDIVSSICYRLHFSTFCVILIILSNHLFLSFSFFSFVFSSLYFFVLYILIYSLYISSPDITFFFPPLYLLFVLSLIIYYFFLLFSLLVLSLSLFLSCSPLSPFCVVLYPPLLFFVSYLPYLFSLVLIYFILSLSSLVPLVACYASFVACLFLSLLVYSCCLFLMFSSALYTFYSCISSSTFYSSSTISLSCSLYFISSLFLLLDNRSLYX

SEQ ID NO: 132962 - protein, 52 aa, Oryza sativa
  Clone ID: PAT_MRT4530_34880C.1.pep
PRLDLCTPVPSWVPKKTPLSGPLNCFPLPKNGVLVHLNFRLKSFFRSRVQNF

SEQ ID NO: 132963 - protein, 272 aa, Oryza sativa
  Clone ID: PAT_MRT4530_34881C.1.pep
MRGKLTCSVVLTVISLSLGILCALLSFLWPSISVDHRTLGLLFSVIFLIGAVVPAWDHYRKFGWSVCVSQIEEPYQPKTMQAAAAAPDSDRDRAEVIAKYMAFEDSVVFVGTTLSQGIVCALLSILSPGVSWEYRAFGVQLSGIFLIYRFVELEHSTPQNLIELNIILTVKHKIELNLLLSPLGRQRGGEEGGLCVGGELQVRAEEEKKEVRKGGMARRKDDYNGCSNKDWGQRGSFREEEEEGFGTGFQGSRMGFDPGYGFGQQGSFGQRW

SEQ ID NO: 132964 - protein, 96 aa, Oryza sativa
  Clone ID: PAT_MRT4530_34882C.1.pep
LADVGEPVKDRSLILTLIGGLNDKFDNLKSLLPLQVLFPTFAKARAQLLLDELTKGHRPPVTATAFLAASSTTARSATSTNTSNNNSRNNNRRRGH

SEQ ID NO: 132965 - protein, 77 aa, Oryza sativa
  Clone ID: PAT_MRT4530_34883C.1.pep
NINYKRGGSLNALSGFENDNNWYYRLVRWKTNHIELPICLLYQHAYTRCGMGRTCNHIEKGGDIKSKLTDDDHGSVS

SEQ ID NO: 132966 - protein, 51 aa, Oryza sativa
  Clone ID: PAT_MRT4530_34884C.1.pep
MEASTRLAAISHNRNELDVIRLDGEPGPKPVKHTNGQACQICSDHVGLTPD

SEQ ID NO: 132967 - protein, 130 aa, Oryza sativa
  unsure (1)..(130): unsure at all Xaa locations
  Clone ID: PAT_MRT4530_34885C.1.pep
SGPGPLLFIYLFIYLFYLFYLFLLFFIYFYFFFFLFFKKTQKGGPLPKKTQEQNRELPKGGGGLPGGXGKKGKKKNKNPPLAGGATLPGGNPPGAKKPQKRGGRFKKGGGGNPRANLGFKRRAPPGGGAF

SEQ ID NO: 132968 - protein, 101 aa, Oryza sativa
  Clone ID: PAT_MRT4530_34886C.1.pep
MAIGRKEGRHSVAAYFLTVTQDRKRADDGGHQARDRDEVEGEVSLVNVGRWDEDDAIVAAATIVSLWPLVVGAVSGVPGEQEPVGGADAIHGPRMDAWDSG

SEQ ID NO: 132969 - protein, 249 aa, Oryza sativa
  Clone ID: PAT_MRT4530_34887C.1.pep
MRVTRRRRWGRGDKEAATNDREAEEVEADARPTKMEAEAAAAGTVERRYGERGAVGEVTQCGREAGEVAVRAAVERGMGLGEELLERQEHLTETPVPDDVAAVGNNRLPQWVPGRPVSAFVPGADAASSPCALFALPPQAAASPAAFFNRGAPRQAMELAKANSRGEQCLGHGARRRSCRLHDKLEATCAASFMSLPLHGTRLRRPRTSGASVAASLLTPVAEMRRALVVAGLSSSLARPRPPEAPLSS

SEQ ID NO: 132970 - protein, 50 aa, Oryza sativa
  Clone ID: PAT_MRT4530_34888C.1.pep
LRAIYCVRIAMDQNRLGDHLKRSGLKKRLHLRLGTPHSGPDGWRGFGCAE

SEQ ID NO: 132971 - protein, 760 aa, Oryza sativa
  Clone ID: PAT_MRT4530_34889C.1.pep
MATSLTLIATPCTAPRSSSSFALAPRLPPRCSNATAARRRAVRATTLQSDQEPAGSGDSGATTTKLSASTSVRQERWEGDLPIEGCLPPWLNGTYIRNGPGMWDVGEHAFHHLFDGYATLVRVSFRGGGGARATGAHRQIESEAYRAAVARGRPVLREFSHCPAPAKSLLHRFGDLVGLVTGAALTDNPNSAVLPLGDGRVMCLTETTKSSVLIDPDTLETVGRFRYTDRLGGMVQSAHPIVTDTEFLTLLPDLVRPGHLVVRMEAGSNERKVIGRMDCRGGPSPGWLHSFAVTEKYAVVPEMPLRYSSASLLASELAPFYAFDWVPASGSYMHVMCKSTGKTVASVEVPPFMAIHFINAYEEEGDEAAVVVDCCEHYGDPAIIETLVLSRLRLLRGKDVLPNARVGRFRIPLDGSPFGELETALDPEEHGRGMDMCSINPARLGRKYQYAYACGARRPCNFPNTLTKIDLVEKKAKSWHEEGSVPSEPFFVARPGATDEDDGVVISIVSSDDGEGYALVLDATTFEEIARVRFPYGLPYGFHGCWIPATEEPATTSARLISATGVRRLAATDAPLVLGLRSLVPCNGKLMKEAAQGAGGGSGVGAGHEGGDGPPGYPLRQPGYSAAVTYCSARLPPSPSPSINAHGCFREVLLALKQLLAEAHAALHRRSDRDLSRLASTLCDLSYRSSFAVATFDSCEAALAEAVGAATCRRRPLPPPSSWASHPPPPPLPRGRWWLPPYPPSPTAASVSPSSPACCP

SEQ ID NO: 132972 - protein, 1571 aa, Oryza sativa
  unsure (1)..(1571): unsure at all Xaa locations
  Clone ID: PAT_MRT4530_3488C.1.pep
MGCKMAGHPPNHRGEGMINFVAELARMTLVVGYPNAPEYTTIPPLSGELPHRVRLEVHGYVGTCLANMVVEASGGSTDHACQEAAYLMMARLRERHNYIFHDTAYRFHPRRASGDDISTFRPTAGENDTTFSHMCAVMRGLDRMHSDLHKATKALNDGKLMRIVTLKDEIARLKRENAQLKGLPAPGGVRIRTTPXKTTTAPVRIQLAPRNPPPSAAPAAPPVPPAVPAAPAPAPASALSFAPASAARGPASGTGSWLSATPSGSRDLSSSSSSGSQSGSGETYLPGSGSRSEVXMVYTRNGSRATGEGSNGEERTDGAHPHSDSGNGPPPLPENPTLAQVMAHQTQMMAAMMQQMQQQHQQMHQRMLQHAEQQHQQFGPPPPQSKLPEFLRVRPPTFSSTTNPMEANDWLHAIEKKLNLLQCNDQEKVAFATHQLQGPASAWWDNHMATRPPDGVVAQKKREFRALHQGNRTVTEYLHEFNRLARYAPEDVRTDAEKQEKFMAGLDDELTNQLISGDYADFERLVDKAIRQEDQRNKMDRKRKAAQFRAPQGSHQRPRFTPGQQGGPTTMIVRQYRPFNPSNFPQGASGSQNHHGGQPNRGAAPRPPMAPAQSGPPAQAKKETGAKPGSCFNCGELGHFADKCPKPRRAGPRFIQARVNHASAEEAQAAPEVVLDLDVILGMDWLTKFKGVIDCANHTVTLTNEKGETVVYKSLVSPKQGVSLNQIETEIPVDTVEKNLRKLEYIPIVCEYPEVFPEDLTTMPPKREIEFRIDLAPGTAPIYKRPYRMAANELAEVKKQVDEQLQKGYIRPSTSPWGAPVIFVEKKDKTKRMCVDYCALNEVTIKNKYPLLRIDDLFDQLKGAEVFSKIDLRSGYHQLRIQEEDIPKTAFTTRYGLYECTVMSFGLTNAPAFFMNLMNKVFMEFLDKFVVVFIDDILIYSKSEEEHEQHLRLVLEKLKEHQLYAKFSKCDFWLTEVKFLGHVITAQGVAVDPSNLLKKDEKFKWTAECDKSIEELKKKLVSAPVLILPDQMKDFQVYCDASRHGLGCVLMQEGRVVAYASRQLRPHEGNYPTHDLELAAVVHALKIWRHYLIGNRCEVYTDHKSLKYIFTQPDLNLRQRRWLELIKDYDMSIHYHPGKANVVADALSRKSYCTALCIEGMCEELRQEFEHLNVGIVEHGFVAALEARPTLVDQVRAAQVNDSEIAELKKNMRVGKARDFHEDEHGTIWLGERLCVPDDKELKDLILTEAHQTQYSIHPGSTKMYQDLKEKFWWAEHQRPAGLLQPLQIPEWKWEEIGMDIITGLPRTSSGHDSIWVVVDRLTKVAHFIPVHTTYTGKRLAELYLSRIMCLHGVPKKIVSDRGSQFTSKFWQKLQEKLGTRLNFSTAYHPQTDGQTERVNQILEDMLRACALDFGGAWDKNLPYAEFSYNNSYQASLQMAPFEALYGRKCRTPLFWDQTGERQLFGTEVLAEAEEKVRIIRERLRIAQSRQKSYADNRRRKLTFEAGDYVYLRVTPLRGVHRFQTKGKLAPRFVGPYKILERRGEVAYQLELPSNMIGIHDVFHVSQLKKC

SEQ ID NO: 132973 - protein, 1198 aa, Oryza sativa
  Clone ID: PAT_MRT4530_34890C.1.pep
MEYMSNGDLDYHLHVKNSLDSLDIRLNIAIDCADALGYMHSMCSPVLHGDVKPSNILLDDSFNAKISDFGISRLLSTDKTHTENMITCYMDPLYYQEGRLTSKSDVYSFGIVLMELITKKRATCLTQALAEGQEMTELLDPMIANESNMKVLLEIEKLVQECLAEDIDRRPDICDVAAYLRMLRKMSQQAPQENFGWHLFAETQNDFKKQSHQGTNIISSIKMVFPRMMGILNVNMAKSENKGTPLYVSGKRIFTALEIKKITGNYSRIIGKDMFTVVYSGILEDNTQVAVKTHNMFERGKWRCANELNSLSELIHKNIINLLGFCYEMDAVILVYELIERGHLCNILHGNDTKRFPLPLDLRLDIAIGLAEGLSYMHSRSKPILHGNIRTVTVLLDDKFVPKISGFGSSKIGEDGKCRIVGSEMGYMDETFVNTRVLTRKSDVYSFGVVLLELITRKRIYYNGKDNNTAINFAKVYEKEGSGRAMFDNEISADKNIPTLEDIGILAMKCFNPDIDKRPEMKEGSYSLEVFWAPILLIHLGGQDVITAYNIEDNELWRRQAAMQMFVFGVLKCIEKPWALRSASINMLVSSNSLITKIEKSNEEGDRIDISLESYVEEARKFVLNPSDVDGNYVGSSIKPCDSSGSIIVLVLQHVKSGWKDYITNVASYRMFNDNRGQWSLQRNNCDNEDLAWNVRAPFDESVLLWHLATDLCLLSEGYTNEGATRSIEISNYMMYLLLNNPDMLMAGTKRSLFTTAIHELKGIIGDETLEDIDLAHKIIAKMESSEGCPSFIHNACVLSKALLCLDNTKMWEVIEGVWVEMLCFSASRCRGYLHAKSLGNGGELLTFVWLLLLQMGMEPLAEKLQRAEIPKRGGNGAASAASLSSDKSLALQRKKTEVPSGDEGNIADAQAATVATPVLATPDLSAAAAAVMMPPQSPPPNPEEETLLADYYRLATDQIYFRNLVRQARITFELLRGILLRDDERAEVLGLTGVAGFGAAASAPTCVPRQSSSGEPIATSIIVSGGYEDDDDRGDVLVYTGHGGRGPNLHKHCVDQKFEGGNLALEPARVKRQQRCTRLAAARDERSAGARGSNGSGGAHGGGRRGTAGGQGWAGVRSAQTAALMAARGRAGVGGRAVGAHGSTHGAAETWTGRWPGAAARRGRGWGGAYGGGGEEGACGGDGWLRQRLALVAAAGG

SEQ ID NO: 132974 - protein, 325 aa, Oryza sativa
  Clone ID: PAT_MRT4530_34891C.1.pep
MAIVAALVAPTANPHNPLRLIAAAPHRQWRRVAAAASSSAAPGVDLKALQAAIDKKDSEEVKQAMDQLKELGWAKRWSSQPYVSRRTTSLRELTTLGIKNAENLAIPSVRNDAAFLFTVVGSTGFLGVLAGQLPGDWGFFVPYLIGSISLIVLAIGSISPGLLQAAIGAFSTVFPDYQERIARHEAAHFLVAYLIGLPILGYSLDIGKEHVNLIDDQLQKLIYSGQLDQKEIDRLAVVSMAGLAAEGLEYDKVVGQSADLFTLQRFINRTKPPLTKDQQQNLTRWAVLFSASLLKNNKAAHEALMSAMSQKASVLGCIEAIENAS

SEQ ID NO: 132975 - protein, 117 aa, Oryza sativa
  Clone ID: PAT_MRT4530_34892C.1.pep
MWEVIEGVWVEMLCFSASRCRGYLHAKSLGNGGELLTFVWLLLLQMGMEPLAEKLQRAEIPKRGGNGAASAASLSSDKSLALQRKKTEVPSGDEGNIADVPSTSNDSIVIDIGDNAS

SEQ ID NO: 132976 - protein, 551 aa, Oryza sativa
  Clone ID: PAT_MRT4530_34893C.1.pep
MASAAMLVPLVLVLCTAAASAAVVEHTFKVGGTKITQLCMNSVIYTANQQLPGPTIEVTEGDTLVVHAVNDSPYPLSLHWHGVYQLRSGWNDGANKITQCPIQPSGNFTYRFNITGQEGTLWWHAHSSLLRATIYGALIIKPRNGPSGYPFPEPYEEIPILLGEWWNRNVDDVENDGYLTGLGPQISDALTINGMPGDQNRCKGSAMYEVEVEYGKTCLLRIINAAVNVELFFKVAGHTFTVVAADASYTKPYATDVIVIAPGQTVDALMNTTASPGRYYMAAHVFDSKTVAVPFDQSTATGIVKYKGVPNYAPAAMPSLPPHDDVVTAGRFYWSLTGLARPSDPGVPTTVDHNMVVTFGLDQAPCAPNQTKCSGFALVAAMNRNSFQFPDQKVSLLEALYKGVPGVYSEDFPDFPPPMQGFRKATAVKKVKYNDVVEVVLQSEQYSSTLGTENHPIHLHGFDFYLLAQGLGRFNPSMKSKYNLVDPQVRNTVAVPAGGWAVIRFMANNPGEPAALNLFLPYMIWCNRASDCRVVELQLISDWFHASGMKL

SEQ ID NO: 132977 - protein, 684 aa, Oryza sativa
  Clone ID: PAT_MRT4530_34894C.1.pep
MEMDTSPSSSAPSSPAASSDSIDLNFLPFLKREPKSEPASPERGPLPLPAAAPPPPPPPPPPPPPPQVQAATVATPVPATPDLSAAAVMTPLQSLPPNPEEETLLAEYYRLATLYLSSAGAAGVIVPAAAPEASAGAVAQPGSGSGAKKRRPRSSELVRVSSLSVQDQIYFRDLVRRARITFESLRGILLRDDERAEVLGLTGVPGFGAVDRRRVRADLRAAALMGDRDLWLNRDRRIVGPIPGISVGDAFFFRMELCVLGLHGQVQAGIDFVTAGQSSSGEPIATSIIVSGGYEDDDDRGDVLVYTGHGGRDPNLHKHCVDQKLEGGNLALERSMAYGIEIRVIRAVKSKRSPVGKVYFYDGLYKVVDYWLDRGKSGFGVYKYKMLRIEGQESMGSVNFRLAEQLKVNALTFRPTGYLGFDISMGREIMPVALYNDVDDDRDPLLFEYLARPIFPSSAVQGKFAEGGGGCECTENCSIGCYCAQRNGGEFAYDKLGALLRGKPLVYECGPYCRCPPSCPNRVSQKGLRNRLEVFRSRETGWGVRSLDLIKAGTFICEFSGIVLTHQQSEIMAANGDCLVRPSRFPPRWLDWGDVSDVYPEYVAPNNPAVPDLKFSIDVSRARNVACYFSHSCSPNVFVQFVLFDHYNAAYPHLMIFAMENIPPLRELSIDYGMIDEWGAAFPS

SEQ ID NO: 132978 - protein, 91 aa, Oryza sativa
  Clone ID: PAT_MRT4530_34895C.1.pep
MVEKGGGADRDSVMRVVASTAPPASNGDGGNQQLIGRVAAPQGNETTQAGARTGWPAVMDVGVGGRAGGSDGRPWNAGPVTRSMPAPVHEL

SEQ ID NO: 132979 - protein, 189 aa, Oryza sativa
  unsure (1)..(189): unsure at all Xaa locations
  Clone ID: PAT_MRT4530_34896C.1.pep
MDAKARIVHRTYSLVGGDDIEANNYIVITKQIYKLTGQTHHLALIQAARRSSFKLLTAHLPETSPRTLTVQVFSSDEGGWDPPLACAILQECELHSXYAKPVVLRGAVHWLCLTYSRHRILVLKWEHPPRGRCDVASPPLKASLMRLPTPCXHDMCLVLSQATNDVGRTSHRAAASLSVVALPGNRIAV

SEQ ID NO: 132980 - protein, 145 aa, Oryza sativa
  Clone ID: PAT_MRT4530_34897C.1.pep
MELHVCPQVFPLFFFSIFFYLSLSHIHFYKFRPLNLHAAQPHSPSLPPTLHMHATTRIRPRHPSSASTARIRPRLSSTCIGDRAPRIIAPLHHCTVFVRSSARSRRAASHAHQPHRRDAQLLVEVRQAAHHADGDPHPRRPIQHH

SEQ ID NO: 132981 - protein, 97 aa, Oryza sativa
  Clone ID: PAT_MRT4530_34898C.1.pep
TQMAQAAQQSSINSSLAAHSVCSQCSIGVCLHIGPTMCCFRSAPPSHLCSRLCCRPPCCAVHVCASCLMQTLSSSECSCALMLEAILVWNPGCPKCC

SEQ ID NO: 132982 - protein, 164 aa, Oryza sativa
  Clone ID: PAT_MRT4530_34899C.1.pep
EAVRALFPTTRSCQPLHLILLPHLSPLLSKPPFPLPSATAALSPSPPHLGLRPHPPPPPQLGLRPPVPLSSPAVVRRREEAGGRARWCSNAGRRGRRDAGGSRRRPRRRSGWSSAAAARDDLDGGSRGGWQRSSAVAVAVAGHAKTRRRWPAARRRDGGGRPRQ

SEQ ID NO: 132983 - protein, 104 aa, Oryza sativa
  unsure (1)..(104): unsure at all Xaa locations
  Clone ID: PAT_MRT4530_3489C.1.pep
LACLLISNKGFIGVSADELSRYCIGLXRLYPIGFYWIILLFCCIIISRLSLFTSSVRLYINHIADSSKSYRYRLDQTDWHTRILSTFGPALELSRYPRPLCSST

SEQ ID NO: 132984 - protein, 189 aa, Oryza sativa
  unsure (1)..(189): unsure at all Xaa locations
  Clone ID: PAT_MRT4530_348C.1.pep
SRGRGRRLHLAGAGEYGGGVGDRLGAERRSRWXGGRLGTRGAGGRDGGQLGARGASGGGXPVWCERRSRWRRPVWRERRGRRRRRRPWCEEEMPVGVXHEGWPAGGASAGVPHVGRGCVVVEHRCVSRRFAGGVRRVXTQSGLSRANNDGXFPLLRALSCCLTPQGQLPGESPVLAPLSPDGRRRRFFH

SEQ ID NO: 132985 - protein, 148 aa, Oryza sativa
  Clone ID: PAT_MRT4530_34900C.1.pep
KSRETTERASLCVLVLPSLTTGTMAIGKKHKEAAALSSSSSPLLPADRKALLLLLLLLIVLLARPAASSDGVRYDYRAYTECKSHPEPALYNGGILRWANKVTDFRTEDDGNYSPAFVLYNMSAATVYSFSCWVKIDGPTTAHVKPSI

SEQ ID NO: 132986 - protein, 52 aa, Oryza sativa
  Clone ID: PAT_MRT4530_34901C.1.pep
MTLEGRHGLELASAASQRADPALQQRRRALGAVGTISAMTTTMTHCDNDGGG

SEQ ID NO: 132987 - protein, 105 aa, Oryza sativa
  Clone ID: PAT_MRT4530_34902C.1.pep
IRRRGRRESPPPSSTPSGVEVVVASGRRREPPASRLPPPHVAAPPRAAARLLASPHHRRRRERHRRAEPERRQQLRWMGMQPERRWGWGWSGGGGWEREGGLERR

SEQ ID NO: 132988 - protein, 87 aa, Oryza sativa
  unsure (1)..(87): unsure at all Xaa locations
  Clone ID: PAT_MRT4530_34903C.1.pep
HSINHIQRSDTCTSRIITHHLITLHVNGNPRHLKPQFSKHLRYLKNQSHIXYHXNHPMASSAHFSHSKPTASSSNTQFPPNAFHPYD

SEQ ID NO: 132989 - protein, 139 aa, Oryza sativa
  Clone ID: PAT_MRT4530_34904C.1.pep
TIPNHSWSAIAHETRESRVKYNERDGPCPLAIQLLSISSCNKNVLPLFGFSIRKLLMNQNGMTQQRVIFNHTVSTKNDFYSILGNWDSLSLSPHLSEDFLPTLSKSSLSVFRPFPLLFTLVPFWARERSPQNQNLSIAN

SEQ ID NO: 132990 - protein, 121 aa, Oryza sativa
  Clone ID: PAT_MRT4530_34905C.1.pep
MPAPASAATCFVFAASGVRCRAFSTPITKNARQGEGEREGELTGHTRKRGALGRWRWRGFGGGASWVDAVDGAPAASDVGRGAPEERHNLGKMREWLGEGGVARSGRKRLPEMEIAEGLTG

SEQ ID NO: 132991 - protein, 276 aa, Oryza sativa
  unsure (1)..(276): unsure at all Xaa locations
  Clone ID: PAT_MRT4530_34906C.1.pep
PQHLFSPSPLHLSSSLLSSSRAPVGEQLHRRXPAGAGGGGRSRSRAGGRVARRRAXRRGSSYMGADANGGGGGGGSRQQLPRGRNRRGSSHVSDEAALLQRELSKRWRSSLPLLLDLWTTSTRHILLFILFLNLTMSDAAEIQLQITGVRGQEDVVAECDMGTSRADATAAAPPPVSSKRLRWWAVVLANIVVVLGGQSVATLLGGGGLWLVTMLXSCGAPLXIPLLLYFRTGSPAPPXTEPSERWRRQSSARAGLDGRLSPSAAGCVEKRGEEKK

SEQ ID NO: 132992 - protein, 100 aa, Oryza sativa
  Clone ID: PAT_MRT4530_34907C.1.pep
ASLPPRLSASIPIIPSAPREADLPRARRLPRPRHLVSSPSLFSPLSDLPQLLLPPGCLCRCELPQLHAFFPAPFCSSTIPPVFRSPTRHLSSMTLVILLS

SEQ ID NO: 132993 - protein, 264 aa, Oryza sativa
  unsure (1)..(264): unsure at all Xaa locations
  Clone ID: PAT_MRT4530_34908C.1.pep
HLFSPSPLHLSSSLLSSSRAPVGEQLHRRXPAGAGGGGRSRSRAGGRVARRRAXRRGSSYMGADANGGGGGGGSRQQLPRGRNRRGSSHVSDEAALLQRELSKRWRXRARPGQDINIDSPDLPLLLDLWTTSTRHILLFILFLNLTMSDAAEIQLQITGVRGQEDVVAECDMGTSRADATAAAPPPVSSKRLRWWAVVLANIVVVLGGQSVATLLGGGGLWLTGPSLTEPSERWRRQSSARAGLDGRLSPSAAGCVEKRGEEKK

SEQ ID NO: 132994 - protein, 45 aa, Oryza sativa
  Clone ID: PAT_MRT4530_34909C.1.pep
SRSCPPLCSPVGDSRRSHAQPDCNGGAHKSKTGASYSFRRVNLAG

SEQ ID NO: 132995 - protein, 1202 aa, Oryza sativa
  Clone ID: PAT_MRT4530_3490C.1.pep
MGCKMAGHPPNHRGEGMIDFVAELARMTLVVGYPNAPEYTTIPPLSGELPHRVRLEVHGYVGTCLANMVVEAAGGTADHACQEAAYLMMARLRERHNYIFHDTAYRFHPRRASNDDVSSFRPTAGENDTTFGHMCAVMRGLDRMHSDLHKATKALNDGKLMRIVALKDEITRLKRENAQLKGLPAPGGVWIRTTPRKTTTAPVRIQLAPRNPPPSAAPAAPPVPPTVPAAPAPAPASALSFAPASAARGPASGTGGCLFGMVYTRNGSRATGEGSNGEERTDGAHPHSDSGNGPPPLPENPTLAQVMAHQTQMMAAMMQQMQQQHQQMHQRMMQHVEQQHQHFGPPPPQSKLPEFLRVRPPTFSSTTNPMEANDWLHAIEKKLNLLQCNDQEKVAFATHQLQGPASAWWDNHMATRPPGTEVTWAEFCRSFRKAQVPDGVVAQKKREFRALHQGNRTVTEYLHEFNRLTRYAPEDVRTDAEKQEKFMAGLDDELTNQLISGDYADFERLVDKAIRQEDQRNKMDRKRKATQFRAPQGSHQRPRFTPGQQGGPTTMIVRQYRPFNPSNFPQGSSGSQNHHGGQSNRGAAPRPPMAPAQSGPSAQAKKETGAKPGSCFNCGELGHFADKCPKPRRAGPRFIQARVNHASAEEAQAAPEVVLGTFPVNSIPAIVLFDSGATHSFISKKFVGMHGLIREKLSTPMRVHTPGNSSTSVQFSPSITIEIQRSPFLANLILLESKDLDVILGMDWLTKFKGVIDCANRTVTLTNEKGKTVVYKSPDSPKQGVSLNQIEAEIPVDTVEKNLRKLEDIPIVSEYPEVFPEDLTTMPPKREIEFRIDLAPGTAPIYKRPYRMAANELAEVKKQVDEQLQKGYIRPSTSPWGAPVIFVEKKDKTKRMCVDYRALNEVTIKNKYPLPRIDDLFDQLKGAKVFSKIDLRSGYHQLRIREEDIPKTAFTTRYGLYECTVMSFGLTNAPAFFMNLMNKVFMEFLDKFVVVFIDDILIYSKSEEEHEQHLRLVLEKLKEHQLYAKFSKCDFWMTEVKFLGHVITAQGVAVDPSNVESVTKWTPPKTVSQIRSFLGLAGYYRRFIENFSRIARPMTQLLKKDEKFKWTAECDKSFEELKKKLVSALVLILPDQMKDFQVYCDASRHGLGCVLMQEGRVVAYASRQLRPHEGNYPTHDLELAAVVHALKIWRHYVEFSEL

SEQ ID NO: 132996 - protein, 632 aa, Oryza sativa
  Clone ID: PAT_MRT4530_34910C.1.pep
MALWQARHFLIIKHVPLPNYAPPLPRGFFLPRRRGRSIEPPGSWITGTNNNHHHLGINHFNPPLFVPSRGSLCVGVLQRQSWIIIVCFCTRRSRPQKAASFTAGHGGVDRLMAASGGGSLLERRSSVRRSQSMVSEEGRGTPADEDLGGGGTLKIGAVLDKDSAAPKSRLAKDTGEHGGGGPSEMELMKEKFAKLLLGEDMSGSGKGVPSALAVSNAITNLAASVFGEQRKLEPMAPDRKGRWKKEVGWLLSVADHIVEFVAKKQVLDNGVEMEVMGTQQRRDLQANIPALRKIDTMLLDYLDNFKDRNEFWYVKRDSCSDSDEQRSDEKWWIPIVKVPPGGLSPASRGWLQHQKELVNQVLKAAMAINANCLMEMAIPESYLESLPKNGRASLGDALYRIITDVEFDPDVFLSTVDLTSEHKILDLKDRIEASVIIWNRKVHNKDGKSAWGSAVSQEKREQFEERAQTLLLIIKHRYPGIPQSTLDIAKIQENRDVGFAILESYSRVLESLAFNVMSRIEDVLNADDHAREKAKKEAPPAPAMANDAAEHHHQQAGEVDAPCKMTGSPNGRTLLDFMDDWNGDADRPSPTAPEPAAQEDGRLMKLPNIMTNLKQTYMDNLFGAHRSPPGRH

SEQ ID NO: 132997 - protein, 244 aa, Oryza sativa
  Clone ID: PAT_MRT4530_34911C.1.pep
MVIGRLALSSFFHNKARDTSPSPPPAPATAPPWVWPSCKNPRTQSFRAATAPPPPPGSRTIASIFLDSAESSFTTSSARHDCSDSLSTASEASAGAEAADTADDAIVRGLRSSDRLLFDPGASATSSILEEKSSDAAGEASFIGGVAVAFESEDPYVDFRVSMEEMVVAHGVGNWGWLEEMLGWYLRANGKDTHAAILAAFIDVIVAIADPALASCSSHRRSSTCTITEESSLEVAEKQAKLAV

SEQ ID NO: 132998 - protein, 181 aa, Oryza sativa
  Clone ID: PAT_MRT4530_34912C.1.pep
MATLCGSVCFLFVIMVIASSPAAVAAAGEDIVEETCGQCSRSNPNVNYTLCVSSLSGYPGADLHGLALFSTMPLRSALATIASEARVLRDRAPPGSPPRSCLDSCLEVFRDAAYNLGNAVAAIESWRYGDAKTAMSATTDAPVTCEDEFKGQGMATPPAIKARTKPLFQHGVISLAIISLL

SEQ ID NO: 132999 - protein, 98 aa, Oryza sativa
  Clone ID: PAT_MRT4530_34913C.1.pep
KGGGSIYFGKGLDHPFLNQFTLNQTGFKFKNWGGRLKLGGEKKNFLTREIPGWGKGKFLGLFPKGPKAPLNFFFFPNGGKGWGASRRLNIFWVFKKGF

SEQ ID NO: 133000 - protein, 98 aa, Oryza sativa
  Clone ID: PAT_MRT4530_34914C.1.pep
MAWLVLLVCVRPRRQSVSTCADAAESRKRRVTGSWSKASVRTQKKKASANHSGRTHVRDYVSSKPTAITTLLQSSCPRPARAADRERTRMRVVDAPEE

SEQ ID NO: 133001 - protein, 107 aa, Oryza sativa
  Clone ID: PAT_MRT4530_34915C.1.pep
DTGRHSWFLARLIQRSGVQVCDGFFFPLFLQPIIMNWMRLRWFKRKFVETYLQFMFTYLFFPGMMLWAPFVNFRKFPRDPTMKYPWSKPKEGTPLFKDRYPPIETYK

SEQ ID NO: 133002 - protein, 195 aa, Oryza sativa
  Clone ID: PAT_MRT4530_34916C.1.pep
MPMQLLCHSASGNWRSGPLLVYACTATPGDPAYMSFAPVWHGLNSSRPISISIRGRRQPFFTHPRRRAVVRSWRGGEWRWQDADGQQRGRTGSTKQGNHRYPAFPVLHTTYYLVLVLVRALRFSSGKSQVVPSAARLHPFGRPCPRYSTSRPCSDSSGLVVAQLTDALIHCANAEGNRGTPSQLCRRCSERLVET

SEQ ID NO: 133003 - protein, 65 aa, Oryza sativa
  unsure (1)..(65): unsure at all Xaa locations
  Clone ID: PAT_MRT4530_34917C.1.pep
GSASPRRAPPSPDPLLDPPSPSTPPPXPSPIPPPLPSPSPPXSPPSSPSPKLSPSPLLSHELSST

SEQ ID NO: 133004 - protein, 199 aa, Oryza sativa
  Clone ID: PAT_MRT4530_34918C.1.pep
IFRVWHFDSLRSTRMKLNPEKCVFGVPAVKLLGFLVSSRGIEANPEKIRAIERMRPPSKLIDVQCVTGCMAALSRFISRLGERALPLFKLLKRPGPFVWTEEAEQALNQLKAYLTSPPILVAPGTEEPLLLYLAATPHAVSATLVVERDESRPGAPRLAMALHPPKARYLKPPTPGRTPRPPWEEGRLWRVVPRPIVLT

SEQ ID NO: 133005 - protein, 168 aa, Oryza sativa
  unsure (1)..(168): unsure at all Xaa locations
  Clone ID: PAT_MRT4530_34919C.1.pep
WIGPGEEYSSXIRDQLIRENMTDQLGMSKRRHNGFSRARRXCSPLIVRVLGVMVEDSSCDSNGDGLSLGDGDDGGLQWWGGRGKRRRDRRRQRVAGCSATADPAMDQVHGMSVVLLLRVLVLPLLSRKQPACSLAVLALPATGHCRLVRLEQAMVALDEDSRYLTKLS

SEQ ID NO: 133006 - protein, 234 aa, Oryza sativa
  unsure (1)..(234): unsure at all Xaa locations
  Clone ID: PAT_MRT4530_3491C.1.pep
SKKLAANDKTLENINVKLDGFAYAFQNXLSFNKMIETXQAQLAALVPANESGRILGQXDPSVKNVKAITTREGAGNNNREAPSSDAAEEKVXQEKTMPQEYCDTRLLPFPQRYNKPLVDXQFACFVEVIQKIHIHVPLLDAMQVPTYARYLKDILNNKRPLPTTEVVKLMEECSNAILDKLPEKKKDPGCPTITCSIGTQRFDQDLSDLGASISVMPKDVFDMLNFTVLAPTPM

SEQ ID NO: 133007 - protein, 161 aa, Oryza sativa
  Clone ID: PAT_MRT4530_34920C.1.pep
KKPENINPSRRGFIKNTSFGLAGTSLAGGSVNALLTTEAVAAEMQTVVTAAHWGALGVVVENGKVVKSGPAMPVSVENELQTVVPDQVHGETRIKYPMVRKGYLAGNKDTSLRGRDEWVRISWDKAFELVSDEMKRVRDTYGPSSIFGGSYGWYSSGSLHA

SEQ ID NO: 133008 - protein, 95 aa, Oryza sativa
  Clone ID: PAT_MRT4530_34921C.1.pep
MGKRKCIIVFRRCVCFTRTSDKSRQQGEEGDCVLRRPKKDPPPNTPPSFSAEHAIISGSNRYELAARFTLPATYSVVPKNMFTLIDLDVSHLILD

SEQ ID NO: 133009 - protein, 546 aa, Oryza sativa
  Clone ID: PAT_MRT4530_34922C.1.pep
SGGPGRGRALAFPSLPPHLRLRLRRRAAAGDDSDGRPLRGHRVAMYRAASGLGAIKRHGLDGQMLNVAIRCASTSVAQRSSGGFWTWLTGARSNALPPPDFTLPGVTIPPPLPDLVEPGKTKITTLANGVKIASETTPGPSCSVGVYVNCGSVHEAPETLGATQLLKKMAFTTTTNRSHLRVVREIEAVGGNVKASANREMMSYSYAALKTYMPEMVEVLIDCVRNPAFLDWEVKEQIMKLKAELAEASSNPETFLLEALHSTGYSGALATPLIASESSVSRLNTNVLEYFLAENYTAPRIVLAATGVDHDELVSIAEPLLSDMPGVTGPAKPKSTYVGGEYRRTADSSNTDVALALEVPGGWLKEKEFVTVSTLLGGGGTYSWGRHGKGLHSSLNHLANEFDQIRSIAAFKDVHSNTGIFGIHTSTDAAFVPKAIDLATRELTSLATPGKVDQTQLDRAKATAKSAILMNLESKASATEDMGRQILAFGERKPVEHLLKAVDGVTLKDITALAEKIISSPLTMASHGNVLNVPTYDSVSGKFRSK

SEQ ID NO: 133010 - protein, 37 aa, Oryza sativa
  Clone ID: PAT_MRT4530_34923C.1.pep
WVLSQSVKLVSAKLVNSISGQSKFHRVIVFIIEKKKK

SEQ ID NO: 133011 - protein, 90 aa, Oryza sativa
  Clone ID: PAT_MRT4530_34924C.1.pep
IWFSLNRRIPSWFNFPGKSGMFPVFPPGGGGCVLVLSQGGVCNNKWGVWKAWFLYRDLGKIPWGQKKKKKKKKKKKERGEKPKKLKKQTI

SEQ ID NO: 133012 - protein, 53 aa, Oryza sativa
  Clone ID: PAT_MRT4530_34925C.1.pep
NPQIQLIQLRLQTLILHVVISHEIKYPIRQPQMLRLVGYFQMLDQTGTQKGKP

SEQ ID NO: 133013 - protein, 109 aa, Oryza sativa
  unsure (1)..(109): unsure at all Xaa locations
  Clone ID: PAT_MRT4530_34926C.1.pep
TRLRRHAVASRRRLALLPLRAPSPLHPRPPPAILALAALPSPACVTSPVAAAARLPPPPPIACRRRRRRGCSPAAVPLPSLRTPGHLLPSSPLSSPGHPPPPXSSPYPR

SEQ ID NO: 133014 - protein, 48 aa, Oryza sativa
  Clone ID: PAT_MRT4530_34927C.1.pep
RIRDTGEEAALRYYSSTFRISGEAARINLRQLTRGGTHIGTAIHAGGD

SEQ ID NO: 133015 - protein, 87 aa, Oryza sativa
  Clone ID: PAT_MRT4530_34928C.1.pep
LAQFLGQPFSGAEEEAGVVTEIADLCSIDNLRNQKANKYGSIGGKISHESFFRKGMAGDWTNHMTLEMAERLDSILREKLDGSGLIV

SEQ ID NO: 133016 - protein, 118 aa, Oryza sativa
  unsure (1)..(118): unsure at all Xaa locations
  Clone ID: PAT_MRT4530_34929C.1.pep
IPSTSGYMPYTDTVYLRVYGCFLYTLRKFITXIETESTDGRSPTRTELGRHCIVWGLISPSSTWRSTDPQYKRDPREDLRHXISLPTQPPQPTKSKPTGAKSPGDLVGPTRLRSRRYH

SEQ ID NO: 133017 - protein, 1818 aa, Oryza sativa
  unsure (1)..(1818): unsure at all Xaa locations
  Clone ID: PAT_MRT4530_3492C.1.pep
MADHPPNHRGEGMDDFVAELACMTLVVGYPNAPEYSTVLLLSGELPHRVRLEVHGYVGTCLANMVVEASGGNRDHACQEAAYLMMARLRDRHNYIFYNTAYRFHPRRASGDDASTFRPTVGENHTTFGHMCTVMRGMDKMHSNLHKASKALNDGKLVRIIALKDEIARLKKENAQLKGLPAAGGVRIRTTPRKSTIAPVCIQLAPRNPAPTAPPTVPAAPPAAPPAPVPAPVPVLAPVSALSFAPASAARGPASGNGGWLPATPSGSRDHSSSSSSGSEPGSGETYLPDSRSCSEGPGLFLPMVNTRNGSRAAGEGSNDEERADGGYPNSASGNGPPPLPENSTLAQVMAHQTQMMAAMMQQQHXQMHQRMRXQAEQQQXQFGPPPPQSKLPKFPRVRPPTFSSTTNPMEANDWLHAIEKKLNLLQCNDQEKVAFATQQLQGPASAWWDNHMATHPPGTEVTWAEFCRSFRKVQVPDGVVAQKKREFRALHXGNRTVTEYLHEFNHLAXYAPEDVRTDAEKHEKFLAGLDDELTNQLIYGDYADFEKLVDKAIRQEDQRNKMDRKRKAAQFRSNQGSHQRPRFTSGQQGGPTTMIVXQHRPYNPSNFHPGSSGNHLGQGQHNRGAAPHPPMAPVQQTAPAPPKYTGGKPGACFNCGESGHFADKCPKLRRAGPKFVQAQVNHASAEETQAAPEVVLGTFPVNSIPATVLLYSGATHSFISKKFVGXHGLIREELSTPMRVHTLGNSSTSVQFSPSVTIEIQRSPFLANLILLESKDLDDILGMDWLTKFKGVIDCANRTVTLTNEKGETVVXKSPVALKQGISLNQIEVENSVVTAEKSSRKLEDIPIVCEYSEVFPEDLTTMPPKREIEFRIDLAPGTAPIYKRPYKMAANELAEVKKQVDEQLXKRYIQPSTSPWGAPVIFVEKKDKTKRMCIDYRALNEVXIKNKYPLPRIDDLFDQLKGARVFSKIDLRSGYHQLRIQEEDIPKTAFTTRYGLYERTVMSFGLTNAPAFFMNLMNKVFMEFLDKFVVVFIDDILIYSKSEEEHEQHLRLVLEKLKEHQLYAKFSKCDFWLSEVKFLGHVITAQGVVVDPSNVESVAKWTPPKTVSQIRSFLGLAGYYHRFIENFSRIARPMTQLLKKDEKFKWTAECDKSFEELKKKLVSAPVLILPDQTKDFQVYCDTFRHGLGCVLMQEGRVVAYASRQLRPHEGNYPTHDLKLAAVVHALKIWRHYLIGNCCEVYTDHKSLKYIFTQPDLNLRQRRWLELIKDYDMSIHYHPGKANVVADALSRKSYCNALCTEGMCKELQQVLEHLNLGIVEHRFMATLEARPTLVDQVRAAQVNDPEIAELKKNMRVGKARGFLEDEHGTIWMRERLCMPDDKELKDLILTEAHQTQYSIHPGSTKMYQDLKEKFWWASMRREIAEFVALCDVCQRVKAEHQRPAGLLQPLQIPKWKWEEIGMDFITGLPRTSSSHDSIWVVVDXLTKVAHFIPVHTTYTGKKLAELYLARIMCLHGVPKKIVSDRGSQFTXKFWQKLQEELGTRLNFSTAYHPQTDGQTERVNXILEDMLRACALDFGGAWDKSLPYAEFSYNNSYQASLQMAPFEALYGRKCRTPLFWDXTGERQLFGIEVLIEAEEKVRTVRERLRVAQSRQKSYANNRRRELTFEAGDYVYLRVTPLXGVHRFQTKGKLAPRFVGPYKILEXRGEVAYXLELPSNMIGIHDVFHVSQLKKCLRLPEEQADSEHIDIQEDLTYVEKPVRILETSERRTRNKVTRFYRVQWSHHSEEEATWEREDELKATHPHLFTSSSESRGRDSV

SEQ ID NO: 133018 - protein, 265 aa, Oryza sativa
  Clone ID: PAT_MRT4530_34930C.1.pep
MASRIARLLQHQNRRLLSTAAEASSRRPPRAPLSGAIPKHEVAKAEASSLKKSRWYMIKSNPSSPLTTQRESHKVSTHLVRPSASYSTQASEQNPKEGTKDLKTVEDPFDSPTYNIPEKPVTFAEGASYSLVIVAGLGIAAVAGYAVFKELIFEPKEYKIFGKALARVQNDSQVTAKIGYPVTGYGNESRNRAARQRIPNKVWTDEDGVEHVEVNFYIRGPHGAGKVYSEMFKDNNDRSWKFTYLIVEIVSPHRVQLMLESYVPA

SEQ ID NO: 133019 - protein, 338 aa, Oryza sativa
  Clone ID: PAT_MRT4530_34931C.1.pep
MLPALLPGCLAAPPPPPPLVTTSSTASPSAHLRTLRLPSGLAVSRRAGFGEAARAAATERGAIEEEEEEEEGFPEWGNGDEDEYDHDPEIGDIMGEYFDDPNKAQSRMEERIKKKRHKIVQAKTGSPNPMKVVFNKFDFSNSYIWFEFYHALLPKDVTLICDALRSWHIVGRLGGCNSMNMQLSQLPLDCQRPTYDALEGANTTPTSFYNIGDLEIQDNIARVWVDIGIHEPLLLDILLNALTTINSDFLNHPPHKGFNRYDLAVLTEKKSDDTILKPEKFVAIFLQRTFAWKRLPIIMQRSQPIKMQIDPKMSEGAHDFFNLIYLEYRQQSTVIDKI

SEQ ID NO: 133020 - protein, 355 aa, Oryza sativa
  Clone ID: PAT_MRT4530_34932C.1.pep
MASRIARLLQHQNRRLLSTAAEASSRRPPRAPLSGAIPKHEVAKAEASSLKKSRWYMIKSNPSSPLTTQRESHKVSTHLVRPSASYSTQASEQNPKEPKAVQVRARHGSLGRLLVRLGNQLDGKTFTAPLTSTLLALATECGPQSLLAGVIRERKGSSQAERKGIEVEETGLLYAPYLLTGRAVLSMGTKDLKTVEDPFDSPTYNIPEKPVTFAEGASYSLVIVAGLGIAAVAGYAVFKELIFEPKEYKIFGKALARVQNDSQVTAKIGYPVTGYGNESRNRAARQRIPNKVWTDEDGVEHVEVNFYIRGPHGAGKVYSEMFKDNNDRSWKFTYLIVEIVSPHRVQLMLESYVPA

SEQ ID NO: 133021 - protein, 209 aa, Oryza sativa
  unsure (1)..(209): unsure at all Xaa locations
  Clone ID: PAT_MRT4530_34933C.1.pep
VLYYIVDALELNELVHLGGMIXNVQLHQNPDDITWNWSESGVYSYKSAYLYQFEGSFTSIDFKSIWKAPAEPKMKFLGWLILHQKTLTAQNLLIRHWPCDWICCLCSSAFEDTNHLFSECDFVREVVPAWQNLSISTSNPQAGATNWWSKVNLTVSKVDKIATRGALLTTWWNIWLERNRRIFNHKSLSEREVAHLVKHDLDLRSWAFK

SEQ ID NO: 133022 - protein, 107 aa, Oryza sativa
  Clone ID: PAT_MRT4530_34934C.1.pep
MRRRAAGRGLDGEQEDGQAADAPPPRSPTMPCPTVGWSNTGGCRASPAAHAARRRSASAAAAAARRRHRSPSLRVPSCPPSPLVVALARRRPPPAPLSNAPPACLSA

SEQ ID NO: 133023 - protein, 192 aa, Oryza sativa
  unsure (1)..(192): unsure at all Xaa locations
  Clone ID: PAT_MRT4530_34935C.1.pep
SDLNVQLHQNPDDITWNWSESGVYSCKSALYQFEGSFASIEFXSSWKAPAEPKMKFWGWLILHQKTVTAQNLLIRHXPCDWICCLCSSAFEDTNHLFSECDFVRQVWNLVHAWQNLPNSTSNPQVGTANWWSKVNLAVLKVDKIATRGALLTMWWNIWLERNRRIFNHKSLSEREVAHLVKQDFDLRSWAFK

SEQ ID NO: 133024 - protein, 83 aa, Oryza sativa
  Clone ID: PAT_MRT4530_34936C.1.pep
ISSRFSIKAIEMLYVVQILNSTSLYLQRGAVINHLGTKQTKCYQTHSTSHWQPRSVWLVGRGFGHIAARDLATHHHSSASLHF

SEQ ID NO: 133025 - protein, 69 aa, Oryza sativa
  Clone ID: PAT_MRT4530_34937C.1.pep
MGINCRVLHLKSGATGQDLTSDFSDEVLSISAVRAHPILVELPLPSPVQIGASQHGSRRHSERSPLDSV

SEQ ID NO: 133026 - protein, 71 aa, Oryza sativa
  Clone ID: PAT_MRT4530_34938C.1.pep
PMCVPYHSCCSTNQCVKSNLVDNASSKTSHTLNIYTPWFNVYTYQTRCCHKMGFICLLCILSSFFYSKKKS

SEQ ID NO: 133027 - protein, 70 aa, Oryza sativa
  Clone ID: PAT_MRT4530_34939C.1.pep
MEDTHDNQRTPTRRHNIQAYIRQDTPPDIDFRDRHGYSPTVSPDNVMRYESAISDLAGHGFEEEGYPVVD

SEQ ID NO: 133028 - protein, 683 aa, Oryza sativa
  unsure (1)..(683): unsure at all Xaa locations
  Clone ID: PAT_MRT4530_3493C.1.pep
LPVPSLLKLEHQPLILIKLKLQFPSLLALLDQAQASPFCGKPNKDANSHLQQFLEICSTYTMKGISPDGVRLXLFPFSLIGKAKQWFYANRATINTWDKCXTTFLSKFFPMEAWERLQEYVAACPHHGMDDXLILQNFYNGLTPTSHDHLDAVARGAFISKTVRGVVDLLEKMVSNMGWSEERLXTHQRGMHTVKEMELLAAKLDLLMNRLNDHEKKPQGTVKALDSHVTCEVYGGTGHSGNDCLETREEAMYMGNNNNNGFXRQAQGWNQPRPYFQGGNNNGNFSNQPSLKDLVFAQAKTTNALSKKLAANDKLAALVPANESGRILGQPXPSVKNVKAITTRGGKSTCDLTYPNLVGAGNNNREAPSSDAAEEKVXQEKTMPQEYCDTRLLPFPQRYNKPLVDXQFACFVEVIQKIHIHVPLLDAMQVPTYARYLKDILNNKRPLPTTEVVKLMEECSNAILDKLPEKKKDPGCPTITCSIGTQRFDQDLSDLGASISVMPKDVFDMLNFTVLAPTPMRLQLVDSSVYFPAGIAEDVPVKIRDFFIPVDFVVLDMDSDKETPLILGHPFLSTANANFDVGAGSICLXINRKEEKFEFQPRTEQCSMVRIKYRANPQNIQVVXVEQPKMDSLVKFMQNFLEKGSSVPRTRYWKTSVQSITPAKKPXKTAPKMPPTTPKRKKV

SEQ ID NO: 133029 - protein, 114 aa, Oryza sativa
  Clone ID: PAT_MRT4530_34940C.1.pep
NTDGQMGDASSLTVRAKVMASVSDISITDYMWWIDVQGYRLLRPLRKTVWNLHTELVDLYDVLWANKVKPGGDKDSFITHDEAPELDEDMVLWPYMRGYVCAYVLPWQDARSCA

SEQ ID NO: 133030 - protein, 90 aa, Oryza sativa
  Clone ID: PAT_MRT4530_34941C.1.pep
TPTKGSGVGPAQGKWPWSDAQNRGLKTLLNLEGGVSIMLGKKFLEGLGPPKKVFHRALESPHPRAGGKFSPFLLFSAPIYIKRARKQVSP

SEQ ID NO: 133031 - protein, 161 aa, Oryza sativa
  unsure (1)..(161): unsure at all Xaa locations
  Clone ID: PAT_MRT4530_34942C.1.pep
GLTXTSPXAPSXRLCHDGFVVVLELXEETXGRRCSVXPPREGGXVAAAIIEAVXSGRDAEEVYEXRRXXRRSGVASSSAFSSLAAPRPPAAALPLRRPFVVVAADHLFHEAGVAVGALHLLDAHLRPHDQRAHVAKVPXTLHSVLPPLILCTAVSSSSSCL

SEQ ID NO: 133032 - protein, 418 aa, Oryza sativa
  unsure (1)..(418): unsure at all Xaa locations
  Clone ID: PAT_MRT4530_34943C.1.pep
MDQLTSSTVFWLTTAVAFLLINTVILRALQKRKSSPAAAAAAAPPPVVQGVGLVRFVRAMARDGPLEAIREQQAKLGSVFTASAPLGLFKVTFLIGSEVSSHFYVASYSEISMGRLYEFTVPIFGPGVLYGVDLETRKEQIRFNWDILKPRSLKASVGAMAEEXRWGDQGTVDLKHELEQVLMLTASRCLLGKELRERACQANYAXLFGELDNGLHLISGLLPYLPIPAHRRRDRARQRLGEIITEVIRLRRNSSRGAAGTDENNDDMLQCLINSRYKDGCAMTDAEIAGLVVALMFAGKHTSSGVSIWTGVHLLSNPNHLAAVVAEQDRLMASCPGRTDDYHRLDYDTVQEMRSLHCCVKEALRLHPPVAAVRQAYKHFTVQTKEDKEYTIPGGHMVVSTILVNHYLPHIYKGPSCV

SEQ ID NO: 133033 - protein, 154 aa, Oryza sativa
  unsure (1)..(154): unsure at all Xaa locations
  Clone ID: PAT_MRT4530_34944C.1.pep
SSAAPSTSATAPKRVVVWFIAILITRCFLHHAAQQELAAIPTKGMSRLPESGDVDEVAKLLLAIKLWGLFAVTGHIMXEPFLDKILTATREFFHLSPKEKVMYSNMVDADXGGGERFLPEVYRIDHIDTNRQILNWCDRLYLQVXPEEERRLDF

SEQ ID NO: 133034 - protein, 161 aa, Oryza sativa
  Clone ID: PAT_MRT4530_34945C.1.pep
GIWPYWPKIRRPSEPIIRQVGTITSNIPSSLVAPGGAKGLLCISRVGSSFTMVPKRCKKIKTDNPYSIVGGMSVDIHASGSSSMGKGVNLLVSKYGARVSGVSPICLGEGWFPPGDAVEGGTTVFMCWAVTLAGLVVVGALLVSNPSALAGYISPGSGVRM

SEQ ID NO: 133035 - protein, 78 aa, Oryza sativa
  Clone ID: PAT_MRT4530_34946C.1.pep
LQLSSCPMSWRLGLQCLPCHGLMSVLVRLLELLFGMSHSAQLSLAISVRLWSSSSYVVLSVQWLCNSGLRPHIRPVQC

SEQ ID NO: 133036 - protein, 94 aa, Oryza sativa
  Clone ID: PAT_MRT4530_34947C.1.pep
QLPLAKVNSSLPLWPPVICPSTFAQKRPMSLPSPPPAKKLQVQQSSSMLPQDFPKLEVLPVEKPTKLQVRRSPQHVSPALKQDSPKMERPLLPR

SEQ ID NO: 133037 - protein, 107 aa, Oryza sativa
  unsure (1)..(107): unsure at all Xaa locations
  Clone ID: PAT_MRT4530_34948C.1.pep
YGIPARIRIVSVYVKEIYHVIETVSTDGRSSTRTKLGLYHIVRGPISPSPTWRSTDPRYIRDPXGQDLRHQISLPTHPPQPTELERAGAKSPGDIVGPTRLRSYRYH

SEQ ID NO: 133038 - protein, 98 aa, Oryza sativa
  unsure (1)..(98): unsure at all Xaa locations
  Clone ID: PAT_MRT4530_34949C.1.pep
MKASMAFTVLALAVVAVSGAAAASTTTFTMHNLCPYTVWPLVTPNAGQPAIITGGATIRLDPNGLASLAFPAAAGWSGRVVPRTGCTGAXTCGTGTRQ

SEQ ID NO: 133039 - protein, 57 aa, Oryza sativa
  Clone ID: PAT_MRT4530_3494C.1.pep
YKDGDLLPGFKPDVSAALMRYNDVAWSTGGCRGSTTNRVLRGKVKGCNRTVKCPMPF

SEQ ID NO: 133040 - protein, 48 aa, Oryza sativa
  Clone ID: PAT_MRT4530_34950C.1.pep
LQESAQGSGCVPSYLRLAWGRRYVAFGDERIRISLNLMAQNNGSTYFK

SEQ ID NO: 133041 - protein, 84 aa, Oryza sativa
  unsure (1)..(84): unsure at all Xaa locations
  Clone ID: PAT_MRT4530_34951C.1.pep
DLKNLCIASAYRPVHELLEEEKKEGPCSQNTGLRPLXLDDFIQAKAKVSPSVSYDATSMNELRKWNEQYGEGGSRTRSPFGFGN

SEQ ID NO: 133042 - protein, 486 aa, Oryza sativa
  Clone ID: PAT_MRT4530_34952C.1.pep
MWRRHLLRRLLPSPATAAAAAASPSPAIRLLSTASPDPAPPATLASSLAGALSALSSTPPPATSPDAYFSLHFSDVRPTNALLAEALALAPPATSRAAAELFRFLVRRRSLHPSDSALAPVVRHLARRRDFPAVRSLVQEFPSALGHDTLDAYLLSLARAGRATDAVKVFDELPPQLRTRQALTSLVSSLSAEGWPSHAEGAVKKVANEIFPDDNICTLLVSGYANAGKLDHALRLIGETRRGGFQPGLDAYNAVLDCICRLCRKKDPLRMPAEAEKFLVDMEANGIPRDAGTFRVLITNLCKIRKTEDAMNLFRRMGEWGCSPDADTYLVLIKSLYQAARISEGDEMMTWMRSAGFGAKLDRKAYYGFIKILCGIERVEHAVKVFRMMKGYGHAPGTKSYSLLIEKLTRHNLGDRANALFREAVARGVTVTPGVYKIDKKYVKAKKEKKVKKRLTLPEKMRLKSKRLYKLRMSFVKKPKRRMVRV

SEQ ID NO: 133043 - protein, 176 aa, Oryza sativa
  Clone ID: PAT_MRT4530_34953C.1.pep
MAASPAFLVLAVLLCAAAAVARAADDGAAGMTKFKVYFHDVVGGTKPTAIRVAQAASTNGSSTFFGAVVAIDDPLTTDAASSSSEVGRAQGSYTFADQKTFGLLMNMNFVFTAGDHKGSTLAIVGRNEVLSAVREMSIVGGSGKFRMARGYVEARTVDSGANSGETIVEYTVFVKA

SEQ ID NO: 133044 - protein, 118 aa, Oryza sativa
  Clone ID: PAT_MRT4530_34954C.1.pep
MYTIEYYVWINAHDRPIQGHPDDHGTSPNPNRGSPLQVSGPKLQLYNAQQIGGFEKSLMFPEPEPDASPSWLAARRPTPEGAPVPSGPNAGWYRLQIQSSTKGVPEYGVGWLLAASAL

SEQ ID NO: 133045 - protein, 289 aa, Oryza sativa
  Clone ID: PAT_MRT4530_34955C.1.pep
KAEGLKNNVVWPGCIREKKPLGTLLDQCLDSKWTIDLLNVSFDGQLAPDRISALAGLKELQRISPIRRWRLVEIDTVLTNLKGESEHVMSLIYPSNTYMDLNIGIALWLAAGGDGWVDGSICNMQDGCRYKYKSTSRVLLVGSGADEQCAGYGRHRTKYRLGGWVLLDEEMRLDVQRIWKRNMGRDDRCISDHGKEARFPFLDENVIKTLLEIPLWDIAKLDEPVGKGDKKILREVANLLGLKEAALQPKRAIQFGSRIARESNRKNFGSNRAANQASAGSVEIHQRAR

SEQ ID NO: 133046 - protein, 421 aa, Oryza sativa
  Clone ID: PAT_MRT4530_34956C.1.pep
MVVPDGEVLTLLPRHSTAPAGTVVVPDGKLNYDGYDGWNGRNYPPTVIGASSQPSSQNLDPTVARRNRLPLCHTIHRSPAPAPAAASPGPPALPHHRTAAPKPNPNAACEMNRLRRRRGTSVAPPVTLPDDDDLLSEILLRLPPRPSSLPRASLVCKRWRRLVTDPAFHRRFRARHRNPPLIGVFEDYLGYPFFRSVLDPPDLIPRERFRLRLAEDEGGQWRFYGCRHGRVLLFNRAKNEILVWVPDTGDHRRVAVPPEIDGKEKIIWNGAVLSAANADDGFSSCPFKVVLVGVAGNNTQMFACVYCSESGKWSDLISVAAPFLVFFFRDPGILVGHALYWMASGDHGSTILQFDLDDQTPAVIEWPSDSDPNCYTQTWLTEGVAKWVLQKTYELKNVLNPEIRLNVEYVTKLGYAQDIKV

SEQ ID NO: 133047 - protein, 386 aa, Oryza sativa
  Clone ID: PAT_MRT4530_34957C.1.pep
MNRLRHRRAISLAPPVTLPDDDDLLSEILLHLPPRPSSLPRASLVCKRWRRLVTDPAFHRRFRARHRNPPPLIGVFEDYLGYPFFRSVLDPPDLIPRECFRLRLAEDEGGQWHFYGCRHGRLLLFNRAKNEIVVWVPDTGDHRQVAVPPEIDGKEKIIWNGAVLSAATADDGPFRVVLVGVAGNNTQMFACVYCSESGKWSDLISVAAPFLVFFFRDPGILAGNALYWMAYGERWLTVLQFDLDKQTLSVIEWPYDSEPYSQTWLTEGDCLGAATLSRSSLQMWERKVCSGGVAKWVLQKTYELKNVLNPEFRLKIGYLTKLGYAQDIKVMFLWADHSVFMLQLDTLQAKKVWESCVIAPIHPYASTYVAVLSKEGKKSEASPGRN

SEQ ID NO: 133048 - protein, 425 aa, Oryza sativa
  Clone ID: PAT_MRT4530_34958C.1.pep
MWAAASPSVGAEGRRGHSGRRRECRGRHRRRFGPEEATASRTSAAEATAPARDKPEDAAPLEIAVDAAPAEDEPEDVVPLLQIRGGRRGNRRGCRRRPSRCRRHVGCRVAVGWSCLTSTSVVAEPPRGPSRRCLSRYESATLRTSAAEAIAPPPPSRTPPPRESEEAGGGQSGNGGMLPPAGPSHLSPDRTALSVAVHNAVAAFEAPRQWWGGPSRHPDFRRHLWNVNTYGGAVADDGGVIGASSDTVHGKDLLLRHAAGHLADEQPHPLAVAILRISGHHRDLSLSRLFSFSDGYATSSDEPPPRRGAAPQPQQLCGLNGGAGLFSSGRGMTAMMECHDVEMPFLRGIDVNRPAPAAETTTTRGASLARRTRGVRRDLPQQHALQPAATTRTPAAAADLVYRGQGRDGSSNSREKKREENKICS

SEQ ID NO: 133049 - protein, 112 aa, Oryza sativa
  unsure (1)..(112): unsure at all Xaa locations
  Clone ID: PAT_MRT4530_34959C.1.pep
GSSTRSPGGRRSQNAVIGLLKKAYQLCALCDAEVALIISYNRGQLYESCSGQSMTRTLERHPKARYGGPDSAIHNKENESVQSSRNEYLTLKAQVVXLHRTLRNLLGEDPET

SEQ ID NO: 133050 - protein, 940 aa, Oryza sativa
  Clone ID: PAT_MRT4530_3495C.1.pep
MIVRQHRPFNSRSFHQGASGSQNHQGGQPNHSAAPCPPMAPAQSAPSAQAKKETGTKPGSLFNCGEHGHFADKCPKPRRAGPRFVQARVNHASVEEAQVAPEVVLDVILGMDWLTKFKGVIDCANRTVTLTNEKGETIVYKSSVSPKQGVSLNQIEVEIPVVTEGKSSTKLEDIPIVCEYPEGFPEDLTTMPPKREIEFRIDLAPGTAPIYKRPYRMAANELAEVKKQVDGQLQKGYIRPSTSPWGAPVIFVEKDKTKRICVDYRALNEVTIKNKYPLPRIDDLFDQLKGAKVFSKIDLRSGYHHLRIREEDIPKTDFTTRYGLYECTVMSFGLTNAPAFFMNLMNKVFMEFLDKFVVKDEKFKWTAECDKSFEELKKKLVSAPVLILPDQTKDFQVYCDASRHGLGCVLMQEGRVVAYASRQLRPHEGNNPTHDLELAAVVHAWKIWRHYLISNRCEVYTDHKSLKYIFTQPDLNLRQRRWLELIKDYDMRIHYHPEHGFVATLEARPTLVDQVRAAQVNDPEIAELKKNMRVGKARDFLEDEHGTIWLGERLCVPDDKGLKDLILTEAHQTQYSIHLGSTKMYQDLKEKFWWASMRREIAEFIALYDVCQRVKAEHQRPAGLLQPLQIPEWKWEEIGMDFITGLPRTSSGHDLIWKLQEELGTRLNFSTAYHPQTDGQTERVNQILEDMLRACALDFGGAWDKSLPYVEFSYNNSYQASLQMAPFEALYGRKCRTPLFWDQTGERQLFGTEVLTEAEEKVRTVKERLRIAQSRQKSYADNRRREFTFEAGDYVYLRVTPLRGVHRFQTKGKLAPRFVGPYKILERRGEVAYQLELPSNMISIHDVFHVSQLKKCLRVPEEQADSEHIDIQEDLTYVEKLVRILETSERRTRNKVTRFCRVQWSHHSEEEATWEREDELKAAHSHLFASSSESRGRDSV

SEQ ID NO: 133051 - protein, 149 aa, Oryza sativa
  Clone ID: PAT_MRT4530_34960C.1.pep
MGTRSSGSSSSAQRRRSDLPLIKCPCCCVKNIVELTATTDANRGRIFFTCPDHEKDGSGCNFWYRKEGYVKYLERKGYIADKELRDVKHMSERKKAVNNEDGGEDEVKKLMLSLVSIGLEIVQILKGMLVGFILLVVALVCLVLAVWLK

SEQ ID NO: 133052 - protein, 82 aa, Oryza sativa
  unsure (1)..(82): unsure at all Xaa locations
  Clone ID: PAT_MRT4530_34961C.1.pep
HCSTSPSGDPKRISNSGNVCNLPKAKTIQEQQLXRGSDYSSMIYPNVEDYXDGIQGCHHLPPTSDKSMGYTTNKGEPRYAHL

SEQ ID NO: 133053 - protein, 36 aa, Oryza sativa
  Clone ID: PAT_MRT4530_34962C.1.pep
PHDPIDEDFTLLEAKTSLKLPATMSSSYISRILLWS

SEQ ID NO: 133054 - protein, 87 aa, Oryza sativa
  Clone ID: PAT_MRT4530_34963C.1.pep
RPHPVAPRPQNSKSMDLRIPAGAPPPRSSRSPESRLSGAVKKVIDLDELRMLAVRGPCGPRRLLVNCVGYCHVVPGEQDWQKRPDQL

SEQ ID NO: 133055 - protein, 90 aa, Oryza sativa
  unsure (1)..(90): unsure at all Xaa locations
  Clone ID: PAT_MRT4530_34964C.1.pep
MRWWLRRRPWSAATRAGDGDGDHHLDVEQHQHVDDVETGSASSEHHLRAPGLPVEEPVHVEDSAVTQHHPAVXSSEEEEEELGSGTSGSD

SEQ ID NO: 133056 - protein, 134 aa, Oryza sativa
  Clone ID: PAT_MRT4530_34965C.1.pep
MTTRSQIPFPKFQHPPKQINFARNQVIVDRFLVSILQKLGKGDTIHTIIKFLSNKLSGHEPTCKRIVAVGTGSSKSESVVAVDKVESMLCNLDRFEANAQHEVGPTTPDCNYSSPGCFNANVKQAAMATRWRTR

SEQ ID NO: 133057 - protein, 80 aa, Oryza sativa
  Clone ID: PAT_MRT4530_34966C.1.pep
MPIKKPQDFVREFCNKVDLVRMGTRLKVHKPPPVTDGLVSKLIRAIRIPGTMDLHPHMRKMLRKRLEFVSNICIKSVKIE

SEQ ID NO: 133058 - protein, 316 aa, Oryza sativa
  unsure (1)..(316): unsure at all Xaa locations
  Clone ID: PAT_MRT4530_34967C.1.pep
MHRSAGATMAWNVFRFCTALRGLGSIMILLVLSIVGVTYYAVVVYNYGPALFAGGASTLLALVVLLLFHFLLVMLLWSYFSVVFTDPGSVPPNWNLDFDEERGETAPLSGLDFNSQVNSQQSIAHNDTGHPRARYCRKCNQMKPPRCHHCSVCGRCVLKMDHHCVRGAAGVGAXVHVFNDSMQFYTFLETTLVTLSLLPHFIAFFSDIDIPGSPAALATTFLTFVLNLAFSLSVLGFMIMHVSLVSANTTTIEAYEKKTTPRWMYDIGRKRNFIQVFGNDKRYWFIPAYSEEDLRRMPVLQGLDYPVRTDLDGQEL

SEQ ID NO: 133059 - protein, 127 aa, Oryza sativa
  Clone ID: PAT_MRT4530_34968C.1.pep
LMNLIVFLIMRMVMDGAIAWTTFLFPLVMLPLVVLGLGISWLMAAAGVYFRDISQITGVLSLALLFLSSAMMPLESVPDGYRWVFEIIRSRSSSTSPDVLLWTDARLPGLAWYLLASLGVLYPSYSL

SEQ ID NO: 133060 - protein, 83 aa, Oryza sativa
  Clone ID: PAT_MRT4530_34969C.1.pep
GLKGPGGKAPPGYQQKRVMPFGGNFFFRENPNPGAKKGLTLIPKKPHAHFTLRKPPIKNIGDLGPQKKGPGFGFGNRSFVPKG

SEQ ID NO: 133061 - protein, 58 aa, Oryza sativa
  Clone ID: PAT_MRT4530_3496C.1.pep
KSFKEDYEQLLKDAQDIPQRTGCIVNALAIHPITGKCHEAQLGEVTLQLLSEELDEVP

SEQ ID NO: 133062 - protein, 62 aa, Oryza sativa
  Clone ID: PAT_MRT4530_34970C.1.pep
MAVAVFRLLPLQPFLALAATVAAAASRIDHTLNSSNAVPYDGTRYEQMGLVKDFTVSNSGFS

SEQ ID NO: 133063 - protein, 51 aa, Oryza sativa
  Clone ID: PAT_MRT4530_34971C.1.pep
SSSVLSLSLSAHTLGASTPQAATAASGAMELYQNLLIQLRNVAAVDTLIFN

SEQ ID NO: 133064 - protein, 84 aa, Oryza sativa
  Clone ID: PAT_MRT4530_34972C.1.pep
MGGGEMNWVGVTEGGFRGKTQKTSGGHRRRANNEAMIDRGGVVEQGIPLDLTKRGNGSKTREYDEEEEREGGVAQSRHCLVANE

SEQ ID NO: 133065 - protein, 145 aa, Oryza sativa
  unsure (1)..(145): unsure at all Xaa locations
  Clone ID: PAT_MRT4530_34973C.1.pep
SRGSTVDGVEVGAALPVVRRRWIRPPRGPAAADPPSPRPGGGGSTLPASRXRSRAPPRPRPRVAAAPAPELATTFATHSVEGXEGVGRGREGGRSGGRMRRRQPAVVGRWRRWRREGGETERGGRHVFAGGHLRGPLPTGMPLWP

SEQ ID NO: 133066 - protein, 42 aa, Oryza sativa
  Clone ID: PAT_MRT4530_34974C.1.pep
MGFTQFGVEGQKLNHAKCRVIGDVNHQIVASAGSFNMPVVVA

SEQ ID NO: 133067 - protein, 71 aa, Oryza sativa
  Clone ID: PAT_MRT4530_34975C.1.pep
MVQKLPRHCSTSAKRPRRAKASPPPAAASTEQPEATEQATSTSYGFGNTGGTMTSAAFAAGSFLPHSLGAD

SEQ ID NO: 133068 - protein, 85 aa, Oryza sativa
  unsure (1)..(85): unsure at all Xaa locations
  Clone ID: PAT_MRT4530_34976C.1.pep
TSCIGRGILGCLGNKGCISVSMTLPQTSFCFICSHLASGXGVRKIPKKILEHDKVIWFGDLNYRIALSYADTKNFLMENNWDVLF

SEQ ID NO: 133069 - protein, 659 aa, Oryza sativa
  Clone ID: PAT_MRT4530_34977C.1.pep
MALLSATAPAKTRFSLFSHEEAQHPHPHALSACCGGGASGKRQRARARVAAAMRPADAAASVAQAASPGGGGEGTRRPRVLVAGGGIGGLVLALAARRKGYEVTVFERDMSAVRGEGQYRGPIQIQSNALAALEAIDMSVAEEVMREGCVTGDRINGLVDGISGSWYIKFDTFTPAAERGLPVTRVISRMTLQQILARAVGDDAILNDSHVVDFIDDGNKVTAILEDGRKFEGDLLVGADGIWSKVRKVLFGQSEATYSEYTCYTGIADFVPPDIDTVGYRVFLGHKQYFVSSDVGAGKMQWYAFHKEPAGGTDPENGKNKRLLEIFNGWCDNVVDLINATDEEAILRRDIYDRPPTFNWGKGRVTLLGDSVHAMQPNLGQGGCMAIEDGYQLAVELEKSWQESAKSGTPMDIVSSLRRYEKERILRVSVIHGLARMAAIMATTYRPYLGVGLGPLSFLTKLRIPHPGRVGGRFFIKYGMPLMLSWVLGGNSTKLEGRPLSCRLSDKANDQLRRWFEDDDALEQAMGGEWYLLPTSSGDSQPIRLIRDEKKSLSIGSRSDPSNSTASLALPLPQISENHATITCKNKAFYVTDNGSEHGTWITDNEGRRYRVPPNFPVRFHPSDAIEFGSDKKAVFRVKVLSTLPYESARGGPQILQAA

SEQ ID NO: 133070 - protein, 332 aa, Oryza sativa
  Clone ID: PAT_MRT4530_34978C.1.pep
MLRLPTLLPLKPSPPTTGLNPIHGRRHGHHPSRLLASSAPPPPPPRPPKPEPRTSHENLGDDTPDFPTTKPRKPRRGRRSEAAAVEDFVRGRLEQVFASIRERDPEVLEGKGDILKRKEELSDEEGKEGTGEEEGELKAVVEEEDPSWPLDADIGWGIRASEYFDKHSIKNVTVDGVEIDWEREVEEGWVKEINCLEWESFAFHPSPLIVLVFERYNRAADNWKFLQELEKAAKVYWNSKDRLPPRVIEVVGHMLNLIEFQTVKVDMNIERDLAFALQVKECPQLLFLRGNKILYREKELRTADELVQMIAHFYYNAKRPSCVNPEAIAPPC

SEQ ID NO: 133071 - protein, 188 aa, Oryza sativa
  Clone ID: PAT_MRT4530_34979C.1.pep
MEHIGPFLLAAMAVAAAVAAASETATTVPVAALPPLPALPVTAAASTLQPGTASCMDDLMPCATVSDDPTMLTPCCEAVAEVLKSDPECLCKVAEMSRNNTRKLASVSNNLDSDQQLFAQCKITGVSSDVCHKDKGHQGGTNHAVSSLKNVLTKTEKMRSQLAIDIALRSKITLSMHNGHLINNTFFQ

SEQ ID NO: 133072 - protein, 1570 aa, Oryza sativa
  Clone ID: PAT_MRT4530_3497C.1.pep
MAGHPPNHRGEGMIDFVAELACMTLVVGYPNAPEYTTIPPLSGELPHRVRLEVHGYVGTCLANMVVEASGGTADHACQEAAYLMMARLRERHNYIFHDTAYWFHPRRASSDDVSTFRPTAGENDTTFGHMCAVMRGLDRMHSDLHKATKALNDGKLMRIVALKRENAQLKGLPAPGGVRIRTTPRKTTTAPVRIQLAPRNPPPSAAPAAPPVPPAVPATPAPAPASALSFAPASAARGPARGNGGCLFGMVYTRNGSRATGEGSNSEERTEGVHPNSNSGNGPPPLPENPTLAQVMAHQTQMMAAMMQQMQQQHQQMHQRMLQHAEQQHQQFGPPPPQSKLPEFLRVRPPTFSSTTNPMEANDWLHAIEKKLNLLQCNDQEKVAFATHQLQGPASAWWDNHMATRPPGTEVTWAEFCRSFRKAQVLDGVVAQKKREFRALHQGNRTVTEYLHEFNRLARYAPEDVRTDAEKQEKFMAGLDDELTNQLISGDYADFERLVDKAIRQEDQRNKMDRKRKAAQFRVPQGSHQRPRFAPGQQGGPTTMIVRQYRPFNPSNFPQGAGGSQTHHRGQSNRGAAPRPPMAPAQSGPPAQAKKETGAKPGSCFNCGELGHFADKCPKPRRAEPRFIQARVNHASAEEAQAAPEVVLGMFPVNSIPATVLFDSGATHSFISKKFVGMHGLIREELSTPMRVHTPGNSSTSVQFSPSITIEIQRSPFLANLILLESKDLDVILGMDWLTKFKGVIDCANRTVTLTNEKGETVVYKSLVSPKQEVSLNQIEAEIPVDTVEKSLRKLEDIPIVCEYPEVFPEDLTTMPPKREIEFRIDLAPGTAPIYKRPYRMAANELAEVKKQVDEQLQKGYIRPSTSPWGAPVIFVEKKDKTKRMCVDYRALNEVTTKNKYPLPRIDDLFDQLKGAKVFSKIDLRSGYHQLRIREEDIPKTAFTTRYGLYECTVMSFGLTNAPAFFMNLMNKVFMEFLDKFVVVFIDDILIYSKSEEEHEQHLRLVLEKLKEHQLYAKFSKCDFWSTEVKFLGHVITAQGVAVDPSNVESVTKWTPPKTVSQIRSFLGLAGYYRRFIENFSRIARPMTQLLKKDEKFKWTAECDKSFEELKKKLVSAPVLILPDQMKDFQVYCDASRHGLGCVLMQEGRVVAYASRQLRPHEGNYPTHDLELAAVVHALKIWRHYLIGNRCEVYTDHKSLKYIFTQPDLNLRQRRWLELIKDYDMGIHYHPGKANVVADALSRKSYCTALCIEGMCEELRQEFEHLNVGIVEHGFVAALKAWPTLVDQVKAAQVNDSEIAELKKNMRVGKARDFHEDEHGTIWLGERLCVPDDKELKDLILTEAHQTQYSIHPGSTKMYQDLKEKFWWVSMRREIAEFVALCDVCQRVKAEHQRPAGLLQPLQIPEWKWEEIGMDFITGLPRTSSGHDSIWVVVDRLTKVAHFIPVHTTYTGKRLAELYLSRIMCLHGVPKKIVSDRGSQFTSKFWQKLQEELGTRLNFSTAYHPQTDGQTERVNQILEDMLRACALDFGGAWDKSLPYAEFSYNNSYQASLQMAPFEALYGRKCRTPLF

SEQ ID NO: 133073 - protein, 99 aa, Oryza sativa
  Clone ID: PAT_MRT4530_34980C.1.pep
PTRPASPICSTSLQISENHATITCKNKAFYVTDNGSEHGTWITDNEGRRYRVPPNFPVRFHPSDAIEFGSDKKAVFRVKVLSTLPYESARGGPQILQAA

SEQ ID NO: 133074 - protein, 122 aa, Oryza sativa
  Clone ID: PAT_MRT4530_34981C.1.pep
LVTICPEDRYGRYAYVATILAEPSSHQDVDIHQEWQHVMAEELAALERTGTWDLVPLPSHVRPITCKWIYKVKTRSDGTLERYKVHLVARGFQQEHGHHETFAPVAHMTIVRTLLAVASARH

SEQ ID NO: 133075 - protein, 728 aa, Oryza sativa
  Clone ID: PAT_MRT4530_34982C.1.pep
MPPPPEDDGSSSARTPLIPPTPPPPGRAVARLHPLPLLVAAAFAASYHLLVAPAPSYYRSLFLSLGSNDTAAAHLHALTLRPHLAGTEANARAAEHVVSALSSLSFPTRVVPYSVLLAYPVHRSLSLSAPGHATTPFALVQDTYPGDPYAAVSAEAVPTFLAYAASGSVAAEAVYANYGRPEDFAYLAARGVDVTGKVVLARYGKVYRGDIVINARKAGAAAAVIYTDAKDYAAGEAFPDGPWMPPTGVQVGSTFKGVGDPTTPMWASSEGCERVSIPEAMATDDMPGIPALPVSGRDGEAILQLIGGDVAPKDWQGGDGSPVYRLGPGPAVLNLTYIGNETMATIQNVISVIEGKEEPERYIILGNHRDAWTFGAVDPNSGTAALLELAQRFSELQKKGWRPRRTIILCNWDAEEYGLVGSTEWVEENRAMLTSRTVAYLNVDSAVYGAGFYASATPQLDELLKEASKQVQNPDNETQSLYDLWMASDSSSMIKIGRIGGGGSDYSAFVQHIGIPSIDISMGSEYAVYHSLYDDFVWMEKFGDPLFRRHVAAASMWGLVALRLSDEEILPFNYSTYAVELEKGAIDINKRLLGVPVSSSPLQKSIAEFKRAALQMDSEMKALQTRKVWNPWRNNPLKVRDLNERLMMTERAFTDREGLSGRPWYKHLIYAPSLHDDYGAQVYPGVDDAIQMAERTNTSESWRSVQHEIYRIARVINQASLVLSGGLT

SEQ ID NO: 133076 - protein, 178 aa, Oryza sativa
  unsure (1)..(178): unsure at all Xaa locations
  Clone ID: PAT_MRT4530_34983C.1.pep
EIVFPLGATTERALHIKIKMPKCWNLIRPLAKLMTSNGRRICVRHPFSRQLKKQDVASPVMGLWACNLIWDPGPRIRLICTGKVNNPRRGVSIAKAQHNNVXYSCSWVVNVSPKSYRCPQVSVVTYENGIGSLPRFYFCSFQKFLSPYSKCLPRYRYIQTPLRCLVEXSVYVTIPLAL

SEQ ID NO: 133077 - protein, 112 aa, Oryza sativa
  Clone ID: PAT_MRT4530_34984C.1.pep
PGSRCCHRICYLRCPLSGRGISRVGRWRASMLDRLVGRTGGVLRVRHEGHVADPMVADGDVDSMLGTSVHDGLGPIVGPQVIRRTLASQLMMLSLSVGPEQPPYYHGSGRSS

SEQ ID NO: 133078 - protein, 57 aa, Oryza sativa
  Clone ID: PAT_MRT4530_34985C.1.pep
KGRNQAEFFYWGPVFGIKVLLSIAFIAVPFFPPFIFPRAFVSKCGPVHSKVYIKVIF

SEQ ID NO: 133079 - protein, 308 aa, Oryza sativa
  Clone ID: PAT_MRT4530_34986C.1.pep
MDANMLSAMMAAVGGDKPQPDTSEQINVSPLALLKMLKHGRAGVPMEVMGLMLGEFVDEYTVTVADVFAMPQSGTGVSVEAVDHAFQSEMLEMLRQTGRPEMVVGWYHSHPGFGCWLSGTDMATQQSFEQLHPRAVAVVIDPVQSVKGKVVMDAFRLVDHMAMVLGGAAGGEARQTTSNVGAVARPSAVALVHGLGRHYYSLAISYRMKEGEERMLACLSRSGWSDGFALRRFGAHDAGNEAAVRGMRDLAVGYGAQVREEDETPPERLAVVRAGKVDAKGKLEEKAMDAMSANIVQTLGMMLDTVTF

SEQ ID NO: 133080 - protein, 102 aa, Oryza sativa
  Clone ID: PAT_MRT4530_34987C.1.pep
MWAPHVIPFLLLPLPSSLSFLFLLPPLAPWQCLSLPPVSGWRSDIGHTSSLPPTESNHLRTAKSSRDGLRTSEKETTPAVLALMAMAMAEAVASEKLGGGRL

SEQ ID NO: 133081 - protein, 435 aa, Oryza sativa
  Clone ID: PAT_MRT4530_34988C.1.pep
MVRKLPDIDNTQQSIKTLLKVKQTVFEEKYLGLPTPSGRIKSGKFQSLKEKFEKRLSDWCEKNLSMGRKEVLIKSVLQALPMYMMSVSKIPVSLCEEYMQLIRKFWWGEDRHKRKVHWISWHQLVKPKSQGGISFRYLKLFNQALLARQAWRLIQYPDSLCAKVLKAKYYPNGIIWRIGSESKIIIWRDNWIPREHNLKVLGKRSRARLKWVADLMLPNKQEWDERLIRQLFYPADADIILNIQLSHRMTEDFIAWHYDRVGMFTVRSAYKLALDIQTRSQGNVVGCSSAADGRKVWSDLWSTQAKALRSEMRKIWQLPPEQAFEKTGPDWLLMLLQQADPSIRAAALLLLWRAWFLRNDIIHGNGKAQTSASVMFLQHYAETLFMVRQKEVDLKGKGICQPNMHVRPSVPDSRTVWKPPPPGWVKLNVDGAFSA

SEQ ID NO: 133082 - protein, 1266 aa, Oryza sativa
  Clone ID: PAT_MRT4530_34989C.1.pep
MPSTFGWSASAFVAAVLARLIGKGLALLAELDDAAAGHLRRLEALLAPVWRVLDAADAGAIDVVGHRRPLQDLLDAAYAADDALDDLVLLQSDAMARGGEHGVDARGTPAAGAARKPKPCSPLRFLLCFSPPRNAVASSSSSSSGSHGKSSKGNKSNPDLRGLGVAFEMMAQAAYRCTSAYEHVVAGKNYATMVSAQAEAATAAEAADYDQFQNDIFGRETEVEQILEKVRFSDDPHYRLGIGVLPIVGVEGVGKTALAQFIFHYEVVKAEFPVRMWVHVSGEVQLKDELVVQMIHGVAGDAHEVEDIREILHEELTGKRFLLVLDDVSDVGDIQWKDLMRLLQPAARRSMIMVTTQSEIAANAIGTMPPLILNPLESEDYQKMFRHFAFGSSDESEDYTPLGDEWDDVEDEDEEEKQSPMEKVALELAKKMGGLPLPATAIARALFFRREDKEHWKNVLEDKLWEQRDVAGISPALWLSYQHLDPRLKQCFAYSAVFPCSHAFTKDELVQMWVAQGLIYSEDAVARPEDIGSKFFEDLVERCFFQPIGSSRYVVHNSMRKLAQAVSTDQFFMVTESSGDVPLEVRHLTIMTNNLSKLINDLSLKISHSSGSDQHFLQRIRTIIFFADFSNSDEFIEFLADIFKVAKDVRVLGVTYANIAFLPAEIGFLRHLRYLNLLGNRIADLPESVCDLHLLQVLDVRCSSPYLRAPNGITNLIYLRHLHASEPFLSIIPKIQNLSHLQELEVYKVSSISRIDALQGMTQLRGTLCLKDLQPVDVSELRKGILKGMQHLNILELSWSSSDSQSREASTDEDTLECLQPHENLKDLRITGYRSTKCPSWMLKTPCSLSNATSVFLTDCVNLKNLPPFHIMPCLEILEMRKIHSVNKVNTVPQRSDQIMFPKLKRLVFEDVLNCTEWSTGSSKSRNTVFPCLCEIQIRNCPKLRNFPDLPLTLTTMIIENVGLETLPRIQDRHSLPPSSSSDAIATSKEGRWTSRLTTLQIHQCHGLKSLGSSLLQQQHLLRSLEVLSIKNCDNVTCDLSDGFQDLTALTDLSLYDCPKLLVDKFHTSLRKLEISECFITHGAWVDDYPFLFSVWTLKVTSCPHVSTDQESSFSIEPLDWLNCLFNVCSLHLENTLLLKLSMFNRLRSLEILEIDGSRSFFDDLVEEFEWLEKLQALSIRNCKELRMLPANISTLPVLEELCIENCPALEALPASGLPTSLKRLSISKCSPRLTQRCLDDEPDNLNIAKIAVVYIDGQCISIQQK

SEQ ID NO: 133083 - protein, 1785 aa, Oryza sativa
  Clone ID: PAT_MRT4530_3498C.1.pep
MAGHPPNHRGEGMIDFVAELARMTLVVGYPNAPEYTTIPPLSGELPHRVRLEVHGYVGTCLANMAVEASGGTADHACQEAAYLMMARLRERHDYIFHDTAYRYHPRRAHGDGVSSFRPTAGENDTTFGHMCAVMRGLDRMHSDLHKATKALNDGKLMRIVALKDEIARLKKENAQLKGLPVPGGVRIRTTPRKRTTAPVRIQLAPRNPPPPAAPAAPPVPPAAPAVPAVPPAPAPAPAPAFTLSFAPASAARGPASGTGGCLFGMVYTRTGNRTTGEGSNGEERADGVHPNGDSGNGPPPLPENPTLAQVMAHQTQMMAAMMQQMQQQHQQMHQRMMQHAEQQHQQFGPPPPQSKLPEFLRVRPPTFSSTTNPMEANDWLHAIEKKLNLLQCNDQEKVAFATHQLQGPASAWWDNHMATRPPGTEVTWAEFCRSFRKAQVPDGVVAQKKREFRALHQGNRTVTEYLHEFNRLARYAPEDVRTDAEKQEKFMAGLDDELTNQLISGDYADFERLVDKAIRQEDQRNKMDRKRKAAQFRSNQGSQHRPRFTPGQQGGPTTMIVRQHRPFNPSNFHQGTSGSQNHHGSQPNRGTAPRPSVAPAQSGQPAQAKKETGAKPGSCFNCGELGHFADKCPKPRRAGPRFIQARVNHASAEEAQAAPEVVLGTFPVNSIPATVLFDSGATHSFISKKFVGMHGLIREELSTPMRVHTPGNSSTSVQFSPSITIEIQRSPFLANLILLESKDLDVILGMDWLTKFKGVIDCASRTVTLTNEKGETVVYKSLVSPKKGVSLNQIETEIPVDTVEKNLRKLEDIPIVCEYPEVFPEDLTTMPPKREIEFRIDLAPGTAPIYKRPYRMAANELAEVKKQVDEQLQKGYIRPSTSPWGAPVIFVEKKDKTKRMCVDYRALNEVTIKNKYPLPRIDDLFDQLKGAKVFSKIDLRSGYHQLRIREEDIPKTAFTTRYGLYECTVMSFGLTNAPAFFMNLMNKVFMEFLDKFVVVFIDDILIYSKSEEEHEQHLRLVLEKLKEHQLYAKFSKCDFWLTEVKFLGHVITAQGVAVDPSNVESVTKWTPPKTVSQIRSFLGLAGYYRRFIENFSRIARPMTQLLKKDEKFKWTAECDKSFEELKKKLVSAPVLILPDQMKDFQVYCDASRHGLGCVLMQEGRVVAYASRQLRPHEGNYPTHDLELAAVVHALKIWRHYLIGNRCEVYTDHKSLKYIFTQPDLNLRQRRWLELIKDYDMSIHYHPGKANVVADALSRKSYCTALCIEGLCEKLRQEFEHLNVGIVEHGFVAALEARPTLVDQVRAAQVNDSEIAELKKNMRVGKARDFHEDEHGTIWMGERLCVPDDKELKDLILTEAHQTQYSIHPGSTKMYQDLKEKFWWVSMRREIAEFVALCDVCQRVKAEHQRPAGLLQPLQIPEWKWEEIGMDFITGLPRTSSGHDSIWVVVDRLTKVAHFIPVHTTYTGKRLAELYLARIMCLHGVPKKIVSDRGSQFTSKFWQKLQEEMGTRLNFSTAYHPQTDGQTERVNQILEDMLRACALDFGGAWDKSLPYAEFSYNNSYQASLQMAPFEALYGRKCRTPLFWDQTGERQLFGTEVLAEAEEKVRIIRERLRIAQSRQKSYADNRRRELTFEAGDYVYLRVTPLRGVHRFQTKGKLAPRFVGPYKILERRGEVAYQLELPSNMIGIHDVFHVSQLKKCLRVPEEQADSEHIDIQEDLTYVEKPVRILDASERRTRNKVTRFCRVQWSHHSEEEATWEREDELKAAHPHLFTSSSESRGRDSV

SEQ ID NO: 133084 - protein, 738 aa, Oryza sativa
  Clone ID: PAT_MRT4530_34990C.1.pep
MTSAMTVPTMLWSTLVPLVLLAPLFSIPRHCRAQVLMNYSCNNGSSYAENSTYDSNVRAVLATLSASTPNATTGFATASAGRGADTVWGLALCRGDTDHAVCASCVAAVPAIAFHQCRGVRDVTVFYDRCIARFSYGDFTARPDNTEVLMVSPSKYQATVNAGHFDALVTRLAGALADWAAYNSTLRYAAGVMASSDGFPSTTGYMVHNIYGLVQCAPDLAPPACRACLQALIVDMPQAFGGRIGGQFNAVWCNLRYETSVFYDGDPAVRLVASPSLEGPNINGSTTLIIGNRRRRPNAATVVVSVLAAVIIALLSVLSIYLWRKLQAKQCSPLAATAQQLIVKQAASKQIKQQSTYKSKQAMLAVADGDGAALGEDVGEVGVLDECAVAVVEGEAVVAALSVARGPGDDVGTRSALVLRHLMVAPRKSSATASWSSTARAMRSAPSARPPPRPTAASPSHRLGPAAASPDRRHLTPADTADQDVEAGSLLFDLATLRKATANFAEVNKLGHGGFGAVYKGFLRDGEEIAVKRLDKASGQGIEQLRNELLLVAKLRHNNLAKLLGVCIKGEEKLLVYEYLPNRSLDTFLFVLGLLSVKLDVYSFGVLVLEVVTGRRNTDVFGAVEESNNLLSYVWDHWVKGTPLAIVDASLLGDGRGPPESEMLKCIQLGLLCVQENPADRPTMLHILVMLHDVDATSFAAPSKPAFTFVNGGHTTGSSSNVAALSLNEVSISEFHPR

SEQ ID NO: 133085 - protein, 70 aa, Oryza sativa
  Clone ID: PAT_MRT4530_34991C.1.pep
GTRVDKKVQLMKEIRAHEVAIGELNNLPPSRAVYQKTCNLFFRKSVKSAVMSEQKQLDMAKSRLQKLDQA

SEQ ID NO: 133086 - protein, 61 aa, Oryza sativa
  Clone ID: PAT_MRT4530_34992C.1.pep
EMHYNWVMFRKFGSGNEDFRLNFCLCKKKKKKKKKKKKKGGALYRVPALCAACCIRRSSFI

SEQ ID NO: 133087 - protein, 327 aa, Oryza sativa
  Clone ID: PAT_MRT4530_34993C.1.pep
MASRSSWHCCLLAFFLLSSAAGAAYGQQLSTTFYAASCPTLQVVVRATVLGALLAERRMGASLVRLFFHDCFVQGCDASILLDDVPATSFVGEKTAFPNVNSVRGYDVIDQIKRNVELLCPGVVSCADIVALAARDSTALLGGPSWAVPLGRRDSTTASLSAANSDLPAPSSDLATLIAGFGNKGLSPRDMTALSGAHTIGFSQCANFRDRVYNDTNIDPAFAALRRRGCPAAPGSGDSSLAPLDAQTQNVFDNAYYRNLLAQRGLLHSDQELFNGGSQDALVQQYSSNPALFAADFAAAMIKMGNIKPLTGAAGQIRRSCRAVNSS

SEQ ID NO: 133088 - protein, 59 aa, Oryza sativa
  unsure (1)..(59): unsure at all Xaa locations
  Clone ID: PAT_MRT4530_34994C.1.pep
PRVRVGPSMVVRPQSSAIVATSIQSIISTVCEXELEMRCFPISCESFGPCESQLPKCPG

SEQ ID NO: 133089 - protein, 93 aa, Oryza sativa
  Clone ID: PAT_MRT4530_34995C.1.pep
RPRVRSSTSTMAGGTWFGTLSIARPAAERSLLASKTASPVFSIRTGTETARLRLSVVTGGRTPALSAAQSRARWASCATCDPRGADPQSKITN

SEQ ID NO: 133090 - protein, 56 aa, Oryza sativa
  unsure (1)..(56): unsure at all Xaa locations
  Clone ID: PAT_MRT4530_34996C.1.pep
TLVLGTSVMYYVXYXVPIEVSVQVQRRLPRGRRYNVRRCSVLRVRDTVVKRLLRLV

SEQ ID NO: 133091 - protein, 430 aa, Oryza sativa
  Clone ID: PAT_MRT4530_34997C.1.pep
MRSLHCALLLLAVAAAAVHHLPPAASLPAMPNPASLEPSLLFPSSSGASSQPAQPGPGAASSTIPAFPEQSEAAAATSVCQLAPSPPLLPAVLASCNAGGGALPPRLRCCPALAAWMYAAYAPTALLAAAAGGGGGVPGAAHSTASAAEAVAAVVDLPVLPDDAEECAGAAERALLAAGASLPPPPPPSQVGANGTTAAAACDVPFCYCRVRLRRPACAAPAGRAARRLEKACSRPGLAGCSRCLRALNQNMISKFCVPNGIKVLPSIKQMYGIGVTASTMVIFFCANAIVIRHASHEVGEFREIDLNGGNATKAANASHGGAQAQQQQQRQRDCQLMGLTWLLHRNATRHGAAATAVIQALMAADDATGRPAPCSLPSDDLPVAVASSEINGAAASKLAGGGLNIGRLLLRHAVVLAAFAMILSSQYCF

SEQ ID NO: 133092 - protein, 68 aa, Oryza sativa
  Clone ID: PAT_MRT4530_34998C.1.pep
ITYFGEFVHQPTCIPNCIAATQACTQSLLPLGARDVCLLADVDRLRRRWHFCLIYSLLITKGITCPTP

SEQ ID NO: 133093 - protein, 208 aa, Oryza sativa
  Clone ID: PAT_MRT4530_34999C.1.pep
MVNTAAVAAAKGSRGSGLPLASLNHISIVCRSLQESLTFYTDVLGFFPVRRPGSFDFDGAWLFNYGIGIHLLQAEDPDSLPGKTEINPKDNHISFQCESMVAVERRLKELGIPYIQRCVEEGGIYVDQIFFHDPDGFMIEICNCDNLPVVPLGADQPLVMAACKRAAVIKQQQQASSSPATAAAAAQCAVPSSTKAIHVGEEAHISCA

SEQ ID NO: 133094 - protein, 1242 aa, Oryza sativa
  unsure (1)..(1242): unsure at all Xaa locations
  Clone ID: PAT_MRT4530_3499C.1.pep
MADHPPNHRGEGMDDFVAELACMTLVVGYPNAPEYSTVPPLSGELPHRVRLEVHGYVDTCLANMVVQASGGTADHACQEAAYLVMARLRDRHNYTFCNTAYRFHPRRASGDDVSTFRPTAGENDTTFGHMCAVMRGRDRMHSDLHKASKALNDGKLVRIIALKDEIARLKKENAQLKGFPAPGGVRIRTTPLKLTTVPMRIQLAPRNPPPPAAPPVPPAVLAVPAAPAPAPAPVPVSAPASALSFAPASAARGPASGNGGWLPATPSGSRDHSSSSSSGTEPGTGETYLPDSRSRSEGPGLFLQMVNTRNGSRAAGEGSNGEERTDGGHPNSDSVNGPPPLPENPTLAQVMAHQTQMMAAMMQQMQQQHQQMHQRMXAANQXQQQQFGPPPPLSKLPEFLRVRPPTFSSTNNLMEANDXLHAIEKKLNLLQCNDQEKVAFATHQLQGPASAWWDNHMATRPPGMEVTWAEFYRSFRKAQVPDGVVAXKKREFRALHXGNRTVTEYLHEFNRLARYAPENVRTDAEKQEKFLAGLDDELTIQLISRDYADFEKLVDNAIRQEDQCNKMDRKRKVAQFRSNQGSHQRPRFTPGQQGGPTTMIVRQHRPLNSSSFHQGASGSQSHQGGQPNRSAAPRPPMAPAQSAPLAQAKKEIGTKPGSYYNCGEHGHFVDKCPKPRRAGPRFAXARVNHASTEEAQAAPEAILGTFPVNSIPATVLFDSGATHSFISKKFVGMHGLRKEELSTPMRVHTPGNSSTSVSYSPSVLIGIHRSXFLANLILLESKDLDVILGMDWLTKFKGVIDCANCIVTLTNEKGETVVYKSPVSPKQGISLNQIEVENPVATEEKSSRKLEDIPIVCEYPEVFPEDLTTMPPKREIEFRIDLAPGTAPIYKRPYRMAAKELAEVKKQVDEQLQKGYIRPSTSPWGAPVIFVEKKDKTKRMCVDYRALNEVTIKNKYPLPWIDDLFDQLKGAKVFSKIDLRSGYHQLRIREEDISKTAFTTRYGLYECTVMSFGLTNAPAFFMNLMNKVFMEFLDKFVVVXIDDILIYSKSEEEHEQHLRLVLEKLKEHQLYAKFSKCDFWLSEVKFLGHVITAQGVAVDPSNVESVTKWTPPKAMSQIRSFLGLAGYYRRFIENFSRIARPMTQLLKKEEKFKWTAECDKSFEELKKKLVSAPVLILPDQMKDFQVNCDASRHRLGCVLMQEGRVVAYASRQLRPHEGNYPTHDLELVAVVHALKIWRHYLI

SEQ ID NO: 133095 - protein, 246 aa, Oryza sativa
  Clone ID: PAT_MRT4530_349C.1.pep
MDSEEERLRINDDSVLSFLFSSSDDAPAIDGPLGLHPVDVVQRNIRGTCHQNSAGRSNGVFMIPCAAELQEAGIRFKVAAADAGGGFAGAITFRGGVLTIPLLHVMDSTESMFLNLMAFERMHPGAGNDAMAAVIFLDNLIDTARDVALLKSRGIISNLFSSDEAVAALFNNLSRGAVMSPHSSLYGVQRQVIAHCRKRRNRWRASLVHSYFRNPWVFISLVAAFILLAATVMQTIYTVIPFYTKS

SEQ ID NO: 133096 - protein, 96 aa, Oryza sativa
  Clone ID: PAT_MRT4530_34C.1.pep
LCGLRRRGLNTHNTNPSPTNNNYFPPHMPATPAGNAHVGLNPRNRPPSGIGPQHTGTTATPKGQKHAKSTTWTLTANSADPSGRENSATQSPSGEQ

SEQ ID NO: 133097 - protein, 86 aa, Oryza sativa
  Clone ID: PAT_MRT4530_35000C.1.pep
KGHTLLRIGGEKGKQKNKAKGKEIKQAKRTRHAHELTPPRSTQQHGSTKFQRGSDAQTPVTPCDPVRDARAYQTATTSFQNVVPRM

SEQ ID NO: 133098 - protein, 100 aa, Oryza sativa
  Clone ID: PAT_MRT4530_35001C.1.pep
KPNTWDRSSLHAVFFWNPHNLCSPRNSPIISTWFPGGFNPWGTGHGGLPLQGGGFAWVDPLKRKVRHKPGIYFRFCRVKKNVGGNCGPLFIFSRSGQPTR

SEQ ID NO: 133099 - protein, 631 aa, Oryza sativa
  unsure (1)..(631): unsure at all Xaa locations
  Clone ID: PAT_MRT4530_35002C.1.pep
MARNKLVYNRSDEIGVVLFGTKETSNELAKELGGYKHVVVARDIKVVDEETTNALQNLPRGTSPGKQRMCLVTDAQHPLRDPPQGTKKDQVDTIADQMKRHEIKMDCIIFRESGVRHNAVMDENDQLLYHFRERSVTKVVHVDSPTSLLGALRTRNVLPVTVFRGDLEVWVYKKTSEEKFPTLKKYSDKAPASDKFASHEVKVDYEYKSVLEPDTVVPPDQRIKGYLYGPQVVPISSAEWEAVKFKPEKVLRPDVSNGDTVHLFYFNRHYFMKDVFSFVPEPGNTKAVAAVSALARAMSEMNKVAILRCVWRQGQGNVALGVLTPNISSAKNVLDSFYFNILPFAEDIREFQFRSFSSLPSSSQPTKEQQEAADNLVKMLDLAPPGREEILKPDFTPNPMLERFYRYLDLKSKQPDANVPPLDKCLKKITEPDPDVIDYQAPLIKKLGNVFELKENPKKKKARTQDRLTYTGADDQAKLLEEPSAEKVGVSEALYPPKKKAGEIGDHNPVQDFEAMLTQRSSSTWVQTAIEEMQKYITALIQDSCDRDNHQKALECLVALRKACIIEQEPNEYNGFVTKLCQKFRPAGDKIFLQLLSSKKASLISKEEAPDRXVTEEMARNFCLKPEPSSQ

SEQ ID NO: 133100 - protein, 100 aa, Oryza sativa
  unsure (1)..(100): unsure at all Xaa locations
  Clone ID: PAT_MRT4530_35003C.1.pep
MACCCWTNILKKLHPQITWXLISVGSLATTQREYVALHAFCCRNVQMQNAIVQSCLDHFPKYEKQPPVMPDCFTPNFADHLHRTFDGPQLSTIHWSAMHL

SEQ ID NO: 133101 - protein, 153 aa, Oryza sativa
  unsure (1)..(153): unsure at all Xaa locations
  Clone ID: PAT_MRT4530_35004C.1.pep
NXPXXGTXTXASREQXXXGQXRXXXXXVXXYXXPXXXGXXXTXXXAXYXEXNXXXXGXXLXNXXXXDXXXTRXXXSXXXXXXTXPXXGXXHXQXXGXXXEEQQDXXXXGTTAXRXXCSSQXXGXXXXXXXXXKXQTLTRVQLXXRRSXDLGRS

SEQ ID NO: 133102 - protein, 60 aa, Oryza sativa
  Clone ID: PAT_MRT4530_35005C.1.pep
QKAVYVLEPVYKSKGGTTADIGNRTRNKVFLSRSKNNPLLSTQKMARRLKCIGRGRRGRA

SEQ ID NO: 133103 - protein, 52 aa, Oryza sativa
  Clone ID: PAT_MRT4530_35006C.1.pep
KYYNHLYVFFFLILLLFLIFNFFFHIFFSFFFYFLFFSFYFFYYFLFFFIYY

SEQ ID NO: 133104 - protein, 106 aa, Oryza sativa
  Clone ID: PAT_MRT4530_35007C.1.pep
RARARSPPPKKGPRERSPPSRESPSKGGGGFLGGLRLTPLLIEKLSFLKKIRGGVLILLFGSGFSPRGLNWGVPNPIFWLVLSRGDYFCDPSRSFPKSKCLPEKGS

SEQ ID NO: 133105 - protein, 75 aa, Oryza sativa
  Clone ID: PAT_MRT4530_35008C.1.pep
GSKEPIVIHEKTTISCRHSTMYSYWFRLFITMGLKFPQINPTYDTTYPDHLSDSSNLLHNSEKKNIPSFPSQNWP

SEQ ID NO: 133106 - protein, 147 aa, Oryza sativa
  unsure (1)..(147): unsure at all Xaa locations
  Clone ID: PAT_MRT4530_35009C.1.pep
SQSHGHTVPNTASSWNFFSSKVHHRSLNLYRCVISVPKLANRPFRSSNLFDCVIPIPKLSYHSFRSSNLFSCVTPVSKLGFEYHLGQIGRDQGDTTGQVGGLKRVICKFKNRDDTVEQXGDLVSKRTEMEKCGISGRPSILCHKDIA

SEQ ID NO: 133107 - protein, 86 aa, Oryza sativa
  Clone ID: PAT_MRT4530_3500C.1.pep
TFSLFPPFSLFLFPFSSGRGWRQRLRRGVEEGWRGRRLTGKERRGEEGQWNGRHRRWLPSRGEERCGRCRGEVAMPAQPAAGEGGA

SEQ ID NO: 133108 - protein, 1022 aa, Oryza sativa
  Clone ID: PAT_MRT4530_35010C.1.pep
MATRPASRQRRASSAAAAVAVVRSSPQPQQQQQQQLPIPQSGSPTSTTTTTTSSSRLTPELSLDGPASPLFAGLDEDPAPKENVTVTVRFRPLSPREIRQGEEVAWYADGDTVVRSEQNPSVAYAYVVLPTGVLGHLGVNYVCRPAVPVLTHNLYADLYSVAPYRLFVKTSVNMVYDVAAQHVVSGAMEGVNGTIFAYGVTSSGKTHTMHGDQRSPGIIPLAVKDAFSIIQETPNREFLLRVSYLEIYNEVVNDLLNPAGQNLRIREDPQGTFVEGIKEEVVLSPAHALSLIAAGEEHRHVGSTNFNLLSSRSHTIFTLNLIDLAGSESSRAETTGVRRKEGSYINKSLLTLGTVISKLTDGKATHIPFRDSKLTRLLQSSLSGQGRVSLICTVTPASSNSEETHNTLKFAHRAKRIEVQASQNKIIDEKSLIKKYQNEIRRLKEELEQLKMGIITGTPVKDAGEDNIILWKQKLEDGNVKLQSRLEQEEEAKAALLARIQRLTKLILVSTKATQTSRFSPHPGPRRRHSFGEEELAYLPYKRRDIVLDNESNELLSPVEGLGMTLEDSKEEKKNRKGILNWFKLRKREGGASILTSSEGDKSSLTKSTAPSTPIGESVNFPSEPRISNSLVGESASVDLFSIGHGEFATDSLHGEETPLASRKTIDHVDLLREQLKILSGEVALHTSVLKRLTEEAGRSPNNEKIQMEMKKVNDEIKGKKHQIASLERQIPHSISNNQGMADKLELTPSYAELLEQLNEKSFDLEVKAADNRVIQDQLNEKTTECMELQEEVAHLKEQLYQTLQAKDSLSNSIMMQKNAGINHETDNHADQELSVPREVPGETSPKEPQSVEIDELKQKVCELIEVKAQLETRNQKLLEESTYAKGLASAAGVELKALSEEVTKLMNQNEKLASELASVRSPTPRRANSGLRGTRRDSISRRHEPAPRRDNNAGYEREKALEAVLMEKEQKEAELQRRIEESKQKEAFLESELANMWVLVAKLKKSQGHDLEDFDTKYIGS

SEQ ID NO: 133109 - protein, 110 aa, Oryza sativa
  Clone ID: PAT_MRT4530_35011C.1.pep
MAAPRAPPLTAVAPSLHPLSTAPSPPPTSHVGLVVKPALNTAIGPNLTRFCKLGVKISNSTKSEGYKWTYSLMGLTYKNKGFVQFIAKKTLPFVEKAKFGDAKILAKIKL

SEQ ID NO: 133110 - protein, 586 aa, Oryza sativa
  Clone ID: PAT_MRT4530_35012C.1.pep
MASSSLVTSLLFSSSSSSNTATSTSSRRSFSLFSKNQYCKPRPLRRSSSRLLVRCSLQQQQEEKAAPAAESHHAGGGQDDAATASHHAVEGENGVADADGGGVKKSKEELEEEEQQEVDWRSDEEFKRFMGNPSIEAAIKLEKKRADRKLRELDREPDANPLAGLLRGLARGQLAREKERLELAENTFKALDLNKLKSCFGYDTFFAVDVRRFGDGGIFIGNLRKPVEEVRPKLEKKIAEAAGTDVTLWFMEEKNDDITKQVCMVQPKAEIDLQLEITKLSTPWGYLSAVALAVTTFGTIAIMSGFFLKPGATFDDYVSDVLPLFAGFLSILGVSEIATRLTAARYGVKLSPSFLVPSNWTGCLGVMNNYESLLPNKKALFDIPVARAASAYLTSVALAVSAFVSDGSLNGGKNALFVRPEFFYNNPLLSFVQAVIGPYADELGNVLPNAVEGVGVPVDPLAFAGLLGIVVTSLNLLPCGRLEGGRIAQALFGRGAAAVLSFATSVALGAGAIIGGSVLCLAWGLFATFVRGGEEIPAQDEITPLGSERYAWGLVLAVVCLLTLFPNGGGTYSSDFLGAPFFRGGI

SEQ ID NO: 133111 - protein, 65 aa, Oryza sativa
  Clone ID: PAT_MRT4530_35013C.1.pep
KILSSIKPPTHTDKTLVAITRPVPSYICRISLAESECAAKATFAISSSCIHHLMRVYWTGVLLLC

SEQ ID NO: 133112 - protein, 89 aa, Oryza sativa
  Clone ID: PAT_MRT4530_35014C.1.pep
MRWCTVRLSTVDPHENHVTFTWPLDRYCSEKTLERKVTLKFTAKKLNCFQDQLTKFQAENAMAPGKMHVYDEAQFFQNHVDMSDKLSYS

SEQ ID NO: 133113 - protein, 70 aa, Oryza sativa
  Clone ID: PAT_MRT4530_35015C.1.pep
MEAKFTGTARLHITKQKREDNQRKKNQSKWNIWLIHSVQSEKKRSCLVQATTLVPTNMISAGGAEKIPYE

SEQ ID NO: 133114 - protein, 148 aa, Oryza sativa
  Clone ID: PAT_MRT4530_35016C.1.pep
FFFFLPLVFCCLLHLRETSISITVLPGRKCYNLTRIPNLKQLPVHPPWHPAQGHIEVIQLLIIHPSPVVCNRRTKTILGVQLQCDSCSFRHRMVHLVPLVTPQCIIFRHFFQTHHHHSPSHISITYYCWCERWPFRPQTVSLCTAVGV

SEQ ID NO: 133115 - protein, 141 aa, Oryza sativa
  Clone ID: PAT_MRT4530_35017C.1.pep
KKPSNGWGCGLICVFRWFIAAIEDVYLPVPVMHLLTSNFAPFPWQHLDYTVVQLTKQDSNCLQALFERCTDFFNLTTGQPPASTAAEAEFVDVPAGKTPEDLHVFGLHHPQKGLIGTIIAVQNYPEAATWWIGTMLIDHRV

SEQ ID NO: 133116 - protein, 102 aa, Oryza sativa
  Clone ID: PAT_MRT4530_35018C.1.pep
VGPQMLTMQDINNCSAHSAATDNCHQFGDAATLDAECWAPSSSSVGLLTSHSRYGYATLRYYGCHPKYQDPPGRCLVMSFTQYSGSEVKNKLRYPQKKKKKK

SEQ ID NO: 133117 - protein, 84 aa, Oryza sativa
  Clone ID: PAT_MRT4530_35019C.1.pep
CRRELLQFLASDQKINSLENAPSPISVLDTSYYHTRLSYSFKGEKLIQYFFCIKITNCKNSNMMDSTVCSHSIQKPIVSFKGQA

SEQ ID NO: 133118 - protein, 1357 aa, Oryza sativa
  unsure (1)..(1357): unsure at all Xaa locations
  Clone ID: PAT_MRT4530_3501C.1.pep
GIKYDCHVALKASNNGKLVRIIALKDEIARLKKENAQLKGLPAPGGVRIRTTPRKTATAPVRIQLAPRNPPPPAILAAPAPTPAPVPQQHQQMYQRMQQQAEXSSXFGPPPPQSKLPEFLRVRPPTFSSTTNPMEVNDWLHAIEKKLNLLQCNDLEKVAFATHQLQGPASAWWDNHMATRPPGTEVTWAEFCRSFRKAQVPDGVVAQKKREFRALHQGNRTVTEYLHEFNRLARYAPEDVRTDAEKQEKFLAGLDDELTNQLISGDYADFERLVDKAIRQXDQRNXMERKRKAAQFRSNQGSHQRPRFTPGQQGGPTTLIVRQHRPFSASNFHQGASGSQNHHGGQPNRSAAPLPPMAPAQSAPSAQAKKETGTKPGSCFNCGELGHFADKCPKPRRVGPRFVQARVNHASAEEAQAAPEVVLGTFPVNSVPATVLFDSGATHSFISKKFVGMYGLRKKELSTPMKVHTPGNSSTSVSYSPSVLIEIQRSPFLANLILLESKDLDVILGMDWLTKFKGVIDCANHTVTLTNEKGETVVYKSPVSPKQGISLNQIKVENPVTTGEKSSRKLDDIPIVCEYPEVFPKDLTTMPPKREIEFRIDLAPGTAPIYKRPYRMTANELAEVKKQVDEXLQKGYIRPSTSPWGAPVIFVEKKDKTKRMCVDYRVLNEVTIKNKYPLPRIDDLFDQLKGAKVFSKIDLRSGYHXLRIREEDIPKTAFTTRYGLYECTVMSFGLTNTPAFFMNLMNKVFMEFLDKFVVVFIDDILIYSKSEEEHEQHLRLVLEKLKEHRLYAKFSKCDFWLSEVKFLGHVITAQGVAVDPSNVESVTKWTPPKTVSQIQSFLGLAGYYRRFIENFSRIARPMTXLLKKDEXFKWTAECDKSFEELKKKLVSAPVLILPDQMKDFQVCCDASRHGLGCVLMQEGRVVAYALRQLHPHEGNYPTHDLELAAVVHALKIWRHYLIGNHCEVYTDHKSLKYIFTQPDLNLXQRRWLELIKDYDMSIHYHPGKANVVADALSRKSYCNALCIEGMCEELQQELEHLNVGVVEHGFVAALEARPTLVDQVRAVNDLEIAELKKNMRVGKARDFLEDEHGTIWLAERLCVPDDKELKDLILTEAHQTHYSIHPGSIKMYQDLKEKFWWVSMRREIAEFIALCDVCQXVKAEHQRPAEVLREAEEKVRTIRERLRIAQSRQKNYADNRRRELTFETGDYVYLRVTPLRGVHRFQTKGKLAPRFVGPYKILERRGEVAYQLELPSNMIGIHDVFHVSQLKKCLRVPEEQANSEHIDIQEDLTYVERPLRILKTSERRTRNKVTRFCRVQWSHHSEEEATWEREDELKAAHPHLFASSSESRGRDSV

SEQ ID NO: 133119 - protein, 46 aa, Oryza sativa
  Clone ID: PAT_MRT4530_35020C.1.pep
LLGKVAEPSIGATQIDVKLRREQIKGELVGHTNLWLADWWVYIRQI

SEQ ID NO: 133120 - protein, 143 aa, Oryza sativa
  Clone ID: PAT_MRT4530_35021C.1.pep
RATRSVTLELELSGADPASCSLDLASSSAKKVHKSGVMLTGSSRAVAVGGVFAEVASICSEPLPSARIELASTAKLLSSLPSGAGHDEAWANCGGDDHQLGNSSAPLPPCETTPNLQRSIRTYELETTGLRHRVVHNLKETAS

SEQ ID NO: 133121 - protein, 216 aa, Oryza sativa
  unsure (1)..(216): unsure at all Xaa locations
  Clone ID: PAT_MRT4530_35022C.1.pep
TFRSRSFTFAFSLRSRFIHLRSFVHFTFTFVDVRSRSFVHVRSFFHIQFSFTFVRSFMFSFMFVRSFSFTFVRSFTFSFVRSFTFVHVHVHVNSFDHVAAAERRWGGAAVAWRRRAARGTRXAAALCGGGVAARRCRATAASWRPGVSCRRSVLAWRRVVTTSASASATRRPAATEREREIEIGEREXEGGGGVALTPEMRRRRRRRRRRRRRARD

SEQ ID NO: 133122 - protein, 316 aa, Oryza sativa
  Clone ID: PAT_MRT4530_35023C.1.pep
FASSHSEILFPEKILELKNLRTLIMCYSVEGMNQDDFERVLKKLTKLRVVHLDLRHLSRVPPCIGGLKHLRYLGIMSPPPHSLILPAEFSKLYHLQELSVNPNTRLHCPSQLKIANLINLRYMLTWYGLNIPDVGKLTSLRALYHFYVRKEKGYEIQQLEHLNNLRGKLFIDCIENVQSKEEAVRARLSDKVYLTELTLRWGGTDERCSKKAELQEEVLEGLRPPSGITVLCIRDYGGVIYPSWLTIGEFFTCLHTLSVTDCSWNYLPVKLCRLKTLRELIVQECPNMMTLPKLPQSLKSIVISGCHPSLAVGNGP

SEQ ID NO: 133123 - protein, 424 aa, Oryza sativa
  Clone ID: PAT_MRT4530_35024C.1.pep
MEIETTTISSGGEHDQVSAGEEARRARPGRSGEYGGSWCSVGERELEKKEERGAVQGGLGRRKKGEYFEYMINFAVQSRCAPTNSLCCYAIAISLLQDYHVEELASLIKDNLYSKHLVLSTEETLVGILQNQYHNSDDDEDEDDIVAAYRGTNRNILELQPASSYQRLLLHRLADIYGFVHESVGEGEDRHLVLQRCPETAIPPVLVSDVLWEYDNKDTSTSVVVKRKDTDLEEAWKEDAQENISAEISHLKNDADLKALQKSVAPPAPSLKEREAAYRAARERIFSAHDAKGNGTAVAKPRHVPAVAQRMIAHALGKKVESPTETAAVKNGKGKEPAESSRNKLNPRTAGGKEDSRYVENGRMRLHTGNPCKQSWRTSNSRAASSVSPDELKREQVGAAKRMFVHALRLPGVEGSDGPVRKGK

SEQ ID NO: 133124 - protein, 63 aa, Oryza sativa
  Clone ID: PAT_MRT4530_35025C.1.pep
AFFFCRPNSVYINDYIIYEEVDIRRLLWLLLHHVRIGDIIRGLLRRVKILSVHHSLRLLLRKL

SEQ ID NO: 133125 - protein, 51 aa, Oryza sativa
  Clone ID: PAT_MRT4530_35026C.1.pep
HRSSRATGQRLTRHLATPRGHALTPTLPRTTSRQEPPHRQAHAAALAAAAA

SEQ ID NO: 133126 - protein, 73 aa, Oryza sativa
  Clone ID: PAT_MRT4530_35027C.1.pep
MDIEGFKDGFDILRIRRSIGKEFKDGIEFRGGLVRARQILWERDGGCSDGNGESGGMEGDDGCLGKVGGWRCQ

SEQ ID NO: 133127 - protein, 63 aa, Oryza sativa
  Clone ID: PAT_MRT4530_35028C.1.pep
TLQIYYYLIMLIYNCDFTYKPKLLIFFYSNTPTRILLITLQIIGEHTKGERAWHTKPSLTTMT

SEQ ID NO: 133128 - protein, 89 aa, Oryza sativa
  Clone ID: PAT_MRT4530_35029C.1.pep
MGRLLFYRRGVGHRGEGTDIGAVKGSELAVVLGASGQTAVEVRWLSGGLVRARQILWERDGGCSDGNGESGGMEGDDGCLGKVGGWRCQ

SEQ ID NO: 133129 - protein, 1109 aa, Oryza sativa
  Clone ID: PAT_MRT4530_3502C.1.pep
MEANDWLHAIEKKLNLLQCNDQEKVAFATHQLQGPASAWWDNHMATRPPDDVRTDAEKQEKFMAGLDDELTNQLISGDYADFERLVDKAIRQEDQRNKMDRKRKAAQFRAHQGSHQRPRFTPGQQGGPTTMIVRQYRPFNPSNFHQGASGSQDQHGGQLNRGAAPRPPVAPAQSGPSAQAKKETGTKPGSCFNCGELGHLADKCPKPRRAGPRFVQARVNHASAEEAQAAPEVVLGTFPVNSIPATVLFDSGATHSFISKKFVGMHGLVREELSTPMRVHTPGNSSTSVQFSPSITIEIQRSPFLANLILLESKDLDVILGMDWLTKFKGVINCANRTVTLTNEKGETVVYKSPDSPKQGVPLNQIEVEIPVVTEEKNSRKLEEIPIVCEYPEVFPEDLTTMPPKREIEFRIDLAPGTAPIYKRPYIMAANELAEVKKQVDEQLQKGYIRPSTSPWGASVIFVEKKDKTKRMCVDYRALNEVTIKNKYPLPRIDDLFDQLKGAKVFSKIDLRSGYHQLRIREEDIPKTAFTTRYELYECTVMSFGLTNAPAFFMNLMNKVFMEFLDKFVVVFIDDILIYSKSEEEHEQHLRLVLEKLKEHQLYAKFSKCDFWLTEVKFLGHVITAQGYYRRFIENFSRIARPMTQLLKKDEKFKWTAECDKSFEELKKKLVSAAVLILPDQMKDFQVYCDASRHGLGCVLMQEGRVVAYASWLLRPHEGNYPTHDLELAAVVHALKIWRHYLIGNRCEVYTDHKSLKYIFTQPDLNLRQRRWLELIKDYDMSIHYHPGKANVVADALSRKSYCTALCIEGMCEELQQEFEHLNVGIVEQGFVAALEARPTLVDQVRAAQVNDPEIAELKKNMRVGKARDFLEDEHGTIWLRERLCVPDDKELKDLILTEAHQTQYSIHLGSTKMRASTVRDRGISGSRRESQNHQERLRIAQSRQKSYADNCRRELTFEVGDYVYLRVTPLWGVHRFQTKGKLAPRFVGPYKILERRGEVAYQLELPSNMIDIHDVFHMSQLKKCLRVPEEQADSEHIDIQEDLTYVEKPVRILDTSERRTRNKVTRFCRVQWSHHSEEEATWEREDELKAAHPHLFASSSESRGRDSV

SEQ ID NO: 133130 - protein, 260 aa, Oryza sativa
  Clone ID: PAT_MRT4530_35030C.1.pep
MRIQFKEVGASPGFKEPISGVGWGGRAPRRASDERRPPGAGGNGGEAMPGGGGARGSVYGRQQWRGGGDEGKRMREMGRLLFYRRGVGHRGEGTDIGAVKGSELAVVLGASGQTAVEVRWLREGFKDGFDILGIRRSIGKEFKDRIEFRRGVGRRGEGTGIGAIKGSELAVVLGASGQTAVEGGMGGCAAQAARADAAATGQSTARERAREGEFKRRGGLVRARQILWERDGGCSDGNGESGGMEGDDGCLGKVGGWRCQ

SEQ ID NO: 133131 - protein, 37 aa, Oryza sativa
  Clone ID: PAT_MRT4530_35031C.1.pep
CVMNRGKTIPWVFYGRYCLRLFGISSSCVGNKIDKIG

SEQ ID NO: 133132 - protein, 217 aa, Oryza sativa
  Clone ID: PAT_MRT4530_35032C.1.pep
YQVIPTTYHVILAKYQVKSVRYQAIPSTYQMILAKYQVKSIRSQAPKASSPVIPPFTSHVGACHRRRHHPRSTPEIVTGTATSSAIHVPRQSSSPAAVSSSATPHAGLIASGRVLHCPCPTPELIAEAASSTVHTPTSSSVRIGAVTGGSDEQATTTTMKPSSCRLAADSPCTYSLSCRLAPPGVVNAPHHLAGAKQQQQQESCISNSSHRSRVTTI

SEQ ID NO: 133133 - protein, 484 aa, Oryza sativa
  Clone ID: PAT_MRT4530_35033C.1.pep
MAEEQSKAQAGAKALSEPVRVGGSAAEATLSGGELAWRPTGGGGGGGEAGRLELESEVLGVRVDGRALRVATFARGDDAAAAAARPATCGGGERRREREREREVVVEMESEEAAAAWGDAMRDRLASLGRPKRLFIIVNPYGGKRGGRKIFQTEVLPLIEAAGILYTMQETKHRLHAQEIAHSLDLRKYDGIVCVSGDGVLVEVVNGLLQREDWNTAIKIPLGIIPAGHKRPLDVTSVVQGKTRFFSVLMLTWGLVADIDIESEKYRWMGSARLDFYSLLRVVSLRRYNGRVLFVPAPGYEGLGDLVEQISSCKSNGASTGVQEDRSNDFNDETCAYAGPSIDETDHEWRSLDGPFVSVWVSGVPFASENVMTAPEAKFGDGYLDVAIIKDCPRSALAGLMFQMKDGSYVKSPYVEYFKVKALRIEPGMRVGSTTKGGIIDSDGEVIARGDGSHTGDEIEHLMAYGPPIQLTVDQGLATIFSPR

SEQ ID NO: 133134 - protein, 140 aa, Oryza sativa
  Clone ID: PAT_MRT4530_35034C.1.pep
YRLHAQEIAHSLDLRKYDGIVCVSGDGVLVEVVNGLLQREDWNTAIKIPLGIIPAGTGNGMVQSLVHFAGESFFVYNAVLAIIRGHKRPLDVTSVVQGKTRFFSVLMLTWGLVADIDIESEKYRWMGSARLDFYSLLRVV

SEQ ID NO: 133135 - protein, 103 aa, Oryza sativa
  unsure (1)..(103): unsure at all Xaa locations
  Clone ID: PAT_MRT4530_35035C.1.pep
PFPSPSSSHRPRTSPAAPPPPPPPSRPPGPRAPRTPAQPXPPPLLPRRLPWGATPAPRRRAWPPPRTPRPAPAPTGPSPPPGPWTAPPPWMEEEGRKLSCLRW

SEQ ID NO: 133136 - protein, 104 aa, Oryza sativa
  unsure (1)..(104): unsure at all Xaa locations
  Clone ID: PAT_MRT4530_35036C.1.pep
ALLLAAPHAAVAITCGQVNSAVGPCLTYARGGXXPSAACCSGXXRSLKAAAXSTADRRTACNCLXNAARGIKGLNXGNAASIPSXXGXSFPYTIXAXINCXRVT

SEQ ID NO: 133137 - protein, 286 aa, Oryza sativa
  unsure (1)..(286): unsure at all Xaa locations
  Clone ID: PAT_MRT4530_35037C.1.pep
LTWWLSQCRAPRGPYKPTSNLIPPHSPLLPSQPKPPGHSSMGGEKGVRRRGKARRRRPPADVAPNDQERSRHGLAHVRGVARVPTTTAXVVFTGTREGWGFRLVTLAKXPIPQAHSRPHRAAQKPMCSRVPEVXLFFAEANTRFRRMVFDVDSIYSTLRXHGPRCMRPFPQRWPSQSFLFVASLLPTHRQAPSSGFYLSPPPNNHHHFPCWSPATTHLSRDSASGVLFACMHGHSCSQWCSRVCSGVATYSISQLLEILPPIPTVWLICNHERAARRPEWDGRCRR

SEQ ID NO: 133138 - protein, 43 aa, Oryza sativa
  Clone ID: PAT_MRT4530_35038C.1.pep
HASSPLNPLEYSPANKSRQCLMPASSAAVGPFFGVIPVSMTSS

SEQ ID NO: 133139 - protein, 91 aa, Oryza sativa
  Clone ID: PAT_MRT4530_35039C.1.pep
MMVIAVDDEQLILRVVNTNVDRKQMNMNELTLIKGEIRHFYNILCLMANIHMYKSTVHLTREELECLMTVAANRFEMKGTDCFLNCMKDYT

SEQ ID NO: 133140 - protein, 1472 aa, Oryza sativa
  Clone ID: PAT_MRT4530_3503C.1.pep
MVYTRNGSRATGEGSNGEERTDGAHPHSDSGHGPPPLPKNPTLAQVMAHQTQMMAAMMQQMQQQHQQMHQRMLQHAEQQHQQFGPPPPQSKLPEFLRVRPPTFSSTTNPMEANDWLHVIEKKLNLLQCNDQEKVAFATHQLQGPASAWWDNHMATRPPGTEVTWAEFCRSFRKAQGNRTVTEYLHEFNRLARYAPEDVRTDAEKQEKFMAGLDDELTNQLISGDYADFERLVDKAIRQEDQRNKMDRKRKAAQFRAPQGSHQRPRFAPGQQGGPTTMIVHQHRPFNPSNFPQGASGSQNHHGGQSNHGAAPRPPMAPAQTGPPAQSKKETGAKPGSCFNCGELGHFANKCPKPRRAGPRFIQARVNHASAEEAQAAPEAVLGTFPVNSIPATILFDSGATHSFISKKFVGMHGLIREELSTPMRVHTPGNSSTSVQFSPSITIEIQRSPFLANLILLESKDLDVIHGMDWLTKFKGVIDCANRTVTLTNEKGETVVYKSLVSPKRGVSLNQIETEIPVDTVEKNLGKLEDIPIVCEYPEVFPKDLTTMPPKREIEFRIDLAPGTAPIYKRPYRMAANELAEVKKQVDEQLQKGYIRPSTSPWGAPVIFVEKKDKTKRMCVDYRALNEIDLRSGYHQLRIWEEDIPKTEIRLYECTVMSFGLTNAPAFFMNLMNKVFMEFLDKFVVVFIDDILIYSKSEEEHEQHLRLVLEKLKEHQLYAKFSKCDFWLTEVKFLGHVITAQGVAVDPSNVESVTKWTPPKTVSQIRSFLGLAGYYRRFIENFSRIARPMTQLLKKDEKFKWTAECDKSFEELKKKLVSAPVLILPDQMKDFQVYCDASRHGLGCVLMQEGRVVAYASRQLRPHEGNYPTHDLELAAVVHALKIWRHYLIGNRCEVYTDHKSLKYIFTQPDLNLRQRRWLELIKDYDMSIHYHPGKANVVADALSRKSYCTALCIEGMCEELRQEFEHLNVGIVEHGFVAALEARPTLVDQVRAAQVNDSEIAELKKNMRVGKARDFHEDEHGTIWLGERLCVPDDKELKDLILTEAHQTQYSIHPGSTKMYQDLKEKFWWVSMRREIAEFVALCDVCQRVKAEHQRPAGLLQPLQIPEWKWEEIGMDFITGLPRTSSGHDSIWVVVDRLTKVAHFIPVHTTYTGKRLAELYLSRIMCLHGVPKKIVSDRGSQFTSKFWQKLQEELGTRLNFSTGYHPQTDGQTERVNQILEDMLRACALDFGGAWDKSLPYAEFSYNNSYQASLQMAPFEALYGRKCRTPLFWDQTGERQLFGTEVLAEAEEKVRIIRERLRIAQSRQKSYADNRRRELTFEAGDYVYLCVTPLRGVHRFQTKGKLAPRFVGPYKILERRGEVAYQLELPSNMIGIHDVFHVSQLKKCLRVPEEQADSEHIDIQEDLTYVEKPVRILDTSERKTRNKVTRFCRVQWSHHSKEEATWEREDELKAAHPHLFTSSSESRGRDSV

SEQ ID NO: 133141 - protein, 377 aa, Oryza sativa
  unsure (1)..(377): unsure at all Xaa locations
  Clone ID: PAT_MRT4530_35040C.1.pep
SSYGCSSSSSSARSWRAPSSSPGGRRATPTSSPTPPASSGWATSSSSPSRPPARRPCSASSGCSAPPSLSSASSSTRWPGVLPATARTPASSPPTWRPPPPSPPTWPAPPRWSGAGTPXWEKRTWSSRPGRAATSSTSTSPKPTRSSPSARSGGRESTRSSRGSASPSRSSSCCAAASRTCRPXPSERPKSAAPSSSMASAATPXAAGDLAPEVTXSRCSRTSSTCSPSTTTPSSPWCSRAPTSSSSTTSSTRPSCSPSASXPSSSAAMAASPTSSMPCXLTAHSYPSEWAPWPSACGAPSPGRPGPSTPSSTSSSATSSSSPSPTRRPPRPSSSSSPTGSPSRSSTPTTARPRPPPPPASSSSSPETSGTTRAESP

SEQ ID NO: 133142 - protein, 96 aa, Oryza sativa
  Clone ID: PAT_MRT4530_35041C.1.pep
SCPLQYRPVNFAHFINARFGEEAASLIPGCCVVILREDLGSITMDPTTIAIVCWRGKATLNAMVSPPDRKELLERITQRFGLKALRVEEENPRRQN

SEQ ID NO: 133143 - protein, 33 aa, Oryza sativa
  Clone ID: PAT_MRT4530_35042C.1.pep
HASDLFERHTNPTTMTHCNQKPSALQQLVYRVL

SEQ ID NO: 133144 - protein, 120 aa, Oryza sativa
  Clone ID: PAT_MRT4530_35043C.1.pep
MAQVELEATAGSAGAAGVGWAAGAWDGWWWFCGVMGLLHVNFNDRVAANFNDELFSGRRIRKSAPHHSYSEDNEDYNFLLVINVGISSSEGLLGRPSSLLPPLRFPLLQWFPATGSAATA

SEQ ID NO: 133145 - protein, 65 aa, Oryza sativa
  Clone ID: PAT_MRT4530_35044C.1.pep
HSKKKNLNKNRGVLFIVSKLSYNVVATLWPLYWTPKIKWGGRDFKTPEREKPGGNQIIFFWGKIP

SEQ ID NO: 133146 - protein, 502 aa, Oryza sativa
  Clone ID: PAT_MRT4530_35045C.1.pep
MWSALFSHLREVHKRSGVKEEKLIMKSPPAAGEAGCHKPQATATNKMTVLQSPLGLRTILTSLVAFFIVVSSVSLLFDRGQDAQAQLAVEQHQHQEVLLKQKPASAAVGEQKSVVVDQSSLRSQEAQVQWTSELQDVATDSGDGGFDGEEDCNWSLGRWVYDNASRPLYSGLKCSFIFDEVACDKYGRNDTKYQHWRWQPHGCNLPRFNATKFLEKLRNKRLVFVGDSVNRNQWVSMVCMVEHFIPDGRKMRVYNGSLISFKAFEYNATIDFYWSPLLLESNSDNPIIHRVEYRIIRADRIEKHANVWKDADFIVFNSYLWWRKQRDGMMMKVMYGSFEDGDAKLDEVQMVDGYEIALKKLTEYLGANINKNKTRIFFAGSSPAHSWASNWGGDDNNKCLNETEPIQIEDYRSATTDYGMMDKAKEIFGTLEPKGIHVQILNITQLSEYRKDAHPTIFRRQYVPLTKEQIANPSIYADCTHWCLPGVPDVWNEFLYAYIMHK

SEQ ID NO: 133147 - protein, 534 aa, Oryza sativa
  Clone ID: PAT_MRT4530_35046C.1.pep
MGEWDPRGRPGECSLLPSERGHKRSGVKEEKLIMKSPAAAGEAAGCHKPQATATNKMTVLQSPLGLRTILTSLVAFFIVVSSVSLLFDRSQDAQAQLAVAQHQHQEVQPKQKPASAAVGEQKSVFVDQSSLRSQEAQVQWTSELQDVATDSGDGGVDGEEECNWSLGRWVYDNSSRPLYSGLKCSFIFDEVACDKYGRNDTKYQHWRWQPHGCNLPRVPGANWKTYREKSVGFEFFKQRFNATKFLEKLRNKRLVFVGDSVNRNQWVSMVCMVEHFIPDGRKMRVYNGSLISFKAFEYNATIDFYWSPLLLESNSDNPIIHRVEYRIIRADRIEKHANVWKDADFIVFNSYLWWRKQRDGMTMKVMYGSFEDGDAKLDEVEMVDGYEIALKKLTEYLGANINKNKTRIFFAGSSPAHSWASNWGGDDNNKCLNETEPIQIEDYRSATTDYGMMDKAKEIFGTLEPKGIHVQILNITQLSEYRKDAHPTIFRRQYVPLTKEQIANPSIYADCTHWCLPGVPDVWNEFLYAYLMHK

SEQ ID NO: 133148 - protein, 81 aa, Oryza sativa
  Clone ID: PAT_MRT4530_35047C.1.pep
DPKRRSRSMTLGSAHEAVRLCLRSVNGHTTLHRPRRAARLPARRRRRRGRRALLRHLQSLSRLVYLSRVCSRLHYHQMLVP

SEQ ID NO: 133149 - protein, 91 aa, Oryza sativa
  Clone ID: PAT_MRT4530_35048C.1.pep
GWGFFFFFFFFFFFFFFFFFFAKTWSFFSSTLGSHQKLGCLKNQTKLPPNLKITFVCKKKLDRVNRNKTFFFYPILLTLVKICLNSREFVL

SEQ ID NO: 133150 - protein, 73 aa, Oryza sativa
  Clone ID: PAT_MRT4530_35049C.1.pep
VGESLEAERKMIFLLPAAYSLLVLVLPPIPGGALAAPTLAGCNNSCGNLAFAYPFGIGQGCFRNPILARLPPR

SEQ ID NO: 133151 - protein, 62 aa, Oryza sativa
  Clone ID: PAT_MRT4530_3504C.1.pep
EQRAIKRGKNGKKKKRVFQDYNSGVPPPKPGERTGGQGYSLEKKKGKPFPHFKKKKKTPGPP

SEQ ID NO: 133152 - protein, 415 aa, Oryza sativa
  Clone ID: PAT_MRT4530_35050C.1.pep
MESCARRCAVSGLTALSMRLTKQLSAAAASKAGAAGNLVFSPLSIYSVLSVVTAGARGRTLTELLGALGAESREKLAANAGEMARALPAPGGGAAQPGGGPRVAHACGVWHERTRTVRPAFRDAAAASFNAAALAVDFLNNPEEARKEINSWVAAATENLIDTILPPGSVSTDTGLVVTSAIYFNGQWWTPFCKEITEKRAFHRLDGGDVEADFMRSGEDQYIAVHDGFKVLKMPYAACVSARTTTTPRYSMYVFLPDERDGLWSLEDRMAAGGEGFLREHTPERRVEVGEFRIPRFKLSFDDSVVGALQRLGVRDVFKPFVADLADVLEAENSGDDPPLFVSDVKHKAVIEVNEEGTEAAAATAVCLTFASAAPSSRRPARVDFVADHPFAFLVLEESSGAVLFAGHVVDPTDE

SEQ ID NO: 133153 - protein, 76 aa, Oryza sativa
  Clone ID: PAT_MRT4530_35051C.1.pep
APLPLVDWEMRCRPRLSCFFRDKRFLFFGKYQGGGGGTLPFPLLRVTCTLGLNGVFPFTRSSLFNRTGKKKSWVCV

SEQ ID NO: 133154 - protein, 64 aa, Oryza sativa
  Clone ID: PAT_MRT4530_35052C.1.pep
YRLPCTGSLMGCMKGTMDESTLIHSYLLSAILCALHGLSIDNYTISYFPGGCRASKLMCSRVLS

SEQ ID NO: 133155 - protein, 111 aa, Oryza sativa
  Clone ID: PAT_MRT4530_35053C.1.pep
MGGDARNSASTEREITRGGWRGRLPAPPWLAGGCTAAKGEGGCSGDAAAGGGNPNEKENKGDGLGTHEKEHSLTDYSCPIILMACLAREGKRNGSLKEEVDGGIGKRSTAK

SEQ ID NO: 133156 - protein, 129 aa, Oryza sativa
  Clone ID: PAT_MRT4530_35054C.1.pep
MSSTLAKAMYHGNPTFNVKNYGASDDTKVSRGGTLMVTAQYGLNERLVVVDEVHASLAHARGGYEGHGEERPPFFLSPMVKVEGTSEAEVGRARKAAARSGLPPFSPMVGTARPSEAGRERKAQKDEAV

SEQ ID NO: 133157 - protein, 539 aa, Oryza sativa
  Clone ID: PAT_MRT4530_35055C.1.pep
MGSLPEQFVFRSRLPDIAIPDHLPLHDYVFERLADRRDRACLIDGATGETLSFGDVDALSRRVAAGLSSIGVCHGSTVMLLLPNSVEFAVAFLASSRLGAVTTTANPLHTPPEIAKQVAASGATVVVTEPAFVAKVSGLAGVTVVATGGGAERCASFAGLAAADGSALPEVAIDVANDAVALPYSSGTTGLPKGVMLSHRGLVTSVAQLVDGENPNLHLREDDVVLCVLPMFHVYSLHSILLCGMRAGAAIVVMKRFDTVKMLQLVERHGVTIAPLVPPIVVEMAKSDALDRHDLSSIRMVISGAAPMGKELQDIVHAKLPNAVLGQGYGMTEAGPVLSMCMAFAKEPTPVKSGACGTVVRNAELKIVDPDTGLSLPRNQPGEICIRGKQIMKGYLNNPEATEKTIDKDGWLHTGDIGFVDDDDEIFIVDRLKELIKYKGFQVAPAELEAMLIAHAAVADAAVVPMKDDSCGEIPVAFVVARDGSGITDDEIKQYVAKQVVFYKRLHKIFFVDAIPKAPSGKILRKDLRAKLAAGIPAC

SEQ ID NO: 133158 - protein, 326 aa, Oryza sativa
  Clone ID: PAT_MRT4530_35056C.1.pep
MAATAASPERARAEVDTSSAFRSVKEAVAVFGERILVGENRNGGGGYGGGDRRAGREGRTRSNTLAIAASFAKLEGGGGGDGVRVSNHSKPNAIGVNAKLPVASDATPPAMYLVPSSSPPFFASSPSLANDDDGVSAASASDAMVMGSIRKVEEEAARARQEVVQLKRRLAETELAMATLSAKLHRALSKLAHMEADRAAAERARIQRRDGRDMALAVWAASGGGDRRRGVATAAAHAAATARRQPLGELLRLGEADVVGARRRRRRRDGDRWPEKGGGGGGEEEGAEGEADRATDRSSHQWHPLLQEEEEQGQGELVHEGALQLA

SEQ ID NO: 133159 - protein, 101 aa, Oryza sativa
  unsure (1)..(101): unsure at all Xaa locations
  Clone ID: PAT_MRT4530_35057C.1.pep
VLPMFXVYSFHSILLCGMRAGAAIVVMKRFDTVKMLQLVERHGVTIAPLVPPIVVEMAKSDALDRHDLSSIRMVISGAAPMGKELQDIVHAKLPNAVLGQV

SEQ ID NO: 133160 - protein, 331 aa, Oryza sativa
  Clone ID: PAT_MRT4530_35058C.1.pep
MAWNTLYENAEMLLKYYEVFVCQLGTILQGLHHIDIDVTDPTQGGYTTALNSIRERDQERAGQNTFHGVAITSLNKQWRRINLVHQDRPTVSLLIDESNGYLVGFRRGDGTWMHFNDQELPNVPGTEQRVPGIPIQLSSSYMNLIKDNERPYFSVGRQSLRHSYFVLLNYDAEVDLRSAMMKRQRKALTQLIILFCEAARIRPVLEFISEAMSTEDTTPLDETLWTWIKNWSTLSRFALHCRRCERDATPLDPNEIKHVSPYGITSREQVLEVVARGILFIVCVCCGLTWNTFSMLLFNSLMIFERKKCDDNGCDRCGENVVFLMILKLIH

SEQ ID NO: 133161 - protein, 107 aa, Oryza sativa
  unsure (1)..(107): unsure at all Xaa locations
  Clone ID: PAT_MRT4530_35059C.1.pep
YSALFFLNTRIEFQQKDGENCSSHDVLVKRVKAAFDRFAESTEQSCRERCMEDLVSTTRYVPWSLHNKNRAGLRHFXDYFAAQEQLSANTLTAHSTGLHEHSFGCMT

SEQ ID NO: 133162 - protein, 63 aa, Oryza sativa
  Clone ID: PAT_MRT4530_3505C.1.pep
RGGCPRTCCRRVIISLGLAVTYDVLSNNACSMTLLHASSVLRINIAKAGVDGAEHEPDDEERM

SEQ ID NO: 133163 - protein, 115 aa, Oryza sativa
  Clone ID: PAT_MRT4530_35060C.1.pep
MTARFAEVGERREAPAGRSMEEGGGGAHRRRGASPAAAATRIGGARRNFGREGKMRRGVDGYLAIFPGWFLQKGRGREGARGCEMDGGEMARVGSARSGPSVSTSAAFVSRFGNF

SEQ ID NO: 133164 - protein, 66 aa, Oryza sativa
  Clone ID: PAT_MRT4530_35061C.1.pep
MLKREEARVEEEDGANMVSSLTVAGGDGHQTRASGAAGVTASQPPRVARVSGDRRFALYSGACVGY

SEQ ID NO: 133165 - protein, 145 aa, Oryza sativa
  Clone ID: PAT_MRT4530_35062C.1.pep
MWPATAFLRLLVLLVAGGPEPVWSSHAVTAACLPDSLQPCRHGHRRRVLRRQLRGWATGADAGGRADGRWRQTPAGKWKDDESGGRAGEQWRRLRRRATGADASGCTDGRRKRQPSGEAAATTARPREVARNLAELLPEQGAHQP

SEQ ID NO: 133166 - protein, 99 aa, Oryza sativa
  unsure (1)..(99): unsure at all Xaa locations
  Clone ID: PAT_MRT4530_35063C.1.pep
KGKVYGVGQVYLGXAKXAYSRVIFAXTYLSKTINPAGWTSYGYTGSTDHVMLGEFNCTGPGSEATKREPWSRQLTQEEADKFINIDFINGKEWLPAYYY

SEQ ID NO: 133167 - protein, 667 aa, Oryza sativa
  unsure (1)..(667): unsure at all Xaa locations
  Clone ID: PAT_MRT4530_35064C.1.pep
MDLEKSTSTTASLRKLQDDGALPCRGTMQREAGGIXPKPILGRMVVVEDYISCGFLPPPSQFLLLVLNFYGLSLLHLNPNSIAFLSIFSHLCEAYIGVEPFLDLFRFYYELRWMEPNRIENSDPVLVVPKEQPNKIPEWTAKPALTPSLQSFIEIIDDLRNWGLSGYEVAADFVGRRIQPLQARAHPAFDYSGPEDTTRISPRGLDSDTGGRRVSQVIISAPSATGEISIPLCEKGTAERAAAINAAASLKESIAKEASDAVAATTSGSNVPKRGRKFSSVRGTRRKAKNSTVSFFVVPKNLHRAARAKTHKVGLMPLSACPLRRPXTKDQEAARSGPAVSLMPTRGPSTDALTWEELQAEMERILXAGARGVGHEIEEARAAASSANQRADXLASDLAXEAHEDLLKMRELVAGNEMQRRGLEHRMSELEGHMIDICGSLRTSFTSLHQLAGECSVTTTIPAHPDEFSLTSSLVELATAMEEITSKHAARIGEETSNGIYTGACHVLACMRLAYPDLDLKKALDLGAADDARKDTMEEVGDLGESVLPLFEEDVDIEDVQQRGQPDIPVIVQALTLKPFVQWEETSQSPSAEVNMAMTSLDFENMLADRDRRIQYWRTKLEVAELKKTMVEVKKDQAVEALRGRKVWFNSYLKSCCAVMVRVCKEL

SEQ ID NO: 133168 - protein, 98 aa, Oryza sativa
  Clone ID: PAT_MRT4530_35065C.1.pep
ASVLLIFKTHNRGKKPNSRVGENQDHNGDRPLVPGGRIPKKPKGKRPNPKGTEDLHILSSKIQSTTGFSLRRSSQIIFLGSLHLDLFQDFLTKHPSQV

SEQ ID NO: 133169 - protein, 61 aa, Oryza sativa
  Clone ID: PAT_MRT4530_35066C.1.pep
ACCTALSRCRLKWIAPFVGYSGHHELSRNASQSETNRVSLKSIFIDNIFPLLQSTWSHWLF

SEQ ID NO: 133170 - protein, 140 aa, Oryza sativa
  unsure (1)..(140): unsure at all Xaa locations
  Clone ID: PAT_MRT4530_35067C.1.pep
MATSLLAXAGLVPALLLTRARRAPSGGTXPLAWELEDARGRDRTATTTFXWXSSEDAAXDGRRGGEAACRTPQGYINYERAGRDTTPSSVRSACYYCCRPAGEGRPDSRGCSAVSRYHDYHTFDDGPGHVLHGITNCAAG

SEQ ID NO: 133171 - protein, 270 aa, Oryza sativa
  Clone ID: PAT_MRT4530_35068C.1.pep
PMVVVLHQCRASQCSQCEGLSMQPGVDDLDAGLHAGPRPVVRDRARHPSQPQRPDGPELVVDDPLPHRLHRALLLRHFVRPTQALLPTSPVPDLFVPAVNEQEAIDEEGERCLGTFLIAGAVRGRGVRKRPWWWHCSGGSRCTMTRQESGSASCERTWRPVPLSRWRWRRWFRAHTRLAVLGVFWGGYPRERGAGSLGMFRCPVEEPACGFSRGRDFRQRLGYASHEIEKTAKELTQLWLQFRCAQEINEMESSRSKLRLGSDEPTWRFR

SEQ ID NO: 133172 - protein, 39 aa, Oryza sativa
  Clone ID: PAT_MRT4530_35069C.1.pep
IRVATIVQCTAAFDHFVSATPISKVKVVRVTCIYVDPRA

SEQ ID NO: 133173 - protein, 395 aa, Oryza sativa
  unsure (1)..(395): unsure at all Xaa locations
  Clone ID: PAT_MRT4530_3506C.1.pep
PRAAGKKVGVGNEVHHPPTRRRRWRRLRRATNGCHGADAGHGSRGSLWRPRRRGRRRRSRRRRRGCPRRAPPVGCSRRPHGRRPPPHRRIYIRRIRAPLFLRHPLRLLRDLLRCPPRRPQRRLPPLFHRRLPPGSTSASGYYRPGAPPRGGLRASGTXQEAAKGDGDYDVVELDASELLAEHVHFCDICGKGFRRDANLRMHMRAHGDRFKTLDALSRPGQPKPPAGREVRFSCPYAGCNRNRAHRRFRPLKSAVCARNHFRRSHCPKLYACERCGGKKRFAVLADLRSHLRHCGEEAQWRCSCGTTFSRKDKLFGHLALFEGHTPAIAEPNKGVATAAAEASISMMEEGGVEANCDREEDEEGGFDPKFFQEWMEELRGGAVAPNWSAPSEAGH

SEQ ID NO: 133174 - protein, 171 aa, Oryza sativa
  Clone ID: PAT_MRT4530_35070C.1.pep
MSPLAAIGHVHANTISSSPSPSSVAPLSLLHRHPFPPPRAPLPSSLPNGYGGGDEENELDGIGWRWQRDKESSAVDGSRTAPRWLGAGDDDERWHGSGNNDGLDGLEWGQRQARRRGTGTTIRLDVRSAASSSSATASHGVWGHCTRPILTQHAVRPVTRSALTKAYQILI

SEQ ID NO: 133175 - protein, 733 aa, Oryza sativa
  Clone ID: PAT_MRT4530_35071C.1.pep
MAAVGSRWLRLGRQPVRRDLPVDHLRLWLMDPRKNVICKLGSGWLVRSRWRQLRHRGRNRPKGLAFPKPNIPYRPTAGLVSLFAKTGTIRRKVRVNDQSVRSLPFSYAAVARLPMERNNRQGRPAVGGYGKFSARGFHPGFGGGNHQGGRGRGRGRGWFDGRGGRQDFFQGGRWFGSAGNGHGWNNGFGLNAGPSGGNFAGSHVGFNPNLGFQPFGTASGHGAVAGQEIFKPLAGFPPVGAPVAAGPVAQVGHGPVTDGPTIQGGASTAFPPAGGAAVVGAFPVAGGGVATDAAFPVLGGAGPPAAGTSAGPLLPSGGGATGSASVQATGGSAVSVDAKGQPIGASAKGKDDAGSGAIIALADGKGDSTAGPVASGTGGNVLSLLHGNLHSLEQQGELRGYTRDGLGFFHIPLSAGMRVKHEPKAALVKVTKGQMSVSSIISELERLIPGRWKWVVHDNGDGTFHTIFPSAAELSRMVEWGNVHTKVGEAEMEIVERGVGNEVKYVMPKVWVQCKGLPSELREYLIIWAVGSILGITKAVDMIFTRRYDIARLQVLVLDPSLIPDVVDVVIGDHLYELSFRVEPENGPKEPVPMEMENLDDGDLEKKKEGNVNQDLGKGAGLFDSGNNSKMGSGGQFSERGGPSAPSSQLNLIPESDGLTVSDEEFDGLDEETIMVDKAQIQESLVAKLSAIPEAVISPSRKSKRRASDSDQLVLERAEKLKAGKNLENLQAR

SEQ ID NO: 133176 - protein, 321 aa, Oryza sativa
  Clone ID: PAT_MRT4530_35072C.1.pep
MGHPCLRTGTARPDSWWAVPGREVQPIGRHGLARSAYRQPPRGGGGEGHREERRPASLGGRGREKRPEEVWTVPDDCSTDCRNLSTFFQLPLHLSRSSPRVAGQGPWPRVPHRAEHETCGLKPREVPGGEAAGGYFSMAGYSRGHRLGVTGRRSLLPNCREPRLATLRPCLHIATAAFDFGRTALDRNKFTYCPRSEEGAAGARSTASRSERRETSSMVDGTEVGAALPVVRRRRIWPPRGPVVADLASPRPGGGGSGLPEARRRWIRPPRAPELLSRPRPRAAAHSRVPPPTPELAAAFAAHSVEGEGVGRGREGCFLQP

SEQ ID NO: 133177 - protein, 54 aa, Oryza sativa
  Clone ID: PAT_MRT4530_35073C.1.pep
YSRSYGNGRGGSKAELEALNPIVEARGDGQGLHMACMISGPDLSEGDEHWDEPD

SEQ ID NO: 133178 - protein, 123 aa, Oryza sativa
  Clone ID: PAT_MRT4530_35074C.1.pep
PIPLGYTIWDKVVVDVGDLTVEQFVQSFPKFHHGVKCEALSSTGANTDNFKVLYLDFAPNETIKALVEGNKNKLLQDAYEATYGKLPAGREYILLDGVFSTPDDEPAKIPTIMYKFKRPQDQQ

SEQ ID NO: 133179 - protein, 115 aa, Oryza sativa
  Clone ID: PAT_MRT4530_35075C.1.pep
MECKRQHNQHGTLKMFLKEENLDMEGFIWKSMLRHVTRAFGRACRNTSSSSWRSIKRAKHLLERRPKPWSNIARRSTKGEAKDPRPKGDEEKGLCQQARRTKPQVGQPLKKAHLE

SEQ ID NO: 133180 - protein, 66 aa, Oryza sativa
  Clone ID: PAT_MRT4530_35076C.1.pep
HHSNVCCTCTRVRDNRRRGPKGQGSAAGSVLYADQTSRVTAIISNSQVILLISLLTLISLRFYLIP

SEQ ID NO: 133181 - protein, 116 aa, Oryza sativa
  unsure (1)..(116): unsure at all Xaa locations
  Clone ID: PAT_MRT4530_35077C.1.pep
KRXLNXRGXXXXKXLSSPXAXKXXRXSQXGKXNPLGGXTFXDRRRXXVXGGGXXGAQKKPLFXGGGDFXKEGKXXSRXXRGXGESNLMGLVXXXGPXVKNLXFRXKXGGELXGVTI

SEQ ID NO: 133182 - protein, 46 aa, Oryza sativa
  Clone ID: PAT_MRT4530_35078C.1.pep
MDARGSKVANSTRRCYSARSNFENLDGMARGDEDSLVKAMKRAQYG

SEQ ID NO: 133183 - protein, 282 aa, Oryza sativa
  Clone ID: PAT_MRT4530_35079C.1.pep
MDASDGRPSPRSRQLQGPRPPRLAVSKDSHKVRKPPVVPQPRGGGGVVAGPSRPQQQQQPRAPVIIYDASPKVIHTRPSEFMALVQRLTGPGSAAVAAVAAPVAAGFHTEASSSSSASASALPPQFQLPQEFMLSPTAALSPAARYAAIERSVRPLPPTTAHYYTADADDPILLDVDGDAAAFAAALGPARPSILSPVPSALPPAASSGLFSPLDQASLSWLSDLSPFLHSAGAAAAPPPPFAPSPRSLLLSTPTMPSPATFSVMEFFSSNFPDPEPFRLGH

SEQ ID NO: 133184 - protein, 793 aa, Oryza sativa
  Clone ID: PAT_MRT4530_3507C.1.pep
MASISDSETTNHGSIWDLDQNLDQPMDEEASRLKNMYTEKKFSSILLLRLAFQSLGVVFGDLGTSPLYVFYNIFPHGVDDDEDVIGALSLIIYTLTLIPLMKYVFVVLRANDNGQGGTFALYSLLCRHAKVSTIPNQHKTDEELTTYSRQTYEENSLAAKIKRWLEGHVYKKNCLLILVLIGTCTAIGDGILTPAISVLSASGGIRVQNQKMSTDVVVVVAVIILIGLFSMQHYGTDKVGWLFAPIVLLWFILIGTIGALNIHKYNSSVLKAYNPVYIYRYFRRGKSESWTSLGGIMLSITGTEALYADLCHFPVLAIQIAFTLVVFPCLLLAYTGQAAYIISNKDHVVDAFYRSIPDTIYWPVFIIATLAAIVASQATISATYSIIKQALALGCFPRVSVVHTSKKFLGQIYIPDINWVLMILCIAVTAGFKNQSQIGNAYGTAVVIVMLVTTFLMVPIMLLVWKSHWILVVIFIVLSLMVELPYFTACINKVDQGGWVPLVVATTCFIIMYVWHFCTVKRYEFEMHSKVSMAWILGLGPSLGLVRVPGIGFVYTELASGVPHIFSHFITNLPAIHSVVVFVCVKYLPVYTVPTEERFIVKRIGPKNFHMFRCVARYGYKDIHKRDDDFEKMLLDRLLLFVRLESMMDDYSDSEDFTMMEEKTQGSSNALLLTGKAGSNTMCSTGDLSYSSQDSIVPAKSPIRGNSLTRYSSQTFGDELEFLNLEFLNRCKDAGVVHILGNTVVHARPDSGIIKKVAVNYVFAFLRKICRENSVIFNVPHESLLNVGQIYYI

SEQ ID NO: 133185 - protein, 50 aa, Oryza sativa
  Clone ID: PAT_MRT4530_35080C.1.pep
MEGVTVAASRGRSHRNQTDAACCLGVRAARAFSQLRAYRHGRYREVQNFR

SEQ ID NO: 133186 - protein, 94 aa, Oryza sativa
  Clone ID: PAT_MRT4530_35081C.1.pep
MSRSGQPPDLKKYMDKKLQTLMVYSFTLFSILPVKLNANRVVIGTLRGFDQFMNLVVDNTVEVNGNEKNDIGMVVIRGNSVVMIEALEPVPKPQ

SEQ ID NO: 133187 - protein, 236 aa, Oryza sativa
  Clone ID: PAT_MRT4530_35082C.1.pep
MANAGLKPVAGLLLVLNFCMYVIVAAVGGWAINHAIHTGYFIGSGMALPANFSPIYFPMGNAATGFFVIFAVIAGVVGAAAALAGFHHVRAWSHESLPAAASSGFIAWTLTLLAMGLAVKEIDLHGRNARLKTMESFTIILSATQLFYLLAIHGGSPNGYLRTTIVYPVNNRGLLYDGIPFGRNQMIPSIYRDDTYEVSRMIHVRYLYIDDRNPNDTWYRDDTYEVSMIDDDCRYQ

SEQ ID NO: 133188 - protein, 104 aa, Oryza sativa
  unsure (1)..(104): unsure at all Xaa locations
  Clone ID: PAT_MRT4530_35083C.1.pep
MASGVAAPAPSVFEAARPALENGGGGGGAPPPARADASFDTNMVIILAALFFALLFAIGLNSLARCALRCGXRGAAAAGGGGGGGGGGAAAAGVGCGGIKKRAL

SEQ ID NO: 133189 - protein, 110 aa, Oryza sativa
  unsure (1)..(110): unsure at all Xaa locations
  Clone ID: PAT_MRT4530_35084C.1.pep
MGASCRLRARLAERRPPPSLMPPPPPSSXFPCLPCPSTAPPLPPPDSPPSRARRRRSRRSPPPAPTAHRPPSRARCRRRRSRADRPPPPRAPAARARPPPCAPTGRATAP

SEQ ID NO: 133190 - protein, 67 aa, Oryza sativa
  Clone ID: PAT_MRT4530_35085C.1.pep
EILKLYMQPKTTFPLNIPFTISGKVQNTFTTSLPISNSRTVYPRSRVVPTRVFKAHRAAVRTLKFII

SEQ ID NO: 133191 - protein, 1221 aa, Oryza sativa
  unsure (1)..(1221): unsure at all Xaa locations
  Clone ID: PAT_MRT4530_35086C.1.pep
MPRPLAPAPPLQTIMLDELKVFAYLHQEENMDACVWHLDTDATNHMTGVRSAFVELDLAVRGSVRFGDGSVVGIEGEEAARQDTAWLWHARFGHLHFDALRKLADKDMVRGLPRIEHVEQLCDGCIISKHRRSPFPTRAVYRATDRLDLVHGDLCGPISPATPGGKSYFLLLVDDHSRYMWLVLLARKGDAVKAIMHFQASAEAESDRKLHHGVGRHFSAPYSPQQNGVVERRNQTILATACSLLKAKGMPARFWGEAVTMAVFLLNRAPTKSLENRTPYEAWFGKKPAVGHLRTFGCLAYVKNMRPHLSKLEDRSTPMVFIGYAAGTKGYKVVEPVTGRVQVPRHVTFAESATWEYGADSAESGIVHSEFYIECGLTXMRGGDICVQGENLSPIPRRVASTMPLEPRAPSPKLVQRTSLHGTSTVLFLRRSMGEEHLDAAPEDXERRYRPLGDLLGDAAAPGLAERALAPEQLYLQEAEEPASFNEAEQHQRWRSTMLEEIATIEENKTWRLVDLPRGHHAIGLKWVFKVKKDARGEVTKFKARLVAKGYVQQPGVDFNEVFAPMARLESVRMLLALAAQAGWFVHHMDVKSAFLNGELTEEVYVVQPPGFVVEGHEHQVLKLDKALYGLRQAPRVWNAKLDTSLTSLGFRRCDFEHAVYAQGQGTHHLLVGVYVDDLIITGSDAVEIDRFKAEMMSLFRMSDLGLLCFYLGIEVKQVAGSTRLTQSAFARRILEKAGMQDCNACVTPMEQRLKLSKHSDAPLVDSTGYRSIVGSLRYLVHTRLDIAFAVGYVSRFMEAPTAEHEAAVKRILRYIAGTIDYGIIYRRSETPATLVGFSDADMAGDVDTRKRTSGVMFFLGSSPLLGEINQAQPDVFKLMVDNKSAIALSKNPRSEAEPSRGLHAVTRTCSSRGHPLRRLHFVAVAVAVAAAAASLSSAWAALLRFRGGGGAGLGLSARDREPGRLPLMEMEDSGRGVVGAGKRGVAETFSRLREQGKTAFIPFITASDPDLATTSKALKILDSCGSDVIELGVPYSDPLADGPVIQAAATRALKKGATFDSVIAMLKGVIPELSCPIVIFTYYNPILKRGVSNFMAIIKQAGVHGLVVPDLPLEETALLRNEAVMHGIELVSSVGVTGARSNVNLRVEYLLQEIKKVTDKPVAVGFGISTPEHVKQIAGWGADGVIIGSAIVRQLGEAASPEEGLKRVEEYAKNMKAAMP

SEQ ID NO: 133192 - protein, 83 aa, Oryza sativa
  Clone ID: PAT_MRT4530_35087C.1.pep
MTGERGTVRPTPLLYSSSSISTQELVRKTSGASSLLLLPDAATQVVVYSVLLQWPQHPGVRKPGQRASSSAHTKLTTPPSQCQ

SEQ ID NO: 133193 - protein, 902 aa, Oryza sativa
  Clone ID: PAT_MRT4530_35088C.1.pep
MGHLRTFVCLAYVKNVRPHLSKLEDRSTPMVFIGYAAGTKAYKVFDPVTRRMQVSRDVIFDEGASWDWGAKVTESGLEQTEFSVEYVLTQVSGGGRGAQEENSSSSSRRAASTMPEEPRTPSPSSGPRASLHGTSPVFVSPPSGGDEHLDADHDDCPAKEAEEPASFNEAEQHQRWRSAMLEEIAAIEENKTWRLADLPRGHHAIGLKWVFKVKKDARGEVTKFKARLVAKGYVQQPGVDFDEVFAPVARLESVRMLLALATQARWSVHHMDVKSAFLNGELTEEVRCDFEHAVYARGEGTHRLLVGVYVDDLIITGSDAVEIDRFKAEMKSLFRMSDLGLLCFYLGIEVEQVAGSTRMTQSAFARRILEKAGMQDCNACATPMEQRLKLSNHSDAPPVDSTGYRSIVGSLRYLVHTRSDIAFAVGYVSRFMEAPTAEHEAAVKRILRYIAGTIDYGIIYQRSETPATLVGFFDADMAGDVDTRKSTSGVMFFLGSNPVSWQSQKQKVVALSSCEAEYIAARTAACQGVWMAQLLGEINQAQPDVFKLMVDNKSAIALSKNPVFHDCSKHIATRYHYIRECVEEGRVQLEFTGTADQVADILTKSLGRVRFEELRSRIGVSEAPRPLPVDRMIVSESTHNGKTISRRAVGGGSSSRAAARPVGAHGGGRAWAAGARGRAVGGGRARVDDARYYEVGGRGQWRARLGGGRPWTAAREHGRWAAGARGRSTIAVGWLRSSTGAVGQAAAGAVPVGGGRSREGQLVGGERRAVTGADGCFLSATGAAGRATACASPADGGHNTGWQRVATGVAGWPWSAAGGALGGGGEGPPPSLMPPPPPSSPLSLSALPLDGSAAAAAGPREREGNGRSGYSEELASPPVTRHPAAPAAAARAAAHLPPLHAP

SEQ ID NO: 133194 - protein, 120 aa, Oryza sativa
  Clone ID: PAT_MRT4530_35089C.1.pep
MPSRGETLESIVVAGPAKAVLVLALGRLRMFPEFDILFGVTQRAATVVDVLAGRCHELRNGFRPPTPDRPDPDWEAPDLVRRLSDLASPRARPVPAACSASVMSSPPPVLLLPCPPHHYR

SEQ ID NO: 133195 - protein, 288 aa, Oryza sativa
  Clone ID: PAT_MRT4530_3508C.1.pep
MRPPPAPLSGRASPPPHLLLLSNSSLAPSLPTVAAACRMPPAAAAAARSVSVSVSTAVDAPTAAAAEPARGDAAPAPAAPPRRRLILLRHGESAAGGRLTRDHDRPLSKAGRAAAISVSNKLQQMGWIPELVLCSDATRTKETLKILQDHVKGLSEAIVHFIPSFYSIAAMDGQTAEHLQKAICQYSSDEILTVMCMGHNKGWEEAASMFSGDSVVLKTCNAALLEAEGKSWVEEWHLASACNKNVLVPPLQKSVFSNAHPSKKLACGQMLVVPFRWLGLGDGSFMAL

SEQ ID NO: 133196 - protein, 94 aa, Oryza sativa
  Clone ID: PAT_MRT4530_35090C.1.pep
SLSSTLLSPTRDPPPPRPIHPSTPQHHPRQPHSSKTIRPHIPSHPTLHPPSSPHSPHPQPAHPPPAFIQRPPRSLSSSRASGSSNRTRNLHPPS

SEQ ID NO: 133197 - protein, 178 aa, Oryza sativa
  Clone ID: PAT_MRT4530_35091C.1.pep
RKRTVALSPRRRRCLQKLRASRAAMDRVEEKEGNRFQEPASDRCEDNEDKEQDNSEESSSVDQRKEEEEEEKEGCEEATPAAAAAAAAPSFFAHPCSLLQYIARVCACCLGLSDSFCDPKASSVLVPEPEPAAADPSQEGEEDMKSSEATTRVRAARLRPKPPGNPREGSGGNGGHHH

SEQ ID NO: 133198 - protein, 83 aa, Oryza sativa
  Clone ID: PAT_MRT4530_35092C.1.pep
SGCCTSCAVRIKSGQIRQPEALGISVELKDKGYALLCVGFPTSDVEVETQDEDEVYWLQFGRYFARGPVERDDYALELAMGDE

SEQ ID NO: 133199 - protein, 139 aa, Oryza sativa
  unsure (1)..(139): unsure at all Xaa locations
  Clone ID: PAT_MRT4530_35093C.1.pep
MTTLGKRHRNNSSMRRTTSMSGFAVAEEEEQQGRQPPARAARGGGGGGSAAPSPGWGAMQRRHSGDFAVAETAAFLKACGICNRRLGPGRDTFIYMGEVAFCSHECRQQQMNLDELNEKXNASSGKAAAALTSPATAAP

SEQ ID NO: 133200 - protein, 89 aa, Oryza sativa
  unsure (1)..(89): unsure at all Xaa locations
  Clone ID: PAT_MRT4530_35094C.1.pep
RLTRYSPVDVRTDAVRQEKFMFGLNDELTNQVIYGDYTDFEKLFDKLICQEDQRNQMDRKRKGAXFRARQGNNQKPRFTLGLRRVKMLI

SEQ ID NO: 133201 - protein, 93 aa, Oryza sativa
  Clone ID: PAT_MRT4530_35095C.1.pep
DALQNIQHLERVSSSETQAQDHQNVTRITHVMHSHPPMPLMLVTSITHQGLHVSYFDFDTLDYGEHANYTCRAYSVDEKTYIDHTDAWTMDWS

SEQ ID NO: 133202 - protein, 95 aa, Oryza sativa
  Clone ID: PAT_MRT4530_35096C.1.pep
MATSARWGDRGCHEGEVFVLWAQPDPFPETISIAAPSHCHAHHQVVRMCFQDFDGKKIGMPLSTGWTTSTSRRLGARCATSHPRQGALRHKKMVL

SEQ ID NO: 133203 - protein, 184 aa, Oryza sativa
  Clone ID: PAT_MRT4530_35097C.1.pep
PASAETQLKFIIEAWSQIIECRRVLKWTYAYGYYLDDKVKSEFFEYLQGEAESGLERLHQCAEKDLQSFLTVRSDNTEPAPSIAEFGDFRVKLAGLTSVTRNYFENLVQALEAGLEDVHSTAQGTTSSNATNIPSKKAVTKGKTKKQLPRTSSDNSDEGWPCERCTFINPSSVDACSVCDKHRY

SEQ ID NO: 133204 - protein, 429 aa, Oryza sativa
  Clone ID: PAT_MRT4530_35098C.1.pep
MLGRLYYCCKKSWSRIFVIAMPSKKCTEEAHRPVNCETVSRWILKNSAESENMNWILANSKPCPKCKRPIEKNQGCMHMTCTPPCKFEFCWLCLGSWAEHGERTGGFYACNRYESAKKEGVYDETEARRERAKNSLERYMHYYERWASNQTSRQKAQADLQKAEKEQLAKLTDVFGIPETQLKFIIEAWSQIIECRRVLKWTYAYGYYLDDKVKSEFFEYLQGEAESGLERLHQCAEKDLQSFLTVRSDNTEPAPSIAEFGDFRVKLAGLTSVTRNYYYLDDKVKSEFFEYLQAEAESGLARLHQCAEKDLQSFLAVRSDNTDPAPSDNSDEGWPCERCTFINPSSVDACSVGETHEAGLEDVHSTAQGTTSSNATNIPSKKAVTKGKTKKQLPRTSSDNSDEGWPCERCTFINPSSVDACSVCDKHRY

SEQ ID NO: 133205 - protein, 58 aa, Oryza sativa
  Clone ID: PAT_MRT4530_35099C.1.pep
VPSRGGGCVVARLGVGDGDDVESNNLITILHHFFLLLIKTEPTCSVYFSLPNHLLMML

SEQ ID NO: 133206 - protein, 55 aa, Oryza sativa
  unsure (1)..(55): unsure at all Xaa locations
  Clone ID: PAT_MRT4530_3509C.1.pep
PATCYSIKHRNSSLLSLTDRTCIETVTGGXARLFIPKSRIFYLSGGVQDKKFFFF

SEQ ID NO: 133207 - protein, 91 aa, Oryza sativa
  unsure (1)..(91): unsure at all Xaa locations
  Clone ID: PAT_MRT4530_350C.1.pep
LRRHVGRRVVDAWEELRATFSGVPGNLENYLLYVAEEVLATLAQXGYRXLDDIVGRTDLLTATHVSLDKTLHIDLRYLLSSAVLPKWSISQ

SEQ ID NO: 133208 - protein, 153 aa, Oryza sativa
  Clone ID: PAT_MRT4530_35100C.1.pep
MSRAPRLRRVLLGLHRAPATLAVEGEIQQAAPELLFLTGSGRLELNLARAHAASDASGQALAVALLSRSKPLAAASPEGTSPSALPRGCSGEGRRRRRGGAGKGRRRRGGAGKGRRRQRDGAGGGATRRSGAGGEVDLGEREYRTGEGKAWDH

SEQ ID NO: 133209 - protein, 75 aa, Oryza sativa
  Clone ID: PAT_MRT4530_35101C.1.pep
YSGVGVFFFFFFFLKPKILQKPNGFTGHTYRWYTNSFTHKVFGEAKHGVCLSNPLKKIHVLKYLMNPVCSQGKIN

SEQ ID NO: 133210 - protein, 94 aa, Oryza sativa
  Clone ID: PAT_MRT4530_35102C.1.pep
MWFKGLSEGGIPSIITGCSTHPLYLIKVRMHLHGEASAAAAATPPAHAALPPALAFHSGQAVAIPHDLIAPARKPGPIAVGAQILRADGSPALF

SEQ ID NO: 133211 - protein, 52 aa, Oryza sativa
  Clone ID: PAT_MRT4530_35103C.1.pep
ISTHITIDNITGSEIDMKGRWSSAKPSCINIFQKRQSLSPWTWGKNSEQRGA

SEQ ID NO: 133212 - protein, 731 aa, Oryza sativa
  Clone ID: PAT_MRT4530_35104C.1.pep
MVPPGNGNGAAAAAGNDVILELSTPGDDWSHELQGDDVEANGGGNGDAPPRRTFSFGQAYKTRHRQPQVFTVWQTLMLGYQSLGIVYGDLGTSPLYVFPSVVLPDADATDFLGILSLIIWTLTLMSLVKYALIVLKADDHGEGGTFALYSLLRQHVNFKGNIPVPLTRLESDVHLKFHSKRRSRPSRLQLFLENSPKAQLAITIIVLIGTCMLIGDGALTPAISEHVVVLSAVILVLLFLVQRFGTSRVSFTFSPIMLLWFASIAGIGVYNIVMHYPPVLKAVSPHYIYYYFAKNKRVGWEQLGAVILCITGAEAMFADMGHFNKSSIQVAFSTAVFPSLILAYSGQAAYLIKNPGDLSTAFYSSVPAPLFWPMFVVSTLAAIVASQSLISASYSIIRQSIALGCFPRTTVKHTSDKYEGQVYCPEINYVLMVVCVLITVGFQGGPEIGRAFGVAVIWVMLLTTTLMTVVMVVIWEVNGALAGGFFVFYLAIEGTYMTSLMTKVPQGGWVPFAITVAFLSVTLSWTYGRKKKREYEARHAVGDGEFAGIVSRSARVPGMCLFCTDLMDGVPPIVRHYAANTGSLRELLLFVTFRTLPVRTVLAGERFLVAREGARAGVYRCIAQYGYMDEQDMVGDDFVRAAVAALVEVAAAAAEADSGEEEAEMIGRAPASGVSYVIGRTVLRMRRARNWPKRFVINELYRFLQKNFRSNVSTLKLDHAKTLQVGMIYEI

SEQ ID NO: 133213 - protein, 290 aa, Oryza sativa
  unsure (1)..(290): unsure at all Xaa locations
  Clone ID: PAT_MRT4530_35105C.1.pep
WSRPERRRLPAPPAAAAAQAQRTSPPVRSPSAPARSSRAHPPKGNPSPQQQQXVLSPPPLSSPGELAAALSHLRTADPLLSEVISSTGAPAFISSPSRPAFHSLAHSILHQQLAPSAAAAIYARFLALIPAAADPDAAVVNPAAVLALSAADLRAIGVSARKAAYLHDLAGRFAAGELSESAVAAMDEAALLAELTKVKGVGEWTVHMFMIFSLHRPDVLPSGDLGVRKGVQELYGLPALPKPEEMAALCERWRPYRSVGAWYMWRLMESKGAAAKKAKSNAIATLPSSC

SEQ ID NO: 133214 - protein, 123 aa, Oryza sativa
  Clone ID: PAT_MRT4530_35106C.1.pep
FFFFFCISKSVYNNDYASREEKEKIQKLGNNYSQRRRAKTPLCLPFANLPSHPLSMLPKHISFSNRESLVILLVVILYDMDYLMIVRFSSPLFLLFFLLLLLFFLCSSSSLCFSAFWVSCFLR

SEQ ID NO: 133215 - protein, 47 aa, Oryza sativa
  Clone ID: PAT_MRT4530_35107C.1.pep
CVVRILKGASHDSPQRTYQGMKSPVPFTPRLFSLADTIPRIIAMQSE

SEQ ID NO: 133216 - protein, 129 aa, Oryza sativa
  unsure (1)..(129): unsure at all Xaa locations
  Clone ID: PAT_MRT4530_35108C.1.pep
RGCDLSGCGGGDHGRRRRRRHGGLGRLAKGVVDGYIGPARHCLEEGSETGLAKSGAVNDSGXRLGARGASGGVGGRLGTRGAADGGRPDWRERRVRWRRPAWRERRGRRWRRRPRCKPAIGALFKGLQM

SEQ ID NO: 133217 - protein, 220 aa, Oryza sativa
  Clone ID: PAT_MRT4530_35109C.1.pep
MASRGAVLLALVAAVALMSASVASAQVDGGVPPAPARITSAAAGGAASAALAVALSISNTIRFHVSDALMPRNAADEFPFRLSRRRCERRAVGPGTLRRCRSGRTSRRRRRERQRRVVPHTGSGYSSGSPPTPPHRNTSAASASAAAAFSPSCGGGGADSPGPMTLRRACKEERGDGERGGKTRVGMTYGVHVEVEACLPTIDIGHAWLLRQAQVYVKTF

SEQ ID NO: 133218 - protein, 87 aa, Oryza sativa
  unsure (1)..(87): unsure at all Xaa locations
  Clone ID: PAT_MRT4530_3510C.1.pep
TKYVTCRIFXSSVEKFLASKTQSYKRNLEIIISSNXGCNFFCRCPWLYYFPDSEYEKIAPGGGANHIGALPLPPQRRPATVEGGWRQ

SEQ ID NO: 133219 - protein, 608 aa, Oryza sativa
  Clone ID: PAT_MRT4530_35110C.1.pep
MATITTPGYAHIQRQHGRCSTTAGRRGASNSVRFSARAVSSVPHAAAASSAPAFLPVPFVPGADAPSPSGKSAIGVPKAPRKGEEGKRLNFFQRAAAMALDAFEEGFVANVLERPHGLPSTADPAVQIAGNFAPVGETPPARALPVSGRIPPFINGVYARNGANPHFDPVAGHHLFDGDGMVHAVRIRNGAAESYACRFTETARLRQERAMGRPMFPKAIGELHGHSGIARLALFYARAACGLLDPSHGTGVANAGLIYFNGRLLAMSEDDLPYQVRVTADGDLETVGRYDFDGQLGCAMIAHPKLDPATGELHALSYDVIKKPYLKYFYFAPDGTKSADVEIPLDQPTMIHDFAITENYVVVPDHQVVFKLQEMLRGGSPVVLDKEKTSRFGVLPKHAADASEMVWVDVPDCFCFHLWNAWEEADTDEVVVIGSCMTPADSIFNESDDRLESVLTEIRLNTRTGESTRRAILPPSSQVNLEVGMVNRNLLGRKTRYAYLAVAEPWPKVSGFAKVDLATGELTKFEYGEGRFGGEPCFVPMDAAAATPRGEDDGYILSFVHDERAGTSELLVVNAADMRLEATVQLPSRVPYGFHGTFITGDELTTQA

SEQ ID NO: 133220 - protein, 109 aa, Oryza sativa
  unsure (1)..(109): unsure at all Xaa locations
  Clone ID: PAT_MRT4530_35111C.1.pep
GLVSIHGYXNMYTRGHCKLSQRSIQLLLVYRHPLSRXFYLSSGRTWHLTRGCIDFRSPAKGXVLRTAGIGNCIGYIGVLQSCIASISWIALVRFIYLPTYLSYILVNIA

SEQ ID NO: 133221 - protein, 406 aa, Oryza sativa
  Clone ID: PAT_MRT4530_35112C.1.pep
MARPRTRSVARMEATAAAAAAAEEEEAGNPDGAEGAAVVAVAPEAAAEGPNEPNAGEASREPDAGQASREPDVAGPSRQPGAAGPSREPGAAGGPRQPGAAGGPWQLVPNAAGPAVAPYVEDIDRYLRSLEGREMAKCLDAVQFCTAEESRRPIVNYDQEIQGGHINMRGKLVNWMEELVYGFNLWDNILYLAVSYVDRFLSRNVVNRERLQLLGTSALFVASKYEDRCHPSARFFSSITADTYTTQQVVAMEANILSFLNFQMGSPTVITFLRRFLFSCRGSNRPINIRLELMCIYLAELSLLDDYNIRFLPSIVAAACLFVGKFTLNPNTRPWNLSVQRITGYKVSDIEDCIRSIHDLQAGRKWSNLRAIRSKYEDDAFERVSTIPSPNTIKPSFLRDLKYVNG

SEQ ID NO: 133222 - protein, 293 aa, Oryza sativa
  Clone ID: PAT_MRT4530_35113C.1.pep
MSAASASATASLSAAAAVAVAAAALRPTQLRRLRVVAPPRPLRLTSLNPPRAASAPSTPLWEAGVRAESSDSPGAGAGGDVMGLLLRERIVFLGNEIEDFLADAVVSQLLLLDAVDPNSDIRLFVNSPGGSLSATMAIYDVMQLVRADVSTIGLGIAGSTASIILGGGTKGKRFAMPNTRIMIHQPVGGASGQALDVEVQAKEILTNKRNVIRLISGFTGRTPEQVEKDIDRDRYMGPLEAVDYGLIDSVIDGDSIIPLEPVPERVKPKYNYEELYKDPQKFLTPDVPDDEIY

SEQ ID NO: 133223 - protein, 54 aa, Oryza sativa
  Clone ID: PAT_MRT4530_35114C.1.pep
MRVFTLYYSTLKDKSICGSSSFKLNIFKVMDGQSYKKFVTQTLSKRSINMEPGE

SEQ ID NO: 133224 - protein, 337 aa, Oryza sativa
  Clone ID: PAT_MRT4530_35115C.1.pep
MERHAQMCCTLVRLGFCSGREWRLGFLTVQTATAKAASVGSSEVRRGGSRQGAARRGRVDHRGLPVDGGGARQGSGGWADGGARGRAVGRRRREMSGWALDGGRLHAAAQASVNGGGARRGLGGPRPSASVLANECVDFALHPTLHAHILTLRVTVTSPGYFFAPPPSCLASLFLLPFRSAVVLLRRHPLPSRLLLIRSELLRLALDVPPASPFLVVFSRVLVAAFVSPPPSISFPPLPFLRRFLFPPSTFAVPDHLCAPLDRHIPLRCRWFVPLPAIVPAFLVAESDALAAAHARCLRRRPSAVTTAGPGGRRGKEGEERLRRGGSRPRATGPRLR

SEQ ID NO: 133225 - protein, 82 aa, Oryza sativa
  Clone ID: PAT_MRT4530_35116C.1.pep
YAKPNGGELFLSKMWAQLCLRCNLYNQIDKASPSQPNLPDSDKRRQFITIYCFNLASCAVVEKHGTAGSGLFNQTYIHAMHL

SEQ ID NO: 133226 - protein, 139 aa, Oryza sativa
  unsure (1)..(139): unsure at all Xaa locations
  Clone ID: PAT_MRT4530_35117C.1.pep
MASRCLVTTGFEDECREIHDACNQPRRLSVLLAHRSPSERQKIKATYRTVFGEDLAGEVQKILMVNQEDELCKLLYLWVLDPSERDAIMARDAVENGGATDYRVLVEIFXARSRTQFFLTIRAYLARFKKNLEQDMVTE

SEQ ID NO: 133227 - protein, 217 aa, Oryza sativa
  Clone ID: PAT_MRT4530_35118C.1.pep
MAVLAGPSRPAPPLLPAIPPAVPRRPAALSFAPAAPGGAPGRVALSAAWGGRAARGRVSAAGRIVASSVEQSYIMIKPDGVQRGLVGEIISRFEKKGFVLKGLKLFQCPKDLAQEHYKDLKEKPFFPGLIEYITSGPVVCMAWEGNGVVASARKLIGATNPLQAEPGTIRGDLAVQTGRNVVHGSDSPDNGKREIALWFKEGELCEWESVLTPWLVE

SEQ ID NO: 133228 - protein, 74 aa, Oryza sativa
  unsure (1)..(74): unsure at all Xaa locations
  Clone ID: PAT_MRT4530_35119C.1.pep
SSHCSHNKHNSLACPHSRVKIFRGXRHTDGSIRKSASMGNLSPISSSPPPNLKPKNVVQFLLEESSNSLLKNLT

SEQ ID NO: 133229 - protein, 54 aa, Oryza sativa
  Clone ID: PAT_MRT4530_3511C.1.pep
MACMAGVDSRGGEALSLAAVCCSTVAAAACATVPLNSCICIWTLLASSLAIDDD

SEQ ID NO: 133230 - protein, 380 aa, Oryza sativa
  Clone ID: PAT_MRT4530_35120C.1.pep
MASLPNGAASASASAAGGGPAVVDKEVDFANYFCTYSYLYHQKEMLCDRVRMDAYHSAVFRNAHHFRGKVVLDVGTGSGILAIWSAQAGARKVYAVEATNMAEHARELARANDVADIVEVIQGSMEDVVLPEKVDVIISEWMGYFLLRESMFDSVICARDRWLKPDGVMYPSHARMWLAPIRSDLAENKMEDLEIAMHDWNLFVEDTESYYGVNMNVLTKAYRAEHEKYYLKSAIWNNLHPNQVIGQAAVIKEIDCLTATVDEIREVRAQVTMPIKLDMTRLAALAGWFDVHFRGSKQNPATQEVELSTAPDVNGGTHWGQQVFLLTPPLKVNEGDNVKVSFTMVRSKENHRLMDMEFTYELHESSGKQLPAITTKIYLE

SEQ ID NO: 133231 - protein, 271 aa, Oryza sativa
  unsure (1)..(271): unsure at all Xaa locations
  Clone ID: PAT_MRT4530_35121C.1.pep
GSRSRRRRGPAPGPRPSAPAGRTRRGRGARWRAPWSAAPPRRSTPAAAPRPDAARRSPRTGTSWPRCGRAGSQSGRGRRRRRRRQLAGRSDRXAMRAVRPASPWSDRPTLCRFRFRVVCLDIRGCFMFMASRXILYSSLICVCSVSAVXGEIPSVRPAASWRSDWWRLQATIAXSPVRPEMQSRSDQQHSGGQTGASTSVRPRSDEFEGNLVAAAGCGPPRSGRRPALDAAARPPSTRQLPSWEWAPAHALGRLALSRTAGPLPPPNGCHK

SEQ ID NO: 133232 - protein, 46 aa, Oryza sativa
  Clone ID: PAT_MRT4530_35122C.1.pep
TQPLRLLLLRASPTVSLNTYLANSPSNLTSQTSCLLHQPLHLSSLF

SEQ ID NO: 133233 - protein, 73 aa, Oryza sativa
  Clone ID: PAT_MRT4530_35123C.1.pep
SLETAAALHRPLPCAVYARHQPRAEGSRRSIARVALRTRGVMLNTLIFRLQMVMCDLDLRRSIVTPPLSIRLR

SEQ ID NO: 133234 - protein, 146 aa, Oryza sativa
  Clone ID: PAT_MRT4530_35124C.1.pep
LHPCSQVCTRGHEVAMAVPAADSEAPMEQFMDAAMVLSPASDSAKSSLNPAAGALNPGLAITSYDGNRASICSWRYNLSSIVEMLTCHYPPFVHLSVEWLFPVCPSRMVQNNSTRSLSLIDVSYYEDMLNVCHQICFIRYVWEMHT

SEQ ID NO: 133235 - protein, 117 aa, Oryza sativa
  Clone ID: PAT_MRT4530_35125C.1.pep
ADALHCTQTNNHLNRSSEFLEPYRLFASTTRSSDTQRPTASRSKHASSEKKKSARTAPRAQIERERARDERNSRKGRREAYPCTCRSRPTWFLEESRGRKGDLGETGLAEGSLVRIP

SEQ ID NO: 133236 - protein, 47 aa, Oryza sativa
  Clone ID: PAT_MRT4530_35126C.1.pep
EKCLSRSFNSAFTYPSKKSGCVDLMLAPAGYHELSISAGASYICARK

SEQ ID NO: 133237 - protein, 82 aa, Oryza sativa
  Clone ID: PAT_MRT4530_35127C.1.pep
PRAAGSTLVSLHEHHRSICGVRWLVCDVLLRVVLLFSFVFLAVRFGLVWCICRHGRRRMQASNHGSLVCNVQISPLGIIQLQ

SEQ ID NO: 133238 - protein, 54 aa, Oryza sativa
  Clone ID: PAT_MRT4530_35128C.1.pep
RTRPLFRGRVGVLLGVSKALGPRAAKPWDCCDNIEISRLMIYRPLHRCNNKVKE

SEQ ID NO: 133239 - protein, 127 aa, Oryza sativa
  Clone ID: PAT_MRT4530_35129C.1.pep
DSLPPPHTEAEGARAKAPKAPPLGTEPPAGPPAVGPPAPGVASFVGKPACNPPPGTPPVSKAPDCKPPAAICNLPPGAPLVGTAPAGKTPVSTPPPAICNPPPGATPVSKAPAGNTPPPAAGKTGAD

SEQ ID NO: 133240 - protein, 74 aa, Oryza sativa
  Clone ID: PAT_MRT4530_3512C.1.pep
KNFLAFFHEPNIWIQTIHHPTRHMNTQMANFCLYFLSWFTFGSRQIWINKPTLTKPHTTNSCLRGLASHCTQNS

SEQ ID NO: 133241 - protein, 191 aa, Oryza sativa
  Clone ID: PAT_MRT4530_35130C.1.pep
IPPPSTFNLSCWEFPFLESAIFINETVSDATADVAANTPPVSKRSPAPADPAPGVAPFVGKPACNPPPGTPPVSKAPDCKPPAAVCNLPPGAPLVDTAPAGKTPVCTPPPAICNPPPGAPPVSKAPAGNTPPPAAGKTGADIPGTAPKTRLPAPTPPPSARTADPKEGWNPAPLNPPSLGPALRPKPPLHP

SEQ ID NO: 133242 - protein, 88 aa, Oryza sativa
  unsure (1)..(88): unsure at all Xaa locations
  Clone ID: PAT_MRT4530_35131C.1.pep
XKRNFXFXLVDPXFXGGFXXRGXFXYGCIXTSHXLGRWXSXVXXQRKGXXSVXYYAXFKGWXFXGKLXGCFXTPTXFIXERSFRGFSW

SEQ ID NO: 133243 - protein, 167 aa, Oryza sativa
  unsure (1)..(167): unsure at all Xaa locations
  Clone ID: PAT_MRT4530_35132C.1.pep
ASINRPIVFFTVCLFLLCNGSLAQQLSRHHHYLNGTTSSXAGSPHAPIHGFRIRLAKQFEPXIRSVRSQAGTTEFFDVSNEQFQCTGRICCPSDVIEPYHALPTYPQLHLNGCNLXYISSNGTHGITXGPTFPGCPEFYQQQFQQSGQAQLTESQSQSQKFKDEPSK

SEQ ID NO: 133244 - protein, 100 aa, Oryza sativa
  Clone ID: PAT_MRT4530_35133C.1.pep
MRIGRRPGRPQGVRVGRFINAAGTTGFPICLPARHLSSTNYKACSIFLFSNPHSVLQYARQDGTTTVGMAAAAGFEKLTALLNKRLGADDEWSTHVAVRH

SEQ ID NO: 133245 - protein, 235 aa, Oryza sativa
  unsure (1)..(235): unsure at all Xaa locations
  Clone ID: PAT_MRT4530_35134C.1.pep
KNRNGKKKSDPEKKRRKKPKKPDRKNQVCPIKNKKKKSDSYIRNSEKKSEKKKKIIKEKENKDRKVHKXKKKSRTKKKIKKKITTKVFFSLLAKKTVDPTEKRFDSYKRQKKKSGDKKNARSESFKNRKKKKAKKNHRKKQAKKRARKQEKKHTRKEKQKKKEKNMVFFISKKSKKKHGRKKLFKRNVPFLKNGLRKSRKKKRKKNSKRNRLTKKRKQRKKNDARIRFLFFLPFF

SEQ ID NO: 133246 - protein, 39 aa, Oryza sativa
  Clone ID: PAT_MRT4530_35135C.1.pep
LSSFREQGMEDIDAVIYGRSFSAISSPCRSKETMEGCRN

SEQ ID NO: 133247 - protein, 155 aa, Oryza sativa
  Clone ID: PAT_MRT4530_35136C.1.pep
SLFAVPTSSAPWSDMTAPYPLASSSIPLSAVRFNQIAMDDVKGTHSALGTLMLLSLGEPAIFVPVAAAESIVSPKGATFEVSSDQRSIIFSLGPNEHWACLYPTGHYTATPGNVFDHAACRPARPTVCRGAVAGTTRTYVQDDEQDDETGLAIVA

SEQ ID NO: 133248 - protein, 118 aa, Oryza sativa
  Clone ID: PAT_MRT4530_35137C.1.pep
MVDQVTYGALREFVKPGYISKQKKRTIPAIYILFEEKISFTHDVWKKNPVMEMSSRENRRRCSSGCVAWHGAGGDGDTMLSPARRLSPSVATFSLSRVAAAAHGEPQTDEVVSGNDKE

SEQ ID NO: 133249 - protein, 76 aa, Oryza sativa
  Clone ID: PAT_MRT4530_35138C.1.pep
QHSAPATAPRNTRAAAPHSAHAPATAQPPPTTNPLLLPLRRHRHDLSLASLACLELSLSTSTCTSMFDCWSVCFSL

SEQ ID NO: 133250 - protein, 112 aa, Oryza sativa
  unsure (1)..(112): unsure at all Xaa locations
  Clone ID: PAT_MRT4530_35139C.1.pep
RPTRPRSTTYPXVVRWWAAASGAXCCSSCPVARPGHQRCTHXAVAVRLALVGAWLCSVDRKCKHGSSGRKPINHRAGRLCFSCPVAGGGSGLLARGILSRILAGSCSKICCF

SEQ ID NO: 133251 - protein, 1229 aa, Oryza sativa
  unsure (1)..(1229): unsure at all Xaa locations
  Clone ID: PAT_MRT4530_3513C.1.pep
MATEEGAEPSAPVAEDGGAPSASAPAPSLPPSALATSVQVPNAADMAKAAAAARALQTRAEILSTSQLLVPQATPSQPAAAPTTLAAVQVQVNPDPETQTEADMEGIRQNMTRLQDMLRQMQGQQQAYEAARRSKAQLQAFLQQLSQPHNISSTAPSALPEGNTSQDAPSWLPSNQPANSIYSWEQLRDVFVLNFRCTYEEPKMQQHLLGIRQRLGESIREYMRRFSQARCQVQDITEASVINAASASLLESELTRKIANKELQTLEHLLHIIDGFVRGEEDSKRRQAMQAEYDKASVAAAQAQAQVQIAEPPPLTVRQPQPAIQGQPSRQGQAPMTWRKFRTDRAGKAVMTVEEVQALRKEFDAQEASNHQQPARKKARKDLYCAFHRRSSHTTEQCRNIRQRGNEQDSRPQQGAAVEAPREVAQEQAPPAEQRQDAQRRVIQVITRADPPIQLSKRQKKMQLRTIHNITSAGEGSPQYLNQQISFGPEDAEGVMFPHQDPLASAEKQFKLMIAFGSGENRREEQVLFDVVDIPYSYNAIFGRATLNKFEAISHHNYLKLKMPGPKGVIVVKGLQLSPASKCVLAIIKRAVRNVEAEPHDRAKHASKPAPHGKIVKMQIDDADPTKLVSLGGDMGEEEAKNILEVLKKNIDIFAWGPDEVGGVSADLIMHHLAVKPDAKPRKQKLCKXLNKACPKDNFPLPRIDQLVDLIAGCXLMSFLDAYSGYYQIRMNPADIPKTAIITPFGTFCHLRMPFGLRNAGATFARLVYKVLFKQLGRNVEAYVDDIVVKSRKAFDHASDLQETFDNLRAAGMKLNPEKCIFGVRTGKLLGFLVSERGIEANPEKIDAIQQMKPPSSVREVQKLAGRIVALSRFLSKAAKRAEYEAILLFLRKAKALRVRRMLIRTDSKLVEGHVDKSFEAKEEGMKRYLEAVRSLEKCFTGITVEHLPRGQNEEADALAKSAAYGGPHSPGIFFEALYAPSVPMDSLEVMAIDQVKLGEDPYVWVLQPLLRCISFAEGEEMAKEIHQGLCGTHQAARTVASKVFRQGVYWPTVLKVCVEQIKKCESCQRHGRSQTAPQYELQPIAPIWPFARWGLDIIRPFPVARNGPNPLGTITSAAVQKFVWKNIVCPFGVPKEFITDNGKQFDSDKFREMCEGLNLDIRFASVAHPQSNGAAERTNGKILEALKKRLEGXTKGKWPEXMLSVLWALRMTPTRPTKFSPFMLLYGD

SEQ ID NO: 133252 - protein, 107 aa, Oryza sativa
  unsure (1)..(107): unsure at all Xaa locations
  Clone ID: PAT_MRT4530_35140C.1.pep
GGVDEVDLDHTNPTAKRKRGEEDAGMDFIGAGRSGTAGSGPISPANVGRWRWRERRDSNFESRPSRAQVRASGRESGCGRXRRMRGRGRRGPEEAGAWARRQSGAVS

SEQ ID NO: 133253 - protein, 450 aa, Oryza sativa
  Clone ID: PAT_MRT4530_35141C.1.pep
MAAAAEEGEGKKGGGTVLQGRYEMGRVLGHGNFGRVHVARDLRTGRSVAVKVVAKEKVVRAGMMEQIKREIAVMKRVSHPNIVELHEVMATRSKIYLALELVRGGELFGRIVRLGRVREDAARHYFRQLVSAVDFCHSRGVYHRDLKPENLLLDEAGNLKVVDFGLSALADHARADGLLHTLCGTPGYAAPEVLRDKGYDGAKADLWSCGVILYVLLAGSLPFPDDNIVTLYRKAQRGDYRCPAWLSTDARRLIPRLLDPNPTTRISVAQLVETPWFKKTSISRPVSIELPPAFADPAPAKEEAEKDEPETLNAFHLISLSEGFDLSPLFEGDSAKGRRDGGMLFATREPASGVISRLEGVAARGGGRMRVTKSGARGVRLEGAERGGAKGRLAVAADIFSVAPSVLVVDVKKDGGDTLEYRSFCSEELRPALQDIVWGAAADPTPTAAV

SEQ ID NO: 133254 - protein, 124 aa, Oryza sativa
  unsure (1)..(124): unsure at all Xaa locations
  Clone ID: PAT_MRT4530_35142C.1.pep
IRLTAHNRGHGYSDSFSLIRGVQLYPQDTTPCHVSVRXHATMTSKRGRDRTLCITPSNQAHHTSSFTPTSQXAAGSPLSCLGESASRIGHRRAHPNSITFTLAWMRHLEESYTTSPTVAHAGLW

SEQ ID NO: 133255 - protein, 147 aa, Oryza sativa
  Clone ID: PAT_MRT4530_35143C.1.pep
MATGFSAFLGCKTAGLRVTYSRSASARAPDRPRWSRERPTCGYGLVAVIFAFRRKRKGRPWFPLRAASGWKSVAAQEENRGAGLGACGFSHVDKAEWIYITIVAAKSSFDSYKGMLVKASVIALLVDATATVVVWSLRRGRRRRYAS

SEQ ID NO: 133256 - protein, 82 aa, Oryza sativa
  Clone ID: PAT_MRT4530_35144C.1.pep
NPTSRNKFLTENAKFGKSQPPPFVPTTTTGNLLGRTSSYKFDFKRGVLSGGAKWFKANFSSVGHPGTMCLTTLLMLTFKLQP

SEQ ID NO: 133257 - protein, 305 aa, Oryza sativa
  Clone ID: PAT_MRT4530_35145C.1.pep
MAVRLRRLIFLDRRYKVPPGKIHLYRRSFKRSSRGKIEDISSITSNLKAVSFTDSTYANFIGLMGGIGPIKRICLQSNVELAFTTKALETYSGTSTTSSTIINLGLSPKISNVDDVALTVMWPSTLMRILYLSPSTTLCLQIDSHHARERGGKGGTRRTTKEGGGRQSGGGSGPVEAAAAVIAPSRLPDVARGEAADLGGCRATARRRRQRRGKATGTVPPPLRPTTFLSMLGQPDPACPIATGAQGRPNPASPLPTGAWGRPDPGVVVEEAGHRGRWLWWRPGVAGGFHKDAVAASTTVFLVGF

SEQ ID NO: 133258 - protein, 49 aa, Oryza sativa
  Clone ID: PAT_MRT4530_35146C.1.pep
KDSLELKAAAPIHHTQHLFTGIPKNYHRCQVLIIKKHRFRIYAPKIFDT

SEQ ID NO: 133259 - protein, 120 aa, Oryza sativa
  Clone ID: PAT_MRT4530_35147C.1.pep
GKGEEGVHVVSRYIYEGVPGCHRGLSLVGAVDISSFQGGVKKVIRSSKGIMLSCLHVIIHGLNRCGRSTFYGSEDTLPSIIRCLPHVGFSCYGRGNRRGVPDSPHPCYLVPVVEPFLHFA

SEQ ID NO: 133260 - protein, 234 aa, Oryza sativa
  unsure (1)..(234): unsure at all Xaa locations
  Clone ID: PAT_MRT4530_35148C.1.pep
RERMWTKVSGFKGQGLSNAGKDVXKKSVLLAVPTYSMXRLPKGLCSKLLTTIVRNFXWGRQQGRRRLNRXSWQRLCKSKSGGIGFRDFKIFNQAMLARQGWRILTCPECLCSKVLKALYFKNCSFLEATCPRKALYMWRSIIFGRELLSKGLLWHITDGKSIKIKRDNLIPXGWAPRXPLGFKEPVGDQTVSKLFISSTKQWDNDRVSVFSFECDTTDVLNIPLPEHDGEDFVA

SEQ ID NO: 133261 - protein, 125 aa, Oryza sativa
  Clone ID: PAT_MRT4530_35149C.1.pep
MAATQLWALAPLALLLVLQLAGACHAVPQSLEAEQASDSHFQPPMMNWINGMVGLCIASAAVAVAAELSREQACLGLLLCLAFHAGIALVIRAAAAPDAGRGGGVRAAAERGEDATAAGGAEEGG

SEQ ID NO: 133262 - protein, 307 aa, Oryza sativa
  Clone ID: PAT_MRT4530_3514C.1.pep
MRATALRGDAHAGSGGARERKRRGGSSHRGSAGAGGYDGKRRRSASITNRSRAAECHGPTSCASRDFSLRHAVPTARCREHGRGQKGATAEWGIKTRPIPPQFKFPPVPRYLVETDPKEFLSIYKSAIEAAHGDENTKAKAGGVDKGVLFDVVDIPYNYNAIFGRATLNKFEAISHHNYLNLKIPGPVGVIVVKGLQPSAASKGDLAVINRAVHNVEAEQHDRVKHAPKPAPHDKIIKMQIDDVDPTKLVSLGGDMGEEEAANILEYSRKTVISSPVALIRWEVFRQISSCITWCNTLKIRPTKQKL

SEQ ID NO: 133263 - protein, 203 aa, Oryza sativa
  Clone ID: PAT_MRT4530_35150C.1.pep
MAAEAAAALEGSEPVDLVKHPSGIIPTLQNIVSTVNLDCKLDLKAIALQARNAEYNPKRFAAVIMRIREPKTTALIFASGKMVCTGAKSEQQSKLAARKYARIIQKLGFPAKFKDFKIQNIVGSCDVKFPIRLEGLAYSHGAFSSYEPELFPGLIYRMKQPKIVLLIFVSGKIVLTGAKVRDETYTAFENIYPVLTEFRKVQQ

SEQ ID NO: 133264 - protein, 282 aa, Oryza sativa
  unsure (1)..(282): unsure at all Xaa locations
  Clone ID: PAT_MRT4530_35151C.1.pep
MAKSCTLVLLLVALVGLSLLXKPKPKPKPSMXKPVVRAHNNYTGSPSVTVTTGWAAAGATYYGAPNGDGSDGGACGYQTAVGQRPFSSMIAAGSPSLYKGGKGCGACYEVKCTTNAACSGQPATVVITDECPGGICLAGAAHFDMSGTSMGAMAKPGMADKLRAAGILQVQYRRVPCKYSGVNIAFRVDQGANPFYFEVLIEFEDGDGDLNAVDLMEAGCGWTPMVQNWGALWRYNSNTGKALKAPFSLRLTSDSGKVLVANNVIPASWKPGVTYRSLVNYS

SEQ ID NO: 133265 - protein, 43 aa, Oryza sativa
  Clone ID: PAT_MRT4530_35152C.1.pep
SLLHLTGRWGIRPVATMHAGAAAATLTHCPHTFRRAFVSCAGS

SEQ ID NO: 133266 - protein, 292 aa, Oryza sativa
  Clone ID: PAT_MRT4530_35153C.1.pep
MAKSCTLVLLLVALVGLSLLVSPIACSRKLSKPKPKPKPSMKKPVVRAHNNYTGSPSVTVTTGWAAAGATYYGAPNGDGSDGGACGYQTAVGQRPFSSMIAAGSPSLYKGGKGCGACYEVKCTTNAACSGQPATVVITDECPGGICLAGAAHFDMSGTSMGAMAKPGMADKLRAAGILQVQYRRVPCKYSGVNIAFRVDQGANPFYFEVLIEFEDGDGDLNAVDLMEAGCGWTPMVQNWGALWRYNSNTGKALKAPFSLRLTSDSGKVLVANNVIPASWKPGVTYRSLVNYS

SEQ ID NO: 133267 - protein, 37 aa, Oryza sativa
  Clone ID: PAT_MRT4530_35154C.1.pep
MKTKAPSNGDKVVQPWQQNNQSITDEALDEENEDGHQ

SEQ ID NO: 133268 - protein, 108 aa, Oryza sativa
  Clone ID: PAT_MRT4530_35155C.1.pep
PASYASSVFSPWPRHSRPVPPRRLLFAASRPWSTRPSWGCPLIHCYVENGYDYVGNDITNKPGLVDSCCWSCSSTPGCKAWSWSNHNGGTLLAQVGSRRHRRQPQRQV

SEQ ID NO: 133269 - protein, 54 aa, Oryza sativa
  Clone ID: PAT_MRT4530_35156C.1.pep
MPVTAADDGDDGDDGHDLMSLGLSSFDMIRHQAKTFALALVDGIGLIEGAIIGV

SEQ ID NO: 133270 - protein, 94 aa, Oryza sativa
  unsure (1)..(94): unsure at all Xaa locations
  Clone ID: PAT_MRT4530_35157C.1.pep
PPSPPWSRPPAPSXRPPRRPRARPLRPTPPPPPHHPRRVQTPAAASSPRAAARRASPSSPPPPFPSPARRRPRWSPRRCWRSPTPSCVKKFFYK

SEQ ID NO: 133271 - protein, 81 aa, Oryza sativa
  Clone ID: PAT_MRT4530_35158C.1.pep
MVGGDGVSLDSGGDVVGGSWDESCAWMVNRVICRWILEEIYAPWQELATSTAHHRGPRLLDRCHPRSAPSTASRNKQPRRR

SEQ ID NO: 133272 - protein, 109 aa, Oryza sativa
  Clone ID: PAT_MRT4530_35159C.1.pep
MDADTVENGGEAAPVRWRAEARWLRRGGGRRRLRRGGERRRGGSCAVEGRGGGGSGAVEGWRWRPGAVDGSGATALSTFDVTIPVFAYAEPQGAGWIDVLVEGIDVLVE

SEQ ID NO: 133273 - protein, 1447 aa, Oryza sativa
  Clone ID: PAT_MRT4530_3515C.1.pep
MAGEEGAEPSALVAEDGGAPSASAPAPSLPPSAPATSAQVPNAADMAKAAAAARSLQTRAEILSTSQLLVPQAAPSQPAAAPTALAAVQAQVNPDPETQTEADMEAMRQNMTRLQDILRQMQEQQQAYEAARRSKVTSAPILQYSAGYVPPQVYPQVPTQPFPPQVVQAPMYFAGQPSTAAAHPAPHVQLQAQPVAAQVHPQLPGQVPQTMAEGASALQAQLQAFLQQLSQPHNISANTKANSIVLNFRGTYEEPKTQQHLLSIRQRPGESIREYMRRFSQARCQVQDITEASVINAASAGLLEGELTRKIANKEPQTLEHLLRIIDGYARGEEDSKRRQAIQAEYDKAFVAAAQAQAQVQVAEPPPLAVRQPQPAIQGQPPRQGQAPMTWRKFRTDRAGKAVMAVEEVQALRKEFDAQQASNHQQPVRKVRKDLYCAFHGRSSHTTEQCRNIRQRGNVQDPRLQQGAAVEAPREAAQEQAPLAEQRQDAQRRVIQVITRADPPIQLSKRQKKMQLRTVHNITSAGEGAPQYLNQQISFGPGDVEGVMFPHQDPLVISAEIAGFEVRRILVDGGSSADVIFAEAYAKMGLPTLALTPALASLRGFGGEAVQVLGQAQLLVTFGAGENRREEQVLFDVVNIPYNYNAIFGRATLNKFEAISHHNYLKLKVPGSVGVIVVKGLQPSAASKGDLAIINRTVHNVEAEPHGWAKHAPKPAPHGKIIKMQIDDADPTKLVSLGGDMGEEVAASIQEVLKKNSDIFAWGPDQVGGVSTDLIMHHLAVKPDAKPRKQKLRKMSVDRQEAAKPEVQKLLKAGVIQEIDHPEWLANPVLVRKSNGKWRMCIDFIDLNKAYPKDDFPLPRIDQLVDSTAGCELMSFQDAYSGYHQIHMNPADIPKTAFITPFGTFCHLRMPFGLRNVGATFARLVYKSYVDDIVVKSRKAFDHASDLQETFDNLRAAGMKLNPEKCVFGVRAGKLLGFLVSERGIEANPEKIDAILQMKPPSSVREVQKLAGRIAALSRFLSKAAERGLPFFKTLRGAGKFNWTPECQAAFDELKQYLQSPPTLISPAPGSELLLYLAASPVAVSAALVQETDSGQKPVYFVSEALQGAKTRYIEMEKLAYALVMASRKLKHYFQAHKVIVPSQYPLGEILRGKEVTGRLSKWAAELSPFDLHFVARTAVKSQVLADFVAEWTPALAPEPEPVEQPWVMHSDGSWSHKGAGIAAVLTSPSGVPIQYATRLQFDITNNATEYEAILLGLRKAKAMGIRRLLIRTDSKLVAGHIDKSFEAKEEGMKRYLEAVRSMEKCFTGITVELLPKPNHRFRGCAGDRQEGVRYDDILQSRRRNMRACPGFRRGRAGGITMRAILLRTGLRILLFLLPITFDGGLRATASSDLAAFRDRTFAFFQSASLVIAGPRGVRSAWQFAGIDTVHSAVNMALEQAGELGCG

SEQ ID NO: 133274 - protein, 303 aa, Oryza sativa
  Clone ID: PAT_MRT4530_35160C.1.pep
MSSSASPSTAPSAEYAEHLSNLVAIPSLSHENHYFLGPIGNLDPTDFIIGESNRIPFRLANPNLGHWKKTFKSWPSLEKTTPERSWTTWYKRVSASKKVHWDEIGIGQALALTIANSAKDEPLMAAATYFWSNTINAFLFNRGPMTPTLIDITMITGLDVTSSANPMSMNTKNQFDFRTKSIGGWSGYVAAYMGKGPVTPREHVAFLLMWLEKFLFCGSSCGPTTNWQFIAEALESKKQFPLGKILLDYLYQMLNNASAKIAVGSVVGVGRPWWLLQTWLNLMVLKVVNRPSVTEAEFPRFKL

SEQ ID NO: 133275 - protein, 92 aa, Oryza sativa
  unsure (1)..(92): unsure at all Xaa locations
  Clone ID: PAT_MRT4530_35161C.1.pep
RPIIPWSPPASHSCSLTQLTWGALFKITGGYKPIDLTIVEELASFRPTAHTCPRNQSDLTRCQXEWTDNALSRTKILCDVTWRANREALAII

SEQ ID NO: 133276 - protein, 437 aa, Oryza sativa
  Clone ID: PAT_MRT4530_35162C.1.pep
MALDPNIPLDERDEEVVPDLNEPMGQQEEMLAGEEDDHLGASGLKGKKSPNVQENHLSLLSACHTVENTVMMPWNKFWKLMEVTTKMHFLLISTLIPTRNTYKCKQEYGVYAGDVNIVFEQEELDDSDLEDEHSNKNLTNIQRQAIYDALLRGTLRSFASALDPHTLPNEPKFVDMRNIVHIDEKWFNTTKKTRNFYMVHWEDDLYRPVQNNNSIDKVMFLAAVARPRYNEEGICTFNGKEPAQRTSQNRPRGTLVTKTIKVDRDTVRSFLIAKVLQAIISCWPREHAHNTILIQQDNAPSHVLVDDPQFAYAVSQTGFDIRLMNQPPNSPDMNALDLGFFASLQSLTYRRISRNMDELIDNVEQEFHAYDDSKLNRVFLTLQSCLLEVMEANGGNGYRIPHMGKERLQRLHMLPKTLSCGCDLYDKVRSALVNQVQ

SEQ ID NO: 133277 - protein, 200 aa, Oryza sativa
  Clone ID: PAT_MRT4530_35163C.1.pep
MKESNASVLRCLYRRHASCTATAAHVRHPTSICSGGGRGACVDGGSRIKILCSFGGRIMPCPSDDALKYIDSETRILAVPRSIPFSPRADLKKKVEEMFRTEVAVVAEDLDVLVSVTWDEDLTHMLDEYDCSKEKRSPSASPRFRVYIFSSHGSACTTTAAPVPSPRRRRTWGAIATTSSLLRSPSCVVEKDTSSAWFLG

SEQ ID NO: 133278 - protein, 221 aa, Oryza sativa
  Clone ID: PAT_MRT4530_35164C.1.pep
MALPNQGTVDYPSFKLVIVGDGGTGKTTFVKRHLTGEFEKKYEPTIGVEVHPLDFTTNCGKIRFYCWDTAGQEKFGGLRDGYYIHGQCAIIMFDVTSRLTYKNVPTWHRDLCRVCENIPIVLCGNKVDVKNRQVKAKQVTFHRKKNLQYYEISAKSNYNFEKPFLYLARKLAGDPNLHFVEAVALKPPEVPIDLAMQQQHEAELAAAAAQPLPDDDDDLIE

SEQ ID NO: 133279 - protein, 499 aa, Oryza sativa
  Clone ID: PAT_MRT4530_35165C.1.pep
MWLVGDLDGGGTWTRLQRQRRQRRVAASHGEPGIGAVAQRKRQLRSNINYTRSQFAVQATNNSKTLAPPHRGKARSVFTRHQITSERNRLHWSQSERQSRRANPGMPERRRPYRKWPLVTGLASLSFAPTVLLHPPSPLRQPPPRRPPPRLPPRRLLAPGLPAPRRSFSSIAGRPSDLLSTTGRPAQREEPIFLCPLTGNLELMSKTQFVAEFEIRPSSAKRIQRILQLTKPCKQGPLAVLEQVEHAPQEAGVAGAEEGWGQEQEEDDLDRRARPVPLAVVVLHRATANCSNGNSAGAQSNTSKEEEADKIEIPMLDPCSFSSPTQPLLPLRPWRRLSAPELGISLKNLAYCLLLLLPGQRRAVPSKTAATEPRRCLTVTTCRLCVTLLVADRYTPLFADVLWWEAFSVAVAVADVPRLRESSAPEVERLCGGVRLSRDRLYLVFELKDENRIRCKVKGPRMNLFRKTLGEKRTTGYTTSTTENSIHPLWDIPLFLHVT

SEQ ID NO: 133280 - protein, 49 aa, Oryza sativa
  Clone ID: PAT_MRT4530_35166C.1.pep
LFFIYSIYSTSSSSEGSISSDKASLFMYVLYLISVCLSALIICTKLAFL

SEQ ID NO: 133281 - protein, 282 aa, Oryza sativa
  unsure (1)..(282): unsure at all Xaa locations
  Clone ID: PAT_MRT4530_35167C.1.pep
HAGPIRECPSVVAPPRRLLAPGLPAPRRSFSSIAGRPSDLLSTTGRXCQRWLEQASGAKRRWLEQAGTGEGQGATAPRRRGVTGGERGGGRSSGEWRRAPQEAGVAGAEEGWGQEQEEDDLDRRARPVPLAVVVLHRATAXPCSFSSPTQPLLPLRPWRRLSAPELGISLKNLAYCLLLLLPGQRRAVPSKTAATEPRRCLTVTTCRLCVTLLVADRYTPLFADVLWWEAFSVAVAVADVPRLRESSAPEVERLCGGVRLVKRGGEERREARLTGGAHVGPT

SEQ ID NO: 133282 - protein, 84 aa, Oryza sativa
  Clone ID: PAT_MRT4530_35168C.1.pep
MRQAVCWRMPGSGGQVDGGCPFWMESVEEKPLSMKGGPLMVTAQYGTNVPSPGASTLAPARDECLETLILTGRGEACVRSPVAT

SEQ ID NO: 133283 - protein, 55 aa, Oryza sativa
  Clone ID: PAT_MRT4530_35169C.1.pep
WQKRGIENIGNACLEHRKEKSRMGSRPTCQSLANLVNHYIMKMERIDISTKQLEF

SEQ ID NO: 133284 - protein, 73 aa, Oryza sativa
  Clone ID: PAT_MRT4530_3516C.1.pep
FYLDLYDITVSTCPRHACMHALSFLTICNPLYSFTIPVPSTPPTVGNAPRQQMSVSLRISITHHHGMAQFQVP

SEQ ID NO: 133285 - protein, 34 aa, Oryza sativa
  unsure (1)..(34): unsure at all Xaa locations
  Clone ID: PAT_MRT4530_35170C.1.pep
HGPDERGLKRFMMHKYXPFDMLGFKSMRSGVDLS

SEQ ID NO: 133286 - protein, 60 aa, Oryza sativa
  Clone ID: PAT_MRT4530_35171C.1.pep
PPGNRNQTGFTLDMKLGNLKILRGTQSPSKCRGKDTNFSLSWGHTTWDLNYELAKPCFVC

SEQ ID NO: 133287 - protein, 67 aa, Oryza sativa
  Clone ID: PAT_MRT4530_35172C.1.pep
INKGLLPSPSKFFFPIKRPFPRASTFPCYHTRCIYIPRTIWGQGKPIKLLLQTSTSHSSILPLNYAQ

SEQ ID NO: 133288 - protein, 55 aa, Oryza sativa
  Clone ID: PAT_MRT4530_35173C.1.pep
MASVVNAAGDLHVRVVSRRLVQASDESLVPRVLAVSNLDLLPQSMQVSMLCVYPK

SEQ ID NO: 133289 - protein, 101 aa, Oryza sativa
  unsure (1)..(101): unsure at all Xaa locations
  Clone ID: PAT_MRT4530_35174C.1.pep
PRRLHSELEATPFLASPQPPLSSRDPPPPPAVAPPPPPSRVPPLAASXPPLPXPPPSSRALPPPPTAAPIPSAASLPPPLATAPILSPTSPASSVRPPPIR

SEQ ID NO: 133290 - protein, 128 aa, Oryza sativa
  Clone ID: PAT_MRT4530_35175C.1.pep
TRRTASEKTMPQPPGSALTLSTSDTYWRMSLPAGATRDHPWCNPVTGRGAPRLDSLPLPDFLVCISEQDILRDRNLELCSALRRADHSVEQATYGGVGHAFQVLNNYHLSQPRTQEMLAHIKAFVRAR

SEQ ID NO: 133291 - protein, 404 aa, Oryza sativa
  Clone ID: PAT_MRT4530_35176C.1.pep
MVGGPLRANGLKGRDMQARLEVGWRPLLPRDWIEEAAPRCHVALPRGESGPRWGDGHSLAETRGRRLPQAPRGLRSNDDLDLKEIGGPRQFIYRDLNVATNKFLNVIGRGAFGVVCRGSLGGYEVAVKTLINGRKDFIAELSSIGGVKHKNLVRLIGWCRQNRFNIVDFIFWWRHDKKNKLFLVYELDIANALLYLHEECHPYILHRDIKPDNILLDNNFNAKLADFGLSRIADPDNNIVKTTAHGTKGYIDPLCMRDATIEFDRSSDMYSFGMVLLVVACTQGTSREQVWQLYQDKSLLQAADDNLRGQYDETQMERVLILGLCCSRLDDATKRPTIRQALAFLEHGGPMPGLDFPFRLFSQTRKWLAAAAAEQVEEYHHAEQVDEQEDHHHAAQHDMSSDAD

SEQ ID NO: 133292 - protein, 749 aa, Oryza sativa
  Clone ID: PAT_MRT4530_35177C.1.pep
MQGTTTTKAGRNGDRAGTEAPGATRATDGRGGAAVAARKVGDMRGVSGVEAKDSLTIVALQSPVTVERPVRGDLEEHVPKPYLARALAAPDIYHPDGTTTDDHEHHHLSVLQQHVAFFDRDDNGIIYPWETYEGCRALGFNMIMSFLIALVVNVSMSYPTLPGWLPSPFFPIYIHNIHRSKHGSDSGTYDNEGRFMPVNFENIFSKYARTSPDRLTYREVWQMTEGNREVLDLFGWFAAKLEWTILYVLARDEEGYLAREAIRRMYDGSLFEVGEWTNVKHPCRGPVESFSASQEDWALVLRGLLGRFLWASPCAGHRLSPPPSTGHARAIKGESEHTMLRAAASRCARGAIRRLSSAASPAAVAAGARRQPPLDEGDWSYHREWWGEDEGPGEGAHTVFRRHSEHGNGVVSVSAYPASRPASDEWTVTERWLQERNARIYPNSFGANQFKILGYQWRVMRFNDHTRQSVAKVMACYRSSGDTGMYLMQQPHCLAVPFSGQNNMKILCIGHGGGSLPLVLASKFRGAVVHIVEIDPVVASASIDSMGFPSLPVKGLPPEPTKPANGNELLWGGIHDRLFLHIADAEDFVANDSNVYDLVFIDAYDGDDIFPRKLWDAEGTFLKNLEMKVHPVHGTVVVNLHSDSELSVAGVEKTSSVDSILPLGKHVSQVCRAYKQHFGLAFTAAVPWLCNITLVACRDRAIASGARLGLSRRDFVLGKLLSKSNMVEHALDLPFPCLQYIKNGFTLVD

SEQ ID NO: 133293 - protein, 248 aa, Oryza sativa
  Clone ID: PAT_MRT4530_35178C.1.pep
MDGDGYGDGSGTRDFMSQSDSHADHDELDPYTDSLYYTGSRSGSASRIGMAALDLNSGGDGWPDLGSYEGPPAARANSSPYGGGRSAPAAGARGRGGGRGTQATGARGRGGRRSTSTAATVSEVNLDVDSDNVEDAAELQEIFQNHGKVKPDRANWTEDNTSLLCEIWVDQINKGNCVNGLMQKTGMREIIAAYHAATNLRHVRDESLVFNLAAAASSFALPSRPQRASAIAAATTSSSSGKQQAVQA

SEQ ID NO: 133294 - protein, 83 aa, Oryza sativa
  Clone ID: PAT_MRT4530_35179C.1.pep
MGGDHGGHGHGGGDFRQKVWSMTGGPYCRPVHWRRNTAIAMFGVFLVCIPIAMKSAELEQRPHHPVRPIPSQLWCKNFGKKEY

SEQ ID NO: 133295 - protein, 1919 aa, Oryza sativa
  unsure (1)..(1919): unsure at all Xaa locations
  Clone ID: PAT_MRT4530_3517C.1.pep
MAKTMEQGQREAGNRSQARGLLXRRAQGEEHMPKGDDLAVAGSAPGGPKRLSWPIXPRGQXVDNNPLARXRPMDRNYAMYRCKCRFHKGNHLWFRQQLAPTVGTSERNHXERMPPKKVVKEKVTRXKESDAGADMAAEEGAEPSAPVAEDGGVPSASAPAPSLPPSAPATSMQGPNAADMAKVTSAARALQTRAKILSTSQLLVPQAAPSQSAAAPTTLAAVQAQVNPDPETQTEANMEAMRQNMTRLPDMLCQMQEQQQAYEAARRTKVTSAPILQYSAGXVPPQVYPQVMTQPLPPQVVQAPMYFVGQPSTAAAHLAPHVQLQAQPVATQVHPQPPGQVPQTMAEGASALQAQLQAFLQQLSQPHNISSTAPSTGPEGNTSQGAPSWLSSNXPGLGASPWSQGLQFNFINAAXALTIRPQAPTPGFRANLAPNQVAMTWSQPTFDPSMAAQQASPVRAGQPNAMAQPHAQAVISPFATLYPQQGAVNRAGGEKGLPLSGGIKTRPIPPXFKFPPVPRYSGETDPKEFLSIYESAIEVTHGDENTKAKVIHLALDGIAHSLYFYLLANSIYSWEQLRDVFVLNFRGTYEERKTQQHLLGIRQSPGESIREYMRRFSQTRCQVQDITEASVINAASARLLEGELIRKIANKEPXTLEHLLRIIDGFARGEEYSKRRQAIQAEYDKASVAAAXAQAQVQVAEPPPLAVRQPQRAIQGQPPRQGQAPMTCRKFRTDRAGKAAMAVEEVQALRKEFDAQQASNHQQPVCKKYLNQQISFGPEDAEGVMFPHQDPLVISAEIAGFEVQQILVDGGSSVDVIFAEAYAKMGLPTLALTPAPASLRGFGGEAVQVLGQAQLLVAFGTGENRHEEQXFGRATLNKFEAISHHSYLKLKMPGPAGVIVVKVLQPSSASKGDLAIINRTVHNVEAELHDRAKHAPKPAPHIKIIKMQIDEADPAKLVSLGGDMGEEVAASILEVLKKNSDIFAWGPDXVRGVLTDLIMHHLAVKPDAKPRXQKLRKMSADRQEAAKAEVQKLLKAGVIQEIDHPEWLVNPVLVRKSNGKWRMCVDFIDLNKACPKDDFPLPRIDQLVDSTAGCELMSFLDAYSGYHQIYMNPADIPKTAFITPFGTFCHLRMPFGLRNAGATFARLVYKVLYKQLGRNVEAYVDDILVKSRKAFDHPSDLQETFDNLHAASMKLNPEKCFFGIRSGKLLGFLTAERGLPFFKTLRGAGKFNWTPEYQAAFDELKQYLQSPPALISPAPGSELLLYLAASPVLDSAALVQETDSGQKPVYFVSEALEGAKTRYIEMEKLSYALVMASRKLKHYFQAHKVIVPSQYPLGEILRGKEVTGRLSKWAAELSPFDLHFVARTAVKSQVLADFVAEWTPAFAPEPEPVELPWVMYSNGSWSHRGAGIATVLTSPNGVPIRYAARLQFDTTNNAAEYEAILLGLRKAKALGIRRLLIQTNSKLVAGHVDKSFERKEEGMKRYLEDVQSMEKCFTGITVEHLSRGQNEEADALAKSAACGGPHSPDIFFEVLYAPSVPVKSLEVMAIDQAKLGEDPCDWRTPFVKYLETGWLPEDEAEAKRLQLRATRYKMVSGQLYRSGVLQPLLRCISLAEGKEIAKEIHQGLCGTHQAARIVASKVFRQGVYWPTVLKVCVEQVKKCESCQRHGRSQTAPQYELQPITPIWPFARWGLDIIGPFPVARNGYKFTIVAVEYFSRWIEAEPLGAITSAAVQKFVWKNIVCRFEVPKEFITDNGKQFDSDKFREMCEGLNLEIRFASVAQPQSNGAAERTNGKILEALKKRLEGAAKGKWLEEMLSVLWALRTTPTRPTKFSPFMLLYGDEAMTLTELGANSTRVTFSGGEEGREVSLKLLEGVRVEALEHMRKYATGTSTTYNKKVRPTXAVAWSSCPKEEGEPD

SEQ ID NO: 133296 - protein, 128 aa, Oryza sativa
  Clone ID: PAT_MRT4530_35180C.1.pep
GRRRGAPAAPSWRLSSAASPAAVAAGARRQPPLDEGDWSYHREWWGEDEGPGEGAHTVFRRHSEHGNGVVSVSAYPASRPASDEWTVTERWLQERNARIYPNSFGANQFKILGYQWRVMRFNDHTRQS

SEQ ID NO: 133297 - protein, 285 aa, Oryza sativa
  Clone ID: PAT_MRT4530_35181C.1.pep
MQGTTTTKAGRNGDRAGTEAPGATRATDGRGGAAVAARKVGDMRGVSGVEAKDSLTIVALQSPVTVERPVRGDLEEHVPKPYLARALAAPDIYHPDGTTTDDHEHHHLSVLQQHVAFFDRDDNGIIYPWETYEGCRALGFNMIMSFLIALVVNVSMSYPTLPGWLPSPFFPIYIHNIHRSKHGSDSGTYDNEGRFMPVNFENIFSKYARTSPDRLTYREVWQMTEGNREVLDLFGWFAAKLEWTILYVLARDEEGYLAREAIRRMYDGSLFEYVAMQREQHAKMS

SEQ ID NO: 133298 - protein, 151 aa, Oryza sativa
  Clone ID: PAT_MRT4530_35182C.1.pep
MFDHISTLSGAVVHIVEIDPVVASASIDSMGFPSLPVKGLPPEPTKPANGNELLWGGIHDRLFLHIADAEDFVANDSNVYDLVFIDAYDGDDIFPRKLWDAEGTFLKNLEMKVHPVHGTVVVNLHSDSELSVAGVEKTSSVDSILPLGKHV

SEQ ID NO: 133299 - protein, 129 aa, Oryza sativa
  unsure (1)..(129): unsure at all Xaa locations
  Clone ID: PAT_MRT4530_35183C.1.pep
MNANFTLCSCYTEYTASLSRRCFGAGIMFVYAITLXHDGDISVVFGSLDVVSRXRDIIIXRLNAGMRGGPLMVTAQYGYSSTRVYSTKLISWGGYSSVFSPGCMVMTSCRKELGSQGWLLKVPGGHRIE

SEQ ID NO: 133300 - protein, 74 aa, Oryza sativa
  Clone ID: PAT_MRT4530_35184C.1.pep
PAPRTKSWRRSHRFLAAIQESVGEEHAILDLDRSYSARTIIITIGFTTTRDDSEVGMRGGGRGGRALALTDGAE

SEQ ID NO: 133301 - protein, 88 aa, Oryza sativa
  unsure (1)..(88): unsure at all Xaa locations
  Clone ID: PAT_MRT4530_35185C.1.pep
MLNCWTTPKWXQELDEFGVEGIPHXAFLDKEGNEEGNVVGRLPKQYFLDNVVALASGEPTVPHARVVGQFSSAESRKVHQVADPRSHG

SEQ ID NO: 133302 - protein, 47 aa, Oryza sativa
  Clone ID: PAT_MRT4530_35186C.1.pep
EINILCLKGLAWILYVLLPLNDYFISQPIIIGTPCISFRLKLDKNLF

SEQ ID NO: 133303 - protein, 131 aa, Oryza sativa
  Clone ID: PAT_MRT4530_35187C.1.pep
YFIPSNLVFKAFHYTIFVSITICLHTTHQRCNSTSYESTQLSLALPGSTHPTFCGLNRLSPSSCAAVLPRHGQPHAAHLRLRMMLPVVALIQRHLAVVPMLNNQLLSHRNTLATRTRRRTRARTRGRTRGR

SEQ ID NO: 133304 - protein, 110 aa, Oryza sativa
  unsure (1)..(110): unsure at all Xaa locations
  Clone ID: PAT_MRT4530_35188C.1.pep
DLPSFAGPAAMRHATKAIYRLMRSDYVNCRKGCEGGTLAGEQDVLHNMEXSDVIALHLTVHVNDIRWWRYTAGQLLGALXVMEDIAGERVIYTGDYYHEENRPLKAAERH

SEQ ID NO: 133305 - protein, 266 aa, Oryza sativa
  Clone ID: PAT_MRT4530_35189C.1.pep
MVSSGVRLSATRLGWHTGIKLTGEIWEVWINCKGSKERWVKANVDKDLYDDYRDETIKTYTEWLRDQGLLKQIMAYKAYITNNKNTSDGVEINGSSDMPEIEWPSHARKITKHTQDGKQVGHGTKRLKSSSRKLKVEFSAKLGGPCGDNRRTFVDEVVMYTRLRTPLIGVRKWKDVKQDVKNSIADCVMKVSTQNSTNRQQMKTMHLMGSKPFSQCSWEQNNTTRKLAMTDSDEAGDEGSRSVTFGGQEDDVFQNTYKETTGTKST

SEQ ID NO: 133306 - protein, 2013 aa, Oryza sativa
  Clone ID: PAT_MRT4530_3518C.1.pep
MAEQAKAHDLSPSVSGDDGEPNPRRRARTPPPPPRQSPKQGEALERVDKSVASPVAGDAGERRDGERRLLVCGDGSTPQGALQAAGALLRHPPVVHDPESPAQRWLEDVANLVMTAQQRLGAGGRSATTKTSGAATTGSVSSRRRARRAAAAARHSAATPSSTPPTREDQHGEPDARIDIERRRNNRRTPRATEGASSSRVSPRHGREDQPSVPPAGGVGCRAFVASLRNVRWPPRFRPTITEKYDGSVNPTEFLQVYTTGIEAAGGDDRVMANFFPMALKGQARGWLMNLPPASVHSWEDLCQQFTMNFQGTYPRPGEEADLHARFCQVRNTIPCIPAHAVIYAFRGGVRHNRMLEKIASKEPQTTAELFQLADRVARKEEAWTWNSSGSGVAASAAPGSAAQTGRRDRRRKKRSDRSGDEGHVLAVEGAPRATRKGRPASDKKKEAGTPSRERPAGRWCSVHNTSLHDLADCRAVKNLAERTRKWEEDRRQERREGKSPAVPSGKRRSEAKQKAPAVDIDDGDDDLGFQEPGATIATVDGGACAHVSRRSFKAMKRELLAMAPTHEAMRRARWSEVALTFDQTDHPPCIARGGQVAMVVSPTICNVKLGRVLIDGGAALNILSPAAFDAIKAPGMVLQPSQPIIGVTPGHTWPLGHIDLPVTFGGSANFRTERVNFDVADLSLPYNAVLGRPALVKFMAAVHYAYLQMKMPGPGGPISVRGDLKVALACMEQRADHLAAATKPEGGDERLGTSAPTAPRQRIATCDEVPEDALVSFLRANADVFAWRPADMPGVPREVIEHRLAVRPGARPVRQKVRRQAPERQAFIREEVARLLEAGFIREVIHPEWLANPVVVPKANGKLRMCIDYTDLNKACPKDPYPLPRIDQIVDSTAGCDLLRFLDAYSGYHQIRMAREDEEKTAFITPVGTYCYTSMPFGLKNAGPTFQRTTRISLGSQIGRNVEAYVDDLVVKTRNQETLLLDLAETFENLRSARIKLNPDKCVFGVPAGKLLGFLVSARGIEANPEKIRAIERMRPPSKLRDVQCVTGCMAALSRFISRLGEKALPLFKLLKRSGPFTWTEEAEHALTQLKAYLSSPPVLVAPEPNEPLLLYLAATPQVVSAALVVERDENNPHFVHPHSVLTWPGSERGGEAPESDGGLRPLTTGVGPLPACQTVLSAPDPQEGPKATAGRPHLTPFDPEANPVLTRPGKEQGEEAPEPNGGLRPLTTGVGPLPACPTMPGAPDPQDGPEATEGRPPLSSSDPEVIGTEDKCAPKGHLNEERPGDTAPSKEDRPHRRVQRPVYFVSEALRDAKTRYPQAQKMLYAILMASRKLRHYFQAHRVTVVTSYPLGQILHNREGTGRVVKWAIELSEFDLHFEPRHAIKSQALADFVAEWTPAPETVSIPEASTDPSQLPRTTHWVMQFDGSLSLQGAGAGVTLTSPNGDVLRYLVRLDFRATNNMAEYEGLLAGLRVAAGLGLRRLLVLGDSQLVVNQVCKEYRCSDPQMDAYVRQVRRMERHFDGIELRHVPRRDNMIADELSRLASSRAQTPPGAFEERLTQPSARPDPLGETDAPDRPPRPVGVQASGPEGSAPSSLRLIAWISEIQTYLTDKTLPEDREGSERVQRISKRYVLVEGTLYRRAANGILLKCIPQEQGVELLADIHEGECGAHSASRTLVGKAFRQGFYWPTALNDAVDLVRRCRACQFHAKQIHQPAQALQIIPLSWPFAVWGFDILGPFKRAPGGFEYLYVAIDKFTKWPEAYPVVKIDKHSALKFIKGITARFGVPNRIITDNGTQFTSELFGDYCEDMGIKLCFASPAHPRSNGQVERANAEILKCLKTKTFNILKKHGDSWIEELPAVLWANRTTPSRATGETPFFLVYGAEAVLPSELTLRSPRATMYCEADQDQLRRDDLDYLEERRRRAALRATRYQQSLRRYHQRHVRARSLCVDDLVLRRVQTRAGLSKLSPMWEGPYRVIGVPRAGSVRLATGDGTELPNPWNIEHLRRFYP

SEQ ID NO: 133307 - protein, 96 aa, Oryza sativa
  Clone ID: PAT_MRT4530_35190C.1.pep
ARDMAIFKKDGTAVLFVMSLMVIAMVLSSCQAAIHFNLHCADLPKCTEHECMADCHRRGFQDYKRLLGHTPRFAAVFMDEYMLNIFEMMKVEILRK

SEQ ID NO: 133308 - protein, 103 aa, Oryza sativa
  Clone ID: PAT_MRT4530_35191C.1.pep
MASPDSAVQRRAAFVVLHQQEMRGLAADDLHTPQVAPAITRGGQNMQCRVAFNGDPLQGRRVCRGCRTMTSTFLFSSLLLRRSFHVQKNVIGYPITITSRCKE

SEQ ID NO: 133309 - protein, 368 aa, Oryza sativa
  Clone ID: PAT_MRT4530_35192C.1.pep
MASAVKSKLTVAKTKEDTAKPPMNPWLLLLASRGDCDGITDHILLNMEAATQQKAAKEEGACHRPAPSADSSPLDQANPAIPTMATQQASGDDGHQSCLDLEGVTIEGDTALHVLATSGDGWSYLRSVEIICSKAPHLLLVQNNKGGTPLHCAVRAGHSQMVSFLIDLANNPRSNLQVAARLKEVLRKGTAFLPLHDAIRIGNKEMITKLLEFDPELASSPTDEAGISPLYLAIVLQRSDIAKLLHQMSPENLSYSGLSGQNALHAAVLQGKVTNSVISASPLLISGSFLNATVRFGPMFFPSEREGFLIFCHFHLSGVTSRIASMGGVKKSILPLVDPTTQPQPFPTLLTSVLFKTVLDAYMDGEGT

SEQ ID NO: 133310 - protein, 84 aa, Oryza sativa
  unsure (1)..(84): unsure at all Xaa locations
  Clone ID: PAT_MRT4530_35193C.1.pep
MASVRVKGTVKWFYSTKGFGFITLDDGGXDLLVHQFSLKFDGYRNLNDRYLRVFFAXSGNYGRSNAVDVTEPVGGALSGRSRAS

SEQ ID NO: 133311 - protein, 571 aa, Oryza sativa
  Clone ID: PAT_MRT4530_35194C.1.pep
MGGQVSGTFAFDVLHWGETVSGTFAFDVIQWEKAGYVYLAMALVALLGVLLTKCSRTATAQRRLPPGPWQLPVIGSLHHLIGKLPHHAMRDLTRRHGPVMMLRLGEVPTLVVSSPEAAQEVMRTHDAVFATRALSATVRAGTMGGRDIAFAPYGDYWRQLRKIAATELLSAPRVASFRAIREEEVAATLRTVAAAAADGRAVELRAALCALVTDSTSRAVVGDRCKESDALIRAFDRSMELASGFNPAADLWPSSRLAGLLSGGVREIEANLHTVFGILDRLIEKRLQQKKTAPSSAAGEDILDALLRIHKEGGGLQFPLDMDSIKLIIALSKKPEARELKGSNFRLKAPDGDLFSGGGETVATLLVWAMAELIRNPMAMQKATTEVRRAFALAGAVSEGKGALGELRYLHLVIKEASRLHPPAPLLLPRECSEPCQVLGYDVPRGTQVLVNAWAIGRDERCWTGGSGDGSSPEEFRPERFEDGAEAVDLRGNNFELLPFGAGRRMCPGMAFALANIELTLASLLFHFDWEVPDMADPAKLDMTETLGITARRKGDLLLRPVLRMPVPGVY

SEQ ID NO: 133312 - protein, 95 aa, Oryza sativa
  unsure (1)..(95): unsure at all Xaa locations
  Clone ID: PAT_MRT4530_35195C.1.pep
SPGCRNRHEAGVHESHRLRFXSSTMYCAWGAQLNLQFFSMLECFYRFAEGIKLNIYSYIIIYIFILRYPESSDIFHPSCGADAWLISRCSFWFAY

SEQ ID NO: 133313 - protein, 148 aa, Oryza sativa
  Clone ID: PAT_MRT4530_35196C.1.pep
MCAPRGAPPPPVPWTRSTVDWRTCATSMWGPPIGAALSDDVIRGIGGIKWPVLGLQASELGVKKGEVAAVIPRRREATRDGDIDDAGARGGMGGAASAAGAHVRARHGARSRGGVAHGGYTVARPIHTPLRPPLPGRAPWGAGHGVWV

SEQ ID NO: 133314 - protein, 163 aa, Oryza sativa
  unsure (1)..(163): unsure at all Xaa locations
  Clone ID: PAT_MRT4530_35197C.1.pep
MALWAAAAASTFLGTRLTDPAPHTGRIEARFWFGGSKNAVANKAARPSAPSTDRSVRFPGAETPDYLNGSLVGYYXFDPFRLGKPPEYLQFELDSVNQILSXNNASYIIGTRFETGKVKSTPIQPYTEAFSLQCLRECXLMHGRWTMLATLCALCVKWLTGIT

SEQ ID NO: 133315 - protein, 162 aa, Oryza sativa
  unsure (1)..(162): unsure at all Xaa locations
  Clone ID: PAT_MRT4530_35198C.1.pep
MASRTQYAFLLLSAFMASLFAGSAAGVYHIIGAGKGWRMAPNKTYYADWARTRNISVGDKLMFLYRSGVYNIVEVPTKELFDACSMRNITNRWQNGPTIIELTQPGPRYYFCGVGKHCEEGEKVAINVSVSAPTXPTPTPTPTTTTRTTATARPPRRPPPPT

SEQ ID NO: 133316 - protein, 110 aa, Oryza sativa
  Clone ID: PAT_MRT4530_35199C.1.pep
LCICIYICIYIYVCIYIYVYIYICIYIYMYVYIYMYVYIYIYVCIYIYVCRIYIYMYIYIYIYVCIYIYVCIYVYIYICIYIYVYIYMYIYIYIYMYIYIYIYIYIYIHT

SEQ ID NO: 133317 - protein, 149 aa, Oryza sativa
  Clone ID: PAT_MRT4530_3519C.1.pep
MWPSQVASPVTGANRGAVTVYAHAGTLLIFMCKTKEVDVASIMPYSSVVKSGGGQGERMEAGGGRQGEQMEASGGGQMGEVQVAVGGRARRGRRGRRAEGGGGWTDEARAAGSRARAAVSRRRNDRRRRAGLCLYSEPPPPDPEVLGML

SEQ ID NO: 133318 - protein, 203 aa, Oryza sativa
  Clone ID: PAT_MRT4530_351C.1.pep
MEEDDGLALMTGANQSLWSYYKCTSSRCSAKKHVEKSTDDPEMLIVTYEGSHHHGPQPLFPPHIAQPPPPTSVVGFSAASGAGPPPSSPAAAARKRKNYVRAAFSPTTSEDDGDGAGRLRPEWPQDDGTSCDVAELRRRGDAEHAAPRRVATDRSCDDGGGGGSTSASSSVARADAATALSSDSPPTIWSCLDWPWSQETLFL

SEQ ID NO: 133319 - protein, 369 aa, Oryza sativa
  unsure (1)..(369): unsure at all Xaa locations
  Clone ID: PAT_MRT4530_35200C.1.pep
MAGTVTVPSASVPSTPLLKDELDIVIPTIRNLDFLEMWRPFFQPYHLIIVQDGDPTKTIRVPEGFDYELYNRNDINRILGPKASCISFKDSACRCFGYMVSKKKYVFTIDDDCFVAKDPSGKDINALEQHIKNLLSPSTPFFFNTLYDPYREGADFVRGYPFSLREGAKTAVSHGLWLNIPDYDAPTQMVKPRERNSRYVDAVMTVPKGTLFPMCGMNLAFDRDLIGPAMYFGLMXGDVDDXSVPIGRYDDMWAGWCMKVICDHLSLGVKTGLPYIWHSKASNPFVNLKKEYKGIFWQEDIIPFFQNATIPKECDTVQKCYLSLAEQVREKLGKIDPYFVKLADAMVTWIEAWDELNPSTAAVENGKAK

SEQ ID NO: 133320 - protein, 87 aa, Oryza sativa
  Clone ID: PAT_MRT4530_35201C.1.pep
DTLAPDLRKLPHINLFMVLPFETSIRYHCLFWRKYSFWYEMYKVDTYRSICLLVKKNTGGWLSVVKIMVLKVFFGDLKFKKKKKKKK

SEQ ID NO: 133321 - protein, 151 aa, Oryza sativa
  Clone ID: PAT_MRT4530_35202C.1.pep
QLLLLPSMAHDPNSPSSSTSSSSPSSAAAAASSSPSSHRPPPPPPSSSSQPALPPSPRTVVPRTIDTTPFPTTFVQADTASFKQVVQMLTGSDTTPPSQRPPAKSNHHQHHHSGAPCRPKKQAFKLYERRSGVHKNFKMIAPLAMAAAATA

SEQ ID NO: 133322 - protein, 45 aa, Oryza sativa
  Clone ID: PAT_MRT4530_35203C.1.pep
MGQFLKKRGVLDDEFLGIDPKIMETKVAVKQQAFQDRAAGNHAVK

SEQ ID NO: 133323 - protein, 86 aa, Oryza sativa
  unsure (1)..(86): unsure at all Xaa locations
  Clone ID: PAT_MRT4530_35204C.1.pep
WQVGGEPGGRRWLAGRELVAEAAPIFLSPPCRAPHVPSRIGGAEDAVGSVPRAARGGWLALRGGLTDSXCGRRVTITAKESAMASE

SEQ ID NO: 133324 - protein, 120 aa, Oryza sativa
  Clone ID: PAT_MRT4530_35205C.1.pep
APFRNHATRQYPPLKHARYRVLWMASTSDKAPPNAGIKGCRWSTYARARAAGRWVGGGYKSGAGAAGGETGRIFFAGSRGWNLPPHQQQHRQQQHVRFLRASARDDSLTRRRRGGLVVVF

SEQ ID NO: 133325 - protein, 380 aa, Oryza sativa
  Clone ID: PAT_MRT4530_35206C.1.pep
MRASDHPAFRCRPRRNTSREVSLKHLSTTILSPAAFPATTTAAIFTSTAPARSSERRSRVIDNQPTDAETAVVQQLAFNCTPDDDHLPHCLLWVQVTTLSCGGFVVGVTWNHAVADGFGIAQFIQAVGELARGLPSAPSVTPVRLDDQNNAVSPFTMAFMQLADRHKVPDLTFNNVTVPSRLMDHIIRGRTTNVTVFEAVAAVLWQCRTRAVMTNPEAPAVLLFAVNARKYLGAKDGYYGNCSTMHVAVAKSGAVANADINDIVDIIRRAKERIPEQLKMTGGSDMTMLRELADDHRLDGYESLLYLTSWRNIGFEDVDFGSGKTARVMTYPQREVFSKKMPICFMLKNTPQGARVISGCVKAHHADAFHQEIAKLNATT

SEQ ID NO: 133326 - protein, 64 aa, Oryza sativa
  Clone ID: PAT_MRT4530_35207C.1.pep
FSTYFLTTLNHERMTSLAQIVLISTSPWLFTQCWSIRLSTTSVPSSCVQLTWSPEYNRSVALCS

SEQ ID NO: 133327 - protein, 447 aa, Oryza sativa
  Clone ID: PAT_MRT4530_35208C.1.pep
MSIVVSKSAPVVVRPSQPPVKTTSGSKIVLSPMDKPSSMMPTTVLLAFDHPTIQSECTAETIKRGLAQALVPYYPIAGRLSCDDDGDFYIDCTGEELGVTFVAASANCTMEELMCCVDDQPPDAETAVVQQLAFNCTPDDLHHRLLWMQVTTLSCGGFVVGVTWNHGLADGFGMAQFIQAVGELTRGLPSPSVVPVRLDDDNNATQAIPPFAMAVYQFMSSSSHKASIDHTFNNITVPSSLIDHIRFRGRRTNDDVTVFEAVAAVLWQCRTRAVMKNPEAPAVLLFAVNARKYLGAKDGYYGNCSTMHVAVAKSGAVANADINDIVDIIRRAKERIPEQLKMTGGSDMTMLRELADDHRLDGYESLLYLTSWRNIGFEDVDFGSGKTARVMTYPQRVVLSMSMMVKAMPICVMLKATEQGARVMSACVTAHHVDAFHDEIAKLNATA

SEQ ID NO: 133328 - protein, 574 aa, Oryza sativa
  Clone ID: PAT_MRT4530_35209C.1.pep
MAFDLDTLFDIHTYLSSLVDLFSTQEIDSLISIIPAHKAPGPDGFNGYFMKKCWHIIAQDYYRLAAHFHAGCVDLEILNSSFITLVPKKSSPETVNDFRPISLMRISLKVLTKLMANRLQGVILKLVSDNQYGFIKGKTIQDFLARSFEYIHQCLKVNFDKSSLDPLNLKQDKADLLAGILGCQIGSLPFTYLGLPLGTTRPRVVDFAPLLDRVERRLTASSMFLPQGGRLTLINSVLSSIPTYYMSSLQLPVTVIKAIDTTRKNCLCRGNNPSFTRKSLASWDRVCTPKEKGGLGVINLRVQNTALLLKHMVKFYNGADLPWVKLISQTYYDSKVPHLMVNKGSFWWRDITSLADIFRGVAKCEIRIGTTALFWNDLWNDDFKCTSYPNIFAAAMYKNDSVKATCSRPLEDSFILPLSDVAFSEFLQLEEVLGHLNIQSGRGMLGVLSRVQTNSTQEKCWIEGTVPKKMMTSHAFYAMLITEKQASKSQVGMQYNSSLGAATNNSSHGSESASPSLARQKEKEVVDLEEGSDSSEEGRRGIHINWTEDDNMRLMSSWLNNSVDPIKGNDKKSE

SEQ ID NO: 133329 - protein, 1217 aa, Oryza sativa
  unsure (1)..(1217): unsure at all Xaa locations
  Clone ID: PAT_MRT4530_3520C.1.pep
MPPKKVVKEKVTRRKESDAGADIAAEEGAEPSASIAEDGGAPSGSAPAPSLPPSAPATSVQVPNAADMAKAAAAAAARALQTRAEILSTSQLLVPQAAPSQPAAAPTALTPVQAQVNPNPETQTEADMEAMQQNMTGLQDMLRQMAGGEKGLPLSGGIKNRPIPLQFKFPPVPRYSSETDPKEFLSIYESAIEAAHGDENTKAKVIHLALDGIARSWYFNLPANSIYSWEQLRDVFVLNFLGTYEEPKTQQHLLGICQRPGESIREYMRRFSQAQCQVQDITEASVINAASAGLLEGELTRKIANKEPQTLEHLLRIIDGFARGEEDSKRWQAIQAEYDKASVAAAQAQAQVQVAEPPSLTVRHPQPAIQGQPPKQGEGAPQYLNQQISFGPEDAEGVMFPHQDPLVISAEIAGFEVRRILVDGGSSADVIFAEAYAKMGLPTLALTPAPASLRGFGGKAVQVLGQAQLLVAFGTGENRREEQVLFDVVDIPYNYNAIFGRATLNKFEAISHHNYLKLKMPSPTGVIVVKGLQPSAASKGDLAIINRTVHNVEAELHDRVKHAPKPAPHGKIIKMQIDDADPAKLVSLGGDMDEEVAASILEVLKKNSDIFAWGPDQVGGVSTDPIMHHLAVKPDAKPRKQKLHKMSADRQEAAKAKVQKLLKARIHMNPTDIPKTAFITPFGTFCHLRMPFGLRNAGATFARLVYKVLYKQLERNVEAYVDDIVIKSHKAFDHASDLQETFDNLRAAGMKLNPEKCVFGVRAGKLLGFLVSERGIELNPEKIDAIQQMKPSSSAYKVMVPSKYPFGEILRGKEVTGQLSKWAAELSPFDLHFVARTTVKSQVLADFVAEWTPAFALEPEPVEQPWVMYADGSWSHRWAGIAAVLTSPNGVPIQYAARLQFDTTNNAAEYEAILLGLRKAKALGVRRLLIRTDSKLVAGHVDKSFEAKEEGMKWYLEAVRSTEKCFTGITVEHLPRGQNEEADALAKSAACGGPHSPGIFFEILYAPSVPVESLEAEPLGAITSAAVQKFVWKNIVCRFGVPKEFITDNGKQFDSNKFREMCEGLNLEIRFASVAHPQSNGAAKRTNGKILKALKKRLEGAAKGKWPEEMLSVLWALRMTPTRPTKFSPFMLLYGDEAMTPTELGANSPRVTFSRGEEGREVSLELLEGVRVEALEHMRKYATGTSATYNKKVRPTXAVAWSSCLKEKGEPDSRWQA

SEQ ID NO: 133330 - protein, 56 aa, Oryza sativa
  Clone ID: PAT_MRT4530_35210C.1.pep
APGRSFDPLKPPPFFFFLENNERFPSLLSDFYTNVHRPQIFHIFTLPLLQLTKHII

SEQ ID NO: 133331 - protein, 58 aa, Oryza sativa
  Clone ID: PAT_MRT4530_35211C.1.pep
MFSEPSDVSSSAGCGADFPLVCDCNSAATGSPASSSPSPAAVVAAPMLPPDHDAATSA

SEQ ID NO: 133332 - protein, 42 aa, Oryza sativa
  Clone ID: PAT_MRT4530_35212C.1.pep
MVRRRSQWIAVLLRGTSHQAKSLAEGPPETPAQASFCIAASS

SEQ ID NO: 133333 - protein, 69 aa, Oryza sativa
  Clone ID: PAT_MRT4530_35213C.1.pep
HERHTKKLMTLDLTSWLSKIDLVYTPVDYAVEASLAVNIFDGPSDFTGKVIAWTSGNKDNEFVLHDTQV

SEQ ID NO: 133334 - protein, 360 aa, Oryza sativa
  Clone ID: PAT_MRT4530_35214C.1.pep
MVQVLHATKDPWCTDYISDEMMATFIGSDQAISRFTDEDSVGGIEYAVAPRGMFAQPARLTREWLNDGHTGLAPSKLAPTTRDNTAAVHGVQLAVQAHRAHTNHREYDIEGCGVRRSMHVLVFVSPDKRSEVNFYEPLLHGAGPCDLPTAFKSKETFSIQNAEFPPAPLARGLCSARSGGEQWRAKSIGWRADGVATESLRESRSSGEATTATTAALYPVGEVTLGHCAPLPSPIAIEPPPTAPGHPRRGALFLVGVGGVGTKEGRSRHRCRHLRSSTATAALPPSIADPSPASRKSSPDLSNKNDERGATTGGDSPRSCRACRRPPSLPLPPPATSTARGLPPLRRHALTAIFVGGDED

SEQ ID NO: 133335 - protein, 219 aa, Oryza sativa
  Clone ID: PAT_MRT4530_35215C.1.pep
IHVTYCNELKSPVMAVTVFGRPCRLAAHGQVTERMGFVHAPRNPLRIARGTSLHARNHEGLCNAAGTRSKNIWLGMAFWGDTVLAERTPRHATTATRHCLPALQLQDRHVRHCGLRSPRFPCTRRPCNADSVANNGTTRGTSGKKPKTTLPLGAANEQQERKTTDWGKRRPRSILAGLHMPRTVIYGSCGGRSSGSGMGHGSYHSNADGFNLASYLRRE

SEQ ID NO: 133336 - protein, 96 aa, Oryza sativa
  Clone ID: PAT_MRT4530_35216C.1.pep
MDAAAAAAAAGGGGGGGGSVAARSSPASVQATNDDAAASKLSCVNKGYMKDDYVHFFVRRTTKRAPIINRGYYARWSVLRKLLHQFLGAGNGSNDQ

SEQ ID NO: 133337 - protein, 72 aa, Oryza sativa
  Clone ID: PAT_MRT4530_35217C.1.pep
STPVLITRSPICVCRLLVIVAVLLKTFSIGGWKPRSQVILTDEEGMSASECLSASVGGGGAPEQSKSLPGGI

SEQ ID NO: 133338 - protein, 215 aa, Oryza sativa
  Clone ID: PAT_MRT4530_35218C.1.pep
LDLDLMNKALLGKWIWKLENEEGWWQDILKNKYLRKKPMSIKKNKPGDSHFWQGLMEIKDKFYSLCTKKLGDGKSILFWEDSWLGGRPLNIQYPALYNITFSKHITLAKIKEKGWEVIKFRRSLYGDKLHDCNKIKSKFGELDFQEGAKDKLSWTLTKHGTFSVKSFYRALCVQQKAEADRRRLLLGAKLLRQVANDIFCSKFGWRPGARRIGYC

SEQ ID NO: 133339 - protein, 436 aa, Oryza sativa
  unsure (1)..(436): unsure at all Xaa locations
  Clone ID: PAT_MRT4530_35219C.1.pep
LKYILCLFEQLSGLKINFNKSEVFCFGEARKKQNLYGQLFTCNIGALPMRYLGVPIDKKRILKKDWKVAENKMEHKLGCWQGRFQSIGGRLILINSSLSNVPLYMISFYRLPTGVKERMDFFRRRLLWQEDXGIRKYHQGQWPVICSPKDQGGLGVLDLDLMNKALLGKWIWKLENEEGWWQDILKNKYSRKKPMSITKNKPSDSHFWQGLMEIKDKFYSLCTKKLGDGKSILFWEDSWLGGRPLNIXYPALYNITFSKHITLAKIKEKGWEVIKFRRSLYGDKLHDWNKIKSKFGELDFQEGAKDKHSWTLTKHGTFSVKSFYRALCVQQASSPLKKVWNYKIPLKIKVFLWLLLRGRILTKDNMFKGGWRKGSLNCQFCDKSETIQHLFFECGGRSKKAAXGAKLLRQVANDIFCSKFGWRPGATELLCLLTPS

SEQ ID NO: 133340 - protein, 2027 aa, Oryza sativa
  Clone ID: PAT_MRT4530_3521C.1.pep
MAEQAKAHDLSPSVSGDDGEPNPRRRARTPPPPPRQSPKQGEALERVDKSVASPVAGDAGERRDGERRLLVCGDGSTPQGALQAAGALLRHPPVVHDPESPAQRWLEDVANLVMTAQQRLGAGGRSATTKTSGAATTGSVSSRRRARRAAAAARHSAATPSSTPPTREDQHGEPDARIDIERRRNNRRTPRATEGASSSRVSPRHGREDQPSVPPAGGVGCRAFVASLRNVRWPPRFRPTITEKYDGSVNPTEFLQVYTTGIEAAGGDDRVMANFFPMALKGQARGWLMNLPPASVHSWEDLCQQFTMNFQGTYPRPGEEADLHAVQRGDDESLRSYIQRFCQVRNTIPCIPAHAVIYAFRGGVRHNRMLEKIASKEPQTTAELFQLADRVARKEEAWTWNSSGSGVAASAAPGSAAQTGRRDRRRKKRSDRSGDEGHVLAVEGAPRATRKGRPASDKKKEAGTPSRERPAGRWCSVHNTSLHDLADCRAVKNLAERTRKWEEDRRQERREGKSPAVPSGKRRSEAKQKAPAVDIDDGDDDLGFQEPGATIATVDGGACAHVSRRSFKAMKRELLAMAPTHEAMRRARWSEVALTFDQTDHPPCIARGGQVAMVVSPTICNVKLGRVLIDGGAALNILSPAAFDAIKAPGMVLQPSQPIIGVTPGHTWPLGHIDLPVTFGGSANFRTERVNFDVADLSLPYNAVLGRPALVKFMAAVHYAYLQMKMPGPGGPISVRGDLKVALACMEQRADHLAAATKPEGGDERLGTSAPTAPRQRIATCDEVPEDALVSFLRANADVFAWRPADMPGVPREVIEHRLAVRPGARPVRQKVRRQAPERQAFIREEVARLLEAGFIREVIHPEWLANPVVVPKANGKLRMCIDYTDLNKACPKDPYPLPRIDQIVDSTAGCDLLRFLDAYSGYHQIRMAREDEEKTAFITPVGTYCYTSMPFGLKNAGPTFQRTTRISLGSQIGRNVEAYVDDLVVKTRNQETLLLDLAETFENLRSARIKLNPDKCVFGVPAGKLLGFLVSARGIEANPEKIRAIERMRPPSKLRDVQCVTGCMAALSRFISRLGEKALPLFKLLKRSGPFTWTEEAEHALTQLKAYLSSPPVLVAPEPNEPLLLYLAATPQVVSAALVVERDENNPHFVHPHSVLTWPGSERGGEAPESDGGLRPLTTGVGPLPACQTVLSAPDPQEGPKATAGRPHLTPFDPEANPVLTRPGKEQGEEAPEPNGGLRPLTTGVGPLPACPTMPGAPDPQDGPEATEGRPPLSSSDPEVIGTEDKCAPKGHLNEERPGDTAPSKEDRPHRRVQRPVYFVSEALRDAKTRYPQAQKMLYAILMASRKLRHYFQAHRVTVVTSYPLGQILHNREGTGRVVKWAIELSEFDLHFEPRHAIKSQALADFVAEWTPAPETVSIPEASTDPSQLPRTTHWVMQFDGSLSLQGAGAGVTLTSPNGDVLRYLVRLDFRATNNMAEYEGLLAGLRVAAGLGLRRLLVLGDSQLVVNQVCKEYRCSDPQMDAYVRQVRRMERHFDGIELRHVPRRDNMIADELSRLASSRAQTPPGAFEERLTQPSARPDPLGETDAPDRPPRPVGVQASGPEGSAPSSLRLIAWISEIQTYLTDKTLPEDREGSERVQRISKRYVLVEGTLYRRAANGILLKCIPQEQGVELLADIHEGECGAHSASRTLVGKAFRQGFYWPTALNDAVDLVRRCRACQFHAKQIHQPAQALQIIPLSWPFAVWGFDILGPFKRAPGGFEYLYVAIDKFTKWPEAYPVVKIDKHSALKFIKGITARFGVPNRIITDNGTQFTSELFGDYCEDMGIKLCFASPAHPRSNGQVERANAEILKCLKTKTFNILKKHGDSWIEELPAVLWANRTTPSRATGETPFFLVYGAEAVLPSELTLRSPRATMYCEADQDQLRRDDLDYLEERRRRAALRATRYQQSLRRYHQRHVRARSLCVDDLVLRRVQTRAGLSKLSPMWEGPYRVIGVPRAGSVRLATGDGTELPNPWNIEHLRRFYP

SEQ ID NO: 133341 - protein, 84 aa, Oryza sativa
  unsure (1)..(84): unsure at all Xaa locations
  Clone ID: PAT_MRT4530_35220C.1.pep
MRAMPSPPPHGPMSLMASRCYCCSSPPSPSPKQRRDAESKQQQQQHIXAGGARLAVTTRRALLAAAIVVVGSGTAGRARATEEG

SEQ ID NO: 133342 - protein, 53 aa, Oryza sativa
  unsure (1)..(53): unsure at all Xaa locations
  Clone ID: PAT_MRT4530_35221C.1.pep
MSATMDIDGAADSAAAGGGRHIENELXRTAESDDTVDLFYVYPGDLTGALALR

SEQ ID NO: 133343 - protein, 213 aa, Oryza sativa
  Clone ID: PAT_MRT4530_35222C.1.pep
MSLMASRCYCCSSPPSPSPKQRRDAESKQQQQQHIRNLSPPPSIFVSRGGARLAVTTRRALLAAAIVVVGSGTAGRARATEEGGGGEGEGVVGAIKSIFDPNERTKSGKVLPKAYLKAAREVVRTLRESLGEDDGGDVAKFRRGADAAKESIREFLGGWRGQQAVAAEESYVALEKAIRSLAEFYSKAGPFASLPKDVKDKILANLNTADAFL

SEQ ID NO: 133344 - protein, 175 aa, Oryza sativa
  Clone ID: PAT_MRT4530_35223C.1.pep
MELSVVGGEPLLAVAMQQLLDLDLPDELERQLNPPTRAYVRDRRAMANTPMDVKELRASGALVLAVDMPGVAPADVRVEVEDGNVLAISGERRRPAGDGDDGGEGVKYLRMERRMGKFMRRFPLPESADLDGVRAEYKDGVLTVTVDKKPPPEPKKPRVVEVKVAGAGEPKGKGK

SEQ ID NO: 133345 - protein, 98 aa, Oryza sativa
  Clone ID: PAT_MRT4530_35224C.1.pep
MSGDQADNVGCDNSTFVENVLDNAVYSTTSYSSAHSSIVPEEYFIEDKIYSREYRGMYSGRVKFPRSKVVEVSLVEKSAALMKLEMARIPVRQITHFG

SEQ ID NO: 133346 - protein, 535 aa, Oryza sativa
  Clone ID: PAT_MRT4530_35225C.1.pep
MAPGSSSTSSPGGKAAAVGGEAGKEGGAVPSPAAAASDHAPVAPDGSPGGGALPAGGEAGKEDEGVASTGSRTPLAPGSSSGEGALGECGEARNDDEAPAPAPRLIASPTAAAAAAATTDYPHEGGEAEQEGGNASSPCEEQEEDDDDDEEEEAPTHLPFAPSSESEVNNLVLEVLLANLHVRQFLRAKEICIGIIGNLACHKSLANAITSHNGLIATVVDQLFLDDPGCLTETFRLLSTIFQSNASMSWAEALLPDEILSRIMWIIGNTVHATLLQKILEFLSALVDDQDVITILIEPLIKVGLVDCAIGLLLNELEKSMDGNNLDRSDSLDSILRLIEELSAIDNCSKVMSSNDQLIKALSNIVKLPDKFEIRYNYVPDEHADHVIYSQTMLQVEGYCASVVIIIANVLSDGEHLTPILSHDLPLLEGLFDILPLISDDNEARNAFWCILTRLLQQVEEGETITNSSKLEQFVSIFLAKFTLMKDDIERHGIQTEADSSVEGVSLKNGLRTSVSFIRKFNPDTIMPFMEIHRS

SEQ ID NO: 133347 - protein, 614 aa, Oryza sativa
  Clone ID: PAT_MRT4530_35226C.1.pep
MAPGSSSTSSPGGKAAAVGGEAGKEGGAVPSPAAAASDHAPVAPDGSPGGGALPAGGEAGKEDEGVASTGSRTPLAPGSSSGEGALGECGEARNDDEAPAPAPRLIASPTAAAAAAATTDYPHEGGEAEQEGGNASSPCEEQEEDDDDDEEEEAPTHLPFAPSSESELPDDKSTVDPSFTISLIRKLVPQGPDVDKELSVKQGRTEEKDASSDVGEPKQPHDKDLWDNEGCKLWDLSVIEPQAELMVNNLVLEVLLANLHVRQFLRAKEICIGIIGNLACHKSLANAITSHNGLIATVVDQLFLDDPGCLTETFRLLSTIFQSNASMSWAEALLPDEILSRIMWIIGNTVHATLLQKILEFLSALVDDQDVITILIEPLIKVGLVDCAIGLLLNELEKSMDGNNLDRSDSLDSILRLIEELSAIDNCSKVMSSNDQLIKALSNIVKLPDKFEIRYNYVPDEHADHVIYSQTMLQVEGYCASVVIIIANVLSDGEHLTPILSHDLPLLEGLFDILPLISDDNEARNAFWCILTRLLQQVEEGETITNSSKLEQFVSIFLAKFTLMKDDIERHGIQTEADSSVEGVSLKNGLRTSVSFIRKFNPDTIMPFMEIHRS

SEQ ID NO: 133348 - protein, 136 aa, Oryza sativa
  unsure (1)..(136): unsure at all Xaa locations
  Clone ID: PAT_MRT4530_35227C.1.pep
ARLATDLSVHSLCAFRVIDAPGDYPMIAVQDTGAENLPAEREIFLLVVIQMRQIVGGYLGSAVISAXALIPVLLLESHTVATLHAGMIAGVTGMRXVLXPAVAYIACGLGKKATLLXENTVLXFGLGSGSFGVSLL

SEQ ID NO: 133349 - protein, 115 aa, Oryza sativa
  Clone ID: PAT_MRT4530_35228C.1.pep
EWPHPCGLRHPEGVRTPLGAPPPWWPVSPQPWTSFCSRVHKLSYLSSPMELWLSGPVLDRVPFHCVRFPCNVEPQCLVSWCVKRFIVVDQHAKSIMNNGPLFIVSPQLKNIKRCF

SEQ ID NO: 133350 - protein, 36 aa, Oryza sativa
  Clone ID: PAT_MRT4530_35229C.1.pep
EIWIHESLWSACRDLSHPNAGTMSLSSYIARHVVGN

SEQ ID NO: 133351 - protein, 999 aa, Oryza sativa
  Clone ID: PAT_MRT4530_3522C.1.pep
MGLSTLALTLAPASLRGFDREAVQVLGLTQLLVAFGTGENRREEQVLFDVVDIPYNYNAIFGHATLNKFEAISHHNYPKLKTLGPAGVIVVKGLQSSASSKGDLAIINRAVHNVEAEPHDRAKHAPKPAPHGKIIKMQIDDANPTKLVSLGGDMGEEEAANILEGPDEVGGVSTDLIMHHLAVKPDAKPRKQKLRKMSADRQEAAKAEVQKLLKAGVIQEIDHPEWLANPVLVRKSNGKWRMCVDFTDLNKACPKDDFPLPRIDQLVDSTAGCELMSFLDAYSGYHQIHMNPADIPKIAFITPFGTFCHLRMPFGLRNAGATFARLETFDNLRAAGMKLNPEKCVFGIRAGKLLDFLFSERGIEANPEKIDVIQQMKPPSSVREVQKLAGRIAALSRFLSKAAERGLPFFKALRGAEKFNWTPKCQAAFDELNQYLQSPPALISPAPGSELLLYLAASLVAVSAALVQETESGQKPVYFVSEVLQGVKTRYIEMEKLAYAPGHVDKSFEAKEDGMKRYLEAVRFMEKYFTGITVEHLPRGQNEEADALAKSAAYGGPHSPGIFFEVLYAPSVPMDSLEVMAIDQANLGEDPCDWRTPFVKYLETGWLPKDEAEAKRLQLRAARYKMVSGQLYRSEVLQPLLRCISFAEGEEMAREIHQGLCGAHQATRIVASKVFRQGVYWPTVLKVCVEQVKKCESYQRHGRSQTVPQYKLRPISPIWPFARWGLDIIGPFPVARNGYKFTIVAVEYFSRWVEAEPLGAITSATIQKFVWKNIICRFGVPKEFITDNGKQFDSDKFREMCEGRNLEIRFTSDAHPQSNGAAERINGKILEALKKRLEGAAKGKWPEEMLSVLWALRTTPTRPTKFSPFMLLYGDEAMTPTELEANSPRVMFSGGEEGRKVSLELLEGVRVEALEHMRKYATGTSATYNKKVRPTELLPGHLVLTKKANPIAIGKLESKWEGPYLIKHKSRTGSFRLVTLEGEEFDHSWNAASLKRFYV

SEQ ID NO: 133352 - protein, 116 aa, Oryza sativa
  Clone ID: PAT_MRT4530_35230C.1.pep
MLQLQLPKCHSYVSMQGKARDYHESKHGKMGRHKRCLQEGNDAHRCRHLGFHLGLHRVTNVKAVPLSVVLARMCVCNRPSPMQHVEVTYFRAPLPPAFSNKMELLSSLTEPGSYRI

SEQ ID NO: 133353 - protein, 996 aa, Oryza sativa
  Clone ID: PAT_MRT4530_35231C.1.pep
MSDGKQGSKPPFTKQAPGQPSEVDDGNIIPVTLDKLTPEQRQEFEQMLSNVKNKYLDSFKQTRSGVVIQKYKLKVVSADEPETSSSKGGKAKGAKGDKGDGGDAGDKGVLVNTLTNMIKSVVGGIIAEHQDKGPVFLPEGVFPPYRNLVTGNKQHASNVPPGQPMALVSAPGPCASSSAQRQTVNPYLLTREQPQHAGQNINRLTQEQIAAMFRLPQPVIEPVHSTPIRQQPHSPQVQYQTGGSPQHQLLPQFNQFDPVQQQIQGVSQQKPWADMIADVMKEQFGLKPKDTGNLYWHHYPEWFERVPLPGRYKVPDFSKFSGQDNVSTYEHVSRFLAQCGEASAIDALRVSLFPLSLSGSAFTWFSSLPYNSVHSWADLEKQFHSYFYRGNHEMKIYDLTAVRQRHDETVQDYIQRFRYMRNRCYSLALTDPQLADLAFQGLIAPIKEKFSYQDFESLSHLTQKVTLYEQRWVKNSGKEEKYDFDITKADKIFDLLLLEKHIQLPVGHVIPSVEELGKRKYCKWHNSSSHATNDCKVFRQQIQFAIEGGKIKFDDSKNPIKVDGHPFPIYMVHTSGRAADEGKHRGSQLNSARIINKYQKRHDKQQERYLEEKDGGFDPHWDCEFFRFCWNEGMRLPWIEYCPGCSDNSGNSSQSYNRGNRLIQKRVPVHQRLGPMHQARSEEEGEDRKSQWCPSGIFTKNQKRRVQRMRNKERFQEPAEFEAKQADVDNVEEASARLILSPKQAIFEKPEGTENRHLKPLYVNGFVNGKPMPKMIVDGGAAVNLMSYATFRKLGKNIDDLIKTNMILKDFGGNPSETKEVLNVELIVGSKTVPTTFFVIDGKGSYSLLFGRDWIHMESPNYYFEGVVEGSNFYTKDTVDDLDGKLGQCFISADDLEEIDISPGDRPRPTFIRCTAPDVEEETFSVVFSFFVDVVEDDTAINLQVVFLRQSRELAARMPSALYWLQIKTLVILTLRSSLDYSRMNVLHDVDEGKYI

SEQ ID NO: 133354 - protein, 123 aa, Oryza sativa
  Clone ID: PAT_MRT4530_35232C.1.pep
MARIPLLLALLLAVSAAAAAQVGGNRGHGPLVGGWSPITDVGDPHIQELGGWAVERHASLSSDGLRFRRVTSGEQQVVSGMNYRLVVSASDPAGATASYVAVVYEQSWTNTRQLTSFKPAAAH

SEQ ID NO: 133355 - protein, 460 aa, Oryza sativa
  Clone ID: PAT_MRT4530_35233C.1.pep
MGIIFKIDFEKAYDRVNWNFLYEVMRKKNFSDEFIGWVKKITKGGRMSININGEQGPFFKAHRGLRLGDPLSPLLFNLVDDALAAVLESAKTNGVSEGLVSNLVLGGLIHLQYANDTAHFIKNGEDNIRVLKFLLFCFEEMSGMQINYQKSEVYVLGVSKEEELRVANMLNCKVEATVSDLWENETWNLEFRRNLDDNRGQDLIRLRGLLNEYNLDGGANRVVWPYTSNKIFNVRSMYRLITFGGVKDSEMMSIWKSKIPQKIKHFLYMAGIGRLPYATQLVKRKWRGGDELSSFACCVIRDALGLDKRPSNISEGLDLVKGKKINRVWVVLLATRTTYIFDPARDSKIIHAFNKTALAAKLNWGDEIRRIKGSKMKRKRKLEESDEVKRIRKAINEMLVDKAPGPDGFTGKYFKSCWDIIKDNIVAAFNALHDARSTHVNLLNSANVILILKKDGAEGI

SEQ ID NO: 133356 - protein, 58 aa, Oryza sativa
  Clone ID: PAT_MRT4530_35234C.1.pep
GGTLRRLAAAARILRRRRRGLLPRPMWRFARFIAGPTRLPLYLAAVSLLPAAWDFAPP

SEQ ID NO: 133357 - protein, 416 aa, Oryza sativa
  unsure (1)..(416): unsure at all Xaa locations
  Clone ID: PAT_MRT4530_35235C.1.pep
ISQGRVSINIPFFKTHRGLRQGDPLSPVLESAKTNGVLEGLVSNLVPRGLTHFQYADDTIFFXKNEEYNIRVLKFLLFCFEKMFGMKINYQKSEVYVLGVSKEEELRVANMLNYKVGSLPFTYLGLPMVVEKIXMKDLCYITQKVDKRLXSWKSGYLSYGGREIKINSCLSSAPMYAMGFYHLPEKFHKIMDSIRSRFYXVGFGEKKKYHMLKWKALIRPKEFGGFGFLDTRVMNLCLLSKWIMRIENGDHDMCLQVLRRKYMVQPRTWNLEFRRNLDDNSGQDLIRLRGLLNEYNLDGRADRVVWPNTSNKIFNVRSMYRLITFGGVKDSEMMSIWKSKIPQKIKHFLYMAGKGRLPCSTQLVKRKWRGVVYKTLSFVQKWCIMLKGEEQGILEGWCDRLLEKMGQLKTNRLPED

SEQ ID NO: 133358 - protein, 47 aa, Oryza sativa
  Clone ID: PAT_MRT4530_35236C.1.pep
GPIVHDTPYHILCKAEYGSNGDVPVDFYHHYKEDPIFVTYMNMDALQ

SEQ ID NO: 133359 - protein, 63 aa, Oryza sativa
  Clone ID: PAT_MRT4530_35237C.1.pep
CPRYLNPDGIAWSGKIISPASSCMVSLNHVRVGGFPCPLKPPHKKKKKGGPLCRKNALKCVRA

SEQ ID NO: 133360 - protein, 59 aa, Oryza sativa
  unsure (1)..(59): unsure at all Xaa locations
  Clone ID: PAT_MRT4530_35238C.1.pep
WSSCRRRRRRREEERGHXEHGSIIXXAVGXGVGXXVGIXXXXSXXTXXATGDGARRRRW

SEQ ID NO: 133361 - protein, 35 aa, Oryza sativa
  Clone ID: PAT_MRT4530_35239C.1.pep
HAYALDHLRAVPRYALTYRARSVQISTVRPSSVCL

SEQ ID NO: 133362 - protein, 2027 aa, Oryza sativa
  Clone ID: PAT_MRT4530_3523C.1.pep
MAEQGKAHDLSPSVSGDDGEPNPRRRARTPPPPPRQSPKQGEALERVDKSVASPVAGDAGERRDGERRLLVYGDGSTPQGALQAAGALLRHPPVVHDPESPAQRWLEDVANLVMTAQQRLGAGGRSATTKTSGAATTGSVSSRRRARRAAAAARHSAATPSSTPPTREDQHGEPDARIDIERRRNNRRTPRATEGASSSRVSPRHGREDQPSVPPAGGVGCRAFVASLRNVRWPPRFRPTITEKYDGSVNPTEFLQVYTTGIEAAGGDDRVMANFFPMALKGQARGWLMNLPPASVHSWEDLCQQFTMNFQGTYPRPGEEADLHAVQRGDDESLRSYIQRFCQVRNTIPCIPAHAVIYAFRGGVRHNRMLEKIASKEPQTTAELFQLADRVARKEEAWTWNSSGSGVAASAAPGSAAQTGRRDRRRKKRSDRSGDEGHVLAVEGAPRATRKGRPASDKKKEAGTPSRERPAGRWCSVHNTSLHDLADCRAVKNLAERTRKWEEDRRQERREGKSPAVPSGKRRSEAKQKAPAVDIDDGDDDLGFQEPGATIATVDGGACAHVSRRSFKAMKRELLAMAPTHEAMRRARWSEVALTFDQTDHPPCIARGGQVAMVVSPTICNVKLGRVLIDGGAALNILSPAAFDAIKAPGMVLRPSQPIIGVTPGHTWPLGHIDLPVTFGGPANFRTERVSFDVADLSLPYNAVLGRPALVKFMAAVHYAYLQMKMPGPGGPISVHGDLKVALACMEQRADRLAAASKPEGGDERLGPSAPTAPRQRIATCDEVPEDALVSFLRANADVFAWRPADMPGVPREVIEHRLAVRPGARPVRQKVRRQAPERQAFIREEVARLLEAGFIREVIHPEWLANPVVVPKANGKLRMCIDYTDLNKACPKDPYPLPRIDQIVDSTAGCDLLCFLDAYSGYHQIRMAREDEEKTAFITPVGTYCYTSMPFGLKNAVPTFQRTTRISLGSQIGRNVEAYVDDLVVKTRNQETLLSDLAETFENLRSARIKLNPDKCVFGVPAGKLLGFLVSARGIEANPEKIRAIERMRPPSKLRDVQCVTGCVAALSRFISRLGEKALPLFKLLKRSGPFTWTEEAEHALTQLKAYLSSPPVLVAPEPNEPLLLYLAATPQVVSAALVVERDEDNPHFVHPHSVLTWPGSERGGEAPESDGGLRPLTTGAGPLPACQTVLGAPDPQEGPEATAGRPHLTPSDPEANPVLTRPGKEQGEEAPEPNGGQRPLTTGVGPLPACPTMPGAPDPQDGPEATEGRPPLSSSDPEVIGTEDKCPPRGHLDEERPGDTAPSEGDRPRRKVQRPVYFVSEALRDAKTRYPQAQKMLYAILMASRKLRHYFQAHRVTVVTSYPLGQILHNREGTGRVVKWAIELSEFDLHFEPRHAIKSQALADFVAEWTPAPETVSIPEASTDPSQLPRTTHWVMQFDGSLSLQGAGAGVTLTSPNGDVLRYLVRLDFRATNNMAEYEGLLAGLRMAAGLGIRRLLVLGDSQLVVNQVCKEYRCSDPQMDAYVRQVRRMERHFDGIELRHVPRRDNMVADELSRLASSRAQTPPGAFEERLTQPSARPDPLGETDAPDRPPRPVGVQATGPEGSAPSSLRLIAWISEIQTYLTDKTLPEDREGSERVQRISKRYVLVEGTLYRRAANGILLKCIPQGQGVELLADIHEGECGAHSASRTLVGKAFRQGFYWPTALNDAVDLVRRCRACQFHAKQIHQPAQALQIIPLSWPFAVWGLDILGPFKRAPGGFEYLYVAIDKFTKWPEAYPVVKIDKHSALKFIKGITARFGVPNRIITDNGTQFTSELFGDYCEDMGIKLCFASPAHPRSNGQVERANAEILKGLKTKTFNILKKHGDSWIEELSAVLWANRTTPSRATGETPFFLVYGAEAVLPSELTLRSPRATMYCEADQDQLRRDDLDYLEERRRRATLRAARYQQSLRRYHQRHVRARSLCVDDLVLRRVQTRAGLSKLSPMWEGPYRVIGVPRPGSVRLATGDGTELPNPWNIEHLRRFYP

SEQ ID NO: 133363 - protein, 398 aa, Oryza sativa
  unsure (1)..(398): unsure at all Xaa locations
  Clone ID: PAT_MRT4530_35240C.1.pep
MERNWMYGNSCRNQEYRDGVVEFMNIADNDKRTRMSEYMLCPYANCKNEKMFSHSSGVQSHLIHRGFVEHYSCWTRHGEQETPDVVIDEVPDISNEPNXDGMFVPSPLGADTIDFDXSQMLHDIEXANHNERDFKKFSKLWYXFEMPLYLECKPKHTKLSSILELMKLRVSNSRSDKSXKLFEFLNDLLPEGNEIXTTYETNQVLCPLDLEVRRIHAYQNNYILCYKKHTNLDAFPVCGASRYMRDISEDEGRKSKRGGLTNVMWYVPXAKRMKRMFMNPKQXLVHWDVEEFKVDGKVRHPTNLVXGKXDTINREFTKDPRXAMCMDVINPFDDLSSCHSTGQMLLGNYKLPPWXCFKRKYIMLVMLVQGSRXPGNNIDIFIELIINEKEPIVNVHTK

SEQ ID NO: 133364 - protein, 53 aa, Oryza sativa
  Clone ID: PAT_MRT4530_35241C.1.pep
IRAILVYLERNNYRRGVFFDISTTTQGTFLVYPRHVWINEYSAFSLWHGRKVN

SEQ ID NO: 133365 - protein, 150 aa, Oryza sativa
  unsure (1)..(150): unsure at all Xaa locations
  Clone ID: PAT_MRT4530_35242C.1.pep
LATYALRDCKGIGHELHTRRLHRLRHWPIAVTNRNRGAGEAVSGRGYREHRLGDXSTWLQRHVGSSKNWDKIRSCLADAVMCRSVHGADNPVPHVIYETAYAMEQATSILLLLRYACSGSSRRQARWTTRRGAAAAAGRPKGREWRRPRH

SEQ ID NO: 133366 - protein, 94 aa, Oryza sativa
  Clone ID: PAT_MRT4530_35243C.1.pep
FWDITKPVPWFDYPGPLFCSKVAPQGLFFSSALACSNVHPRPVSPTMGVAAFFLFKTGCPRFFPFAKHCCVVLFSPWGRCVFLSPFCTFLYQCL

SEQ ID NO: 133367 - protein, 64 aa, Oryza sativa
  Clone ID: PAT_MRT4530_35244C.1.pep
MAGQLGDGRFILVDIKKEMHEVHNEMENDVRGPYKVKKKALQVLQNPKPFDGKQVDEHTISSIN

SEQ ID NO: 133368 - protein, 327 aa, Oryza sativa
  unsure (1)..(327): unsure at all Xaa locations
  Clone ID: PAT_MRT4530_35245C.1.pep
MLFAGAPRTALVTGLCSAPQLVATVDLRPAGRGPLLRRHGGSGSGGGRREQQQGNRLTPSGHGGLGRWVVPPVAGLRQRLGSCRRLVGRRVRCAATAPAPMGEKTEYRDGPVERAFMGLFARKMEKYAVVSSSGGKGKEKKKEKSSRSVWEWDYESFVDVSRRVMVGRTRAQQQEAVREVLLSMLPPGAPEQFKKLFPPTRWACEFNAALTVPFFHWLVGPSEVVEVEVNGVKQKSGVLIKKCRYLENSGCVGMCVNMCKIPTQNFFTNEFGLPLTMNPSSISTPSAPICPKLQTXLEEDPASKQPCYANLCSISTPSAPICPKLQT

SEQ ID NO: 133369 - protein, 214 aa, Oryza sativa
  Clone ID: PAT_MRT4530_35246C.1.pep
MALVAQASTIAQFAGVDAYGLIKMIAEAAQTVRRNRATCLQLARRLKMIGDLLKQLHGAQLMQQPETRNPVEQLEETLRRAYLLVRSCQGRSYVYRCFMGGRHADELREVQSEIAFYLQLFPLVSYVDATLNWVRHLNKADPSCKEAPLVRPYFVPFVILSWDGSCLAVVQKVHLGIVYTWLYISYLNIYSTICRSFMCLQELNCCLADIYFLR

SEQ ID NO: 133370 - protein, 497 aa, Oryza sativa
  Clone ID: PAT_MRT4530_35247C.1.pep
MELSLLMTVGPTFNVVGNLIDRHQQIKCNLQLERTNQDNSQNSRWGERINDQIPQGSQAKKKQTIKGRSTQHVNPCNYALAVVIDLEKEHNATSSQQNPVRYSNSERDLNAVVDEYASRAPLQEEAGEVLLWKDDFDFFKDAETTVDLPEGVQPLNTDEAEKTDDFMSKVASCLNIKRGSQLISQAEKDLLTRSCDWGRFRVPTPYNQLSLRLSNLLLGSQYQPGDEPEAGVYDLPRHIATLAQQFINSTTKRWVEVHGHVQTLHNIYADECPLQLNEGPGLVTIATWVNHFFGNDPVSIQSFLPDGFVDPTKPLYEDRGFHVELRNDRPTAIMCDLEMSYVYTYPLVVYRATFIAAWLCTYCVPVEEGKFIRPEVFAMVVEIAQGSRRAIGITSMAFLYRALNNIHHYVAARKALASDCSLFVLDHFIMVLDPPCIVDFRNYRSKDFKSEHELFWDFNQDGSGLRSLDFLGRSGIRFQTVNQEFEMFDNRAFMCNG

SEQ ID NO: 133371 - protein, 89 aa, Oryza sativa
  Clone ID: PAT_MRT4530_35248C.1.pep
RRPGRTTTSDGGAILGSQRRGDRGRGWGGQRGAAAKRARRRAVGGRRRPRDHGTARRSSGDDRRTRRGGRARSRLAKSGGGVRRGRYGL

SEQ ID NO: 133372 - protein, 175 aa, Oryza sativa
  unsure (1)..(175): unsure at all Xaa locations
  Clone ID: PAT_MRT4530_35249C.1.pep
HFISFQVHSSRGFCTGHAAQGNSSTVQSSPAGAMLPGSELSQQACILAASTAQPALQGTAHTQAEGGSGFSHSFSEQHTGXSSTDSAQLHTGGVLTGNSSSALLTVAATTSRRALGRXTSGTQLGLVKKPSRGTYEYLQSVQDLMVXTGSRSRGSKLTYACMQRHSSSIVHLIIH

SEQ ID NO: 133373 - protein, 785 aa, Oryza sativa
  unsure (1)..(785): unsure at all Xaa locations
  Clone ID: PAT_MRT4530_3524C.1.pep
MPGPAGVIVVKGLQPSAASKGDLAIINRIVHNVEAEPHDRAKHAPKPVPHGKIVKMQIDDADPTKLVSLGGDMGEEEAKNILXDLIMHHLAVKPDAKPRKQKLRKMPADRQEAAKAEVQKLLKAGVIREIDHPEWLANPVLVRKXNKACPKDDFLLPRIDQLVDSTADCELMSFLDAYSGYHQIRMNPADIPKTAFITPFGTFCHLRMPFGLRNAGATFARLVYKVLYKQLGRNVEAYVDDIVLKSSKAFDHASDLQETFDNLRAAGMKLNPEKCVFGVRAGKLLGFLVSERGIEANPKKIDTIQQMKPPSSAHKVIVPSQYPLGEIIRDKEVTGRLSKWEAELSPFDLHFVARTAVKSQVLADFVAEWTPAFAPEPEPIEQPWVMYSDGSWSHKGAGVAAVLTLPNGVPIRYAARLQFDTTNNAAEYEAILLGLRKAKALGIRRLLIRTVSKLVVGHVDKSFEAKEGMKRYLDAVRSMEKCFTGITVKHLPRGQNEEVDALAKSAACGGPHSPSILFEVLYAPSVPMDSLEVLEIYQVKLGEDPYDWRTPFVKHLETGWLPVDEAEAKRLQFRATKYKMVSGQLYRSGILQPLLRCISFTEGEEMAKEIHQGLWGAHQAARTVASKVFRQGVYWPTVLKALRTTPTRPIKFSPFMLLYGDEAMTPTELGANSPRVTFSGGEEGRELSLELLEGVRVKALEHMQKYATGTSATYNKKVRPTELLPGHLVLRKKANPIAVGKLESKWEGPYLIKYKSRTGSFRLATLEGEEFDHSWNAASLKRFYV

SEQ ID NO: 133374 - protein, 82 aa, Oryza sativa
  Clone ID: PAT_MRT4530_35250C.1.pep
MANNNPWTSDVILVMTAWVVTTYNSITSALSKARAMDKAAEILARMLKNGVTYADMPDCITGKGKKQPYREINSEYVEPLSI

SEQ ID NO: 133375 - protein, 42 aa, Oryza sativa
  Clone ID: PAT_MRT4530_35251C.1.pep
MGGWQGSGGHRRCCEDVDRGWVGPAVGANETIGLGGLTGAVF

SEQ ID NO: 133376 - protein, 174 aa, Oryza sativa
  Clone ID: PAT_MRT4530_35252C.1.pep
MCCKLRPHPVWPGELHENFIGELLTRAATSWSRRMKARRASKIRRRTSSRGGGVRLRMALAASPPPAKRPRAGGRRGSRAASSLSPRARCRPPHLLPLRTRSPLAGGARAGVPSVRGAVDEDGEDQRRRRVTSSSASVPNAAAAARAGPLRRRRLQSASLARGLVESPSCRWSP

SEQ ID NO: 133377 - protein, 98 aa, Oryza sativa
  Clone ID: PAT_MRT4530_35253C.1.pep
EYPRVRAPGRQKLGRSQILRCPLRPESAIEKIEGSGPLVFIGPLKPRRSKIYAPVSARYNVQTEKVSSLIRPEAKNDDCVRLTPVDDAQDVARLIGIV

SEQ ID NO: 133378 - protein, 58 aa, Oryza sativa
  unsure (1)..(58): unsure at all Xaa locations
  Clone ID: PAT_MRT4530_35254C.1.pep
XPTSVLDVXWXTIPXXLGXLMXMAFEXYVEVLGIASWRXATRPRASXLARLGMEARER

SEQ ID NO: 133379 - protein, 127 aa, Oryza sativa
  Clone ID: PAT_MRT4530_35255C.1.pep
GSRWAASSEQKARLDEVMKQAALSLQSDELLNKAAAGKLQAGNYYFYVQGDLYNYTKGPLTTTTDVQQQYSGSVLIDYTNPLKPSSNNKAGTGSFTMAGDGSVEAAVVYFGKNDKGDQDCAWLIGLT

SEQ ID NO: 133380 - protein, 54 aa, Oryza sativa
  Clone ID: PAT_MRT4530_35256C.1.pep
TPACCPDATAAAAMAESFRHTLTLLLRSTPMNCSLLLCMLRRSVGSAANLASCR

SEQ ID NO: 133381 - protein, 323 aa, Oryza sativa
  Clone ID: PAT_MRT4530_35257C.1.pep
MHQLDRLCYAVVVLVVIGATVAEAATGTFIYAGCSPSKYQPGTPFEGNLNSLLASIANAAPNGGYNSFTAGSNGTGDGAAAYGLYQCRGDLGNADCAACVRDAVGQLNEVCAAAYAASLQLEGCYVRYDSSNFVGQPDNAMVYRKCSTSTSGDGDFLKNRDAVLAALQGGLANGYKVSSSGNVQGVSQCLGDLAAGDCTTCLAQAVGQLKGTCGTSLAADVYLAQCYVRYWANGFYFRPSQGTPNSANYSQDDVGRTVAIIVGILAGLAILVVFISFLRKSCKPLDLEIRSFSFSPRILCDKLRMTCKESFACMTLARASYRL

SEQ ID NO: 133382 - protein, 33 aa, Oryza sativa
  Clone ID: PAT_MRT4530_35258C.1.pep
MVPFVMSGNRSCQIYTNNFLDRSADKAFTSTKA

SEQ ID NO: 133383 - protein, 609 aa, Oryza sativa
  Clone ID: PAT_MRT4530_35259C.1.pep
MGSDEDELLDDEEYYYYCSDGECSGGGSGSDEDEEFGGRGSDEGCEADEVVSTREQRYVVLTEDDIRERQEEMISRVSAIFSVPRESACVLLRHYKWSISKLSDDWFADEENVRRSVGLPSNVVHVPDCPELTCGICFEGCAANAMSCAGCSHFYCHECWEGYISAAVNDGPGCLVLQCPEPSCDAIVLEDMINSLTKDEDKVKYARFVLWSYIGVNNKCAEEAHRPVSCDTVSKWILKNSAESENMNWLCLGAWSDHGDGTGGFYACNRYQSAKMGGMYDEAEARRERAKNSLERYMHYYERWASNQTSRQKAQADLQKVENEDLTKLSDVVGIPETQLKFIPEAWSQIIECRRVLKWTYAYGYYLHNKAKSDFFVYLQGEAESGLERLHKCAEKDMREFLPTADSTQPSLSLQDFGEFRVKLSGLTSVTRNYFENLVQTLEAGLQDVRATDQSASVSTSSSKKPPTNTKGKSGRTVETNSYEKAHFALCASEHRAYRTMTPHGSDDRSSDDGRSWSRAHFSLQVGSFFRRRMEAPADGGYLLGGQPARCSGGHSTGSNGEGFGGHPATSPSSSSWVSLPREHRRVSVQIAFFVASFKLAVASHHVFY

SEQ ID NO: 133384 - protein, 183 aa, Oryza sativa
  Clone ID: PAT_MRT4530_3525C.1.pep
MEGLGRRGRNGEYLRLLDTHDGDGANNESVPTTGSHPVSREKEILQMKKKLAVFHLAVSMDGNKVKTIGKKGEHGSEASKERKRNRGSRNGRGQLGGIDEDTVKHSCSQTVTGNCGRHCRTTVGCPVRTDKPSQACSQRMDGLLFFPAHHTLVEWTMSTKPMAIFTRAEGNLSLQQHISPREA

SEQ ID NO: 133385 - protein, 289 aa, Oryza sativa
  unsure (1)..(289): unsure at all Xaa locations
  Clone ID: PAT_MRT4530_35260C.1.pep
MSCAGCSHFYCHECWEGYISAAVNDGPXCLVLQCPEPSCDAIVLEDMINSLTKDEDKVKYARFVLWSYIGVNNKIKWCPAPDCTCAVEFLGDGNYDVSCKCKFSFCWNCAEEAHRPVSCDTVSKWILKNSAESENMNWILAYSKPCPKCKRPIEKNQGCMHMTCTPPCKFEFCWLCLGAWSDHGDGTGGFYACNRYQSAKMGGMYDEAEARRERAKNSLERYMHYYERWASNQTSRQKAQADLQKVENEDLTKLSDVVGIPETQLKFIPEAWHRRVLXWTYAMVLSTHK

SEQ ID NO: 133386 - protein, 109 aa, Oryza sativa
  unsure (1)..(109): unsure at all Xaa locations
  Clone ID: PAT_MRT4530_35261C.1.pep
SSXXFXXXTXAXXPQXRXXWLLLPQXRRRPXPGXXXXPXRXXXSIRRXTKXXGXMLXNXEWLQXVXNXIMXXNTIXEXETKCSNEXNVEXXIXNXXXXXXGGELQVXKF

SEQ ID NO: 133387 - protein, 116 aa, Oryza sativa
  Clone ID: PAT_MRT4530_35262C.1.pep
ETPKTPGTAQWVNAHQWPKGKEMSQCCAPASNCFPWERMCVVNAKMAIYAVICSPKKKKSLGKGFQKQQTRGKMELRVWCQLPESMPTIGADPRPIILVECAITTEMRQIHKPWDS

SEQ ID NO: 133388 - protein, 309 aa, Oryza sativa
  Clone ID: PAT_MRT4530_35263C.1.pep
MHSLRRALRVPTSASGLRRLSSNRRAPPPSRAAAGAATATTGDDEWNDAWETSWLPGDSPTSSPAPAAPWESPTSGAATVPAISAEVDPDTKAFVADMDERWAERRAASRRPRPAPRAEGAGGAAAKKAQADEYRARKQRVHAALWVKEIEKMEEARLGGGGGGADDIDRLLDSCSEIFDSGNTDFGDSKIPSTAEIKTKPDGWETTSRGQDGSIWDISQREDDILLQEFERRIAFSKQQIASFIKTHIFSRRRPIDGWKYMIEEIGPNARKGKGSVQRLPSVTDPATQPYREEPPAIASGSPFRGNRP

SEQ ID NO: 133389 - protein, 113 aa, Oryza sativa
  Clone ID: PAT_MRT4530_35264C.1.pep
MHGAQLLAGHGKIQVDLVKLDWVSFTLSHPPNDEIMTLGAARGTFIQWPKHSIQINITPRLAPSSRPPLRHPPPTLVSAPPVVEEGDEDLQLQYGTDFGADGTEVDSRPHLPP

SEQ ID NO: 133390 - protein, 89 aa, Oryza sativa
  unsure (1)..(89): unsure at all Xaa locations
  Clone ID: PAT_MRT4530_35265C.1.pep
VGFVIRVXLVPPNEPRRDPLLSPVTPSPLFTAMLHRSVLFRFCEASRWGLSVCLSFCPSFEARGTSPHGFSADPWCPAPFFVVMLGYFR

SEQ ID NO: 133391 - protein, 42 aa, Oryza sativa
  Clone ID: PAT_MRT4530_35266C.1.pep
MGRVKSCRQDFFMPMPYNHYTCHVVITPRVRPTEQSHPNYRG

SEQ ID NO: 133392 - protein, 58 aa, Oryza sativa
  Clone ID: PAT_MRT4530_35267C.1.pep
DWYIIFSVKKAFVYSHKFIFYDIALGPYNYFNPSRQFFLCFVVSLRIVLENVHFNALC

SEQ ID NO: 133393 - protein, 61 aa, Oryza sativa
  Clone ID: PAT_MRT4530_35268C.1.pep
PVNVANLHKLGHSCKRIKQLERACISCQREVLARDLDDVSSEMNDDEHHRRRLLRSQGGPR

SEQ ID NO: 133394 - protein, 1224 aa, Oryza sativa
  unsure (1)..(1224): unsure at all Xaa locations
  Clone ID: PAT_MRT4530_35269C.1.pep
MVRLLGLRSLSFGPEESPREITVAGGGGGDAAAHPVGSSGWLVRFFDSAFFCEWIAVSYLYKHDHQGVRDYLCNRMYTLPLPGLEAYLFQVCYMMVHKPSPSLDRFVIDTCSKSLRIALKVHWLLAAELELEDTDDLDGIDRVQEQCQAAATVQGEWPPLVRPAPPSPIASPRGNPMLSRIRSSKQRLLSLASSPSLGLSPPAGASNAAAAEDVGGSGVKQPATPSSEDNKLLKRLSIGPKVRDAASFFRRSVEKDDEQDKEGFFKRLLRDSKDKEEEDGDKEGFFKRLLSKEKENEEEEGDRDGFLRRLLRDSKDEDMELTPSSEGLLKRLFRDKEDRQGDDEEKEGFFRRIFKDKNEERRESLHGRHGDEERVGKSLEDDDKEGFFRKIFKDKNEERKDGGHSKQQDDKEKTAGNIEDDKRDGFFRQLFKEKNEEKKEGTTPNKKEEDDKGHRTMDDENFFRRLFKDKNEEKKGAAHDRNDDDKCEEGDKENFFRKLFKDKHEERRSDGLDKHDDDGXFRVHPEDAKSGHIESCQPNXNSVPTGNGDKQSGKPPLPNNAIAELRKGCYYASLELVQSLCDTSYGLVDIFPMEDRKIALRESLTEINSQIASTEKNGGVCFPMGKGIYRVVHIPEDEAVLLNSREKAPYLICVEVLKAEAPSHSKGSSDVNKLSKGGIPLANGDVQLPKPPPWAYPLWSRHETQNYETDRMLKSTSQVIDQAMAQLWEAKVKFVNVSFSVEKLGRSRSVAISDSGHRSRQSTADSNEPSGDSQPIADQPIEWVKVTLSAVPGVNMDDVDDNEPTRKKDHRRVPSTIAIEEVKAAALKGEAPPGLPLKGVGQNAQNIESKATDGGDPKPTDALAGEIWAVKRERIRRSSVHGKLPGWDLRSVIVKSGDDCRQEHLAVQLVAHLYDIYQEAGLPLWLRPYEVIVTSAYTALIETIPDTASIHSIKSRFPDITSLRDYYVAKYEENSPNFKLAQRNFVESMAGYSILCYLLQVKDRHNGNLLIDEEGHIIHIDFGFMLSNSPGGVNFESAPFKLTRELLEVMDSDAEGTPSEFFDYFKVLCIQGFLTCRKHAERIILLVEMLQDSGFPCFKGGPRTIQNLRKRFHLSLTEEELLAPSKNQFAYIIVKISGIAQAIGACNATCIAFLPFDEVENCIVVGSYLVEVILGGLLLVIAYVWEFSPSFVNITPLENWKYLRVLPSGNVSGHISESVEIINS

SEQ ID NO: 133395 - protein, 56 aa, Oryza sativa
  Clone ID: PAT_MRT4530_3526C.1.pep
KCLITPRTSVNSVRSVTSQAETTESVDASTEQMRRTVVSYTMNTDRAYTASTTTLH

SEQ ID NO: 133396 - protein, 75 aa, Oryza sativa
  Clone ID: PAT_MRT4530_35270C.1.pep
SYSLGNPPGWSVRHCWDGSPSPSLFIQCSGQRSEAYLLLSVILELVAPECCMMGAFLCHLLTRLSNVNSGPFGAL

SEQ ID NO: 133397 - protein, 100 aa, Oryza sativa
  Clone ID: PAT_MRT4530_35271C.1.pep
FVNVSFSVEKLGRSRSVAISDSGHRSRQSTADSNEPSGDSQPIADQPIEWVKVTLSAVPGVNMDDVDDNEPTRKKDHRRVPSTIAIEEVKVQLIYELIFK

SEQ ID NO: 133398 - protein, 302 aa, Oryza sativa
  Clone ID: PAT_MRT4530_35272C.1.pep
YNYLFDDEDTPPNPKKEGGSTHASVRRSSVHGKLPGWDLRSVIVKSGDDCRQEHLAVQLVAHLYDIYQEAGLPLWLRPYEVIVTSAYTALIETIPDTASIHSIKSRFPDITSLRDYYVAKYEENSPNFKLAQRNFVESMAGYSILCYLLQVKDRHNGNLLIDEEGHIIHIDFGFMLSNSPGGVNFESAPFKLTRELLEVMDSDAEGTPSEFFDYFKVLCIQGFLTCRKHAERIILLVEMLQDSGFPCFKGGPRTIQNLRKRFHLSLTEEQCVSLVLSLISSSMDAWRTRQYDYYQRVLNGIL

SEQ ID NO: 133399 - protein, 250 aa, Oryza sativa
  Clone ID: PAT_MRT4530_35273C.1.pep
FLSGGTNRGNRVCILAFEVANTIAKASNLWRSCSDTSIKELKEEILRSDGVQILVSSNSSELLYIAYVDKRDELDIFSREVIRFGNLCKDPTWHNLGRYFNKLTTDFAPQDHSKEHMETTIQQLINLAQNTSELYHELHALDRFEQDFQRKFHEEESVPAARRESVMILHSELKRQRKLVKTLKKKSLWARTLETIVEKLVDIVVFLHKQIRDSFSEACSVGADLFNSKQAQNKRLGFCGLALHYANIIN

SEQ ID NO: 133400 - protein, 55 aa, Oryza sativa
  Clone ID: PAT_MRT4530_35274C.1.pep
SLSSATESHYHAAPDRTPSAFVDLLYRPSQVGAPWASTTADIMELADARLVVARH

SEQ ID NO: 133401 - protein, 50 aa, Oryza sativa
  unsure (1)..(50): unsure at all Xaa locations
  Clone ID: PAT_MRT4530_35275C.1.pep
MSPSLTWRPVDLWYKRDPXGEDLGHRILPPTHPPQPTKPEPTGAKSPGDL

SEQ ID NO: 133402 - protein, 64 aa, Oryza sativa
  unsure (1)..(64): unsure at all Xaa locations
  Clone ID: PAT_MRT4530_35276C.1.pep
XPSASCQASTPRGLTHQARLGSSFHQPGYIWAQGHHALPVHLLPPCITSSHTXHTRGSEQHSPQ

SEQ ID NO: 133403 - protein, 539 aa, Oryza sativa
  Clone ID: PAT_MRT4530_35277C.1.pep
MAARPIAKAAHELPSLYRLALKTPEILVGAGKSGQADNEALDLFDGMPPKNQVAWNKALGMLVGAGRIERALSFFHEMPGKNAASYATMIGGLSRAGAASVARRLFDDLPLGKHNVFTWTAMVSCHVRNGEPREAVQLFAALYGELYERGVLPNAHTLSSLLKACVALQSLAMATQLHALALKLLEEENTDNTFVWNGLIDVHAKVGALCDAEKVFDGIRFKDASSWTIMMDGYSRHKLIDKALYLFRSMKNKDAFTWNVIISCLWQNRRGEDALRLFIDLLRLGDRDNGGAKPDASIYTTVLHICSVLSLLTLGRQVHARAVKSGLSRSHVFVGNSLMNMYSCSGSTADLEKVFDEMAARDVVSWNTAIQGLGQNGRGRRALAFAERALALGLYNGSTFVAILASCSHAELVAEGMAYFDAMEVEYGVERAFEHYVGAIDLLGRAGRLRDAHGLLLGMPFAPSALAWTTLLHCCLAHKNCSIGSVAARELRALQPDGGGWNYERLLRGCGGSGGGGGGGGEAGGGKSSEHLPGCSWVV

SEQ ID NO: 133404 - protein, 54 aa, Oryza sativa
  Clone ID: PAT_MRT4530_35278C.1.pep
CAFGPVRHSPTVGGPCLGGRRIPWAVPARHEVPIGPCRPDGWWAVPGSMSWLSL

SEQ ID NO: 133405 - protein, 180 aa, Oryza sativa
  Clone ID: PAT_MRT4530_35279C.1.pep
GRSRRWQQRQRPPTAPTPAPASWGRQRPRAEEGGACERGGDSSRRGGDPRRRGGDPKRQRRGGDIGGATATTGEVAGQRWRRSREREEGSSRARGEGGLHDGSGGGCGTVDTSVDQELEARPVRHLRQPPSHLAHPVPKQHRRSCHSHQLQLTLSFDWNDADSRCIGTSSIDSKCTIWDV

SEQ ID NO: 133406 - protein, 1367 aa, Oryza sativa
  Clone ID: PAT_MRT4530_3527C.1.pep
MAAEEGAEPSVPVAEDGGAPYASAPAPSLPPSAPATSVQVPNAADMAKAAVAARALQTRAEILSTSQLLVPQAAPSQPAAAPTALAAVQAQINPDPETQTEANMEAMRQNMTRLQDMLRQMQEQQQAYEAARRSKAQLQPFLQQLSQPHNISGTAPSAHPEGNTSQGAPGWLPSNQPGLGALLWSQVPQFDFINAAQAPTVRPQAPTPDFGANQAPNQVAMTWSQPTFDPSMAAQQASPIGAGQPNAMAQPHAQAMILPFATLYPQQGVVNRAGGEKVLPLRRGIKTCPIPPQFKFPPVPRYSGETDLKGEEDSKRRQAIQAEYDKASVAATQAQAQVQVAEPPPLAVRQPQLAIQGQPLRQGQAPMTWRKFRTDRAGKAVMAVEEVQALRKEFDAKQASNHQQPVRKKQCQNIRQRGSVQDPRPQQGAAVEASCEAAQKQAPPAEQRQDAQRRVIQVITRADPLIQLSKRQKKMQLRTVHNITLAGEGAPQYLNQQISFGLGDAEGVMFPHQDPLVISAEIAGFEVRRILVDGESSADVIFAEAYAKMGLTTQAITPAPALLRGFGGEAVQVLGQAQLMVAFGTGENRREEQVLFDVVDIPYNYNAIFGRATLNKFEAISHHNYLKLKMPGPIGVIMLVSLGGDMGEEEAENILEVLKKNIDIFAWGSDEVGGVSTDLIMHYLAVKPDAKPRKQKLRKMFADRQEAAKAEIQKLLKAGVIQEIGHPEWLANPVLVRKSNGKWRMMPFGLRNAGATFARLVYKVLYKQLGRNVEAYVDNIVVKSRKAFDPASDLQETFDKLRAAGIEANPEKIDAIQQMKPPSSVREVQKLAGRIAALSRFFSKAAERGLPFFKTLQGAGKFNWTPECQAAFDELKQYLQSPPALISPAPGSELLLYLAASPVAVNAALVQETDSGQKPVYFVSEALQGAKTRYIEMEKLAYALVMASRKLKYYFQAHKVIVPSQYPLGEILWGKEVTSRLSKWGAELSPFDLHFVARTTVKSQVLADFVAPEPEPVEQLWVMYSDGSWSHKGAGIAAVLNSPNGVPIRPFEAKEGMKRYLEAVRSMEKCFIGIMVEHLPRGQNEEADALAKSAACDGPHSPGIFFEVLYASSVPMDSLEVMAIDQVKLGEDPCNWRTPFVKHLETGWLPEDEAEAKRLQLRATRYKMVSGQLYRSGAEPLGAITSAAVQKFVWKNIVCRFGVPKDFITDNGKQFDSDKFREMCEGLNLEIMFVSVAHPQSNGAAEYTNELGANSPRVTFSGGEEGREVSPELLEGVRVEALEHMRKYATGTSATYNKKVRPTELLPGYLVLRKKANPIAVGKLELKWEGPYLIKHKSRTGSFRLATLEGEEFDHSWNAASFMRFYV

SEQ ID NO: 133407 - protein, 75 aa, Oryza sativa
  Clone ID: PAT_MRT4530_35280C.1.pep
MAAVGCMVGRAHAGTGETDRWIGCGCGAPVDKEAVGPRAASWLTGATWAARGGRRGDAEMDGGRWPSSPEFDAEV

SEQ ID NO: 133408 - protein, 88 aa, Oryza sativa
  Clone ID: PAT_MRT4530_35281C.1.pep
MDPNGFDFFSQDPISSAAGNIWSSQPSASGPSHGSVPRAGVDTLDLNTQAASGQEFPHLHEYEDEPLVEDSNMNFFRDDLANALFNGL

SEQ ID NO: 133409 - protein, 118 aa, Oryza sativa
  unsure (1)..(118): unsure at all Xaa locations
  Clone ID: PAT_MRT4530_35282C.1.pep
XXXALXXXXGXRNRXXXXXXXXWMXVXDGXXXIRXSTSKXGXXVXXGSXAXTTXTSXXTXRXNSFIXSFXXKEDLPTLDIVHHSRRXFAIGSKXQNIXTNRAXRIXHXLMXASCXPKA

SEQ ID NO: 133410 - protein, 567 aa, Oryza sativa
  Clone ID: PAT_MRT4530_35283C.1.pep
MERHQLLLLPGCLLLYLGAIATLAAADVAIPAGGQPPGCRTRCGDVDIPYPFGIIDPDRPDCAYSRGFQLNCTSVNGAARPMFHNIEVTNISVPNGKAWMKTNISSQCFDPETNRTLYDDIWNSFRYSPYWLSNEDNKLIVVGCNSLAYMRSTSFITRQSMQYVIGCSSTCDNVDLKNGSCSGAGCCQADIPKGIRYYQGYFNANYNTTAIWRSSPCNYMVVMETSAFNFSTTYVDSTVFSDTYKGMIAHQSAEALAYLHSWASPPILHGDVKSSNILLDGDFTAKVSDFGASILSPTDDAQFVTFVQGTRGYLDPEYMQTWKLTDKSDVYSFGVVVLELLTRKKPLNFDGLEDEKSLSVRFLSAVKENKLEEILDDQIKSEENMEILEEIAELARRCLEMCGENRPSMKEVAEKLDSLRKVLHHPWALHNLEEAESLLGESSIVSSEVVTQGCIIVKIQRRWRQEITGGRDLGVLPRLLDAVVAAPPFLPPTFAMLPSATLPSRKAGAGSAVPNSYSPASPGPFEVMGIVDTLRALFIHTTCTTDEEKYTHYFPIVESYRKAHEMK

SEQ ID NO: 133411 - protein, 78 aa, Oryza sativa
  Clone ID: PAT_MRT4530_35284C.1.pep
MAAATGDEEDVEETQGYRIGRMATREAKDGYGRCRSPGLAMGDGRRIALHLLIDFVVDCQHPKTAEDFLKLSPSPKVD

SEQ ID NO: 133412 - protein, 62 aa, Oryza sativa
  unsure (1)..(62): unsure at all Xaa locations
  Clone ID: PAT_MRT4530_35285C.1.pep
MSTLSRKLLMRHFMRLWPDPTAGISCAPHDNNIMLWNSRLFXPDDTPGDGGTFKLTLPSTED

SEQ ID NO: 133413 - protein, 773 aa, Oryza sativa
  Clone ID: PAT_MRT4530_35286C.1.pep
MERHQLLLLPGCLLLYLGAIATLAAADVAIPAGGQPPGCRTRCGDVDIPYPFGIIDPDRPDCAYSRGFQLNCTSVNGAARPMFHNIEVTNISVPNGKAWMKTNISSQCFDPETNRTLYDDIWNSFRYSPYWLSNEDNKLIVVGCNSLAYMRSTSFITRQSMQYVIGCSSTCDNVDLKNGSCSGAGCCQADIPKGIRYYQGYFNANYNTTAIWRSSPCNYMVVMETSAFNFSTTYVDSTVFSDTYKGMVPTVLDWTVEWKKCEEAKENRTSYACVSSNSYCVDATNGRGYRCKCSDGYKGNPYITDGCEGPFPAILIPLPLQIKRCRKSIIFLSLFLADIDECQDAHPCTGICINTQGSYTCTCQRGKHLIDGVCKQSSSSWIIPVIGGSIGVVTLVTIVTCAYLIQERNKLHSIKQKYFRQHGGRLLFEEMKGTAFKIFTEEELQKATNNFDEKKILGHGGHGTVYKGFLNGNTEVAIKRCKTIDEQQKKEFGKEMVILSQVNHKNIVKLLGCCLEVEVPILVYEFIANGTLFHLIHDGHGRHISISTRLQIAHQSAEALAYLHSWASPPILHGDVKSSNILLDGDFTAKVSDFGASILSPTDDAQFVTFVQGTRGYLDPEYMQTWKLTDKSDVYSFGVVVLELLTRKKPLNFDGLEDEKSLSVRFLSAVKENKLEEILDDQIKSEENMEILEEIAELARRCLEMCGENRPSMKEVAEKLDSLRKVLHHPWALHNLEEAESLLGESSIVSSEVVSTGNFSIEKKSLIGLESGR

SEQ ID NO: 133414 - protein, 117 aa, Oryza sativa
  Clone ID: PAT_MRT4530_35287C.1.pep
HKIACYRRIFTDTKQGVFDKVLHGMLEFDADPWTNVSEGAKDLLRKVLVRDPNPRLTAHQVLRVFSPSPSSSLTDCNSHSRQSNTTILLAAYPWLEMCSNGPGKQLNSTLNTCTRGK

SEQ ID NO: 133415 - protein, 234 aa, Oryza sativa
  Clone ID: PAT_MRT4530_35288C.1.pep
MDPKLLRAAGRGDCAVLEALLLGAAAAAAATPNQQVAIDVGSGQQSPLLLDAATTPQGDSALHVVAASGDGEGSLRCARTIYSHAARLLDRPNARGDTTLHCAARAGNAAMVRCLLDMAREEELAGSAGRVAEVMERQNGRRETALHDAVRLGDKQLVDHLISVHPRLARLPGGDGMSPLYLAVSLGHDHIAEALHQQGDELSYAGPAGQTALHAAVLRGAEFSFIYAIHVTQE

SEQ ID NO: 133416 - protein, 73 aa, Oryza sativa
  Clone ID: PAT_MRT4530_35289C.1.pep
GGPFGGPPPWPLPPQGGPLLPQGHPVGPPNPGGGGVTPPPYPGWVGGPPTLLGGPPPPPGGGPPFFPPPPPPF

SEQ ID NO: 133417 - protein, 1080 aa, Oryza sativa
  unsure (1)..(1080): unsure at all Xaa locations
  Clone ID: PAT_MRT4530_3528C.1.pep
MGERLGGGERAPSGMNRWSEQGAVNRAGGEKGLPLSGGIKTRSIPPQFKFPPVPRYSGETDPKEFLSIYESAIEAAHGDENTKAKRPGESIREYMRRFSQARCQVQDITEASVINATSAGLLEGELTRKIANKEPQTLEHLLRIIDGYARGEEDSKRRQAIQAEYDKASVATAQAQAQVQVAEPPPLAVRQPQPAIQRQPPSQGQAPMTWRKFRTDRAGKAVMAVEEVQALRKEFDAQQASNHQQPVRMKIAGFEVRRILVDGGSSADVIFAEAYAKMGLPTLALTLAPASLRGFGREAIQVHGQAQLLVAFGTGENIREEQVLFDVVDIPYNYNAIFGRASLNKFKAISHHNYLKLKMPGLARVIVVKGLQPSAASKGDLAIINRAVHNVEAEPHDRAKHAPKPAPHGKIIKMQIDDADPTKLVSLGGNMGEEVAATILEVLKKNSDIFAWGPDQVGGVSTDLIMHHLPVKPDAKPREQKLHKMFADRQEAAKAEVQKLLKAGVIQEIDHPEWLVNPVMVRKSNGKWRMCVDFIDLNKACPKDDFPLPRIDQLMDSTAGCELMSFLDAYSGYHQIHMNPADIPKTAFITPFGTFCHLRMPFGLRNAGATFARLVYKAYVDDIDVKSRKAFDHASDLQETYDNLRAAGMKLNPEKCVFGVRACKLLGFLVSERGIEANPVKIDAIQEMKPPSSVREVQKLVGRIAALSRFLSKTAERGLSFFKTLRGAGKFNWTPKCQAAFDELKQYLQSPPALISPAPGSELLLYLIASPVAVSGALVQETDSGQKPVYFVSEALQGAKTRYIEMEKLAYALAKALGVRRLLIRTDSKLVAGHVDKSFEAKEEGMKRYLEVVRSMEKCFTGITVEHLPRGQNEEADALAKSAACGGPHSPGIFFEVLYAPSVPVESLEMKQKQSACNSEPQGIRWSQAEHLGAITSAAVQKFVWKNIVCRFGVPKEFITDNGKQFDSNKFREMCEGLNLEIRFASVAHPQSNGAVEPQMAMTPTELGANSPRVTFSGGEEEREVSHELLEGVRVEALEHMRKYATGTSATYNKKVRLMXAVAWSSCPKEERGPDSRWQA

SEQ ID NO: 133418 - protein, 53 aa, Oryza sativa
  unsure (1)..(53): unsure at all Xaa locations
  Clone ID: PAT_MRT4530_35290C.1.pep
TKLNRLELPNXLGNSXYSKCQVGXLNFKLHGMFDSYGMERTTXTPIKLVNYXQ

SEQ ID NO: 133419 - protein, 100 aa, Oryza sativa
  Clone ID: PAT_MRT4530_35291C.1.pep
SAECEASIEQQGWAKVLPGSLASKRNMFRVVHHCWPQGHALPLHSRALTARALHLGVMSLCPRLSTWSRAACDKGRECVRCRSIKRMRGSGKYVRAGTAG

SEQ ID NO: 133420 - protein, 560 aa, Oryza sativa
  Clone ID: PAT_MRT4530_35292C.1.pep
MTTCADDQTGCAFFAPLLSSKGAEVVILVAGDEAEEQQPAPVLTSKPPGRLAKAVNEAWSVSLGVAFPVTPSMFTCSARGEARSILGLAFPMILTGLLLYLRSMISMLFLGHLGGLALAGGSLAIGFANITGYSVLSGLAMGMEPICGQAFGAGNYALLGVTMQRTVLLLIAAAIPIGGLWVQMRPLLLFCGQDAAIAAVAETYIFASLPDLVLQAFLHPVRIYLRTQSINLPLTVCAGLAIGIHLPINYVLVVVLGLGVKAVALASVLANLNLVLFLLAYIFLKGVHKRTGGFLLSAESFRGWGELISLALPSCVSVCLEWWWYEIMILLCGLLLNPQATVASMGILIQTTSLIYIFPSSLSFGVSTRVSNELGAGQPEEASRAATVGLVLGFGFGAFASAFAFLVRNVWASMFTADPAIVALTASVLPILGLCELGNCPQTTGCGVLRGSARPKDAASINLRSFYLVGTPVALVMAFWFHLDFRGLWFGLLAAQATCTVRMLLVIGRTDWAAEAKRSKQLTGAGAANMESDDRVAADEKSRLPVDTDVERSSDHTDRC

SEQ ID NO: 133421 - protein, 94 aa, Oryza sativa
  Clone ID: PAT_MRT4530_35293C.1.pep
GGPLPFSFLGPVAGFPPALAPVPFFYHPPCRNVECLGNLLGWPPGGTRPCRWGGPPFSWFGPFLVFVMLTSDAPWGLLWGFSFASQKKKNLKTP

SEQ ID NO: 133422 - protein, 217 aa, Oryza sativa
  Clone ID: PAT_MRT4530_35294C.1.pep
PRRRRWSGGDGDGQRRRSGGDGNRKLDRVKGSEAEGIRTDGSGSPQLPVTPMAASPPHSGDGAKGMKMGELNQGRGGGAQGTGMGMGLHRRRSAELVRFLAATSAVLIYPQRQSREPENPLRGRLEPLRTTDEATFLCAPHGLAPMAGSGGGSVAQSDDSLVATRVAIPTSLSNELCYYCYFSATITSFPSTTALLPSVDEVELVVYHLREPEKQEM

SEQ ID NO: 133423 - protein, 149 aa, Oryza sativa
  unsure (1)..(149): unsure at all Xaa locations
  Clone ID: PAT_MRT4530_35295C.1.pep
MDFSTPPPPAATATRTGRSATATASSTSAAGSSTRPTSRTLLPPLRLQALPGPPLARPRGRRRRRRRFVYKRRRVLHLDDLTSTSSSILAIDIGAXASSATAWRPCVSLRCGVAMPVSPSSPPPPCVRSPPPPFWPRRLPRRTRPLSSH

SEQ ID NO: 133424 - protein, 314 aa, Oryza sativa
  unsure (1)..(314): unsure at all Xaa locations
  Clone ID: PAT_MRT4530_35296C.1.pep
MRIAVTGATGYLGSRLCGALADAGHAVRAFALRSAGGGGGGGDVEAGLLPASVELAYGDVADVESLAAAFDRCDAVFHVAAAVEAWLPDPSIFITVNVGGLENVLKAARRTPTVKKIVYTSSFFAIGPTDGYVADETQMHQRKNILARRYEKSKVLXADQIALQAAAEGMPITIVYPGFMYXPGKLTAGNLVSRILIERFNGRLPGYVGHGHDRESFCHVDDVVAGHVAAMEKGREGERYLLTGENTSLVQIFDMASRITNTKAPRFHAVRVLRHQWAYSCEKAKKELGYSPRSLTEGLSETLLWLKDSEMIRF

SEQ ID NO: 133425 - protein, 457 aa, Oryza sativa
  Clone ID: PAT_MRT4530_35297C.1.pep
MRIAVTGATGYLGSRLCGALADAGHAVRAFALRSAGGGGGGGDVEAGLLPASVELAYGDVADVESLAAAFDRCDAVFHVAAAVEAWLPDPSIFITVNVGGLENVLKAARRTPTVKKIVYTSSFFAIGPTDGYVADETQMHQGKTFCTEYEKSKVLADQIALQAAAEGMPITIVYPGFMYGPGKLTAGNLVSRILIERFNGRLPGYVGHGHDRESFCHVDDVVAGHVAAMEKGREGERYLLTGENTSLVQIFDMASRITNTKAPRFHVPLWLLEIYGWISVLVSRITGKLPFISYPAVRVLRHQWAYSCEKAKKELGGTTGQAGGWPRRKAWKPALTSGGWIGGGGGDSTMGGGMRVVVTGATGYLGGRLCAALAAAGHAVRAFARRSSDASGLPASVELAYGDVTDEGSLATAFDGCDAVFHVAAAVEPWLPDPSVFTTVNVRGLENVLKAAKRTPN

SEQ ID NO: 133426 - protein, 138 aa, Oryza sativa
  Clone ID: PAT_MRT4530_35298C.1.pep
MANQTNPIDLPAREPREHDQIGWFTGTKDHAQEQNLATSFFSPCSGNNEQQQDVSATLGSVGKTLDTNTQTKTNPPPVNRDRPIKSFFYIKPDAGIIDFLSSIWLTQTCKELSAKDIFALATSTTTPTIEIEPNVPLR

SEQ ID NO: 133427 - protein, 362 aa, Oryza sativa
  Clone ID: PAT_MRT4530_35299C.1.pep
MGSSGYQPSEASSSSLYESSGAARSPLTDPVFQRDLLQALDNLRRVIAAVEQSYGVEAHLQQAGMLPKSASCNDADAGGGDARGTGGDSPRVSPIYILWFRSRNLVVFVVSAMAVDRASASARLCLRGLLCCLGLNILRKIHEYKLQSRRKEMDNRFLNSQCLWKSNFRSTKNVRMGFLEKWFVFGVPGFAACLSFLEIVMLIKNKIEGKDVVNYESFFRSSQFLVWMVVGLVSVHGPWFVFYNPIMCFCWILKILLEIPHLQYKLTVLKAVLYFKEIISFSMAIVFGLFVVVSTVVDQPHNKREMNSIEDPLVPDDEKAEAEVTNLACLTANAKHQFLEITIVKLTGYKFLHRMYICDGMV

SEQ ID NO: 133428 - protein, 242 aa, Oryza sativa
  Clone ID: PAT_MRT4530_3529C.1.pep
MVMDELPTICIFVGFFVEGGRGNAAAGWAAWSSNVSTGGGRVSASGVMRQHVVGRGQVNPAMPHCHLDRRRTAARSASALCLMRLSTKTRRQREGDARRHCRRRKVAAACRFIFSERLAGHPWGERMGGDGRNAGSDLHAPPIRTPVLPAHALPSSCPLEPLEFALLLLPSPFCFANICNPKQGKVSPGSSELLIAIIGTFNAEKENKAETKSSKLVIERLKSFSALIFGAKIQKSRQCIFL

SEQ ID NO: 133429 - protein, 844 aa, Oryza sativa
  Clone ID: PAT_MRT4530_352C.1.pep
MSTSTNLSAAPSAEYAEHLSNLVAIPSLSHENHYFLGLVGSLDPTEFINGETNRIPFRLANPDLGHWKNTFKSWPSLEKTSPEKSWITWFKRISASKRVHWDEIGIGQALDLTIANSAKDEPLMAAGTYFWSNTINTFLFNQGPMTPTLIDIIMITSLDITSSANPMSLNTKNQYDFKTKSIGGWSGYVAAYMGQGPPSITEAEFPRLEPIEDSDGEERTHRRCTSFGEYASTLTDAGAKLSAELLKDWFCSFYEGFQKEARDWFLYEDSTLLENPLDFRFEDINHDRYQKTREIYSTAISTCVLPIGIHQGRNVQVSYEFYHPMSSARQFGMGQLPIGLFFADKIQCRGEISSTLMMNRLLNLQGPPLGSIENIELARFRSRNFDRWWGEWKLHLFHQPASMYMTGLFPDVVPQTTESPPHQSNSGKDIKYAPGLIPNGGGPSPPFIGYDAPKTSALLQGLIREPADAGKKRKTRSSAVDTLAPALNKKTKSKKTKPVDDLHALDPSIEQALDEEEIEEDIDQAAAEISDIEKTPSASPKQTPPTPFAPAHFSRMYNSQKKKTAVRKKLAAPTLKPAPPPPPPPSPPVQLESGNRTPSAVDSHNVEEEEQPAAPTIPVLADLFSFDIKDYLDETKEDTTSKAIAPLSDDVKKTLEDISHRLEASLDNLVTNCGSIRARFTYIQALLSDELADVLTPAVYLEQHQFKLEKARQRLADRRERKDIEATIQHNRQLVHVEKSKLDQLSEGSIKSNIDRLEARKIDLMAQLQECNAELDMEHKKLADLPKSIEDQKARLKSAIKNVADLTKSLRVIPGTDAQHAQAIEEVEQIRQRAISAIQRYLSQ

SEQ ID NO: 133430 - protein, 134 aa, Oryza sativa
  Clone ID: PAT_MRT4530_35300C.1.pep
MGSSGYQPSEASSSSLYESSGAARSPLTDPVFQRDLLQALDNLRRVIAAVEQSYGVEAHLQQAGMLPKSASCNDADAGGGDAYAAVTRRNSRLMRRLESQLAWDGRRFTPCFSDLYPLVSFEKFGGVRGLCDGG

SEQ ID NO: 133431 - protein, 993 aa, Oryza sativa
  Clone ID: PAT_MRT4530_35301C.1.pep
MASTLPQLLLILLLLTLYCSIQTVANTTIPVHCHPHQAEALLQLKSSFINPNLSSWKLNTDCCHWEGVTCDTSSGQVTALDLSYYNLQSPGGLDPAVFNLTTLRNLSLAGNDFNRTVLPSFGFQRLTKLLRLDLSEAGFFGQIPIGIAHLKNLRALDLSFNYLFFQEPSFQTIVANLSNLRELYLDQVRITSEPTWSVALAHSLPLLQNLSLSQCDLGGTIHRSFSQLRSLVVINLNYNGISGRVPEFFADFFFLSDLALSNNNFEGQFPTKIFQVENLRSLDVSFNPTLFVQLPDFPPGKYLESLNLQRTNFSGNMPASFIHLKSLKFLGLSNVGSPKQVATFIPSLPSLDTLWLSGSGIEKPLLSWIGTIKLRDLMLEGYNFSSPIPPWIRNCTSLESLVLFNCSFYGPIPSWIGNLTKLIYLELSLNSLSGRIPKLLFAHQSLEMLDLRSNQLSGHLEDISDPFSSLLEFIDLSYNHLTGYIPKSFFDLRRLTNLVLQSNQLNDREDGYPFHYFPTIKYLGLASCNLTKIPGALRDIKDRLNLSSNRLHGNVPIPLTTTRDGGVLLDYSSNSFSSITRDFGSGMVPSCLIQNGDVTILKLRENNFHGVLPKNIREGCMFQTIDLNSNRIIGKLPRSLSKCKSLEVLDMGNNQILDSFPSWLGNMSNLRVLILRSNQFYGSVGLPTESDATSKYFSGLQIIDLASNNLSGSLQSKWFENLETMMINSDQGDVLGIQGIYKGLYQNNMIVTFKGFDLMFTKILTTFKMIDLSNNDFNGAIPESIGKLIALHGLNMSRNSFTGRIPSKIGKLVQLESLDLSLNQLSEAIPQELASLTSLAILNLSYNNLTGQIPQGPQFLSFGNRSFEGNAGLCGRPLSKQCNYSGIEAARSPSSSRDSASPRTRTRQKQRRTGEQRSSRINSLLQRIHDDRMITETCPDLQVATLQFQPVAFSLRRVASGSGPHWNWGLGIGVYGRLVEWWWESKWGEASTR

SEQ ID NO: 133432 - protein, 95 aa, Oryza sativa
  Clone ID: PAT_MRT4530_35302C.1.pep
GAEGNRPHRARCANVGPVQPSNSDQVNTSSLLVRRGSKQHLRLNRRDVIVLLSGVHRSPATTFSRHGAVVLLHNGRTWGGVKSKDDRTSGRVGLA

SEQ ID NO: 133433 - protein, 62 aa, Oryza sativa
  Clone ID: PAT_MRT4530_35303C.1.pep
ALCSFQTSLFLGWTGSFFPCVLFGHNVEALREDIPWTTPCTCHAVCVEGGIALAILTVIFPL

SEQ ID NO: 133434 - protein, 61 aa, Oryza sativa
  Clone ID: PAT_MRT4530_35304C.1.pep
TNRRKFPWHPSGLAVILALAMTETSVHCRPKRSKLSAVNHSSAGEPRAECIVRLSLIRFTS

SEQ ID NO: 133435 - protein, 30 aa, Oryza sativa
  Clone ID: PAT_MRT4530_35305C.1.pep
GVDGRVCGCSLPLEVAHVSTSSRSRCPCRH

SEQ ID NO: 133436 - protein, 119 aa, Oryza sativa
  Clone ID: PAT_MRT4530_35306C.1.pep
MAGGKEPIEVKFRLFDGTDIGPSKYDPSTTVSALKEFILARWPQDKEITPKTVNDLKLINAGRILENNRTLAESRVPVGEVPGGVITMHVVVRPPQPDKNSEKQLANSPKQNRCGCTIL

SEQ ID NO: 133437 - protein, 43 aa, Oryza sativa
  Clone ID: PAT_MRT4530_35307C.1.pep
GSKHEHKSESQGGKKPKLSWSEKFNTLSSVVVFCGCYKNSPQI

SEQ ID NO: 133438 - protein, 98 aa, Oryza sativa
  Clone ID: PAT_MRT4530_35308C.1.pep
LVYCVSPSHSSHHQSRAWPPAAPRGRWPWISRAPPPDPPPSPPAAAAHRRHRRLAAHRSRRGNRARSPSPSTSTSPPPPPPPPRANSGLVPRGWTRRW

SEQ ID NO: 133439 - protein, 77 aa, Oryza sativa
  Clone ID: PAT_MRT4530_35309C.1.pep
GCGWWTKGGGGTRGKGIRAAANAMRDEVRRVRVRIRVSQTVGARITGYPAEVTAVLILPYPRSKPGNRGNRAVTGGK

SEQ ID NO: 133440 - protein, 159 aa, Oryza sativa
  Clone ID: PAT_MRT4530_3530C.1.pep
MTFCVQLDVRDRSPPSDQAHGLHPPKSRPIDGDVILSPDSFPRIPSARSPPTPRDCGLRSPSSRPYPAPPEKTLSLPPPAPLPSPILRSGSAAADQATLVAVGSGALPPLHRHVKGASSSSLSDPLENPRILWTPSNKELPRHLHATRSLSCRCSPYHT

SEQ ID NO: 133441 - protein, 68 aa, Oryza sativa
  unsure (1)..(68): unsure at all Xaa locations
  Clone ID: PAT_MRT4530_35310C.1.pep
NGDGTKTNEGKKDITLDMGLLVVGTKDRXEIYERLRKLMEEKKQNDDIIMLIDEVSMLIGASASERVI

SEQ ID NO: 133442 - protein, 225 aa, Oryza sativa
  Clone ID: PAT_MRT4530_35311C.1.pep
MTSLEDENDGSADLPIPRPVAAELCKYDGGLIWGTNWLRIRHAAEKWNKKVGRGNNSLIRTNLARCEMNEVSGNVVGDGGVVPWPLCSHPDYTIDRASASFVTRRLNDWDWGPVSNGGNRRLATRIESSVQQAAMSLYSNAHEEHELGNLLLTVQEKTKLLLLFSHDLIREQNNQNVGMGQKHCTGIYSYFIFKKKGSKNPHYDEAIDALTGIQRTQARSYRKRE

SEQ ID NO: 133443 - protein, 82 aa, Oryza sativa
  Clone ID: PAT_MRT4530_35312C.1.pep
FSPRGLRGLGYTPTGERGAPPGDPLGGVPGFQFSGKKNNPSFFLKKSPASHSRLFFFFRVPGLPGPQKDQRPLIFPLFFLVR

SEQ ID NO: 133444 - protein, 47 aa, Oryza sativa
  Clone ID: PAT_MRT4530_35313C.1.pep
MAYLAPKGSLWVKQLLELAPPSEEAVGGADDQGLVRGSPDGPLRRRY

SEQ ID NO: 133445 - protein, 123 aa, Oryza sativa
  unsure (1)..(123): unsure at all Xaa locations
  Clone ID: PAT_MRT4530_35314C.1.pep
NRRGRTTSARARRPSNPTVRASPTCARPTPRIPRPQRPHAAPVPPGFTPRHRPSPPPLPPTTGERAAAXAAPSPPPRSPSPPAPRHRNTSRLSRRSRSCPSAPSAARLSPSSPPPSSPSAPAG

SEQ ID NO: 133446 - protein, 74 aa, Oryza sativa
  unsure (1)..(74): unsure at all Xaa locations
  Clone ID: PAT_MRT4530_35315C.1.pep
VATPDQAHXVHDGLKKSLASNDSAXVAEXTWIIYGGSVTGTNCMELTAKPDVDGFLVGGASLKPEYIDMINSST

SEQ ID NO: 133447 - protein, 197 aa, Oryza sativa
  Clone ID: PAT_MRT4530_35316C.1.pep
MENLKATELRLGLPGTEEEAAPPPSTPRAGSKRALAGEPDQAKIKPAAAAKAQVVGWPPVRSYRKSCLQPTTTTTKSKPPPAAAAAETQQKEDVAGAGGLFVKVSMDGAPYLRKIDLKVYKGYRELREALEAMFLCFSGGAAADAAVNPSDFAVTYEDKDGDLMLVGDVPFEMFISTCKRLRIMKGSEARGLGATRG

SEQ ID NO: 133448 - protein, 62 aa, Oryza sativa
  unsure (1)..(62): unsure at all Xaa locations
  Clone ID: PAT_MRT4530_35317C.1.pep
SASPPVAKGAVSPAVPTRPQNAXPPAPTHVAPVAPPQAAVENPAPVLPGTPALLPSVQAPAP

SEQ ID NO: 133449 - protein, 112 aa, Oryza sativa
  unsure (1)..(112): unsure at all Xaa locations
  Clone ID: PAT_MRT4530_35318C.1.pep
WQVILRWPLFSPWAAPWWAPRRRSASCWTSPGRAAPSPASSSSSASSAPSRPPPCSGLCSWSASSASRAMPLTQPRSAXAGDSDGGXSPSRSSSLPASSPSPPFPPPRSPAL

SEQ ID NO: 133450 - protein, 202 aa, Oryza sativa
  unsure (1)..(202): unsure at all Xaa locations
  Clone ID: PAT_MRT4530_35319C.1.pep
MTAHPTATPAVPTAVAPAPGGRIAQHGRRAATTQTSCRCRTYRLQPLPGRLSSSSTPPQPGSGPPHGCTPRLAAPVAPPPGARRRPPAAIRRRAIPASAPRRATQHGHAPPPHGPHFPAAPACVGRRRRRPSWPPAGRAGTPGRRPSRPPRLAAXPSRPPRLAAGARPRRCLAAPPPGRATPWPPAHGRAVAGSKAPLFKPL

SEQ ID NO: 133451 - protein, 39 aa, Oryza sativa
  Clone ID: PAT_MRT4530_3531C.1.pep
WVRRLGYGPLPQREQANVGRNHRGFYVFPCLRGRVPKRG

SEQ ID NO: 133452 - protein, 54 aa, Oryza sativa
  Clone ID: PAT_MRT4530_35320C.1.pep
RSCCPAPSRSPHAHHAQVPRTRGQRQTQTEFYSWFTDDPSQTVLNFDQSFIGKK

SEQ ID NO: 133453 - protein, 155 aa, Oryza sativa
  Clone ID: PAT_MRT4530_35321C.1.pep
MAASPHMRHHGRTLQGGVPTCHGCTGQRGLKMKERSKRRNGRTCSVCWPRHGRTMTAHPTATPAVPTAVAPAPGGRIAQHGRRAATTQTSCRCRTYRLQPLPGRLSSSSTPPQPGSGPPHGCTPRLAAPVAPPPGALPADDHTWQGAIGGTEKGE

SEQ ID NO: 133454 - protein, 167 aa, Oryza sativa
  unsure (1)..(167): unsure at all Xaa locations
  Clone ID: PAT_MRT4530_35322C.1.pep
MTGFTSARDLCIAILREDGLITESRTKIKAEELTGYDADLLFQCKTCGKSDHPLKMLICDSCEAAFHLSCCIPRVHEVPTDEWYCLPCFRKKPKSQEYQPKASWHESYRVHVTRYVXYVTGVRXGIDXQAEVPEWSCPTSSMLLFLFLEGCLIARSPLNLILLTSLN

SEQ ID NO: 133455 - protein, 91 aa, Oryza sativa
  Clone ID: PAT_MRT4530_35323C.1.pep
METAAAAMLETRVGRFRGPSMAALLVEMWEPLAMTPTLTAPTVRRRRRDPRRAPPLYIQLLPRTVIRGRETEQMKRKIERRKTATLGLSLI

SEQ ID NO: 133456 - protein, 107 aa, Oryza sativa
  Clone ID: PAT_MRT4530_35324C.1.pep
TPIKQDNLLKSEIEELHVKGSLIHQENIELSRSLNVMSQQKLELYNKLQACEQRGATDANESSSTPYSFRIIQNANMPPSLELSQSQQREGECSKTAAPELGRLHLP

SEQ ID NO: 133457 - protein, 57 aa, Oryza sativa
  Clone ID: PAT_MRT4530_35325C.1.pep
NFVLFLMSFLLHMLSVIGFLWANNCYKFSTFSDGSNIDISASTIMMDFFWWAWHVYI

SEQ ID NO: 133458 - protein, 42 aa, Oryza sativa
  unsure (1)..(42): unsure at all Xaa locations
  Clone ID: PAT_MRT4530_35326C.1.pep
QQVNKKWGVFFYFLSITFFPEGVLQXXRSWTVKKKKKNGAVT

SEQ ID NO: 133459 - protein, 197 aa, Oryza sativa
  Clone ID: PAT_MRT4530_35327C.1.pep
MAKQAAPPPAPLLPSPASPLPEPPPAKPGSYKHGGSGALSPSLAVKAVGVPARQSSGPGADVEEEPMAVSRSGARMHGSCSPMAGSVVPGGKEPGTDGHGRLAGEVWKMTVFGRHDSGERSARRPAWCVEARPVAAEADTARGGAAGGGGGGDAGGCGAVYSARRLAGRGRRCSGPTCRERLDGGGASGHQTWTRRW

SEQ ID NO: 133460 - protein, 487 aa, Oryza sativa
  Clone ID: PAT_MRT4530_35328C.1.pep
MATTASVRPPLLRQAAGSEKASLLCKPKQRASVRRRSFTARASSNPVSIPKQWYNLVADLPVKPPPPLHPQTHQPLNPSDLSPLFPDELIRQEVTEERFIDIPEEVAEVYKLWRPTPLIRARRLEKLLGTPAKIYYKYEGTSPAGSHKPNTAVPQAWYNAAAGVRSVVTETGAGQWGSALSFASSLFGLTCEVWQVRASYDQKPYRRLMMETWGATVHPSPSAATESGRRILERDPASPGSLGIAISEAVEVAARDADTKYCLGSVLNHVLLHQTVIGEECLEQLAAAGDVPDVVIGCTGGGSNFGGLVFPFMREKLAGRMSPAFKAVEPAACPTLTKGVYAYDFGDTAGLTPLMKMHTLGHGFVPDPIHAGGLRYHGMAPLISHVYELGFMEAIAIQQTECFDAALKFARTEGIIPAPEPTHAIAAAIREAMECKRTGEKKVILMAMCGHGHFDLASYEKYLRGDMVDLSHSDEKLQEALAAVPKI

SEQ ID NO: 133461 - protein, 551 aa, Oryza sativa
  Clone ID: PAT_MRT4530_35329C.1.pep
MAEASSSTHRRRSQAQISKIALRSDVWNHFTRFTDGDGRAKARCKHCPQVLGAETKSGTSTLWAHWNRHEQREEIPGEESPQQTPPPLPPAGPEEAARGDLARMIALHGYNPSVVKDDYFRSFLCRLNPEYEVPSRLAIEEMCDAIFDETMKGLFSKLHDVPGKTACMDPEFKDDYIISDLENLHLTRQERHQLLSQLGLDYDLWAYDEKWYSEYCSMEVLRKKGSAITNTVFAELLCMLWGEIYRSIQRISAPDCPTSSNLCLIELFKLREVFKHQLAQASGENAIAYNEFNGCFGAEDHKDVADVLTEAMVAIDKAIQDSYPVWSIPLVLDPRYKLARTKFIFQTAFSTEAAADYISEVTRNITELYSDYVEDDDSTMNAVAVGSTDPLQEAWDEHRRAEAQTDLDRYLKDELVHDPAQGFDILSWWKVHGSVLYPRVAQMARDALAMPTCIRVVDDDDDAMCAALVAELRELSERVADEREYAQTGRACVLAGMSSHGQQRASSVQLAKGSSVYGCSSAFATPEMQRMEKLSVILPPSSFTQTLSKMP

SEQ ID NO: 133462 - protein, 52 aa, Oryza sativa
  Clone ID: PAT_MRT4530_3532C.1.pep
RKRELLIWCLTAGLVSLLFIIWLSIITSYHILYDPHVSNIIICHRIDVFPSI

SEQ ID NO: 133463 - protein, 77 aa, Oryza sativa
  Clone ID: PAT_MRT4530_35330C.1.pep
MAGDNTITKLLEMCQVLRAWSMEVGGHMIVVVSCGLYGLKPNIGHTFHNGGHTRGENGNGHGSTGEAPIGHMVEQAQ

SEQ ID NO: 133464 - protein, 685 aa, Oryza sativa
  Clone ID: PAT_MRT4530_35331C.1.pep
MAEASSSTHRRRSQAQISKIALRSDVWNHFTRFTDGDGRAKARCKHCPQVLGAETKSGTSTLWAHWNRHEQREEIPGEESPQQTPPPLPPAGPEEAARGDLARMIALHGYNPSVVKDDYFRSFLCRLNPEYEVPSRLAIEEMCDAIFDETMKGLFSKLHDVPGKVSIAVGTVRTIRGNMLYTACHFIDDQWNLHKIIMDVYADVPFLNYHGPLLGVDEVCLDRDLSRDISIDKVMVRFKAREVLHNLFMMIWETKGNDINLEYELRNEIEDNPFKINPNRRQLFYTTYMDNVIHSIARLLVMDPEFKDDYIISDLENLHLTRQERHQLLSQLGLDYDLWAYDEKWYSEYCSMEVLRKKGSAITNTVFAELLCMLWGEIYRSIQRISAPDCPTSSNLCLIELFKLREVFKHQLAQASGENAIAYNEFNGCFGAEDHKDVADVLTEAMVAIDKAIQDSYPVWSIPLVLDPRYKLARTKFIFQTAFSTEAAADYISEVTRNITELYSDYVEDDDSTMNAVAVGSTDPLQEAWDEHRRAEAQTDLDRYLKDELVHDPAQGFDILSWWKVHGSVLYPRVAQMARDALAMPTCIRVVDDDDDAMCAALVAELRELSERVADEREYAQTGRACVLAGMSSHGQQRASSVQLAKGSSVYGCSSAFATPEMQRMEKLSVILPPSSFTQTLSKMP

SEQ ID NO: 133465 - protein, 127 aa, Oryza sativa
  Clone ID: PAT_MRT4530_35332C.1.pep
QPLLPRQSQIAKKQSKPNHYLLLMKYSQFGRCSYLLACTSIFSSPRSLQSEPPRRQARRGAPPGAPSQPPHSHGHGSPSSPIDCPRPQQHEPDPDRTEIAGIEVGSYPLRSPAVLARVGGLRLRRGN

SEQ ID NO: 133466 - protein, 69 aa, Oryza sativa
  Clone ID: PAT_MRT4530_35333C.1.pep
MAAWWCNLVWDPSFGLVQIYAQDSSAEKVVPSGDRLHSSCPKGRAQCEQDHPDRLTTHAASTIVRSANP

SEQ ID NO: 133467 - protein, 446 aa, Oryza sativa
  Clone ID: PAT_MRT4530_35334C.1.pep
MDTIFSAVLGDLFSRSISFVIDIYHHHHQGGVEENLQQLHRMLLRIKAVVEEADSRCITNQAMLLQLRMLRDVMFRGYYFVDNFRYRIFQAQAKDEVGDHSLDLPPFNPLERFFIFTRAKLERVIKFLLEQHPLCGAKGIDVLPIIGPGKVGKSTLVEHVCRDERVRKCFSTIVFYGPDSIDNGDMVLLPDTRAIKYRNPASGEQSLAIIELVDEMDDETWRRILHSLRGDHITSVSKIIITSRSRKIATFGTTKALQLDFLPKEAFWYLFKTVAFGSTNPEEEPKLASICMEIADLVNGSFMESNVVGSILRSNITAQFWYNFLKRLKYFTDRHFRLLGEHPRDSYKSNRGRTYIWMHKNYYGDGDAATYNLYHANSAGLNNLPMIRMSDMLIGNVKPQKKCEALEWQSSIPPYYSYIVQYGILARQPLMLPKRKRSRALLEELV

SEQ ID NO: 133468 - protein, 87 aa, Oryza sativa
  unsure (1)..(87): unsure at all Xaa locations
  Clone ID: PAT_MRT4530_35335C.1.pep
TGPGFTQLRGGVPRPPLPCLRCGELAFSERPYHPLGPLFGAWAAPCLVALSVGGALAPPIKPGGVAAPLLPFLSLSYLPFSPPFXFF

SEQ ID NO: 133469 - protein, 262 aa, Oryza sativa
  unsure (1)..(262): unsure at all Xaa locations
  Clone ID: PAT_MRT4530_35336C.1.pep
CAADHTAPTGSSSTSHLARFRHCRSRLVAPCWPPPPLPAPPRAKPASRRRPRLLASCRPPLPPAAPLRADLAYEHSSCYSHASQMRSSATPPRLSTHGRQCLDLHRPTLPPPHPPPSPAATAATTTAATSPSSSSSEPPPPSATAAATTAAASPTASSIQPPPSLPPSAAAASHXPPRRPDXPEASPPPSPPTTTPPAPPPALAAPHCLTSSAAPPERAPPLLSLQPPSFAGGGSGGGEALEGRRRAGAVQLVRLPRRPGTE

SEQ ID NO: 133470 - protein, 32 aa, Oryza sativa
  unsure (1)..(32): unsure at all Xaa locations
  Clone ID: PAT_MRT4530_35337C.1.pep
RQSKPGTVKEKRSLDDXTSFFFNQXXDXSLYC

SEQ ID NO: 133471 - protein, 107 aa, Oryza sativa
  Clone ID: PAT_MRT4530_35338C.1.pep
RPGGQTHYPSALCASATICGPIKKKIIDHFHKKPVPPKPEPRPEPPKPKPEPEHPFLDHIPHASEHFFDHFHKKPVPPKPEPKPEPKPEPKPQPAPEYHNPSPPAKN

SEQ ID NO: 133472 - protein, 256 aa, Oryza sativa
  Clone ID: PAT_MRT4530_35339C.1.pep
MKVKRSRTFAGGFAVSGGHSVAEQLMVTAKIERGNELRHCWGGGPNAAAKMRAIYDAHVIQCTPYPTQLKLDKFDFFYEGGSTYLYFTMTLIVVRVPTAGIRGSKHTCPGFPGHQAGRGEFHTELAARGIALFGGQTKIAYARKARLFDSHCRCYRYRRKCSAARWPTLFGSSCRPRATAPGMGSLAPAVCNAALALNRAAECVTLRKEMKAKGIVPVCAEKLARTHEESTVFTLHATDKMWQKHYYCPIVPEKKK

SEQ ID NO: 133473 - protein, 50 aa, Oryza sativa
  Clone ID: PAT_MRT4530_3533C.1.pep
MGVYYCSTVGAEGSTPTNYLGQELKKDAAYHAHDHGESYNINRFKEIAKE

SEQ ID NO: 133474 - protein, 38 aa, Oryza sativa
  Clone ID: PAT_MRT4530_35340C.1.pep
LCVGSMPAMPLWLDRYVLDLHGLLCDQTFTHYLCLEPS

SEQ ID NO: 133475 - protein, 145 aa, Oryza sativa
  Clone ID: PAT_MRT4530_35341C.1.pep
FKFLFLGVEVSFSKNGLCIRDTEILDYRELYRNEITGKIPKELGNLKSLISMDLYDNKLEGKIPKSFGKLKSLKFLRLNNNKLTGSIPRELTRLTDLKIFDVSNNDLCGTIPVEGNFESFPMESFKNNRFSGPELKGLVPYDFGC

SEQ ID NO: 133476 - protein, 147 aa, Oryza sativa
  Clone ID: PAT_MRT4530_35342C.1.pep
MYQAIPYSSTRPWLRPEPAASVVDVVKVETTTAVAGRGGEAEVVGEEEAAEVRRAVAESPVLVVGRRGCCLIHVVKRLLQGLGVNPAVHEVAGEAALKGVVPAGGEAAALPAVFVGGKLLGGLDRLMAVHISGELVPILKKAGALWL

SEQ ID NO: 133477 - protein, 63 aa, Oryza sativa
  Clone ID: PAT_MRT4530_35343C.1.pep
FEERFISSQNTSQIPCLLYCANLFQPCIEPCHIETLCITTPPEAGQHLQARLGIRLVVLFSIK

SEQ ID NO: 133478 - protein, 71 aa, Oryza sativa
  unsure (1)..(71): unsure at all Xaa locations
  Clone ID: PAT_MRT4530_35344C.1.pep
MSRAPHAAPATSPAYLPPNLDDEATASLHAQAVTVLNIKALIPVTLDIHASNYSHWRXGLILVTLGKYALT

SEQ ID NO: 133479 - protein, 222 aa, Oryza sativa
  Clone ID: PAT_MRT4530_35345C.1.pep
VAALVPKPELDGEMGDAHVALQARLMSQALRKLSHSLSRSRTMLVFINQVRSKLSTFSGFGAPAEVTCGGNALKFYASVRLNTKRIGLIKKSEEVVGTQIQVKIVKNKHAPPFKTVHLELEFGKGLSRELEIIEVGFKHKFITKSGVFYHLNGQNFHGKDALKCYLAENKNVLESLMSMIKESIMQQESHPDRNMEDANPDTSITEEFVSATDEQVPEEVEA

SEQ ID NO: 133480 - protein, 104 aa, Oryza sativa
  Clone ID: PAT_MRT4530_35346C.1.pep
PIFPQEDGDPGLQHHKGRDRGVLEEKGDGRRGAAPHRREGSCKNQSQDTYGQFFFLLINRNLLYYQSLSRPLISFTSSGSVWFLVKKKFSMVFSIADKSTHVRQ

SEQ ID NO: 133481 - protein, 38 aa, Oryza sativa
  Clone ID: PAT_MRT4530_35347C.1.pep
TGKENTAFVRLQCRGILHGFYIQQKLKRCYAFVIDFRH

SEQ ID NO: 133482 - protein, 191 aa, Oryza sativa
  Clone ID: PAT_MRT4530_35348C.1.pep
MKKWEYSISGPNPRYSWPAIAKDRIVKDLVKIKIIITVTQIQLQCTVQSTVSRNGEGATVTGTDRDDPAKGDKRLTRPRARTHAQAPAFSDRAATHTPPPPNAVNHGGKGKARTRRVGVCCAGVTRPHVWGGGVVGPRGRPRLDGADGTWTAVMRARLVSLGEERNKDRVCRIRSGRVGSPVGLWAPPGTD

SEQ ID NO: 133483 - protein, 53 aa, Oryza sativa
  Clone ID: PAT_MRT4530_35349C.1.pep
FPFGLLVRPFSPPPSASPAYGSDEMDAPLRRESPSLARKGRLNRNPRYKPRQG

SEQ ID NO: 133484 - protein, 43 aa, Oryza sativa
  Clone ID: PAT_MRT4530_3534C.1.pep
MARRRPSANRYTGSQSHPCQGCNIQLQIEFCAVVFCDISYSFR

SEQ ID NO: 133485 - protein, 140 aa, Oryza sativa
  Clone ID: PAT_MRT4530_35350C.1.pep
ARGFGRDSESSGELTRNLKKYLAEEQIFRIDHYLGKELVENLSVLRFSNLVFEPLWSRNYIRNVQLIFSEDFGTEGRGGSALSLPFASCIQCYHELKYSRENPFYTPRNLANPFYTSEFCLLPYIHPKFDFDPFHTPPVS

SEQ ID NO: 133486 - protein, 122 aa, Oryza sativa
  Clone ID: PAT_MRT4530_35351C.1.pep
MNSRSNYRSTRTSLFDGIEEGRIRATSYSSHEIDENENDQAIDGLQDRVSILKRLSGDIHEEVETHNRMLDRMGNDMDSSRGFLSGTVDKFKMVFETKSSRRMGTLVASFVALFLLVYYLTR

SEQ ID NO: 133487 - protein, 100 aa, Oryza sativa
  Clone ID: PAT_MRT4530_35352C.1.pep
KKAHDHAVDNWTLGILCYEFLYGSPPFEAAEQDDTLRRIVKVDLSFPSTPYVSADAKDLICKLLVKDSNKRLSLDDIMKHPWIVKNADPSGSCSDQKART

SEQ ID NO: 133488 - protein, 177 aa, Oryza sativa
  unsure (1)..(177): unsure at all Xaa locations
  Clone ID: PAT_MRT4530_35353C.1.pep
QPPYRTPSAAGVHSHHRLPPARAMDHVGNSGILTVKFGKXQSHHRLKVSVGFEVLRLADESYQVVSCXILAIFACLLIANKGFIGVSADFMTSDLQPMCALIFGSMLIYHIIICRLVYIGLYYYFITSSSANCLYSIIYIGHIADCLNPIAIGWYRHRLLSVFGWNHYIGCLADRLF

SEQ ID NO: 133489 - protein, 356 aa, Oryza sativa
  Clone ID: PAT_MRT4530_35354C.1.pep
CWIARGHTSQFVAANKRAPFDSLITMESTKVSAMLLLAMLALSSSPLALACGSCGSGGSGSAPSGGGGSAPSGGGGGIGGVVGGIVGGVAPVVGGIVGKVPPVVGGVVGGVAPVVGGIVGKVPPVVGGVVGGVAPVVGGIVGKVPPVVGGVVGGVAPVVGGVVGGVAPVVGGVAPVVGGVVGGIAPVVRRNHVAAAAGGGGYSPSPSPPKRHGGRKACPPCADADAVHPDAVVLGHVPHRRAQARRVRGPPRQRGAHRRRPRDVLPAGEGHRRPVRRRLPLHRHQGQGARHQHLHPHRAQAPRQLRLRRPAWLHLRLSHPHARHVPNHARHVPSHARIHYSLSSTQFSFNQIKVGR

SEQ ID NO: 133490 - protein, 156 aa, Oryza sativa
  unsure (1)..(156): unsure at all Xaa locations
  Clone ID: PAT_MRT4530_35355C.1.pep
LSVLYKSLGVLLTVKFGNRQRRHQLRIIIGCSISESADGSYQVANSRIPAIFACFLIANKGFIGVSADEMTSDLQPMYALTFRSXLLYIVSSRLVSIGLYYCYFITSSSADCLHIIIYVGHIADCLNPIAIGWYRHRLLSAIGWNYSIGLSADRLF

SEQ ID NO: 133491 - protein, 74 aa, Oryza sativa
  Clone ID: PAT_MRT4530_35356C.1.pep
MLNLIYVYAKFDQCDSHFIAYVHASKAYMHAYIKRSLQVYYTPNGEHNGKNQPMDEFTANMADRICVVCTRTHT

SEQ ID NO: 133492 - protein, 260 aa, Oryza sativa
  unsure (1)..(260): unsure at all Xaa locations
  Clone ID: PAT_MRT4530_35357C.1.pep
TNCSSTAPTGPLHRHPPAPGAACPGSLLHARPEESQRHQNKEDWADRIAKLVEEQFGLRPKERIHMYRQPYPQWFERVPLPHRYKVPDFSQFLGQDDISTMEHISRFLAQCGEASAKEALKVRFFPLSLTGSAFTWFSSLPLNSIRGWTDLEKQFHDYFFARVSELKLSDLISVEXQEGESAMEYIQRFHNVRSRCYGLSLSDEQLADLAFQGLSAPIRERFFCHEFDSLVHLMETVSAHESRLQEAKEDWFWSYQDKKL

SEQ ID NO: 133493 - protein, 163 aa, Oryza sativa
  unsure (1)..(163): unsure at all Xaa locations
  Clone ID: PAT_MRT4530_35358C.1.pep
MTVGGHFGQFPFHNRQHLLTMKFGXARSHNRLRVSIGFRISELADENYQVANSRILAIFAIFLTANKGFIGVSADFMTSDLQPMYALTFGLMLIYHIIASRLVYTRLYCYFITSSSADCLYIIIYIGHIADCLNPIATGWYRHRLXSAIGWNYSISLSADRLF

SEQ ID NO: 133494 - protein, 148 aa, Oryza sativa
  unsure (1)..(148): unsure at all Xaa locations
  Clone ID: PAT_MRT4530_35359C.1.pep
LLIVKFGKXRSSHRLRVSIGFEVLRLADESCQVVSYRILTIFACFLIANKGFIGVSADFMTSELQPMCALTFRSMLIYHIIICRLVYTGLYCYFITSSSTDCLHIIIYIRHTTDCLNPITIGWYRHRHRLLSAIDWNYSIGLSADRLF

SEQ ID NO: 133495 - protein, 537 aa, Oryza sativa
  Clone ID: PAT_MRT4530_3535C.1.pep
MESGGLIAPSETCSSDGRGGGGGGWRAARFLIAVGFLERIGFNGVQGNLVMYLTGPMGMSTAAAAAGANAWGGTVLVLTLVGALAADSRLGRYRAIVAAGVLHLLSLGMLTISSVMQPNHPHPASCHDAAAACSPSPPPPPSLARLVFFHAALYLLALAQGFHNPCSEAFGADQFAASDPGARASRSSYFNWYQFFNSFGYGISNTALSYVEDSVSCTVGFAVCLATTAVYLPIFLLGTRAYRAEQPVDGALLARLAKTSSSAARAWTARVFRRKDTSCTERLLAREEVGEKGFLAKLLPIWVTSIVFAIVSAQEVTLFIKQGSTMDRRIGARGGLVVPPAALQSIVSVIFLTFVPVYDRALVPLARRFTGHPAGITTLQRVGVGMAMSCLAMAVAALVEAKRLRAASDAGLIDRPDATVPMGVWWLVPQYALVGLSKVFGIIGLDEFFYDQVPDDLRSVGLAMSLSVRGVGSYASGVLVSAIDCATRSGGESWFSDNLNRAHLDYFYWILAALAALEVAVFVYIAKRYVYKNKGEP

SEQ ID NO: 133496 - protein, 181 aa, Oryza sativa
  Clone ID: PAT_MRT4530_35360C.1.pep
KNKISRWSHTADLPSCPPRHPSPPGAQPSFRGHQGVLTVKFGNRQRRHRLRIIIGCSISESADGSYQVANSRIPAIFACFLIANKGFIGVSADFMTSDLQPMCALTFGSMLICHIIASRLVYTGLYCYCITSSSADCLYIIIYIGHIADCLNPIAIGWYQHRLLSAIGWKYSIGLSADRLF

SEQ ID NO: 133497 - protein, 411 aa, Oryza sativa
  unsure (1)..(411): unsure at all Xaa locations
  Clone ID: PAT_MRT4530_35361C.1.pep
MAVTAEVESSPAATGKLRYNSPLVQVSLIGLVCFCCPGMFNALTGLGGGGQLDHSTADNANTALYSCFAVFGVLGGAAHNLLGPRVTLLAGALTYPLYAASFLYYNHHPSRQAFPVTAGALLGVGAGLLWAAQGAIMTSYPPPSRRGSYISLFWCLFNLGGVLGGLLPFSLNYHRAADATSVNXDATYIAFMAFMLLGAGLALLLLPASRIFNNVNGRLFHLPHKGLNNVFYWGXQMLASAAIGYFLDFGFGSSSRERGLCGVAAVAVLGTAIWXGGLANHVPYADGNWGERLIDFKDXGVVPLAGYDNYWYVPFHLASQSSCISKGCELFKYVGFYKGVQSAGAAVAWQIDTHKTSLISQLIVNWALTTVSYPLLALLVFLAVKEEDSSVSSVEDGKEKDSKLSAPTSFH

SEQ ID NO: 133498 - protein, 177 aa, Oryza sativa
  unsure (1)..(177): unsure at all Xaa locations
  Clone ID: PAT_MRT4530_35362C.1.pep
KPIARSKGRSVLELSRQEILKHEFSYSKTGGHVLTVKFGKXRSSHRLIVSIGFEVLRLADESCQVVSCQILAIFACLLIANKSFIGVSADFITSDLQPMYALTFGSXLLYFVSSRLVSTGLYCYFITSSSAGCLHIIIYIRHIANCLNPIAIDWYRHRLLSTIGCNYSIGLSADRLF

SEQ ID NO: 133499 - protein, 141 aa, Oryza sativa
  Clone ID: PAT_MRT4530_35363C.1.pep
PSSIYINQITTKGTQNVLQIDQYSFWEPKHQCMPGMVTHFHAKVEILNRAHSFFPNYRVVHHVCQHSHCGQSIATKPWVAQPSARVQLCHTSMLHPHRNAPFPGQVVAYWVSTFLETHYLPVLLSNTSVSPRWRTNIGRPL

SEQ ID NO: 133500 - protein, 98 aa, Oryza sativa
  unsure (1)..(98): unsure at all Xaa locations
  Clone ID: PAT_MRT4530_35364C.1.pep
SKFHPKEVCPYCKAKLWNLLQANMIPRSASIRLDAYDDSXEYYICLNGHTLGLCTLMPVSDSEDAQRSSYQDLSQVALFMSWSVNLVQCWILLSTKNQ

SEQ ID NO: 133501 - protein, 148 aa, Oryza sativa
  unsure (1)..(148): unsure at all Xaa locations
  Clone ID: PAT_MRT4530_35365C.1.pep
LLTVKFGKXRSSHWLRVSIGFEVLRLADESCQVVSCRILAIFAYFLIANKGFIGVSAGELTSDLQPMCALTFGSMLIYHILXCRLVYTGLYCYFIISSLADCXYIIIYMGHIADCLNPIAIGWYWYRHQLLSAIGWNYSIGLSADRLF

SEQ ID NO: 133502 - protein, 149 aa, Oryza sativa
  unsure (1)..(149): unsure at all Xaa locations
  Clone ID: PAT_MRT4530_35366C.1.pep
MKTTRTTQIISILVSLVLLGXGDTYGYKYKAPXEERGETHHRRHGTIEATTYKPTXAKTRRQISTLGISTASPLRCLRILSGETKVLSLISXGTDSRKKATLLSTTSQTFRPPYXQQLDRLPQIFXCLAYNLVPTIPILCKYRNRGIKH

SEQ ID NO: 133503 - protein, 768 aa, Oryza sativa
  Clone ID: PAT_MRT4530_35367C.1.pep
MALQLMMDNYLLCSAMKGRLSVYSDSQLILVKMNRESNFMPTPDQDVLEVKPLRTLAPMFPAPLGIDVLNRLTAPPLVFVAPAGQFPGGFGSLNIPAVRSFAAFGGQDASGGKTAGGGDQDASGGKTAAGGDQDAGRGETAAFGGQETVRGEFVANGTPNVGASATGPIDATPISACKSTQPSVISLDDDDNDDDEPYGGNQTSASGRKIKRPSHLKGYNVSDGLGTDSSNGTKKRPKTSNRKAATDNEISLMPPSSDPREVVEVLLMTFEALRRRHLQLDETQETSKRADLKAGAIMLASNLRANIGKRIGAVPGVEVGDIFYFRMELCIIGLHAPSMGGIDYMNKFGDEDDSVAICIVAAGVYENDDDDTDTLVYSGSGGISRNSEEKQDQKLERGNLALERSLSRKNVIRVVRGYKDPACLTGKVYIYDGLYKIHESWKERTKTGINCFKYKLQREPGQPDAVAIWKMCQRWVENPAARGKVLHPDLSSGAENLPVCLINDVNSEKGPGHFNYITQVKYLKPLRSMKPFQGCRCTSVCLPGDTSCDCAQHNGGDLPYSSSGLLVCRKLMVYECGESCRCSINCRNRVAQKGVRIHLEVFRTTNRGWGLRSWDPIRAGSFICEYVGEVVDDTKVNLDGEDDYLFRTVCPGEKTLKWNYGPELIGEHSINISADTFEPLPIKISAMKMGNVARFMNHSCNPNTFWQPVQFDHGEDGYPHIMFFALKHIPPMTELTYDYGDIGCESRGVGSRAKNCLCGSSNCRGFFS

SEQ ID NO: 133504 - protein, 93 aa, Oryza sativa
  Clone ID: PAT_MRT4530_35368C.1.pep
SNLVDFMTSDLQPMCALTFGSMLIYHVIASRLVYTGLYCYFITSSSADCLYIIIYIGHIADCLNPIAIGWYRHRLLSAIGWNYSIGLSADRLF

SEQ ID NO: 133505 - protein, 202 aa, Oryza sativa
  Clone ID: PAT_MRT4530_35369C.1.pep
MANTKIVALGIFLVLCINGLSHAARVIRYSSAKGEGEGGGEGSGSVSGAGSGSGGGFGASNTSSSGGYFGTSNAHANAGGGGSGDGGGPLGSVGSGSGSGSGSSSSNSSSVMRAWYGGGEANAGGVGGGNGDGYGGGYSGSSGYGSGFGTGGGSSAVAMDGFYGAHANADGGGDGTGVGHGEAGGYGNGGGSGSGYGNGKYP

SEQ ID NO: 133506 - protein, 541 aa, Oryza sativa
  Clone ID: PAT_MRT4530_3536C.1.pep
MESGGILPPSETCAGSGSPDGRGGWRAARFLIAVGFLERIGFNGVQGNLVMYLSGPMGMSTAAAAAGANAWGGTVLVLTLVGALAADSRLGRYRAIVAAGVLHLLSLGMLTISSVMQPTHQHPVSCHDAAAACSPPPPPSPSLGRLVFFHAALYLLALAQGFHNPCSEAFGADQFTPPSDPGARASRSSYFNWYNFSSSCGYAISNTAMSYVEDNVSWTVGFAACLATTAVYLPVFLLGTAAYRAEQPIDGALLALLAKKSLSATRVWTARVFPRKDAICTERLLLAKEEEVEHGKGFVVKLLPIWVTSIVFAAVISQQVTLFTKQGSTMDRRVAVGGGVFVLPPAALQDVISATMLTVLPAYDRALVPLARRFTGHPAGITTLQRVGAGMATCCLHMVVAALVEAKRLRAASDAGLPADATVPMSVWWLVPQYALVGLSKVFGVIGLQEFFYDQVPDDLRSVGLAMSLSAQGVGSYASSALVSAIDWATTRRGGESWFSDDINRAHLDYFYWLLAALAALDVAVFVYIAKRYVYRNKDEQ

SEQ ID NO: 133507 - protein, 295 aa, Oryza sativa
  Clone ID: PAT_MRT4530_35370C.1.pep
MAGAPMASPPPYDNPTAGFPIAIVIAIGFMVTSLILASYYFLVVRCWLRGTGGGGAAGAGLLHRSRRESAAERVAAVFFTDYEAEVGGGLDPDVVAALPVVKYRRAASGKSASPQECAVCLSEFVRDERLKLLPSCSHAFHIDCIDTWLHHNVSCPLCRTVVTGGAIGLLVRDDQYDASSRELAAGERRIDAAARMGHGISSCRFPKTGAEQEPIRRSFSMDCFLGDLGRKPPPPPPKDPAGSEAGPSHPDAAGSSSIVGTAGAGETSGRFRRLLSSFGLGRSSRSTVLPIHLDP

SEQ ID NO: 133508 - protein, 48 aa, Oryza sativa
  Clone ID: PAT_MRT4530_35371C.1.pep
SRDYLSSSACEVINQQHGAVSVSMEELIPTLTTHRVFSSSTIITTTLI

SEQ ID NO: 133509 - protein, 175 aa, Oryza sativa
  unsure (1)..(175): unsure at all Xaa locations
  Clone ID: PAT_MRT4530_35372C.1.pep
IWVERASTMPRPPLHPSPXSKDSITYIRHTLLIVKFGKXQSYHRFRVSIGFKVLESADGSQVATCRVPXSLACLLIANKGFIGVSADFMTSDLQPMCALIFGSMLIYHIIASRLVYTGLYCYFITWSSADCIYIIIYIGYIADCLNPIAIGWYRHXLLLAIDWNYSIGLSADRLF

SEQ ID NO: 133510 - protein, 44 aa, Oryza sativa
  Clone ID: PAT_MRT4530_35373C.1.pep
YGTGERSTTRGLFGRLPVSFRAPYIRNGKTRGVQLLSDEMRQWE

SEQ ID NO: 133511 - protein, 447 aa, Oryza sativa
  Clone ID: PAT_MRT4530_35374C.1.pep
MNQHGYDNENLSELKKTLKPSFKLRWTKTPIRLRGTRQLSGRFRVPMETVLIIFDSVSDKIFLNSFPFPKNSDRLILFPKTCPESRNIPYRFHPNRPCLSAAGTRPPPHPPIQPVPPLLPACLAEAGKEHHRPFPPPVPALQTARASLPPPAPALTSTLRPPSNQPVPPTSRAEVRPGRSIQRSCSPPILASDVVGRERRVSILTDEEDADHCRHGEGARLPPLRSHAGHLLTSSHLTSSSTWQYYGPKAFHFLNIDSCQKQTSRRSCLCNNTIHYMDQQFRSFHIIRSRHEAPLAINNRCWMKPPSTIPYILLLSSTSKIVLHLSAVHILAYIIVFIQIFVETNQFHVSASSRCRLPLGVMRKVSHDIGFLLMLGDKGDYYRDMLMRAKIERSIVFARSVENVCSVRPIEPLALHYVQYDQCILIGHNATLMVVLVVLTRLFENQV

SEQ ID NO: 133512 - protein, 51 aa, Oryza sativa
  Clone ID: PAT_MRT4530_35375C.1.pep
MVAYSSHPGQYRRLPLLTLAHCGDYLTHAVAMQMLAAIHQNEHRWSSSLER

SEQ ID NO: 133513 - protein, 169 aa, Oryza sativa
  unsure (1)..(169): unsure at all Xaa locations
  Clone ID: PAT_MRT4530_35376C.1.pep
NILHGVDIYVHDTWKKLVGLPLPDGSYGVRTTVTDKEPTLYXLRVLHKCIARVTEEIQEIRFNIAISAMMEFVNAAYKWDTQPKSVXIESFVLLLSSFAPHMAKELWFHLGHSRSLAHEQFSEAIFSSSSYVSFSCRSFPGSNEVSFSSTSVSDNGKYIYHCCFVFTCR

SEQ ID NO: 133514 - protein, 421 aa, Oryza sativa
  Clone ID: PAT_MRT4530_35377C.1.pep
MAVGMAPPPPTAAALPSRRRLRERIQSERQVVGGLLKKAEALVARAKEDVHGGRAAAAHSEACALPRRGRFLRRPEARPEAEATAAMDGAASPRKKRRKAATSASSIVEVEVIEPTMPKAQRDRLYGLLSSLSAEMPLPPHIVALMQSQCCCVVDPNGEEMDVDLGSAKDAALFQLLNLLEEFAQQQTTKIQPRLAEEQEPPKIEAPDATSRSSSICQLMEDGEVADEGADMDMDICGGVSPLVVDKFPDSPRSSSSGSSSSSSSGSSSSSSESDSDDDGDSASSKPDTADHPTEAEAPKLQPLEQHEVAEQDKKLIAERAASPNTEMQELIARAQERQKLRLELERKTARELERKMAREQLQEMERTARPVYDSIDPSVMKQLGISGDAQYIVSPVKSRHSLHRRGGGGLLQKLGFFLKE

SEQ ID NO: 133515 - protein, 910 aa, Oryza sativa
  unsure (1)..(910): unsure at all Xaa locations
  Clone ID: PAT_MRT4530_35378C.1.pep
MAVAMMQTPLQLRLQPRPPAVVAARHRRRLQSGFPPPNPRRGGGWCRCCANADAGKAQAQARRAYPYDEIEPRWQRHWEEHRTFRTPDIGHGLDTSKPKCYILDMFPYPSGAGLHVGHPLGYTATDILSRFKRMQGFNVLHPMGWDAFGLPAEQXGTHPKITTERNINRFRSQAXLLSYNQAEVPVNWCPALGTVLANEEVIDGVSERGGHPVIRKPMRQWMLRITSYADRLLEDLDELDWPESIKEMQRNWIGRSEGAELEFSAVDKEGHDLGANLLVYTTRPDTIFGATYVVLAPEHSLLSSLISEEQRVHVEEYIELTARKSELERTDLQKEKTGVFSGSYAKNPATGEIVPIWVADYVLGSYGTGAIMAVPAHDSRDHEFALKYKLPIIKVVSPLNGNCDSEEAYADDGIMINSSSSSSGLNIDGMLSKDAALKVTEWVEANGFGKKKVNYKLRDWLFARQRYWGEPFPVIYRDDTNEMLPLQENQLPLTLPELDDFTPTGTGEPPLTKATDWVKTVEPLSGKPARRETSTMPQWAGSCWYYLRFMDPQNASMLVDKAKESYWGPVDIYVGGAEHSVLHLLYARFWHKVLYDIGVVSTKEPFKCLINQGLILGEVEYTAYRDNKGRWVSADSNSSLIDCYQEKVPADKVTKVGDHYVLKDDANIRLNARAYKMSKSRGNVINPDDVVSEYGADSLRLYEMFMGPLRDSKTWSTGGIEGVHRFLGRTWRLVVGTPLPDGSYGVGTTVTDEEPTLDQLRVLHKCIARVTEEIQETRFNTAISAMMEFVNAAYKWDTQPKSVIESFILLLSPFAPHMAEELWFRLGNSRSLAHEQFPEGKSEYLKESKLVLPVQINGKTRGTILVDKECSEDDAFQIAASDEKLSKYLTGKGIRKRIYVPGRILNVIPR

SEQ ID NO: 133516 - protein, 272 aa, Oryza sativa
  Clone ID: PAT_MRT4530_35379C.1.pep
NFPNEEIINWYLNDDNLDNENGVPLLTWNKPDMEILVDFLSLKQNWEPAYIRQRMLPMLSTIYLREMASSQSKSFLLYDQYKFHSIQRIKIRYGHPYYLVKWKRVTRSMISNDPPSKQTELEGKNDKVEVLDGDDEVVDEEEEEPTMISETTELLDEPDVPQVLDDDKDCFLLTDEDIELVNAAFPDEAQRFQEEQRLKEAKSIARKSKLNVAGFETPKGPRPSGVQLSIKEFYRSKKGLSGDSGKDGSRKSSDVDLSKNLPKSVRRRLLFD

SEQ ID NO: 133517 - protein, 91 aa, Oryza sativa
  unsure (1)..(91): unsure at all Xaa locations
  Clone ID: PAT_MRT4530_3537C.1.pep
VFRIWGLLRSSDGFGPTILQPXIVRVLQEPEVRGLGSRVAGGVMQRLSVRLLQPLVCPPPAPGSPYPITHVSSRGSFRRREKRKCNSVIKY

SEQ ID NO: 133518 - protein, 127 aa, Oryza sativa
  Clone ID: PAT_MRT4530_35380C.1.pep
MRGEGDTAQRACRSAEQWNRLDVSQRGRRTASLPPFNAAGPYRCGAIALATTRPLSQDARAKRWRTSARGTEAIRPEEPKHGYVDVQQLFLEPFDRDGSHLAQPLFEKSPKIAKGKHVTASCSSHRK

SEQ ID NO: 133519 - protein, 88 aa, Oryza sativa
  unsure (1)..(88): unsure at all Xaa locations
  Clone ID: PAT_MRT4530_35381C.1.pep
TDDPPSXXPVSTSRRTXRTTXXLAXQGXIGXXFXXRSXPHXXPAXMAAXKRHXRGSXXPAAAGSTXHXAGRAGARAXXNXRLEPXXPA

SEQ ID NO: 133520 - protein, 818 aa, Oryza sativa
  Clone ID: PAT_MRT4530_35382C.1.pep
MEAPPVKSGWRVMAPAHAGGREDRLSDLPEGVLHRVMSFLDSRQAVRTCVLSRRWRDVWRTVPRVHADFCDFTLNWTSDDDEVDEAAVAEDEVVFNRFVNRLLELRDPNASIRSFFLRFCRSDGGDDGSAEGNRWISYALQKNVRILEVSVLSYALELDHSVFSSRYLRTMDFSNVVMNQGFFKQLEMGCPELEELFLDECFIVDDEISSQTLKVLTLDATHFCCGFKTSISSPSITSLALHYPMSGKPVLNDMEALVSTSMLLCHVKDDDFAANDLRDYLWSLYNVEILDFSYHGKKGHRQFIGSDCLRAYIAFSSLSVLLLLGGHVALLLLSRCLRLPLDAVSFALLLPNTAAALALVALVAIAAFWFTLLPEWITGRYSSPWRWSSTSPLVLAERGDPSAARRHGVAGFHARHLFDERRLSGCSAAMEEPPGKKGPAMDPAQDSGRDWLSGLPEGVLHRIMSFLDSRQAVRTCVLSRRWRDLWRSIPRVHADIYDFTPDGTIDGEGEEDVEEAEVVVVFNRFVNRLLERRDPTASIETFFFRCCIPDEDDDGSADANRWISYGLQKNAWFLEVVVQLNSLELDRSVFNSIYLRRIAFGNVFMDQGFFKQLQIGCPALERLYLDDCIVADDEISSNTLKVLTFDTTEFCYEHRISISIPTVTTLALRNTICGKPVLKDVASLVSASVVLYCVESGNFDAYDLRHYLWSFSHVKDLIFSYQGRKDNCKTSEVFIGELEEKSFTCEHLTSVEMKCWEDDPLVINVVDFFVGSGMSSSQIHIEYEDDDEDQFHIESDDMFGFEFEYEDEDEDEDEDEDE

SEQ ID NO: 133521 - protein, 56 aa, Oryza sativa
  unsure (1)..(56): unsure at all Xaa locations
  Clone ID: PAT_MRT4530_35383C.1.pep
PGDLLSECTHCGGSGPQIPGWMEHTHIQGGHTCVKVSXQCLACLCPAEIKMVLPLV

SEQ ID NO: 133522 - protein, 607 aa, Oryza sativa
  Clone ID: PAT_MRT4530_35384C.1.pep
MEQGHRQFIGSDCLRAYIAFSSLSVLLLLGGHVALLLLSRCLRLPLDAVSFALLLPNTAAALALVALVAIAAFWFTLLPEWITGRYSSPWRWSSTSPLVLAERGDPSAARRHGVAGFHARHLFDERRLSGCSAAMEEPPGKKGPAMDPAQDSGRDWLSGLPEGVLHRIMSFLDSRQAVRTCVLSRRWRDLWRSIPRVHADIYDFTPDGTIDGEGEEDVEEAEVVVVFNRFVNRLLERRDPTASIETFFFRCCIPDEDDDGSADANRWISYGLQKNAWFLEVVVQLNSLELDRSVFNSIYLRRIAFGNVFMDQGFFKQLQIGCPALERLYLDDCIVADDEISSNTLKVLTFDTTEFCYEHRISISIPTVTTLALRNTICGKPVLKDVASLVSASVVLYCVESGNFDAYDLRHYLWSFSHVKDLIFSYQGRKPHNHSSLVQLTIENNLQWCPKFFNLVGLTLGKWCLNANFYALIVFLQNSPRLEKLTLILAEDNCKTSEVFIGELEEKSFTCEHLTSVEMKCWEDDPLVINVVDFFVGSGMSSSQIHIEYEDDDEDQFHIESDDMFGFEFEYEDEDEDEDEDEDEDEDDEDEDGDEDEQRSLFQSKDV

SEQ ID NO: 133523 - protein, 43 aa, Oryza sativa
  Clone ID: PAT_MRT4530_35385C.1.pep
RSLLFTFSNPKINLSMLDRRPWLRTYKIITQCYYGLHRCNERM

SEQ ID NO: 133524 - protein, 60 aa, Oryza sativa
  Clone ID: PAT_MRT4530_35386C.1.pep
MDVEGEEAAEVLHSAAKPLAVEARPDEPCLAVGEQLETVEETAIEFRGGGKSVGFYPYPN

SEQ ID NO: 133525 - protein, 208 aa, Oryza sativa
  Clone ID: PAT_MRT4530_35387C.1.pep
MELASRRAASLLAVAAIAAVFLAGPATAVGKTGQVTVFWGRNKDEGTLREACDSGLYTMVIMSFLNVYGHGKYNLDLSGHPIARIGDDIKHCQFIGVPVSLSIGGFGNGYSLPSNRSALELFDYLWNAYFGASKAGVYRPFGDAWLDGVDLFLEHGTPADRYDVLALELAKHNIRGAPGKPLHLTATPRCTFPPSSYLGRAVATGIFE

SEQ ID NO: 133526 - protein, 650 aa, Oryza sativa
  Clone ID: PAT_MRT4530_35388C.1.pep
MAWRNDRSRQGGGGTSREEVFRDEDEAFFSGSLEVGQMGFQPGYGYGQQGGHRREWQRSGFRPRGPRSFGRNGAAMQGGRVERDQPGASKDRGSSVLQTDRCKKVMREGGSRGFPKRKQQPSGKQRRQWGRVRLEAASKIIPKNLDVVIGDHYFELKFEVEKLGVDENGDEVEIEQEEDGDRDEEAEKEEEHGKGTGVAANDDLGNCTLEKDRAEMAAEEVVEAAMENVLNKVYDEVMEEEVVGQGVGMEENNLSAAIERGEKAKEEEQILMAANVSEVVTTPTWASSRLAGMDEAHAVEKAGKRKAWKNLESRNNASNSFLSFSNASIVSDLLNIGLDLGGSCSKISDSILSLREVEEDRISKSLPLSNCLCNEVNNKGFSSEGEEELDNLVLGHLCGDLVEEVMDEEKDHLSCGVQKFSNKSNRKNAEIRRGKRKTCKNIFSNASLKSFCEGQDFFWHWTRPRGRSGGILLGINEAVFDISSVDEGEFYIKFHIKNKDDGFQWILMAIYGAAQEEYKEAFLVELVNSCSKESLPVLFGGDFTIIRNPSEKTNDNFNEKCPFLFNAVIDSLDLRELELSRCKFTWANSLSKPTFEKLDRILMSTEWEHKYPLASNRALSTERSDHTPLLLDTGVNTPKQPIFRFELGWL

SEQ ID NO: 133527 - protein, 953 aa, Oryza sativa
  Clone ID: PAT_MRT4530_35389C.1.pep
MAWRNDRSRQGGGGTSREEVFRDEDEAFFSGSLEVGQMGFQPGYGYGQQGGHRREWQRSGFRPRGPRSFGSQWGGYAGRPGREGPAWGIQRPWQQRPANRPMQEGNEGRWQQGISKEKATTIRKAKEAMGASSIGGSKQVKIGDREVLADQVEKKELEGIVLGLEEEKMSMDGATQTVDMKTTRKSEFGRVFIAVLNPRIIPKNLDVVIGDHYFELKFEVEKLGVDENGDEVEIEQEEDGDRDEEAEKEEEHGKGTGVAANDDLGNCTLEKDRAEMAAEEVVEAAMENVLNKVYDEVMEEEVVGQGVGMEENNLSAAIERGEKAKEEEQILMAANVSEVVTTPTWASSRLAGMDEAHAVEKAGKRKAWKNLESRNNASNSFLSFSNASIVSDLLNIGLDLGGSCSKISDSILSLREVEEDRISKSLPLSNCLCNEVNNKGFSSEGEEELDNLVLGHLCGDLVEEVMDEEKDHLSCGVQKFSNKSNRKNAEIRRGKRKTCKNDFSNASLKSFCGGQDFFWHWTRPRGRSGGILLGINEAVFDISSVDEGEFYIKFHIKNKDDGFQWILMAIYGAAQEEYKEAFLVELVNSCSKESLPVLFGGDFNIIRNPSEKNNDNFNEKWPFLFNAVIDSLDLRELELSRCKFTWANSLSKPTFEKLDRILMSTEWEHKYPLASNRALSTERSDHTPLLLDTGVNTPKQPIFRANEQGSFHGVVPHLIDNGLSILQYADDTILFMEHDIEEAKNLKLVLSTFERLSGLKINFHKRELFCYGKAKEVEKDYILMFGCNSGDSHFLSGLMTVKNTFLSCGSLRVYNGTQVRFWEDRWSGISPFATRFPELYSIVRNKNESVAGVMSTRPLNVSFRRAIVGKYLKDWLKVVAEVILLMYRDVIPKNDMIWKLKVIFRGTFWAKQWSSLLKEEDGQRVKDGWMILEKRVSSFFAMRGWNLRRRLEV

SEQ ID NO: 133528 - protein, 68 aa, Oryza sativa
  Clone ID: PAT_MRT4530_3538C.1.pep
MLCTVERTAMPCRNRVPRREDGVTQSGSLEKRANSYEKFFPSASVPLSSHKISCVHAACVTRASPAGA

SEQ ID NO: 133529 - protein, 278 aa, Oryza sativa
  Clone ID: PAT_MRT4530_35390C.1.pep
MSVAAEGKEKGVGGGGGGAGAGACELCGAAARVYCGADEATLCWGCDAQVHGANFLVARHARALLCRGCARPTPWRAAGPRLGPTASLCERCVRRGGGGRGGGGGGGAAGGGGRGGGGDEEMGGEGDEEEEDEDEEVVVVEEEDEDDEDEEGEGEGENQVVPWAEEAEATPPPVASSTSSSSREAAANGANAADRVKEDQPCSTSQPSLCRYASSAHHGGGGRSDEATSSRNGGGVGGRFLASRHRKRSPSDFRRSGLAQSVSGVQGSNRLQGGRWSK

SEQ ID NO: 133530 - protein, 109 aa, Oryza sativa
  Clone ID: PAT_MRT4530_35391C.1.pep
ARGADAQVQCPRMVVPTSNHECRRNFLELELDFLTDRDDYEADFPSVVNVSILEPEPLKHAVEPVEHSLLCTLSYRHAENRFRMVSETCFEGEGSHWASSAFHTYDAGR

SEQ ID NO: 133531 - protein, 198 aa, Oryza sativa
  unsure (1)..(198): unsure at all Xaa locations
  Clone ID: PAT_MRT4530_35392C.1.pep
NVTVLEQRAAHGSQAVPQKFTLTRAYLGSCTSQQPKSYSNFGCSCRARARRQLLTVKFGKXQSYHRFRVSIGFKVLESADGSLTTKSCLEPXSLACLLIANKGFIGVSADFMTSDLQPMCALNFGSMLIYHIIASXLVYTGLYYCYILSSSADRLYIIIYIGYIADCLNPIAIGWYRHRLLSAIGWNHSIGLLADRLF

SEQ ID NO: 133532 - protein, 150 aa, Oryza sativa
  unsure (1)..(150): unsure at all Xaa locations
  Clone ID: PAT_MRT4530_35393C.1.pep
SGTHVLTVKFGKXQSSHRLRVNIGFEVLRLADESCQVVSCRIRAIFAYILIANKGFIRVSADFMTSDLQPMCALTFGSMLIYHIIASRLVYTRLYCYFITSSSTDCLYIIIYIGHIADCLNPIDIGWYRHRLLXAIIWNYSIGLSADWLF

SEQ ID NO: 133533 - protein, 47 aa, Oryza sativa
  Clone ID: PAT_MRT4530_35394C.1.pep
MTISPVGPGICPYGGRGGCGFQPAGSWGRAPIMSQGKGAGDTRVSGG

SEQ ID NO: 133534 - protein, 206 aa, Oryza sativa
  unsure (1)..(206): unsure at all Xaa locations
  Clone ID: PAT_MRT4530_35395C.1.pep
PGRLLGAARHGHRLSAHRRRARPPPPRGPTEPPARRRLARPPPACPPPPGPPPRPQGEGRLITVKFGNRQRRHRLRIIIGCSISKSANGSYQVANSRVPTIFACFLIANKGFIGVLADFMTSDLQPMCALTFGSMLIYHIIICXLVYTGIYCYFITWSSADCLYIIIYIGHIADCXNPIAIGWYXHRLLSAIGWNYTIGLSADLLF

SEQ ID NO: 133535 - protein, 106 aa, Oryza sativa
  unsure (1)..(106): unsure at all Xaa locations
  Clone ID: PAT_MRT4530_35396C.1.pep
SLACLLIVNKGFIGVSAVFMTSDLQPMCALTFGSMFIYHIIICRLVYTGLYCYFITSLSADCLYIIIYIGHIADCLNPIAIGWYRHRLLSTIGXNYSIGLSADRLF

SEQ ID NO: 133536 - protein, 172 aa, Oryza sativa
  unsure (1)..(172): unsure at all Xaa locations
  Clone ID: PAT_MRT4530_35397C.1.pep
MRGDTGAPPRRSSPPGTPPSIWQTTALLTVKFGKXQSHHRLRVTIGYGISESADGSYQVANSRIPAIFACFLIVNKGFIGVSTDFMTSDLQPMCALTFGSMLIYHIIICXLVYTGLYCYFITSSSADCLYISIYIGHIADCLNPIAIGWYRHRLLSAIGWNYSIGLSVDRLF

SEQ ID NO: 133537 - protein, 87 aa, Oryza sativa
  Clone ID: PAT_MRT4530_35398C.1.pep
PHHSLRPSGWVSPPPPPWPPPPPLPAPPTIPKTLTPSTYRHGSAASAAPSPSSARPHRRGAPILLQGDPRLPRWTGGPRSLGGCHRR

SEQ ID NO: 133538 - protein, 210 aa, Oryza sativa
  unsure (1)..(210): unsure at all Xaa locations
  Clone ID: PAT_MRT4530_35399C.1.pep
TTSLHLGGKLQVSSLQIHPFHKQTEASSPLRPTLQRLAIDRPKSPPPPPPPRIAGCPPPGAAGARLLTVKFGNRQRRHRLRIIICCSISESADGSYQVANSRIPAIFACFLIANKGIIGVLADFMTSDLQPMCALNLGSMLIYHIIASRLVYTGLYCNIILSSADCLYIIIYIGHIADLXNPIAIGWYRHRLLSTIGWNYSIGLSADRLF

SEQ ID NO: 133539 - protein, 45 aa, Oryza sativa
  unsure (1)..(45): unsure at all Xaa locations
  Clone ID: PAT_MRT4530_3539C.1.pep
FRISAISKYIPTWALLFFSNFGFYFILINLVFGSYMDSSLNIPYX

SEQ ID NO: 133540 - protein, 757 aa, Oryza sativa
  Clone ID: PAT_MRT4530_353C.1.pep
MSTSANPSSAPSAEYAKKTSPEKSWITWFKRLSASKRVHWDEIGIGQALDLTIANSAKDEPLMAAATYFWFNTINAFLFNQGPMTPTLIDIIMITGLDITSSANPMSLNTKNQYDFKTKSIGGWSGYIAAYMGQGPVTPREHVAFLLMWLEKFFFFGSSCGPTTNWQSVAEALETKRQFPLGKILLGYLYQMLNNASAKLAVGSVVGAGGPWWLLQSWLNLVVMKFVNRPFVTEAEFPRLEPIKDSDREERTHRRCTSFGEYASTPIDAGAKLSAELLKDWFCSFYEGFQKEARVWFLYEDSTLLENPLDFRFEDINHDRYQKPREIFSTAISPCILPVGIYQGRNTYVSYEFYHPMSSARQFGMGQLPIGLFFADKIQCRGKISSTLMMNRLLNLQGPPLGSIENIELARFRSRNFDRWWGIIPNGGGPSPPFIGYDAPKTSALLQGLIREPADAGKKRKTRSSTMDTSAPALKKKIKSKKTKPVDDLSALDPSIEQALDEEEIEEDIDQAAAEMSDTERTPSASPKQTPPTPSAPAHFSRRESSNRTPSVADSHNVEEEEQPAAPVIPVLADMFSFDIKDYLDEIEEDTTSKAVAPLSDDVKRMLEDISHRLEASLDNLVTNCGSIQARFTDIQALLPDELTDALTPAVYLEQHQFKLEKARQKLADRRERKDIEVTIQHNQQLVHVEKSKLDQLSEGPIKSNIDRLEARKIDLLAQLQECNAELDMEHKKLADLPKSIEDQKAKLKSAIRMLRI

SEQ ID NO: 133541 - protein, 705 aa, Oryza sativa
  Clone ID: PAT_MRT4530_35400C.1.pep
MGTASGDQPAGASSDKLRHVESMSELPSGAGRISGINAVVLGESLAAEEHDLVYPSAEFSADALVPSPKKYQKMYERSINDPAGFWSEIADAFYWKEKWNPSEVCSENLDVTKGPVQISWFKGGKTNICYNAVDRNVEAGNGDKIAMYWEGNEPGQDGKLTYSELLDRVCQLANYLKSVGVGKGDAVIIYLPMLLELPIAMLACARIGAVHSVVFAGFSADSLAQRIVDCKPKLVITCNAVKRGVKPILLKDIVDAGLAESEKQGVAVGLCLTYENQSAMKREDTKWQAGRDVWWQDVVTSFPTKCDVEWVDAEDPLFLLYTSGSTGKPKGVLHTTGGYMVYSATTFKYAFDYKPSDIYWCTADCGWITGHSYVTYGPLLNGATVLVFEGTPNYPDSGRCWDIVDKYKVTIFYTAPTLVRSLMRDGTEYVTRHSRKSLRVLGSVGEPINPSAWRWFYNIVGDSRCPISDTWWQTETGGFMITPLPGAWPQKPGSATFPFFGVQPVIVDEKGKEIEGECSGYLCIKKSWPGAFRTLYGDHDRYETTYFKPFAGYYFTGDGCSRDKDGYHWLTGRVDDVINVSGHRIGTAEVESALVSHPKCAEAAVVAVEHEVKGQGIYAFVTLVDGVPYSEELRKSLILTVRNQIGAFAAPDKIHWAPGLPKTRSGKIMRRILRKIASKQLDELGDTSTLADPGVVDQLIALKDC

SEQ ID NO: 133542 - protein, 168 aa, Oryza sativa
  unsure (1)..(168): unsure at all Xaa locations
  Clone ID: PAT_MRT4530_35401C.1.pep
SIDEEADDDTYVPPAVTGKIHGLKNIRTMKFGNRQRRHRLRVIIGCSISGSADGSYQVANSRIPVIFACLLIANKGFIGVSADFMTSDLQLMGALTFGSILVLLYHIVSRLVSTGLYYYITSSSADCLYIIIYIXHIADCLNPIAIGXYRHRXIGWNYSIGLSADWLF

SEQ ID NO: 133543 - protein, 194 aa, Oryza sativa
  Clone ID: PAT_MRT4530_35402C.1.pep
PYLMGDVLRAQATASAEEVAGGVWPCELDDHLIGELLGDDGLFVPAAEHPTLYYSFGAGSSAAAAAAPCNGGGSADHERRPRPAPAVSRDLCSVYSGPTIRDIEKALSSSASPRPPYPSGRRYSSLYLVEAESKYTSKVRSCGGKMPADGYKWRKYGQKSIKNNPHPRSNLLLTVKFGKPGVVIGLESASASKS

SEQ ID NO: 133544 - protein, 242 aa, Oryza sativa
  unsure (1)..(242): unsure at all Xaa locations
  Clone ID: PAT_MRT4530_35403C.1.pep
MPLLLLLLQRATSRRRAPDPAPPGPPTRSTAAAPPCPLVARTVPPLLLPLRRATSRRAALRGSPSPLDPTPRAPPMRAVAAAPXPSSCRRRPPRPSLVRTSRSPSPPPDSVPPASPTRAAAAAPPPCSCRRRPXSSASPRSSPTIPPVPISSAVPRPQERQRRVPRGAXTSKMRMDSTPTLSLPPTSEPPPPPPHVEPPPSPPRAKLPLSPPLIEPPPPPLTCCPPPHRLLDTSSSCTSSLR

SEQ ID NO: 133545 - protein, 169 aa, Oryza sativa
  unsure (1)..(169): unsure at all Xaa locations
  Clone ID: PAT_MRT4530_35404C.1.pep
VLRARGGGATPPGRDGGGGGGGGLLTVKFDNRXRRHPLRIIIGCSISESADGSYQVANSRIPAIFACFLIANKCFIGVSADFMTSDLQPMCALTFGSMLIYHIIICXLVYTXLHCYFITSSSADCLYIIIYIGHIVDCLNPIAIGWYRHRLLSAXGWNYSIGLSADRLF

SEQ ID NO: 133546 - protein, 106 aa, Oryza sativa
  Clone ID: PAT_MRT4530_35405C.1.pep
SLACFLFANKGFIGVSADFMTSDLQPMCVLTFGSMLIYHIIICRLVYTGLYCYFITSSSPDCLYIIIYIRHIADCLNPIAIGWYRHRLLSAIGWNYSVGLSADRLF

SEQ ID NO: 133547 - protein, 92 aa, Oryza sativa
  unsure (1)..(92): unsure at all Xaa locations
  Clone ID: PAT_MRT4530_35406C.1.pep
MLRFCLRPTPLRPRPPPPLRPSSPTPXPPPPFVSXEAAVDELSHPPXPPPEGAPRPTSPPPPSPPPPPPRPSPPPPPPPPPSAAVLPVLPRP

SEQ ID NO: 133548 - protein, 57 aa, Oryza sativa
  unsure (1)..(57): unsure at all Xaa locations
  Clone ID: PAT_MRT4530_35407C.1.pep
VAPRDWGSNTWTLKSXSPPKGPFLVPFLARNTGSRVVDLFIPKTFPAGFGYKGGSPL

SEQ ID NO: 133549 - protein, 76 aa, Oryza sativa
  Clone ID: PAT_MRT4530_35408C.1.pep
MKRTVKPCETFWKERTLRQRSSVVVQTEIFDFVACTILLCENHSMSSLAWRLMALGGSASNAMAIPGRRELHCYLE

SEQ ID NO: 133550 - protein, 200 aa, Oryza sativa
  Clone ID: PAT_MRT4530_35409C.1.pep
RRGAAAAFGGRSSSLRRRSSSAKSGGRKDSSGPRSSSHPIFIKPAFGGSNVVGLAPNLVSLFLTLSTSIMAAAASMKGVNEGDRVEGNECSPGSSRLAHVRAASSKTMVIELLKCKLIIIQLISHSKKSQTTYKIRRDMLIGVKNKISFGELYYKPDHCVRTRGGFYCCELDQLCYPTLELCIPACTPSKDIDVFRSDEP

SEQ ID NO: 133551 - protein, 106 aa, Oryza sativa
  Clone ID: PAT_MRT4530_3540C.1.pep
MELGDTWVGGLWKGPRPRWGLEGRATRGPWGLHRRGAERDPFRVPTREAIPRHRFRRSLGRCAPKPEKKPSPFGNFLRSDQRCAVQGGRPETELACRVPGPRDFTT

SEQ ID NO: 133552 - protein, 63 aa, Oryza sativa
  Clone ID: PAT_MRT4530_35410C.1.pep
RTASSAATSPAPQGRIDCPRRPISPTERATVQGFTDRCARGDRVTDDRLTIAVAASLLRSGCG

SEQ ID NO: 133553 - protein, 332 aa, Oryza sativa
  Clone ID: PAT_MRT4530_35411C.1.pep
RARFQPPKQGGETMAPHLKEVCSSLAASKELVKALAGIWGPGDGALNPSTASSLLSALRAELDLARAHARRLAKEDRRRGDEAARARARLAEDAREWGRRQREKAAAAVRVAAAELDGERRSRRRAERVNAKLGRALADAERELAASRRELERERRSRERLEKVCDELVRGGLVAAGGGGRGGEEEVEEMRREAERAQEELEKEREMLRLADELREERVQMKLLEARLQFEEKNAVVEQLRDELEAFLGSKKDRQQQEEPPPPDADDHRRRRPDGHHDNDGDEEDDGGGRGECVAEDSDGSEMHSIELNVDGNSKDYSWSYTTASKDMTTTA

SEQ ID NO: 133554 - protein, 683 aa, Oryza sativa
  unsure (1)..(683): unsure at all Xaa locations
  Clone ID: PAT_MRT4530_35412C.1.pep
MTGLDLLISFKENPESHLRRTRPRVISPQVTLSLTRXIIPTSSTLNDMAEKTLHEFAAPSADNVPVGLXVGMGDGDFDMKTSLIKMAQACPFCGKPNEDASAHLHKFLESVXGVTLDTIRLXLFPFFLLGRAKQWFYANRATTFLSRFFPMGKTNALRGRISSLQRTRDETILEAWERLQEYTPSSWDHLDAAAGGTSFSRTVRCQPIEKMLSNMGWNEEXLQTRQCGMYTVKWTKMLATQFDLLLKRLDNNEKDANQGTVKALGSHPTCEVYGSTGHSRMDCPETREDVMVMNNKNGYRPQGGRGWSFAPWGGSRTNRTHKEVKEKPRRTDSLIVFMMRFLEQEEMRNRQYLKPASKKPRIQAGQPVFPVTKRPPPALKTKKGSSTRTSRHDKRSTPSSADASMEEAYVPPRLYDNSDLDLVGDREMQAYHMLKDRTCAQTXSIRLDLLKRIGMDANFHTIWRAIGWDKFACVDEPGSRLLTMXFLCTLLEVGDGVTFHTFRKEYHFSWKDLSLHLGFDKTCKVNFRNAFPXFNKRMFWQSISGLSSCKNTRTSDIHYPTLGLLHRLLGFVLFPRADIRXYELILLNTMDRKIKVSPIQPMIKQCCXELTIPLQVELPHDVPRRITRREKHXQETSSTSPPVQMYGGXWDPTADAPXWTQFLQQDAGGSSLQSTSNGRWHEP

SEQ ID NO: 133555 - protein, 87 aa, Oryza sativa
  Clone ID: PAT_MRT4530_35413C.1.pep
YHIAVRHDLLNKRLALCSVLFIHHLSSFHNSYISNGKLYFNVLSENMKYINVNSKMKSKVLISNSPHISGSYPPEIKDYHFFMYCNL

SEQ ID NO: 133556 - protein, 673 aa, Oryza sativa
  Clone ID: PAT_MRT4530_35414C.1.pep
MATGMLLRGLRSAASRTSPVFPTSASSPAPYVSPLLRRLYSAAAASAAASPALGPGGALDPSRIRNVAVIAHVDHGKTTLMDRLLRQCGADIPHERAMDSISLERERGITIASKVTSVSWKENELNMVDTPGHADFGGEVERVVGMVEGAVLVVDAGEGPLAQTKFVLSKALKYGLRPILLLNKVDRPSVSEETCNEVESLVFDLFANLGATEEQLDFPVLYASAKEGWASLEFTKSPPDNAKNMSALLDSILQHVPSPKADLEAPFQMLVSMMERDFYLGRILTGRVRSGVVRVGDKVHGLRSTDDGVQKIEDGKVVKLMKKKGTSMVIVEAAGAGDIISMAGLAAPAIGHTVSNSDILTALPTIELDPPTISMTFGVNDSPLSGRDGTHLTGAKIGNRLMAEAETNLAINVLPGPLSESYEVQGRGELQLGILIENMRREGFELSVSPPKVMYRTDRGERLEPIEEVTVEVDEEHVGFVMETLTHRKGEVMDMGPVPGTTGRTRIFLTCPSRGLVGFKGIFSSFTRGTGFMHRAFQAYAKYRGQLGNVRKGVLVSVGKGLITSHALMSLEARGILFVSPGMEAYEGMIVGEHSRDSDLDINPVRTKELTNIRAPGKDENVRLSPPRLMSLEEAIGYVAADELIEVTPKVIRLRKKYLDATKRKMMKNKPMD

SEQ ID NO: 133557 - protein, 84 aa, Oryza sativa
  unsure (1)..(84): unsure at all Xaa locations
  Clone ID: PAT_MRT4530_35415C.1.pep
MSFVISLTPLIIIKDAXTSNNLISSWFGMVYSWFGDRTVQPGWLFRMVGPIQQGMLYSVGLILLNXYLTVLLNSEMFAKCCFCK

SEQ ID NO: 133558 - protein, 90 aa, Oryza sativa
  Clone ID: PAT_MRT4530_35416C.1.pep
DTLAQLSRNKCLLLRTSYLKDHGPILFYQMNARSFFRGPLGMQHWGSQNPGGVILLATRAHRGGWITGALWHTPPPCTPQPGDRYRTRIP

SEQ ID NO: 133559 - protein, 133 aa, Oryza sativa
  Clone ID: PAT_MRT4530_35417C.1.pep
NPQTMQQRPKYDDVLAEVSDFLNQRIFECITSGIAKQHIILDPGFGFGKTVQHNYILLKHLKAFADSGFPVLAGLSRKSMIGAVTGKSVEQRTAGSITAALLAVQHGARIIRVHDVAETADALKVWQAMQDCE

SEQ ID NO: 133560 - protein, 67 aa, Oryza sativa
  Clone ID: PAT_MRT4530_35418C.1.pep
MDDDHHSGGEVSLEAMVKIVSQATASDKIISAFLTEVNDGPAGRPVCCYHSAMTRPNASEIGLHTLI

SEQ ID NO: 133561 - protein, 555 aa, Oryza sativa
  Clone ID: PAT_MRT4530_35419C.1.pep
MERLRVAISHHRAALPLPTHHNHFRRRHLQLQPFPSSLSLSLPISPQLSPAPPRRHLLPPLLASASAAQAAGPAPARAAGGGGGGAKPVPLLVSLAVGLAVRFLAPRPAEVTPQAWQLLSIFLTTIAGLVLGPLPVGAWAFLGLTATVATRTLPFTAAFGAFTNEVIWLIVISFFFARGFVKTGLGDRVATYFVKWLGRSTLGLSYGLAISEACIAPAMPSTTARAGGVFLPIVKSLSLSAGSKPNDPSARKLGSYLVQSQLQASGNSSALFLTAAAQNLLCLKLAEEIGVKIANPWISWFKVASLPAIISLLATPYLLYKIFPPEIKDTPEAPAIAAQKLKNMGPVTRNEWIMVATMILAVSLWIFGDTIGVSSVVAAMIGLSILLLLGVLNWEDCLNEKSAWDTLAWFAILVGMAGQLTNLGIVSWMSNCVAKVLQSFSLSWPAAFGVLQASYFFIHYLFASQTAHVGALYSAFLAMHLAAGVPAILSALALTYNSNLFGALTHYSSGQSAVYYGAGYVDLPDVFKLGFTTAAINAVIWGVVGTFWWKFLGLY

SEQ ID NO: 133562 - protein, 83 aa, Oryza sativa
  Clone ID: PAT_MRT4530_3541C.1.pep
FFFFFFFFFFFFFFFFFFFFFFFLGEKGNPKPHFIPTHLERGLRGCNIGGGQKNPPGHWQRTGGGHRPNKFYYRGDLKGEAGG

SEQ ID NO: 133563 - protein, 440 aa, Oryza sativa
  Clone ID: PAT_MRT4530_35420C.1.pep
MADKTLREFATPSADNVAIGPQINMGDVDFDLKSSLIKMAQASPFCDKPNEDANAPLQQFLEICNTYAIKGVSPDAIKLRLFPFSLIGKAKRWFYANRAMINTWDKCSTAFPSKFFPMGKTNALRGRISSFQQTRDESIPEAWERLQEYVAVCPHHGMDDWLILQNFYNGLTLMSRDHLDAAAGGAFFSKTVRGAIDLIEKMVSNMGWSEERLQTHQQGMHTVKETEMLAAKLDLLMKRLDDHDKRPQGTVKALDSHVTCEVCGSTGHSGNDFLETREEAMYMGSNNNGYRPQGVIQKIHINVPLLDAMQVPTYARYLKDILNNKRPLPTMEVDKLTEQCSNVILHKLPEKKKDPGCPMITCSIGAQQFDHLLDRRKMCRIKYGPNPHNIQVVEVEPPKTYSLVKFMQNFLEKETTMPKNRYWKTPAKSNVPAKKLEQPA

SEQ ID NO: 133564 - protein, 148 aa, Oryza sativa
  Clone ID: PAT_MRT4530_35421C.1.pep
CLTPPPPPSSRTFSSPYPTKQKAVLPSFNRSAMSLISSLSPSRPPRITLPPSSTSPMASPSTTMATSPPPPTPTPSSSSPSATAPSTSTSLPYPPPATRRSRRRLSRRCSLGTHRALGPAIAHTRRLPPCLCLHRHPRCGTAQQLGRC

SEQ ID NO: 133565 - protein, 93 aa, Oryza sativa
  unsure (1)..(93): unsure at all Xaa locations
  Clone ID: PAT_MRT4530_35422C.1.pep
MTRRXSHXSHNXHNSRXYPNXXVKIFGXRLTDXSIXKSAXXGNLSLLSSAXGSTNSXASPADXPXTPPXPPTLRSDDFVQGFSFXTRDRRRVF

SEQ ID NO: 133566 - protein, 61 aa, Oryza sativa
  Clone ID: PAT_MRT4530_35423C.1.pep
ACLRTMRDDAGVVECSHVASSVTEFPFFATQLRLGPPEAEEVLPLGPLNAFDTAGLSMANI

SEQ ID NO: 133567 - protein, 322 aa, Oryza sativa
  unsure (1)..(322): unsure at all Xaa locations
  Clone ID: PAT_MRT4530_35424C.1.pep
ADDDFGLTKFHCQQVRVVEERREGVPCXEWAQKASFFVDHGASGMSVAKRCSLAMERCTLAAMRSCPEWEPDAFQQVAAGLKNKPLIPLGLVPPSPDGGRRRAGMTDNSTMRWLDVQPAKSVVYVALGSEVPLPLEQVHELALGLELAGTRFLWALRKPHGVDLSDVLPPGYQERTKSHGHVAMGWVPQITILAHAAVGAFLTHCGRNSLVEGLLFGNPLIMLPIFGDQGPNARLMEGNKVGSQVRRDDMDGSFDRHGVAAAVRAVMVEEETRRVFVANAIRLQELVADKELHERYIDEFIQQLVSHGADGSCNTAAPVPSS

SEQ ID NO: 133568 - protein, 167 aa, Oryza sativa
  unsure (1)..(167): unsure at all Xaa locations
  Clone ID: PAT_MRT4530_35425C.1.pep
PYASKYDYLLLGVVKITIKSVPSEAAALKCMKQHADATEVITVTGYWYYFFHHMPQAMIPLFLTRAHLKVEVQIIITKYKPWWVAEEHXPLIRNLSNYEVIKFIXNAGVHSFPQGYLGMHRGRDIYHLSXHRIRNPRNYTMVAYSRFFHDAVXIRLDRPSMLGEEPG

SEQ ID NO: 133569 - protein, 230 aa, Oryza sativa
  unsure (1)..(230): unsure at all Xaa locations
  Clone ID: PAT_MRT4530_35426C.1.pep
LCHRATVTAQSVRVIENIESSDSSDKLVWGLTVNKKYTTRSLYRALIXFRGIREVNIELXNLSLSMNIKHFLWLAFRDRIXQAAEQLKKKGWEGSKFCQLCGALESTNHILFTCDMVRLIWCICXADALNWITLPGNFKDFFLLCKGISDHTSFRVTLSLLAAIYWNLWLTHNNMVLRANLVYSPLTIPFQIISNLLQWRKLFRPEEEHKLEALVEKLRMLVTSLTPPRA

SEQ ID NO: 133570 - protein, 176 aa, Oryza sativa
  unsure (1)..(176): unsure at all Xaa locations
  Clone ID: PAT_MRT4530_35427C.1.pep
EKKIQSNIKKNKSNSNIWAWXTSPTAPPPPASPPPSPPRRRGHVSLLTVKFGNQQRRHRLRVIIGCSISGSADGSYQVANSQIPAIFACLLIANKGFIEVSADFMISDLXPMCALTLGSMLIYHIIASRLVYTGLYCYFIISSSTDCLNPIAIGXYRHQLLXGWNYSIGLSADRLF

SEQ ID NO: 133571 - protein, 171 aa, Oryza sativa
  unsure (1)..(171): unsure at all Xaa locations
  Clone ID: PAT_MRT4530_35428C.1.pep
RYFPCKPSPSSYIRGGRGVLTVKFGNRQRRHRLRIIIGCSISESADGSYQVANSRIPAIFACFLTANKGFIGVXADFMTSDLQPIYALTFGSMLIYHINASRLVYTGLYYCYILLSVADCLYNIIYXSVRIYIGHIADCXLNPIAIGWYQHRLLLAISYNYSIGLLADRLF

SEQ ID NO: 133572 - protein, 170 aa, Oryza sativa
  unsure (1)..(170): unsure at all Xaa locations
  Clone ID: PAT_MRT4530_35429C.1.pep
PRAIAPPRDGPPKLSQRGWSGHASLLTVKFGKXRSNHRLRVSIGFEVLRLADESYQVVNCRILAIFTCFLIANKGFIGVSADFMTSDLQPICALTFGSMLIYHIIASRLVYTGLYCYFIISSSTDCLYIIIYIGHIADCLNPITIGWYRHRLLSAIGRNYSIGLSADRLF

SEQ ID NO: 133573 - protein, 35 aa, Oryza sativa
  Clone ID: PAT_MRT4530_3542C.1.pep
LPCRFARILKSSRIVKFEHCVLPPFCGLNPSTRLN

SEQ ID NO: 133574 - protein, 320 aa, Oryza sativa
  unsure (1)..(320): unsure at all Xaa locations
  Clone ID: PAT_MRT4530_35430C.1.pep
RAAGIRTWISPPXRRCGRSSPPLSLLFPHGDRHRVALRGGEXSPHSQEVKRWVLSDFDIGKPLGRGKFGHVYLAREKRSNHIVALKVLFKSQLKQSQVEHQLRREVEIQSHLRHPNILRLYGYFYDQTRVYLILEYALKGELYKELQRCKHFSERRSATYIASLARALIYLHGKHVIHRDIKPENLLIGSQGELKIADFGWSVHTFNRRRTMCGTLDYLPPEMVEKTEHDYHVDIWSLGILCYEFLYGVPPFEAKEHSETYRRIVKVDLKFPLKPFVSPAAKDLISQMLVKNSAHRLPLHKLLEHPWIVQNADPSGVYRG

SEQ ID NO: 133575 - protein, 101 aa, Oryza sativa
  Clone ID: PAT_MRT4530_35431C.1.pep
SVNTAVVPVPVVHNPRARKLRSAVWQDFTKERRADGSCVAVSTRRAGKRRKLIVRRILHNKTSTDGQSGDGHASGEDHDNDGTHFDQELSRRDLAHMIVQH

SEQ ID NO: 133576 - protein, 152 aa, Oryza sativa
  Clone ID: PAT_MRT4530_35432C.1.pep
MHTNMLSTVKFGNQQRRHRLKIIIGCSISESADVTYQVANSRISAIFACFLIANKSFIGVSADFMTSDLQPMYALTVGSMLVLLYHIICRLVYTRLYCYIITSSSADCLYIIIYIGHIADCLNLIAIGWYRHRLLSAIGWNYSIGLSADRLF

SEQ ID NO: 133577 - protein, 701 aa, Oryza sativa
  Clone ID: PAT_MRT4530_35433C.1.pep
MLEPTAMEVPITSSVNTAVVPVPVVHNPRARKLRSAVWQDFTKERRADGSCVAVCNHCKKQLTATSRSGTTHLRNHLAICTTTSTRRAGKRRKLIVRRILHNKTSTDGQSGDGHASGEDHDNDGTHFDQELSRRDLAHMIVQHGYRFSIVDDVGFQKFVKNLQPRFRMVSYETVRADSMTIYESEKLKLQDALLKIPCRLSISVDMWRSNTQMDFLCLTCHYIDHANDEWKVRKKILNFVHVEAPFTDDQIASLILEKLREWGIDRKLAAIVLDNCASGEIVARELLVVLQPRRLLLLNGNLFQVRSCAHILNLTVQESLEQTSDIITRVREMIQNVKFSQERFEKFQDTAKLLQMDQKLLVLDSPNNWPSTYLMFDSACYYHDVLMRLAEQEAHYGAFLTAKEWADVKALTEILDALYHKMEKFPVENPTANLYFNDMCEVHVLLNTWRNSPSPVVAQVADRMLTKFEGYWDLTRPVMAFASILDPRYKMKSVEYFCRLIYAADQFRAKTTIDDIRQSFTNLCSEYEQSGNSFKNPSALFYSATSNSCMSSVYSNGDDFKTFSRITLSDARRGLDQYIQETSSGQSFKSDLDMYLEEPVYRQKEGHLDNFDILGWWKSFAAKYPVLSQMARDILAVPVSIIPLDSDARTLNEYLSTMDPSTVQGLVCAQDWLREDTEVASSDGHADDKAARGDELIVLPK

SEQ ID NO: 133578 - protein, 210 aa, Oryza sativa
  unsure (1)..(210): unsure at all Xaa locations
  Clone ID: PAT_MRT4530_35434C.1.pep
MTTKTGTRVLIKRVNRRENLPKPTQCDLENSRLNVFNLYEDIATLSPHSSELMRDMHTRHKEPYVLTVKFGNRQRRHRLRIIIGCSISESADGSYQVANSRIPAIFACLLIANKGFIGVSADFMISDLQPMCALTLGSMLIYHIIANRLVYTXLYCYFIIASSADCLYIIIYIGHIADCLNPISIGWYRHRLLSAIGWNYSIGLSVDRLF

SEQ ID NO: 133579 - protein, 84 aa, Oryza sativa
  Clone ID: PAT_MRT4530_35435C.1.pep
WYACWYRCGQCIAGIDHAFVISHQKVAVAGSSGSDDSRVTDTTPRRLRIWALKDDYAKLELRDTDSSMGNALSRVMIAEVSTVV

SEQ ID NO: 133580 - protein, 146 aa, Oryza sativa
  unsure (1)..(146): unsure at all Xaa locations
  Clone ID: PAT_MRT4530_35436C.1.pep
LLTVKFGKXRSSHRLRVSIGFEVLRLADESCQAVSYQILAIFVCFLIANKGFIGVSADFITSDLQPMCALTFGSMLIYHIIICRLVSTRLYCYFITSLTADCLYIIIYIGHIAGCLYPIAIGWYRHRLLSAIGWNYSIGLSADRLF

SEQ ID NO: 133581 - protein, 78 aa, Oryza sativa
  unsure (1)..(78): unsure at all Xaa locations
  Clone ID: PAT_MRT4530_35437C.1.pep
CLXRTXLDXNGFLNCDFSTVXVLXLWXNXKXWFGRQXQEYCYFCASLXXNXDLXXRNXXVFKKKKKKKKKKKKKKKKK

SEQ ID NO: 133582 - protein, 666 aa, Oryza sativa
  Clone ID: PAT_MRT4530_35438C.1.pep
MGEGVKAMLARPIQLADEVAKQCGAARCFRAECGELKARADKLAALLRQAARADLYDRPAARIMAGAQQALLKASSLAARCASGHPRLRRLFTLSPAAGFPRTVALLDTALEDVAWLLRISSPRSGGGGGGGGGGGDDDGDGDDGDLRGLPNIAQNEPILFLIWDHVARLHTGGLAARADSAANLASLARDSQHFAKLIIEEDGVPPLLRLLKEGTDDGQEAAARALGLLGCDDESIDKLVQAGVCSVFAAALKDPPMRVQAAVADAIGTLADRSATCQELFAQNNAVRYLVGHLASGTIQEHSRYSVGSSSSKNSAAAPQHMTSLHSVVLAKTLSMRHGGDRGTSSSTDEPPRVSNEQDTKRNQMQSVVQSAMAAKTKTNGSLVPPFRPQLGTSGSSGRGAVREVEDPETKARLKAMAARALWKLARGHLGVCKSITDSRALLCFAVLLEKGDGGMGTSVQYFSAMAIMEISRVAEHSLALRQSAFKPSSPAAKAVVDQLLHIVSKGDYDDLLLPCITALGCLARTFTASENRVIAPLVELLDEREPPVIKEAVLALTKFACNENHLHVNHCKAIVDSGGARHLVQLVYLGDEVQIEALILLCFIALHVPESEELAQAGVLAVLLWASKQAHMIQDMRVDALLPDAKGRLELFQSRASRCRLLNM

SEQ ID NO: 133583 - protein, 147 aa, Oryza sativa
  unsure (1)..(147): unsure at all Xaa locations
  Clone ID: PAT_MRT4530_35439C.1.pep
FIVIIFVKFGNRQRRHRLKIIIGCSILESADGSYQVSNSRIPAIFTCFLTANKGFIGVSADEMTSDLQPMYALTFISXLLYIVSSRLVSTGLNCYIILSSADCLHIIIYIGHIADCLNPIAIGWYRHRLLSAIGWNYSIGLSADRLF

SEQ ID NO: 133584 - protein, 120 aa, Oryza sativa
  Clone ID: PAT_MRT4530_3543C.1.pep
MGDQVISPQPAWPWLLEEVEDILHYTFNRNGLEYEAFLVLTTEEDVRVCDPLTCGCRGGGRRRHGCGAAACEWRGGDAGVAAAPGLSSTAAKTKETTPPPDDMKSVAAAARTPDTKILGG

SEQ ID NO: 133585 - protein, 47 aa, Oryza sativa
  Clone ID: PAT_MRT4530_35440C.1.pep
AIQYYRIAIPSVDFIVRHVAHSLGFYSPDDMDLAGVEWTTCFEFRPC

SEQ ID NO: 133586 - protein, 785 aa, Oryza sativa
  Clone ID: PAT_MRT4530_35441C.1.pep
MEVSKEEFLRQFGGDYGYPGAPKGVDEMRAAEFKRLEGAGMAYLDHAGATLYSEAQMADVLKDLASNVYGNPRSCMNCFDSKVLQQGACTATSLLYPVMRMQISRYALSKGATVLAVDVEEGADLAKDNGSYSLYKISRRTNQRRSKDVLSHNCQNGSLSDISGNNWNIFAFPSECNFSGQKFSLSLVKLIKEGKIPLQQQGKWMVLIDAAKGCATEPPNLTVYPADFVVCSFYKIFGYPTGLGALIVKNEAANLLNKTYFSGGTVAASIADIDFVQKRKNIEQVLEDGTISFLNIASLRHGFKIIEMLTTSAIERHTTSLATYVRNKMLDLKHSNEINVCTIYGQQYSKVEGLKMGPTITFNLKREDGSWFGYREVEKLASLFGIHLRTGCFCNPGACAKYLGLSHSDLVSNFEAGHVCWDDNDIINGKPTGAVRISFGYMSTFEDAEKFLKFLQSSFVSLPVQFNNGYMLNLNSLNLIDNSSQKAVSDIHLKSIIIYPVKSCQGFSVKSWPLTTGGLMYDREWLLQGSGGEILTQKKVPELGSIRTLIDLELGKLFIESPTRRDKLQLSLLESLADLSEEVDVFGQRYEVQSYDDRVNTWFSEAIGRPCTLVRCSSSKYRSCTYTGLRDRPCRDTQSKLNFVNEGQLLLISEESISDLNSRLNSGKGDCKQKLPVDAMRFRPNLVISGSSPYSEDNWKKLRIGEACFTSMGGCNRCQMINLHQDSGQVLKSKEPLATLASYRRKKGKILFGILLNYEDIMEGENETIAGRWLQVGQQVYPSTE

SEQ ID NO: 133587 - protein, 147 aa, Oryza sativa
  unsure (1)..(147): unsure at all Xaa locations
  Clone ID: PAT_MRT4530_35442C.1.pep
RLLTMKFGNRQRRHRLRIIIGCSISESADGSYQVANSRIPAIFAYFLIANKGFIGVSADFMTSDLQPMCALTFGSMLIYHIIASQLVYTGLYCYFIISSSADCLYIIIYIRHIADCLNHIAIGWYRHRLLSAIGXHCSIGCLADRLF

SEQ ID NO: 133588 - protein, 144 aa, Oryza sativa
  unsure (1)..(144): unsure at all Xaa locations
  Clone ID: PAT_MRT4530_35443C.1.pep
TVKFGKXQSSHRLRVSIGFEVLRLADESCQVVSCRIRAIFACFLIANKGFIGVSADFMTSDLXSMCALTFESVLIYHIIASRLVYTGLYCYFITSSSADFLYIIIYIGHIADCLNPIDISWYRHLLLXAIGWNYSIDLSVDRLF

SEQ ID NO: 133589 - protein, 253 aa, Oryza sativa
  unsure (1)..(253): unsure at all Xaa locations
  Clone ID: PAT_MRT4530_35444C.1.pep
TRRLDIEGIRGSQGPRHMQLYFYDTEDADALAHRVRRSPDLDINLVRVIVRILAQKPYVQTFSRVGSMPNIDDYMIELNTNVTPDQRRXGDDPMRTFDRQVLVHAKGDKPCYXQSIPCDVEMDEQCDXSLGDVRTNEESTFDDLPENEVVDNYLDNEDDNDDSSKSGKXGKKDKFVTAREYYCFRLQVRRGLLNIILFGGXLFQQWAIDMYIKIESMRLDWYSKPEKQKKIQAELYQGVVDVLSSGEKRFRSW

SEQ ID NO: 133590 - protein, 1985 aa, Oryza sativa
  unsure (1)..(1985): unsure at all Xaa locations
  Clone ID: PAT_MRT4530_35445C.1.pep
LGMDANGSPVEGRFVFGDITNRLNVRQTTPCNEVENKKGETSSKKREYRARKKVEANNPYHGTLNYLPTACVSVNHETGNSQPTKMSNEQREERNRKQHEYRKWKRDEMNNVDISVLSNIPMQPVTEDRNRKQREYRARKKAESNNAILANFDATTPIIASFGTTYSTILQASSVTDNKNGNIDDPTDWLHRNVTYKRQCKRKPVIIEEDKDSPTIDGVTQEETIHVQDAKVHIPDDTYVEFDSGLFEPPLIDFVDEGELEIHDIADNVDELDMQFQQSNDGYESYRVDVKGVNSIEANDPHDRVYKKLPKTHHILKKVPDCQFCDAIRFQYESPGFCCRQEKINVHVPKILAELIRLFTSQVHNDAKYFRKHIRYFNSHFSFTSLGVTLDQQVSTAAGTGVYTFRVHGALYHRLDNLVPGSQGPRHMQLYFYYTKDADALAHRVRRSPDLDINLVRVILCILAQNPYVQTFSRVGSMPNIDDYMIELNTNVTPDQRRYNAPTASQVAAIWLEGDNPMRTFDRHVLVHAKGDKPCYIQVYHGCYDPLAYPLFNPNGXTEWNLKMPYNDPNQIPCDVEMDEHCETSTLGDVRTNEESTFDDLPENEVVDNYLDNEDDNDDSSKSGKGKKDKFVTAREYYCFRLQGVVDVLSSGETSGLAVGKRVVLPRSFPGGDSDMQXRFLNAMALVQCFGRPDYFITMTCNPYWDEIIKNYWPRIFCNILCALMYSPKFSVNFRSSRNSFNSTKIIASIKIKRKTIKIPRRGTPSPHVLHPFPHSPHENSPPVNLSTTPTMPRPSRRPVATSLEHDPVIPSPXKKHPRPPLSISPNFSELXALYCSPLAAPIAAAHRRLSIRSPPLLQPSPCCSAATCGFAVPCRTSAPLRFPHSILYMFVXFLCTVSLVFIRVFPHFACQRVESVVSEVRGREEKSSEDQSEXSKASHTFPLSMLIPIYKCFTVYKXYACFANYMGSGYYLSARLCHVYLISVLCQPWVINRLAGVTYVTXLELYDKMFYNCLYANSLKPLLVSPCTSASLVWLAEYGGCTQSCYYSPFSEVXTKAQTPVEFCLWSGAEAPLGSPFSAAVVLFRCEDXKCLFRKYFTLYLRLELYITYRFVYPGWXQITEHLEPGQQPQDRPDLVTRVFKAKLRDVLDLIVKKKYFGEVQTYTHVTEFQKRGLPHEHILLIMKSGSKLTTPDEYDKVICTEIADKVKYPELHRLVIKHMLHRPCVDPSGEINEIQQYRNAKYVPPPEAIYRMLGFPLFGIYPAVLQLQLYLPNMQYVTYNEDGNLENVVNCPSSTRTTLTEYFKMNQVDPEARKLLYKEFPEHYRWITGQNVXQKRKTERRQVGRIVYTHPAEEERYYLRVLLNHMRGATXEDLRTVSGTTYFTFREACEKRGLVETDKSHDDCLNEASTFQMPSALHRLFATILVFCEVTDIRALWDNHKAAMSEDYSRGNTNPAAVEQMVLRDIRDLLYSMGKDITEYGLPEVIDIGFFSNDVMTEIIEELNVLVDQDHLDIYTTLNDEQRAGFDEIIDHVTNKKSQVFFIDGPGGTGKIFMXKALLARVRSEGLIAIATATSGIAASILPGGRTAHSRFKIPINIAHNSMCNFTKQSGTMELLRMASLIIWDEAAMMKRQAVETLDRYLQDIMGCSLPFGGKVIVFGGDFRQVLPMVTRGTRAQITDATLQRSYLWXKNIRKIRLSRNMRAQSDPWFSEYLLRIGNGTENTIRDDYVRLPDEIVIAYGDSEDSVHKLINHVFPSLDDEKNASSASYMSTRAILSTKNDYVDKLNANMIDRFPGQAKVYHSFDSVDDDPHNSYPLDYLNSITPNGLPPHELIVKINCPVILLRNLDPNNGLCNGTRLMVRAFQDNAIDAKIVGRQHASKRVFIPWIPLSPSDDISLPFKFKRKQFPIRLSFAMTINKSQGQTIPNVGIYLPXPVFSHGQLYVALSRGVSSLTTRILAKPKKEVDSTGKSTRNIVYKDVLDW

SEQ ID NO: 133591 - protein, 415 aa, Oryza sativa
  Clone ID: PAT_MRT4530_35446C.1.pep
MEMWRVIALPRRELRWNRGACRLRHDLLNRDPLSHLYLQNPRSPRDRRPAGGGARRPADGEPSRLAGGGGWLGDLEAGGGARPGRSPPSSSREVLADPLRRRRVNSSPIPFLRRAVTPPIPPSSSGAPRGSVGADPHPPGRRRRSCISSVPSSPIPRLPRAVTPPILASPRPGSWGLGEIDGPGVLGSWDSKSSQALRFENPVQRQWRLRRSPSTTDNDNATPLPPQEPPLPIHTHATVPPAPKEDAEALAHRVQRSPDLDINLVRVAAIWLEGDDPMKTFDRHVLVHAKSDKPCYIKAYHGCYDPLAYPLFNPNRETGWNLKMPYDDPNQIPCDVEMDETCEASTFGDVHTNEESTFDDLLEDEVVDNYLDNEDDNDDSSKSSKGKKDKFVTAREYYCFRLQNISNPANNLKID

SEQ ID NO: 133592 - protein, 627 aa, Oryza sativa
  unsure (1)..(627): unsure at all Xaa locations
  Clone ID: PAT_MRT4530_35447C.1.pep
HDCASFSVDPTGEINEIQQYRNARYVTPPEAIYRMLGFPLFGIYPAVLQLQLHLPNMQYVTYNEDGNLEDVVNRPSSTRTTLTEYFKMNQVDPEARKLLYKEFPELYRWITGQNVWQKRKMKRGQVGRVVYAHPAEVERYYLRVLLNHVRGATSFEDLRTVSGTSYSTFREACEKRGLVETDKSHDDCLNEASTFQMPFALHRLFATILVFCEVTDIRALWDNHKDAMSEDYSRGNTNPAVVEKMVLRDIHDLLHSMGKDITEYGLPEVIDIGERCNDVMTEIIEELNVLVDQDHLDIYTSLNDEQRARFDEIIDHVTNKKSQVFFIDGPGGTGKTFMYKAFLARVRSKGLIAIATTTSEXGNGTEXTIRDDYVRLPDEIVIAYGDSEDSVHELINHVFPSLEDEKNASSASYMSTRAILSTKNDYVDKLNADMIDRFPGQAKVYHSFDSVDDDPHNSYPLDYLNSITPNGLPPHELIVKINCPVILLRNLDPNNGLCNGTRLMVRAFQDNAIDAEIVGGQHASKRVFIPRIPLSPSDDISLPFKFKRKQFPIRLNFAMTINKSQGQTILNVGIYLPEPVFSHGQLYVALLRGMSRLTTKILAKPKKEVDSTGKSTRNIVNKNVLDW

SEQ ID NO: 133593 - protein, 1085 aa, Oryza sativa
  unsure (1)..(1085): unsure at all Xaa locations
  Clone ID: PAT_MRT4530_35448C.1.pep
MRTFDRQVLVHAKGDKPCYIKAYHGCYDPLAYPLFNPNGETGWNLKMPYNDPNQILRDVEMDEQCDIIFSLDAENEVVDNYLDNEDDNDDSSKSXKGKKDKFVTAREYYCFRLQEQWRGQGDTXGKDLEPWMIIEDVQVKSMRLDWYSKPEKQKKIQAELYQGVVDVLSSGEKRFRSWFLNAMALVQRFGRPDYFITMTCNPYWDEITEHLEPDQQPQDRPDLVARVFRAKLRDVLDLIVKKKYFGEFNQAXQQGKDSYPLYRRRDDGWRVKIRGAVLDNRWVVPYNPGLLMRYNCHINVEACASIKSVKYLYKYVYKGHDCASFSVDPTGEINEIQQYRNARYVTPPEAIYRMLGFPLFGIYPAVLQLQLHLPNMQYVTYNEDGNLEDVVNRPSSTRTTLTEYFKMNQVDPEARKLLYKEFPELYRWITGQNVWQKRKMKRGQVGRVVYAHPAEVERYYLRVLLNHVRGATSFEDLRTVSGTSYSTFREACEKRGLVETDKSHDDCLNEASTFQMPFALHRLFATILVFCEVTDIRALWDNHKDAMSEDYSRGNTNPAVVEKMVLRDIHDLLHSMGKDITEYGLPEVIDIGERCNDVMTEIIEELNVLVDQDHLDIYTSLNDEQRARFDEIIDHVTNKKSQVFFIDGPGGTGKTFMYKAFLARVRSKGLIAIATTTSGIAASIMPGGCTAHSRFKIPIKIAHNSMCNFTKQSGTAELLHMSSLIIWDEAAMTKRQAVETLDRSLQDIMGCSLPFGGKFIVFCSDFRQVHPVVTRGTRAQITDATLQRLYLWDNIRKIRLSRNMRAQSDLWFSEYLLRIRNGTENTIRDDYVRLPDEIVIAYGDSEDSVHELINHVFPSLEDEKNASSASYMSTRAILSTKNDYVDKLNADMIDRFPGQAKVYHSFDSVDDDPHNSYPLDYLNSITPNGLPPHELIVKINCPVILLRNLDPNNGLCNGTRLMVRAFQDNAIDAEIVGGQHASKRVFIPRIPLSPSDDISLPFKFKRKQFPIRLNFAMTINKSQGQTILNVGIYLPEPVFSHGQLYVALLRGMSRLTTKILAKPKKEVDSTGKSTRNIVNKNVLDW

SEQ ID NO: 133594 - protein, 62 aa, Oryza sativa
  Clone ID: PAT_MRT4530_35449C.1.pep
SLDTFVTGGLINPLQHCPYYTHTILGGQPMLYHNGSGQKQCRRTHITIGPEGLHVIIHASLT

SEQ ID NO: 133595 - protein, 54 aa, Oryza sativa
  Clone ID: PAT_MRT4530_3544C.1.pep
VNNPSRFALRLPPFCRRFPFICKMLLNYVQDNLCLFMGFRFLIPGFILLQPFLT

SEQ ID NO: 133596 - protein, 1520 aa, Oryza sativa
  Clone ID: PAT_MRT4530_35450C.1.pep
MLDKQKKEEKNIKLCEWRARSAQKAESKFGEEGVTNDAIMQNLTQTELLVKEKKDEKNRKLREWRAKRKAQSNSVDGGGASATVMQNLTHAQLLAKEKREKSRKQCEWHEKSAKRKAESNNVPDEVTSYKTIHTPTSCHSQVTESQKVNHSKMLSIDKKSENEMSSIDKRREQKTKYQREWRARKKAKLNNVDGWSATSSTPAIGAFSTINEGSLYGTVADKENHDPDDPNDWLHRNDVYKPRFNVRKASNLEQTGAGLVIGENIRYKGVEDAKCVDNDFEGVSQVLEDDGYESYRVDVTGVIGISTDDPHDRVYHKLPKTHHVLKKVPDCKHCQAIRFQFESPGFCCREGKINVKIPTVPDELIRLFTSQVHNDAKYFRKHIRYFNSHFSFTSLGVTLDQRVSTAAGTGVYTFRVHGALYHRLDNLVPGSQGPCHMQLYFYDTEDANALAHRVRRSPDLDINLVRVILRILVQNPYVQTFSRVGSMSNLDDYMIELNTNVTPDQRRYNAPTASQVATIWLEGDDPMKTFDRHVLVHAKGDKPCYIKAYHGCYDPLAYPLFNPNGETGWNLKMPYDDPNQIPCDVEMDETCEASTFGDVHTNEESTFNDLPDNEDDNDDSSKSGKGKKDKFVTAREYYCFRLQGVVDVLSSGETSGSAVGKRIVLPRSFPGGDRDMQRRFLNAMALVQCFGRPDYFITMTCNPYWDEITEHLEPGQQPQDRPDLVARVFRAKLRDVLDLIVKKKYFGEVQAYAHVTEFQKRGLPHEHILLIMKSSSKLTTPDEYDKVICTEIPDKAKYPELHRLVIKHMLHGPCGTLNRNCACMFNQATQQGKDSYPLYRRRDDGWRVKIRGAVLDNRWVVPYNPGLLMRYNCHINVEACASIKSVKYLYKYVYKGHDCASFSVDPSGEINEIQQYRNARYVTPPEAIHRMLGFPLFGIYPAVLQLQLHIPNMQYVTYNEGEGERYYLRVLLNHVRGATSFEDLRTVSGTTYSTFREACEKRGLVETDKSHDDCLNEAFTFQMPSALRRLFATILVFCEVTDIRALWDNHKAAMSEDYSRGNTNPAAVEQMVLRDIRDLLHSMGKDITEYGLPEVIDIEIIDELNVPVDQDHLDIYTSLNDEQRAGFNEIIDHVTNKKSQVFFIDGPGGTGKTFLYKALLARVWSEGLIAIATATSRTAASILPGGRTAHSRFKIPIKISHNSMCNFMKQSGTAELLHMASLIIWDEATMTKRQAVETLDRSLQDIMGCSLPFGGKVIVFGDDFRQLLPVVTRGIRAQITDATLQRSYLWENIRKIRLSRNMRAQSDPWFSKYLLRIGNGTENTIRDDYVHLPDEIVIAYGNSEDSVHELINHVFHSLDDEKNASSASYMSTRAILSTKNDYVDKLNANMINRFPGQAKVYHSFDSVDDDPHNSYPLDYLNSITPNGLPPHELIVKINYPVILLRNLDPNNGLCNGTRLMVRAFQDNAIDAEIVGGQHASKRVFIPRIPLSCSDDISLPFKFKRKQFPIRLSFVMTINKS

SEQ ID NO: 133597 - protein, 408 aa, Oryza sativa
  Clone ID: PAT_MRT4530_35451C.1.pep
MPTVHLQNRSPHSRRQVRLQETDSRLWGDDPTKETWCRRRTLAVDVSGVRRSCVVDRGHRKEAEPSKQVTRRRRLAGVECHKHDSVGLVGRVLVCRLNICWRRFSPPDRRCQLPGLLAPVPPSLLRHHKVISGTLSTARQRRIGNGTENTIRNDNVRLPDEIVIAYGDSEDLVHELINHVFPSFDDKKNASSASYMSTRAIVSTKNDYVDKLNVNMIDRFPGQAKVNHSFDSVDDDPHNSYPLDYLNSITLNGLPPHELIIKINCPVILLRNLNPNNGLCNGTRLMVRAFQDNAIDAEIVGGQHASKRVFIPRIPLSPSDDISLPFKFKRKQFPIRFSFVMTINKSQGQTIPNVGIYLPEPVFSHGHLYVALSRGVSRLTTRILAKPKKEVHPTGRSTSHYDVISFSI

SEQ ID NO: 133598 - protein, 127 aa, Oryza sativa
  Clone ID: PAT_MRT4530_35452C.1.pep
SPGRSPPSSSRELLADPPPPSRRHAADSPLLVWRAAGFSRRRSPSPRWPSPILHLLCPVLADPPPPSRRHAADSRLSKTGSVLASFEFELDGRVPVEGFQFWQVLNSSELSFLHLPQITAGQQVNKR

SEQ ID NO: 133599 - protein, 433 aa, Oryza sativa
  Clone ID: PAT_MRT4530_35453C.1.pep
MEPSDLVDGYKFGDQTTSDVRVCFKRADDQAEWFCCHSSVLSGNSKYFADWLSRNDIGSNNCIGVDCISADYEHYVKVLKLIYLPAESIIDSFESVRSAVGVLRASTLLKCELITRSCIEYLEAASWDEKEEEEILEVAQSLGSEEAVALLARLQAPNVSAVKNVFISAIRFATSMESPSPPFLDDLKTSAQEQIDFMLHEDDDTALVTMDEDVRSVVREGLKKLFSTLKIGLDLLTSEYEQLPEQAEQRVLCSLADIDWMANVLTKIEMMNEFVSGWSEISGYVLSVVQDKKYSSGLWLVKAKLIEVTGKAFDAVGYGSVVFPASSRVHFLRMWLPFMQTTKRLLDEKSKDDAIPQMDADLFQNIEGAIVSLVLALPSGDQADILGEWMKNAEQFRYPDLTEAFEVWCYRSKTAKRRLVGGLNGSGNPTVSL

SEQ ID NO: 133600 - protein, 51 aa, Oryza sativa
  Clone ID: PAT_MRT4530_35454C.1.pep
MARDRVFVDDTRPGERIPPSAYYEALKDKVAASTCVDDAPIEASEIDAQLA

SEQ ID NO: 133601 - protein, 146 aa, Oryza sativa
  unsure (1)..(146): unsure at all Xaa locations
  Clone ID: PAT_MRT4530_35455C.1.pep
RYLGIPMHFTKLCNKDWQTIKXRIEKKLSSWKGKHISVDKYPSLYAIVRRRNSSIATVVRTVPLNVSFRRALVGXNIVNWHELCALIVHQLTQXSDCFRWNFHQNGQFFVRYLINNGYIDKNKIICKLKLPLKIKIFLWYLHKWPL

SEQ ID NO: 133602 - protein, 93 aa, Oryza sativa
  unsure (1)..(93): unsure at all Xaa locations
  Clone ID: PAT_MRT4530_35456C.1.pep
MADAEEHLCLIANLAWSTTDESLKDAFVKFANLTEAEVRVDKXSGHSPDSGFGTFDEKXRAMQDAIERMIGLDLYGREITVDKAAATRSCQRS

SEQ ID NO: 133603 - protein, 129 aa, Oryza sativa
  unsure (1)..(129): unsure at all Xaa locations
  Clone ID: PAT_MRT4530_35457C.1.pep
MKNLQCLNSSALAFDGTLAALPPAAAASTEQPEVTEQATSTSYRLGNTGGAMTSAASAAGSFLPHSLGADRVSDSIKSMFPSSSTASGAASAGHDEYRGSPPDLLSRRQATSRRSXQELCLNLVSNFGT

SEQ ID NO: 133604 - protein, 86 aa, Oryza sativa
  Clone ID: PAT_MRT4530_35458C.1.pep
MGLLTGRPRWPPFADSAGDPGRDAGSWLPADDMTGVRPVTSVILVHHVTNVPSLGGNTLAPAGDERLEALVLTGWGEACVRPPVAT

SEQ ID NO: 133605 - protein, 81 aa, Oryza sativa
  Clone ID: PAT_MRT4530_35459C.1.pep
GTPIYMVKASWPVMESLGFTQYLRSNTSGQAFPQCVFDHWQPLAGNPLETGSKPNVLCLQIRKRKGLAEEIPPLDRYEDKL

SEQ ID NO: 133606 - protein, 50 aa, Oryza sativa
  Clone ID: PAT_MRT4530_3545C.1.pep
QAITRTIDPRQVRTRERTCMRTSDRERATENEDEQKTCCRSRPSSLSGRA

SEQ ID NO: 133607 - protein, 107 aa, Oryza sativa
  Clone ID: PAT_MRT4530_35460C.1.pep
MTMLSLLGSGALSYSSPYAIGLGALSYYLETPQQQGLRVRHTLYPSIYTTYRHGIPTRTRIFPYDLRKPFTNSIDEKSPSRTRTGLPTYRAGFDMFESYSESTKPVV

SEQ ID NO: 133608 - protein, 394 aa, Oryza sativa
  Clone ID: PAT_MRT4530_35461C.1.pep
MALGMLKRDEEDFIAWHPDKFGRFSVRSAYKLAQSLEQMEERASSSAASTTIPWNLIWKCNIPQKVKIFAWKATTNCLATMENKKKRKMESSDICVICGREKEDTRHALTRCPLARALLQALQEDHCFISNNLASTDYGHWLFDCLENLADSGRSLLLMVLWRNWFSRNEIMHGKPAPTIEASKNFLLSYVNTLLEIKQHPQANQTKGKHVINYWGFKKDSQQRLNNGCTTDWEKPQQGWMKVNADGSYDAQTGTGGIGVVLRDSEGNVIAASCKQLASCRNALEAELLACKEGVVLALQWTLLPFVLETDCLVAIQMIQSKKKDMSELAYLIREVKELLGSNREVKICKAIRSQNQVGHSLANKARCDSLSGLWTGNGCNFISRLVFEDAVSK

SEQ ID NO: 133609 - protein, 45 aa, Oryza sativa
  Clone ID: PAT_MRT4530_35462C.1.pep
LILLIITFTEVLLLWIKITLFTTQSMDSPMTFTDFLALLNLAPRN

SEQ ID NO: 133610 - protein, 343 aa, Oryza sativa
  Clone ID: PAT_MRT4530_35463C.1.pep
MKTHERAANLALAGLSLAPLVVKVEPNVNVILTACLAVYVGCYRSVKPTPPSETMSKEHAMRFPLVGSAMLLSLFLLFKFLSKDLVNAVLTAYFFILGIAALCATLLPSIKRFLPKEWNDNAIVWCAPFFHSLSVEFTKSQVVASIPGFFFCIWYAAKKHWLANNVLGISFCIQGIEMLSLGSFKTGAILLAGLFFYDIFWVFFTPVMVSVAKSFDAPIKLLFPTGDAARPFSMLGLGDIVIPGIFVALALRFDVSRGIKNRYFNSAFLGYTVGLTVTIIVMNWFQAAQPALLYIVPGVIGFVAVHCLWNGEVKPLLEYNESKAEEEDAVEEDTDSKQNKKEE

SEQ ID NO: 133611 - protein, 112 aa, Oryza sativa
  Clone ID: PAT_MRT4530_35464C.1.pep
NGTASLFACCLTANKDFIGVSADLMTSNHQPICALTFRSILVLLYHIVSRLISTELYCYFITSSSADCLYIIIYIGHIADCLNPIAIGWYWHRLLSAIGWNYSIGLSADRVF

SEQ ID NO: 133612 - protein, 515 aa, Oryza sativa
  Clone ID: PAT_MRT4530_35465C.1.pep
METRRATYRSAALLLLAAILASAASASSIGDKCAACKAVAAELEIGISSEKPRNHLDLRNRLNSKGQREGKVIDYRVSELRVVELLDGLCDKMQDYTLQKLESGEKGWVKVADWNSFKTEKKAAARAHSKNLSSFCGRLLEETEDENQEMSAEHFVKILANTVSLQGLSLAPLVVKVEPNVNVILTACLAVYVGCYRSVKPTPPSETMSKEHAMRFPLVGSAMLLSLFLLFKFLSKDLVNAVLTAYFFILGIAALCATLLPSIKRFLPKEWNDNAIVWCAPFFHSLSVEFTKSQVVASIPGFFFCIWYAAKKHWLANNVLGISFCIQGIEMLSLGSFKTGAILLAGLFFYDIFWVFFTPVMVSVAKSFDAPIKLLFPTGDAARPFSMLGLGDIVIPDECNKISFKVRTTWLLYNEGIFVALALRFDVSRGIKNRYFNSAFLGYTVGLTVTIIVMNWFQAAQPALLYIVPGVIGFVAVHCLWNGEVKPLLEYNESKAEEEDAVEEDTDSKQNKKEE

SEQ ID NO: 133613 - protein, 234 aa, Oryza sativa
  unsure (1)..(234): unsure at all Xaa locations
  Clone ID: PAT_MRT4530_35466C.1.pep
TTTVSAWGQAYQYQHDGLYQYRPDELHQYGHGEECQYNNDWADRIAKMIEEQFGIKPKEHISVYRLSYHKXFDRVLLPHQYKVLDFSQFSGQDDISTMEHISXFLAQCGEASAEEALKVRFFPLSLTESAFTWFSSLSSNSIRGWADLEKQFNDYFFAGINELKLSYLISVEQQEGESAMEYIQRFRNVRSRCYGLSLNDEQLADLAFQGLSTPIRERFFCHEFDNLAHLMQTV

SEQ ID NO: 133614 - protein, 237 aa, Oryza sativa
  unsure (1)..(237): unsure at all Xaa locations
  Clone ID: PAT_MRT4530_35467C.1.pep
MDANPNDVQTEEAAIGGFQLGRPKVVVLPGGCCCYLLDSWETVEFHHVLQFTCCRRAANELAAQDAVAGLMALSNGQIQGAGVNKDSNSGDVVCRVKRTEYGPPIEGEYDDTVYKKEKEKXDIEGICTYIGHTDVQVXGDTADGRHAWRESASRRPCVAEDAWTLRDDDPEAPELYSAGGKHAPSLPRMHVRPISVSSSCRAVKEGGGRSGKETSHVYFGCIDRHEPFVDSVIEFVI

SEQ ID NO: 133615 - protein, 159 aa, Oryza sativa
  unsure (1)..(159): unsure at all Xaa locations
  Clone ID: PAT_MRT4530_35468C.1.pep
TPFSISGSVRAENEVLTVKFGKXRTSHWLRASIGFEVLRLADESYQVVSCRILAIFGLLLTANKGFIGVSADEMASDLQPMYALTFGSXLLYLVSSRLVSTRLYCYVITSSIADCLYIIIYIGHIADCLNPIAIGWYRHRLLSAIGWNYSIGLSADRLH

SEQ ID NO: 133616 - protein, 275 aa, Oryza sativa
  unsure (1)..(275): unsure at all Xaa locations
  Clone ID: PAT_MRT4530_35469C.1.pep
RSAPARAXNPPPTHRPRATSPPPPPPHANPTRSRLPQPPPTGGAPXASLAPTPPPAHRAPHPPHPQPRXPRRXWPRGXXRVPHAAPRSPASGPGWGQXGAPPQPPPXARPRAPPRPKPTSPPPRAKGFRPPPPPPKPKPRPRXSPTRSAPTRPQLPRPHPLAPRAHAPTPSPXPRNAPPPXPPPPQIAPARQNPPNXSPAXXXFPPPAXPPPPHATRAQXTPARXPPPRXPPRRPATPPPPPPARSSLGKNRVGETSPQKPGPAASGLWVSFGPL

SEQ ID NO: 133617 - protein, 59 aa, Oryza sativa
  Clone ID: PAT_MRT4530_3546C.1.pep
RPFFIFWLIAAWIVVRRPRARVAACRLCWFFGLLVLPGFLSKLCFFLLGLFRMSLTSPL

SEQ ID NO: 133618 - protein, 134 aa, Oryza sativa
  unsure (1)..(134): unsure at all Xaa locations
  Clone ID: PAT_MRT4530_35470C.1.pep
HRLRDSIGFEVQRLADESCQVVSCRILAIFAYFLIANKGFIGVSADFMTSDLQPMCTLTFGSMLIYHIITSRLVYTGLYCYFITSSSADCLYIIIYIGHITDCLNPIAICWHRHQLLXTIGWNYYIGLSADRLF

SEQ ID NO: 133619 - protein, 247 aa, Oryza sativa
  Clone ID: PAT_MRT4530_35471C.1.pep
RAGREKIVNSPNKGKRADFPNNFNRAGLVVAMDGGPGGRGRGDPPFAGPGRRRSPRPGPGRAPSSLEGGEGLGEKGRSEEDRPRRRIIHLVRPGLEAWIPGCPSADRRPRVRQSVLYSDRPRRSQGRRGQVQSKTKSLDEKNVSEVSSELSTTTADIPKFKALTINDSLSRFDSTERSNESTYDAGTPGSNQRSSKFVKDKPKDDSDDVEECLRQLQEYYSKGHVHTSIEDAWNEVVAYEHVALTAL

SEQ ID NO: 133620 - protein, 109 aa, Oryza sativa
  unsure (1)..(109): unsure at all Xaa locations
  Clone ID: PAT_MRT4530_35472C.1.pep
TIISTCFLIANKGFIGVSADFMTSGLQPMYALTFRSVLIXYHINASXLVYTGLYCYFITSSSADCLYIIIYIGHIADCLNPIAIGWYRHRLLXAIGWNYSIGLSADQLF

SEQ ID NO: 133621 - protein, 146 aa, Oryza sativa
  Clone ID: PAT_MRT4530_35473C.1.pep
LLTVKFGNRQRHHRLRIIIGCSISESADGSYQVANSRIPAIFACFLIANKGFIGISADFMTSDLQPMCALTFGSMLIYHIIASRLVYTGLYCYFIASSSADCLYIVIYIGHIADCLNPIAIGWYQHRLLLATGWNYSIGLSTDRLF

SEQ ID NO: 133622 - protein, 211 aa, Oryza sativa
  unsure (1)..(211): unsure at all Xaa locations
  Clone ID: PAT_MRT4530_35474C.1.pep
RRRRRGARRLRAPRRRRPRSARWSSSRWRGAASPWPSPPSPPSSAPRSGRSRPGGAPPGXAGYLFLLTVKFGNRQRRHRLIIIIGCNISESADGSYQVANSKIPAIFAYFLIANKGFIGVSADFMTSDLQPMCDLTFGSMLIYHIIASRLVYIGLYCYFITSSSADCLYIIIHIVHIADCLNPIAIGWYRHQLLSAIGWNYSIGLSADWLL

SEQ ID NO: 133623 - protein, 256 aa, Oryza sativa
  Clone ID: PAT_MRT4530_35475C.1.pep
MGKKAKAAAGSGAGTSAGREEPIVVAIKMDKTTIIVSSVVGSLGVLSAILGFAAEAAKFTDCASSLGLAIAATIFLMMAQVTVAAVGGCCGCCKSRAVPSETKRIVGVVCASISWVAAVIAFALFVDGSIGAAVACVGLVGEFAGAGVLVLVATGLGITSFIMLRMHPQAGEAAADRAAPRDYDDDEPTPIGTPIDIHGFRPPMPPNPQVPEPLPNYPPPPYSPAPAPAPAPAEGNGNQLAPDQQLAPHPQGHAQV

SEQ ID NO: 133624 - protein, 181 aa, Oryza sativa
  unsure (1)..(181): unsure at all Xaa locations
  Clone ID: PAT_MRT4530_35476C.1.pep
FIHAKSSLLTSTQVTIHSQHISPKVLLPSSHGHTDMLTVKFGKXQSSHRFRVSFGFKVLRLADESCQVVSCRILAIFACFLIANKGFIGVSADFMTSDLQPMCVLTFGSMLIYHIIICRLVYTGLYCYFITSSSADCLYIIIYIGHIADCLNPIAISWYRHRLLSAIGWNYSIDLSADRLF

SEQ ID NO: 133625 - protein, 165 aa, Oryza sativa
  unsure (1)..(165): unsure at all Xaa locations
  Clone ID: PAT_MRT4530_35477C.1.pep
PPLSPSPXSSSPYLCSLQGLLTVKFGKXRSSHWLRVNIGLEVLRLADESCQVVSCRILAIFACFLIANKGIIGVSADFMTSDLQPMCALNLGSMLIYHIIASRLVYTGLYCNIILSSADCLXYIIIYIGHIADLXNPIAIGWYWHRLLSISAXDCSIGLSADRLF

SEQ ID NO: 133626 - protein, 574 aa, Oryza sativa
  Clone ID: PAT_MRT4530_35478C.1.pep
MVKGAHKMGEMSDLWREAQCLETVICTVLSNLEIVLIEIDNGVQPSAYHYIVSKKVTQGEEGEDDAAAMGEEKQNDERKNKYAVGCSIIGSIISVLMGYDTGVMSGAMLFIKEDLKTNDTQVQVLAGILNVCALVGSLTAGRVSDCVGRRLTISLAACIFLVGSVLMGLAPNFATLLAGRCVAGVGVGYALMIAPVYAAEIASADIRGSLTSLPEICISFGILIGYVANYLLAKLPLVYGWRAMLGLGALPSAALALGVLAMPESPRWLVVQGRAEEALSVLRRVCDRPSEADARLAEIKAAAGLADDDGAAANAGSGGKGVWRELFLHPTPPVRRIVIAALGIHFFQHLTGIEAVVLYSPRIFKAAGIASRNSVLAATIGVGVTKTAFILTAILLVDRIGRRPLYLSSLAGIIASLACLGMGLTVIERSPPHHSPAWAVVLAIATVFTFVASFSIGVGPITWAYSSEVYPLRLRAQGASVGVAINRVMNAGVSMTFVSLYKAITIGGAFFLFAGLAVAAATFFYLLCPETQGKPLEEIEEVFSQGWRARRRASAAAVEMPASGGGGGGGAPMA

SEQ ID NO: 133627 - protein, 158 aa, Oryza sativa
  unsure (1)..(158): unsure at all Xaa locations
  Clone ID: PAT_MRT4530_35479C.1.pep
PNTMFAYMGPMYLLTVKFGNRQRRHRLRIIIGCSISESADGSYQVVNSRVPAIFACFLIANKGFIGVSADFMTSDLHPMCALTFGSMLIYHIIICXLVYTGLYCYFITSSSADCLYIIIYIGHIADCLNPIGIGCYQHRLLSAXGWNYSIGLSADRLF

SEQ ID NO: 133628 - protein, 65 aa, Oryza sativa
  Clone ID: PAT_MRT4530_3547C.1.pep
AKQAALNGSPYRSEHGAHGHRLPGELRIPTAVSRGIPGNSTTDHPDQDLNHNGRGWESTYQHRGF

SEQ ID NO: 133629 - protein, 64 aa, Oryza sativa
  Clone ID: PAT_MRT4530_35480C.1.pep
KHPLLPNLAYQAILVIAVLGRILFPVWLCKSEGMCHNFSGGPPLVFGGVVLVAWGIVFKIWVGF

SEQ ID NO: 133630 - protein, 1249 aa, Oryza sativa
  Clone ID: PAT_MRT4530_35481C.1.pep
MTMIYFQGWYGFGRTGVLRSIAEVLPSMKPYPPELRFDRTIYIDCSRWKSKRVMQRKIAEELKLDNETMASFDKQDEEDDFSGVDICSRDAILNVSAAISRILSQSRFLMVFLNGSDDEIPLSTFGIADYFDCVVIWTWSRMFLTVMDVSYLHSIYRKIKEGRYTDLFIYGYQDADKFSSSEFGALFREEAATIGRCPCLQNIDLEIVADCCLYGFLMYYHNKQNTNEFVWPAHASNYWTCDGIIQGARALEVSNALHPEVSFECRSYELKRVVEMLKMDPKAPFLLLEDDNKFVYSNSNRPYRWVFAISNDTIEEAMQTKMASASSIFLATQMYSGGLLGIPDGFFEQCSSLCVLVLSCCAFNFVSPPFLHCQTLKFIGLDRCKSNSTVELQGKWACLQNLRVIDLRYTDWVEIFHEEKMELMTNQLMEVNIEGVRCSQLTSQLKKRLPCLERLRIINPQNEAETSSSSTDINDIFVDKTDLQLLDLSGNKEMKNLPTSISNAGQLKVLILDGCDALEDVVVPNRLPSSLRSFSFDGYGSAAPSRASTIELPLQSCRPVRRGMIRMKDVKTSVISLEGCTQLDNLFLRGLPNLVERDLSGCAIKVLDFGTMVTDVPCLKRLFLLGCEHLRAIRWGRSRLLELLCIDTRPARKVLGCARPSLAVDHKYFRLQVHACIVDARLARSLLATINYYYYFNISITSSMASSSGVVQPEETSKKMTEPSGQKHCGVAGIYGDVFSKVGDAVTTMEAFPQPPTQQLDRHMEIGDGSHSVESEVKQAYDESNKWCRVERSSNLDVVFPQGADEDGRLEIIWASDLLKAHCIWSRGIKSSDGYLQSLQHLHLRSCPSLRFALPMALPSFPSLETLHIIHCGDLRHIFVPDTEFQSTSIEFPKLTTIHLHDLPSLRQICEAVEMVAPALETIRIRGCWSLRRLPRSQGKQKPAIEVEKDVWDALEWDGVDAGHHPSLYQPPQHSRYYKNKRMPRGTLLGLFCEPGYGASGVPTPFSVCARPSDECVWLSLEYETKQLKKIFQVTLVLAKSLSSPQAVPPEGNTIAHLEILLILKIMEQKPIYVVFDGKLPGVYISFEEIVAQKIDAKLMGGLSWKKYIDFDEALTQARKILGINYYLEPAAKEYIQKCKKAKNKKAPENPYCSNIKNEGSSQKPTYKECLTKGVDPLDGEYIDWKIIEKFEEASPQIKKELKEEILNELKKEMNDKFEEMKKAYDEKFEVSFSDVDTMDLGGHGQPDQ

SEQ ID NO: 133631 - protein, 81 aa, Oryza sativa
  Clone ID: PAT_MRT4530_35482C.1.pep
MDPLAADAVAPPDPTRATSVPPPHATSRCQGARTASVPLPHAAALRLPPPSGADHLRPAAACRLRCWDPVNSGGGGTSLAS

SEQ ID NO: 133632 - protein, 513 aa, Oryza sativa
  Clone ID: PAT_MRT4530_35483C.1.pep
MRKGNARFPKSSSWPRTKTVVKKWLNLKNEEFHSDCINESFAQGRQERRKSCSDKDGSLLTGRDLSGGWLVESSENLRPPARMFVGTWNVGGRAPDQGLDISSWLLDQQPASSPAHIYVLGFQEIVPLNAGNVLGAEDKGPTYKWLDLIRRALNPSSSERSHSFPSNYPYATEASPERPKNDRVSFSDLLAMEDRLSMVSELDDDSEPSTSNPESSSEEETTDVATRYLRSAGQGYRLAASKQMVGIFLCVWVLADLMPCITSLRVSCVGRGIMGYMGNKGSISISLTVQGSTTMCFVCTHLASGEKDGDEVRRNSDVVEILKRTRFTRRRRLSAPAAAVPSPETILEHDKIIWLGDLNYRLTGSGSGDTQELLDKNDWQALLQKDQLRVEQRAGRVFGGWEEGQISFPPTYKYLADSDTYAAAAAFTSSASKKRTPAWCDRILWRGSGMEQVRYARGESRFSDHRPVNSLFSVQLAAGGNNAKSDHLHLLLLRPRAAGPEAAAGIGLRSSRF

SEQ ID NO: 133633 - protein, 152 aa, Oryza sativa
  unsure (1)..(152): unsure at all Xaa locations
  Clone ID: PAT_MRT4530_35484C.1.pep
MSLTNCRFYEEKYPEIDSFVMVNVKQIAEMGAYVKLLEYDDIDGMILLSELSRRRIRSIQKLIRVGRNEVVVVLRVDKEKGYIDLSKRRVSPEDIVKCEERYNKSKMVHSVMIHLXQATEIPLETLYQXIAWXLKQXFXHALDAFKLSITNP

SEQ ID NO: 133634 - protein, 54 aa, Oryza sativa
  Clone ID: PAT_MRT4530_35485C.1.pep
WRSTMATAAVLESHDALDNRMHLGAFDESTASKPRRWRHNKAASPSLKVAAVSS

SEQ ID NO: 133635 - protein, 114 aa, Oryza sativa
  Clone ID: PAT_MRT4530_35486C.1.pep
LKGKTCGRYTKAESLLLKTQIPGARRRHYRPDSGCALMQIQQYMIIRLGSRADDTSACCQRTPELATSEPYRCLESHHRRHKPVGRLKQRPELTSISAEADKLTGQPGKRETHP

SEQ ID NO: 133636 - protein, 96 aa, Oryza sativa
  Clone ID: PAT_MRT4530_35487C.1.pep
MQRKPEQLRRDAPKKPYRLPTRAGTEADGFRRLYSSRTPMRTEARSHRAASVAAEMARTATGGVERGGGGGGRRARGRQSGSVGRADWRRRRASAR

SEQ ID NO: 133637 - protein, 277 aa, Oryza sativa
  Clone ID: PAT_MRT4530_35488C.1.pep
MSLAAPPPPPSLDTTVEPPLAEMELVCLVDSGEAGEVWLVRHRGTRREYALKVLYERWAAAAGGDADDDDHSSLVRCHGATRRNGGGGEEHRIVLLEHMRGGSLSGRRVADERALAGVARQALSGIAHLHRRGVVHGDIRPSNLFVDSSGRVKIAGFGADRAIDRTANGGPCRASLSPAAYMSPDHACGGGGGYAGDIWSFGLTILELYTGSFPLVEQGQSIPLTCYSDGPPEAPATASPEFRSFVGCCLQMNPAKRPSAVQLMDHPFVTSSVFSQE

SEQ ID NO: 133638 - protein, 47 aa, Oryza sativa
  unsure (1)..(47): unsure at all Xaa locations
  Clone ID: PAT_MRT4530_35489C.1.pep
HXSXSPAGRRRRPPXGRYPSXEXWLXRLEGIPEAAKGFPQLKEVWQG

SEQ ID NO: 133639 - protein, 132 aa, Oryza sativa
  Clone ID: PAT_MRT4530_3548C.1.pep
MCALAHIIGTSLYKITTNLYLTNVYCLIWIAGIVAIGCDYAFARDFAAPVHAGLGPKTSPKDAPLPHLSIYIKNIYKGMHGSDTGALDAKGREHQPHAYIYISYISVRRYHMISYNEWSSILTVICDAYASK

SEQ ID NO: 133640 - protein, 523 aa, Oryza sativa
  Clone ID: PAT_MRT4530_35490C.1.pep
MHPIKLCARSPRPSSKKRKRPAAAAATPPESEPEPVHNTAACNSEGENNATGKRREHNNKKMKEEKSKRKKKQGEGKKGSGILTDKLFSDLPISDLTANAIRDMNYTHLTEIQARSIPPLMLGSDVMASAKTGSGKTLAFLIPAIELLCRLRFSPRNGTGVIVLCPTRELAIQTHNVAKELMRYHSQTLGYVIGGIDLRGEAEQLAKGINVLVATPGRLLDHMQKTKSFKYECLKCLIIDEADRILEQNFEEQMKQIFKLLPRQGRQTVLFSATQTEKVEDFAKLTFGSKEERQRTLVYVGVDDHESKATVEGLKQGYCVIPSERRFLVLYAFLKKALSEKTKDYIVQYDPPDETKDYIHRVGRTARGDNGKGSAILFLLPKELQLLIHLKAANISVSEYVFRQELVPKLQPYLHYDSSFEQEKIVGGNYILNRSAKEAYKSYLLAYKSHSMKDIFAIHQLDLTSVAASFCFSEPPKVNLDLESSASKHRKKRNVNTGRRHGIGPSNPYGRKGSDDRRQFARF

SEQ ID NO: 133641 - protein, 131 aa, Oryza sativa
  Clone ID: PAT_MRT4530_35491C.1.pep
MERLAMKQHKMNNYVNVWKPAMLVENELQEHQRKNQRNFGTSCMPRKINITGLAKPSFSYYTTAKSLIEQAPTISEDENNGDDNGATFTQATMERTRRHLEKDLEPWRIIKDMQVKVEAQTKPTSSAIQSP

SEQ ID NO: 133642 - protein, 69 aa, Oryza sativa
  Clone ID: PAT_MRT4530_35492C.1.pep
TTWALVGHPIKESTAQIKGVQTRIIHRRGSISTVFHRSVVSKACGFSIRKSASDELKLPKNFCRWANQS

SEQ ID NO: 133643 - protein, 676 aa, Oryza sativa
  Clone ID: PAT_MRT4530_35493C.1.pep
MEASKKGLGNITARSPADCFGEEGNVWLDFSDLHAIYRRDKMDVNYVGVWCMTNAENADGRPACEDRRSLQSLAYRRTAAPPVKTLFGRFVSADDLLPSPTGFCRAALLTSNVLPPCNICFCSLHQQAGVDDEIDDNSASTEAKSSTSTAKLRSVATAHRQAGGDGAISIRTKKANPLQPKIRAACLPNECQELPVDWPIVGLLPTLVANLHRLHDYLTDVLAASGHSFTAHGPAATNMRLFVTCEPDNVRHIFTTNHDNYPKGQHFAEIFDILAGIPFTMDGELCRRQRAKTHSILSDPRMVASMQSSCVDKVRDGLIPFLTSVASTQTPIELQDLATRLMFDVTAMPVFGVDPGCLSPDMPSKHVSAAMDTIMEVALFRHTVPPFCWKAMRRLKIGPERKLAAAHAALHVFVSEMVEKARTKQEEAAPTSMSMDVISSYINDPDYNDLLHSKLISYMVAGRDTVGTTLPWFFYNLAMNPRVVSGIRDELAPIATSTCNGDGAPVMFSPDDTKPLVYLQAALFETLRLYPPGAIERKTVAADDVMPSGHEMKTIAAAVVWNFDVEVVDGQTVEPKLSCLLQMKNGVMVKMKTIAAAVVWNFDVEVVDGQTVEPKLSCLLQMKNGVMVKRHPPFNEKLTELVHRLFSIASPSRHRLHLRERAATCSNSQYSSSDLL

SEQ ID NO: 133644 - protein, 124 aa, Oryza sativa
  Clone ID: PAT_MRT4530_35494C.1.pep
MEIQRARRQGVFDTGFIDPRKVNVAILDQYPQATEENLVHLLKAQHYKTFILLSYNTVLVFTVFLYQISFPYEHAKCFICNASDAQCRFHWVLLLFDLEASTVNVYDSMDKKESTFDKAFELID

SEQ ID NO: 133645 - protein, 507 aa, Oryza sativa
  Clone ID: PAT_MRT4530_35495C.1.pep
MALSLTPSLQDLVSSLMILLVLLYISYWRSKYQSLFPVDWPIVGLLPTLVANLHRLHDKITEYLAASGHSFTGNGPAASNMRLFVTCDPDNVRHIFTTNHDNYPKGHEFAEIFDIMAGAFFTMDGDLYRRQRAKTHSILSDPRMVASMASSCVDKVRDGLLPLLTSMASTRTPFELQDLATRLMFDVTAMTVFGVDPGRLSPDMPSMHVSAAMDTIMEVGLFRHTVPPSCWKAMRRLKIGPERKLAAAHAALHVFVSEMMEKARKQEAAPSSMSMDVLSSYINDPDYVGLLHSILITYMVAGRDTVGTTLPWFFYNLAMNPRVVSGIREELAHNIATSTCNGDGVPVMFSPEDTKSLVYLHAALFETLRLYPPGWIERKTVVADDVMPSGHEVRAGDAVLISIYSMGRMESLWGEDCRVYRPERWLYDSRGGRKMRHVPSHKFLSFNSGPRMCPGKNIAVMQMKIIAAAVVWNFDLEVVEGQAVVPKLSCLLQMKNGVMVKVKKRAV

SEQ ID NO: 133646 - protein, 83 aa, Oryza sativa
  Clone ID: PAT_MRT4530_35496C.1.pep
FATDDPLSECSQAQKLSPGRGPRTLSQTNKRKTRVLSHLPLETHVEPTIAAKSTLNYTTKKIFNPGTHSPAQKDLQTLQGQKE

SEQ ID NO: 133647 - protein, 143 aa, Oryza sativa
  Clone ID: PAT_MRT4530_35497C.1.pep
FWSWRCGDAAAADGAGLLGGAADAVPAAGAEPQPLRRGDRGRLPRLRAVLPGRHLPLPPRPLPHPLRPRPRPPLDARPGDTSLLPIDRIHVCRLQSPAARTSSACAIVNLSCILFSPQFAPFTCSFCLVSFPFFFGLGIGCSM

SEQ ID NO: 133648 - protein, 78 aa, Oryza sativa
  Clone ID: PAT_MRT4530_35498C.1.pep
MAVEGECCLHHQSLLEKSSTTRRKGRAASRALVPVVLVFGISESAGGYSGDLGGSRKGVFHPFGDTAIDDVDFFIDQD

SEQ ID NO: 133649 - protein, 209 aa, Oryza sativa
  Clone ID: PAT_MRT4530_35499C.1.pep
MTQNTGRGKLRIEMSRHEKSSKQSNYRNHSNTSVWIYRTDLPSCPPRHPSPPGAQPSFRGHQGVLTVKFGNRQRRHRLRIIIGCSISESADGSYQVANSRIPAIFACFLIANKGFIGVSADFMTSDLQPMCALTFGSMLIYHIIASRLVYTGLYYYFIASSSADCLYIIIYIGHIADCLNPIAIGWYRHRLLLATGWNYSIGLSADRLF

SEQ ID NO: 133650 - protein, 388 aa, Oryza sativa
  unsure (1)..(388): unsure at all Xaa locations
  Clone ID: PAT_MRT4530_3549C.1.pep
LGAEEVAVAQVAPTLAAERPGLTAGNPLRQHQHGVVQLREVRGEQQQAWPGSTQFSLPQIQKATKNFSPNLKIGQGGSGTVYKGQLNDGTLIAVKRAKKNVYDKHMGREFRNEIETLQCIEHLNLVRFHGYLEFGGEQLIIVEYVPNGNLREHLDCVNGKILEFSLRLDISIDVAHAVTYLHTYSDHPVIHRDIKSSNILLTNNCRAKVADFGFAKLAPTDASHVSTQVKGTAGYLDPEYLRTYQLNEKSDVYSFGVLLVELITGRRPIEPRRAIVERVTAKWAMEKFVEGNAIQTLDPNLEATDAINLAVEKTYELALQFVATTKMTGPNMSRCPEILXNIRKQIEHESTMTSTQSSGCYSAPRSDGSTSLQDMYCFGEQEEGSYSR

SEQ ID NO: 133651 - protein, 760 aa, Oryza sativa
  Clone ID: PAT_MRT4530_354C.1.pep
MSSSANPSAAPSAEYAEHLSNLVAIPSMSHENHYVLGPVDNPDPTEFIISETNRVPFRLANPDLGHWKNTFKSWPSLEKTSPEKSWITWTKSIGGWSGYVAAYMGKGPVTPREHVAFLLMWLEKFLFCGSSCGPTTNWQFVAEALETKKQFPLGKILLGYLYQTLNNASAKIAVSSIVSAGGPWWLLQTWLNLVVMKAVNRPSVTEAEFPRLEPITDDDGEERTHRRCMSYGEYASTPADAGAKLSAELLKDWFCSFYEGFQKDAHVWFFYEDSSLLENPSDFRFEDINHERYQKSREVFSTAISPCILPVGIHQGRNIQVSYEFYHPMSLARQLGMGQLPIGLFFANKIQCRGEISSTLMMERLLNIPRPPLGSIENIELARFRSKNFDRWWASMYMTDLFPDVIPQTTESSPPHQSNSGRDIKYAPGLIPNGGGPSPPVIGYNALKTSTLLQRLIREPADAGKKRKPDRRLWKHQLRLPRRKPNQRKPSQLQKKKTAVKKKSAAPTLKPAPPPPPPPSPPMQLESSNRTPSAADSHNVEEEEQPAAPTIPVFADLFSFDIKDCLDETEEDTTSKAIAPLSDDVKRTLKDISHRLEASLDNLVTNCGSIRARFTDIQALLPDELADALTPAVYLEQHQFKLEKARQRLLVHEEKSKLDQLSEGPIKSNIDRLEARKIDLMAHLQECNVELDMEHKKLADLPQAVEEQKARLKSAIKNVADMTKSLKVIPGTDAQDAQAIEEVEQIRQRAISAIQRYLSQ

SEQ ID NO: 133652 - protein, 124 aa, Oryza sativa
  unsure (1)..(124): unsure at all Xaa locations
  Clone ID: PAT_MRT4530_35500C.1.pep
GELVMLAIHIYVRIIYSTSIRFTNLLQRINIKVEQNRHQLRRXINRTMSKIILMHEWAKNSELTRXIGPKFTSLHKGATEEATCRVWARWAQPMVQPKPAELPVAPXMQCLDGRLGLFPNDGWR

SEQ ID NO: 133653 - protein, 148 aa, Oryza sativa
  Clone ID: PAT_MRT4530_35501C.1.pep
MANGIGATQSPKAVSNLAPDRSPDLDIELQGYEGNQVPTRSGPRQGTAQAVRGIERRSGTARLRARGARVASPRAAARSRDGGGARKGCARRRRALGRLLLVIWAATARSRDDDGAGKGCERRLRVDMAQRDNHVDTRRVLHIGANLP

SEQ ID NO: 133654 - protein, 137 aa, Oryza sativa
  unsure (1)..(137): unsure at all Xaa locations
  Clone ID: PAT_MRT4530_35502C.1.pep
PLELSQPNPTKIEPQIQNQHNSNAYPGVPTLEIPATRVIDAPRNPPRRFRLAGAEHRWLIVHWTYPIWXGKASQKSGTPPMNSHSLSSPSLHLLTASLCTSSPPTRTRTSPRPPRPTPPPHQARPQRRPKSRSRVPD

SEQ ID NO: 133655 - protein, 47 aa, Oryza sativa
  Clone ID: PAT_MRT4530_35503C.1.pep
LIFFFFGSSVVVDDSDCTICQICSYFHFILLLDVHKEFVFEKRKKQR

SEQ ID NO: 133656 - protein, 213 aa, Oryza sativa
  unsure (1)..(213): unsure at all Xaa locations
  Clone ID: PAT_MRT4530_35504C.1.pep
QERSISLVLSLSSSSNSTLLARSSSTESAPPPVHRXIFAATAVDLGASSPDLLLLLSSRSPGPRRQPALPRWRSLVRHRRRPAXATVSSAMSRHRRLARVLIAAVRTWPLPPSALPPPWPPPCAELAPLDLPFHLHFLPFPIHLRSPLPHPLNLPARRRVRRRPACPRAPLPTARPARRRARDGRPAPARRWPPALPTAPLRIASCALSPVDH

SEQ ID NO: 133657 - protein, 52 aa, Oryza sativa
  unsure (1)..(52): unsure at all Xaa locations
  Clone ID: PAT_MRT4530_35505C.1.pep
SIHXFTYSKTHQNSTMRAQXKIAVHPSYYRRAHQDSLQYNVFITTKSMTXQR

SEQ ID NO: 133658 - protein, 250 aa, Oryza sativa
  unsure (1)..(250): unsure at all Xaa locations
  Clone ID: PAT_MRT4530_35506C.1.pep
MGGSGLSGVAARAVGTRGQRWAAARRQAWPCGRSARTAAREGGRWAEKIDPDPLQRPHLFRSWSXQERSISLVLSLSSSSNSTLLARSSSTESAPPPVHRXIFAATAVDLGASSPDLLLLLSSRSPGPRRQPALPRWRSLVRHRRRPAXATVSSAMSRHRRLARVLIAAVRTWPLPPSALPPGFSTRAARRARVVYLVALAVXAHCRACLAHRPSRAPPCARRPARSRAPLATGAAHRPSPHCVVRAVAR

SEQ ID NO: 133659 - protein, 85 aa, Oryza sativa
  Clone ID: PAT_MRT4530_35507C.1.pep
FNLLEIMIKIIEHYIVFAGSDLLQSHATSLESIVDTIVGNADDKGLLTTLPIIDLLVLMFPQEVPPLISSALQKLVFISLSGGDE

SEQ ID NO: 133660 - protein, 71 aa, Oryza sativa
  unsure (1)..(71): unsure at all Xaa locations
  Clone ID: PAT_MRT4530_35508C.1.pep
EXTELSIKEATGSVMKDQGNLTSLCSNKNPFRSVAPLYNGQITNSLAQTCTSGLTGSKKNLKPVDESTRNG

SEQ ID NO: 133661 - protein, 124 aa, Oryza sativa
  unsure (1)..(124): unsure at all Xaa locations
  Clone ID: PAT_MRT4530_35509C.1.pep
PRVRPRVRPRVRVASTGPGIRXFQIYVCKDRXXXEQLVRRAERAGFKAIAXTVDTPRLGRREADIKNRFVLPPFLTLKNFEGLELGKMDQASDSGLAXXXAXQIDRTLDWKDVKWLQTITTLPI

SEQ ID NO: 133662 - protein, 568 aa, Oryza sativa
  unsure (1)..(568): unsure at all Xaa locations
  Clone ID: PAT_MRT4530_3550C.1.pep
MAQKFLLGGVGAILVVAVVVGVVATVTRSGNKAGDNFTVPGEANLAXLRQVRRVPVRAHAVQGVVREDAHHGHQWHREPQGGVLYRRQVGARVDQVGGGEVEGDRRSQXSDSMTESAREDCKALLEDSVDDLRGMVEMAGGDVKVLFSRSDDLEHWLTGVMTFMDTCADGFADEKLKADMHSVLRNASELSSNALAITNTLGAIFKKLDLDMFKGENPIHRSLIAEQETVGGFPSWMKAPDRKLLASGDRNRPQPNAVVAQDGSGQFKTIQEAVNSMPKGHQGRYVIYVKAGLYDEIVMVPKDKVNIFMYGDGPKRSRVTGRKSFADGITTMKTATFSVEAAGFICKNMGFHNTAGAERHQAVALRINGDLGAFYNCRFDAFQDTLYVHARRQFFRNCVISGTIDFIFGNSAAVFQNCLIITRRPMDNQQNSVTAHGRTDPNMKSGLVIQNCRLVPDQKLFPDRFKIPSYLGRPWKEYSRLVIMESTIADFIKPEGYMPWNGEFALNTLYYAEFNNRGPGAGTSKRVNWKGFRVIGQKEAEQFTAGPFVDGGTWLKFTGTPHFLGFKV

SEQ ID NO: 133663 - protein, 67 aa, Oryza sativa
  Clone ID: PAT_MRT4530_35510C.1.pep
SSSRPQERFVSSPSRVLAAAAAAAKPSAAGLASQRSQDVPRRDPSVVYQGGGLHSAALLPYHHGLLL

SEQ ID NO: 133664 - protein, 966 aa, Oryza sativa
  Clone ID: PAT_MRT4530_35511C.1.pep
MAVNWSGIVSLVIVSSLARFLSTRASSPDAEVRQPMSPAAEHARSRRGTQRSAAPEGRDGSGDAVSLSRCLPRALLHPAMLAPARAPRPPRRAPSLSIVAVLGSGDEGQRRRDAVAALPTAVPPAAYPLYRPLPRLSRRLTKLLEGIVEAWTTAASVGTARLRRRTLGSRQRLDLLEELPSMHTDGVMDILGSFYARWIEWWLTGAGGIKDELAGRSWRRRCRSISSPRHWLGFFGASEEEVVVMKMVRWLGLSFTRSTGTAMMSRRDAQSALQGSEGVVNLGPADRVPYLYYEAAKTTVAEAEQTTSLMAIHALAAERQDVNYPQMEQNNNSNGTSQYGNNTSNGATGIIIPSASNQDPWAMELLECITKSDANRNGLGEFQKLKPPTFSGTANPPKAEDWIVAMEKAFEAMGCTDKEKIIYATYMLQSSAFEWWDAHKKSYSEQSVKRMKEKEFLELKQCNKSVAEYEIEFSRLARLAPEFVQTDGSKARRFESGLRQPLKRRVEAFELTIFREVQIIMGQIKESHLQILILHEEYGRIIHKVGIVLRSLVAEIMRKEASWEGMPIVNEFPYVFPAELPGLSPDREIEFGIEIVPGTTPIYKAPYRMAPVELKELKVQLKELEDKGFIRPSVSPWGAPVLFVKKKDGSLRLCTDYRELNKVTIKNKYPLPRIDDLFDQLQGERVFSKIDLQSGYHQLKIKPSDIPKTAFHARYGHYEYLVMPFGLINAPAAFMDLMNRIFKPYLDQFVLKCDFWMDKVSFLGHVISGEECDICQRIKAEHQRLAGLLQPLSIPLWKWEEISMIFVQGLPTTPTGDWVYLKVSPMKGIKQFGLGKKLSPRYVGPFIIVKQIGEVAYKLKLPDAFTGVHDVFHISMLRKCLRRPSDQVEIHMAELQNDLTYLEYPVCILDIKDRKTRNQTIRFLKVQWSHRTKDEATWEKEDDLQKNYPQFFHHQGIIISRTEFLK

SEQ ID NO: 133665 - protein, 1230 aa, Oryza sativa
  Clone ID: PAT_MRT4530_35512C.1.pep
MEQNNNNNNGTSQDGNNTSHGATGLIIPSASNQDPWANLLANILGKQQETQQRQMEILERITKSDANRNGLGEFQKLKPPTFSGTANPLEAEEWIVAMEKSFEAMGCTDKEKIIYATYMLQSSAFEWWDAHKKSYSERIFITWELFKEAFYKKYFPESVKRMKEKEFLELKQGNKSVAEYEIEFSRLARFAPEFVQTDGSKARRFESGLRQPLKRRVEAFELTIFREVVSKAQLLEKGYHEQRIEHGQPQKKFKTNNPQNQGRFRGNYSGQMQRKSSENQGRKCPICQGSHVPSICPNCWGRCFECGEAGHTRYQCPLLQKGKNRVSSTTQPNTKVLTPVPSLYLPGPSSANNHGPNQGKPLANTNTTRGMRSNNSQGGNHARVYNLTKSTAEESNTVVTGNVLICSYPGKVLFDSGATHSFISTNFVRKYTIPTSQLKERICIETPLDSQTTNLICKLCPITIDGWELTADLIPLDMHDFDIILGMDWLLPGTSPIYKAPYRMAPVELKELKLQLKELEDKGFIHPSVSPWGAPVLFVKKKDGSLRLCTDYRELNKVTIKNKYPLPRIDDLFDQLQGARVFSKIDLQSGYHQLKIKPSDIPKTAFRARYGHYEYLVMPFGLTNAPAAFMDLMNRIFKPYLDQFVVVFIDDILIYSKTKEDHANHLRIVLQTLRDHKLFAKLKKCDFWMDKVSFLGHVISGEAPLTRLTQKGVRYEWTQTCEESFQELKNRLTTAPILALPIMGEEFTIYCDASKIGLGCVLMQKDALSRKALCNMAIQITQDQHILRDLERLDVELKIHEPGVLLAVLQIKPTLEENILEKQRDDSELQKAKKNIEEGKRVKAEHQRPAGLLQPLSIPLWKWEEISMDFVQGLPTTPAGNDSIWVIVDRLTKSTHFLPVKRNFSLKKLAKLYVKEIVSLHGVPVRIVSDRDTRFLSKFWKSLHRAPGTKLDFSTAYHPQTDGQTERVNQIIEDMLRSCILEFKGSWEEFMPLAEFAYNNSYQSSIRMAPYEALYGRKCRTPVCWNEVGERKLLGPDIIQQTKETIRLIRKRLQTAQNRQKSYVDNRRRDLRFDIGDWVYLKVSPMKGVKRFGLGKKLSPRYVGPFAIVKRIGEVAYKVKLPDALIGVHDVFHISMIRKCLRRPSDQVEIPMAELRNDLTYQEYPVCILDTKDGKTRNRNIRFLKVQWSHHTQDEATWEKEDDLQKNYPQFFHHQGTTISRTKFLKEGSL

SEQ ID NO: 133666 - protein, 131 aa, Oryza sativa
  Clone ID: PAT_MRT4530_35513C.1.pep
MDSPATPVGLSPPLLSLVPRTEPCGDQSDGGRGTNGDDDEEEAAALFGLTTATMLRRSPTVAKGRTRTAATWRPRRRSSRATATAETVAAHGWSGGGNGGARAHGARALVGLALALPQPEKREGLLQHWTT

SEQ ID NO: 133667 - protein, 134 aa, Oryza sativa
  Clone ID: PAT_MRT4530_35514C.1.pep
MPPDIPYHVEMMRGCLAAHRSRRLFAGAKMGLDASRALGRGGHSAPGYGELWGLARKDLERVVPDPWSPTPSAFTSGEMHIRTSERHYSRKAGTRDLRGTDNFVGLKIIGEGLTIAYGAASPAPRLPVALLPRK

SEQ ID NO: 133668 - protein, 36 aa, Oryza sativa
  Clone ID: PAT_MRT4530_35515C.1.pep
KRTSKFIIDSPYKYMLPNKSKHYIFINPTNSYTQLA

SEQ ID NO: 133669 - protein, 779 aa, Oryza sativa
  Clone ID: PAT_MRT4530_35516C.1.pep
MEDNDDRASAEITTDQENHLKDALIQVFAATSEHQEGEGEAAEVVQDEEIGEGVEGVRDEEIGDINSKPDKPYVGMEFRDKDEAKNYYDDYARKWGFITKISSCRRSQITKQYNRYEFACHSERSSRESGASAGSRSRRSSRVLKTGCKARMVVVKRDEKWVVTIVDLDHNHPPLNPSALMSLKPHRLIKDEDHDLLEFLRTNKIPTQRIMSVLCDLYGSMQNIPLARKDVSNLRATMRPEAEGTCTDMAATIKYFQESQADDPSFFYSMELDSESKITSVFWVDGVSREAYREFGDCVFFNTKYITTKYCLPFAPIIGMNNHGQTVLFGCVLLKAEIEETFEWVFQTFLKAMDGKVPKSIMTDQDEAMENAIANVLPNTSHRRCSWYIWRNAKFKLGVLPSRLEGFEDDLRHCIDESFNVEEFERRWAAVLDRYNLASNKYMQDLYEIREKWVPCYFMDCFFPFMSITQQSEVMEALFKDFVHPGDIIQNFIVQYEKLVQSCLDRDDKQLFLTVKTDANLWSKFPMEEQASKFYTRAIFERFQEHLKNTTMYNVVCEATPYSYLVQNVFGDQSQNRRYVVHCKLEDETFTCVCKQYEREGLLCEHILKVMTHRNVNLIPDKYLFRRWTLKGSDSAATRSHVPLNMAEASTRKMRYSTICKKSVCMASEACRTQEGYNLALRSIEELTDKLAAINLTRQDQHLPRPNICDKNGKGITMGESNTIAEKVLSESCLKDPTKIRPAAFDNNSESARKRNKVMKAVQDLRSPFQQCPAGVNVL

SEQ ID NO: 133670 - protein, 165 aa, Oryza sativa
  unsure (1)..(165): unsure at all Xaa locations
  Clone ID: PAT_MRT4530_35517C.1.pep
KRSSIGYLIGTFMCSSSVFIFFLGSSIGPSSRLFLPFFCKPLITDVLMIVLSLRSQPTSYILVPSDLKIFKILQAASKPSCLAYNSNPSNTASCRLAYIFSTSSYNPRVQTAASGTVDPPSTTSACRPPLGRYGLFLXXXXXXXXXXXXXXXXXXXXXMYPTGAR

SEQ ID NO: 133671 - protein, 638 aa, Oryza sativa
  Clone ID: PAT_MRT4530_35518C.1.pep
MAIGDGFTMIIFKVDPTLICRIGIAHYLKHEVTREAATWVSHDHERTGWIGGPMPLFKRKPFSLLEPPKDLDSKEKISGKSNLTFEEALVSEHHAVSKAQKLPTELMAPVLRMIQYSTLGLYELVEKIYASLQEAVFEGLELYAKQDGLEAACRILKILGSDGTKMYEVGWLLRDKTIISTSVIKGEDLIHRRPPVSRNTLKIFIRDATSQNAPWVIHENLAKRYGIPIEPPNDMMFGEGLQKKGRKRREDGPMGDPKKKMKNDEEHINVPIKYPIDDLLVQPSADDHALLKRPPLATDFRVPKYSVGDLLMVWDFCLSFGRVLNLSPFSLVDLENAICHKESNALLVEIHTAIFHLLIKDEGDYFTILRTKKRKLKVTLVTWAEYLCDFLEMTKTEELTRNIATVRKGYYSLIDTDIKLKILRELVEEAITTSPVREKLSERVDQRQALAATKRESTRKAKDEQNSSIDGLQDDNESVDEQGKGKEEKDKNNISRSKTEGKRHGVQHLETEIEKLSIRSSPLGKDRHYNRYWFFRREGRLFVESADSKEWGYYSTKEELDVLMSSLNVKGLRERALKRQLDKLYSKISNALEKRSKEITHKLLLEEAVLRRSTRVRAQPRDNPSMSFLKYVNKWKDN

SEQ ID NO: 133672 - protein, 98 aa, Oryza sativa
  unsure (1)..(98): unsure at all Xaa locations
  Clone ID: PAT_MRT4530_35519C.1.pep
FFSDYYRDEFDEEKEPDGMVLSGWSAPVEKQVTSNGGNQSVASSSGADYADGIVEDISTKPGMKRKLDEVLELKENCDASSSAQVVEDDDDDDLXMLD

SEQ ID NO: 133673 - protein, 78 aa, Oryza sativa
  Clone ID: PAT_MRT4530_3551C.1.pep
MAGRGGGRPCRGWWARRCPPIRQIRQEGRRQEGKNSSVVASTADATFPTATSPPPFVLTSCQLAGFARRSTHPSVSPS

SEQ ID NO: 133674 - protein, 222 aa, Oryza sativa
  Clone ID: PAT_MRT4530_35520C.1.pep
NDCICHKESNALLVEIHTAIFHLLIKDEGDYFTILRTKKRKLKVTLVTWAEYLCDFLEMTKTEELTRNIATVRKGYYSLIDTDIKLKILRELVEEAITTSPVREKLSERVDQRQALAATKRESTRKAKDEQNSSIDGLQDDNESVDEQGKGKEEKDKNNISRSKTEGKRHGVSICSQSMYLHVMDLSLYLTHVLLLFTTIGSEPDYYAYSLLFVGTAPRNRD

SEQ ID NO: 133675 - protein, 106 aa, Oryza sativa
  unsure (1)..(106): unsure at all Xaa locations
  Clone ID: PAT_MRT4530_35521C.1.pep
HAYVYFWADAWTVLPVNGDVVTYINILFGDRGLLKETQVKLMAQILDEQRLGTTSHIVRYVDXALVRFASAEVLEGGNLSLLSSXSRGSLSRGTYXGGILSTDAGT

SEQ ID NO: 133676 - protein, 565 aa, Oryza sativa
  unsure (1)..(565): unsure at all Xaa locations
  Clone ID: PAT_MRT4530_35522C.1.pep
MESPAAGGASPAPEAPPPPPRGWISGLVSGAGRILASVLGPDSPAAASGSATTTSATSPSASSSPASSRHPGMKAYHGNSPLFFPKANKLNKSENEAIMKDYSEASLAIISEIEPKDAIMQLLKQETYSRSECNALVKIIQERVVDSNLNGVDAGGLALPINWKTGRQANIGYSSLSPKGLLPATSIPPVQDHVFDNSAGAGASTTIAHDRGPFAHATDKIQSVLKRSCSVATDTPDPEDSRRVRPKINGNSLEISNFKQVDVIRTHSGDDNKLSDVPLFGTNNLIYSNIVSIVGSADEKIGIPNKPSAGDGNKNYDSEFLNPCTNKDLKNSFPLKVEPLDVCIPFEQQMMDLSHQKHEHAACDDYCSVSKLMFKEDIETALSMPVGVPLENGSKNRRRRAPNTQRITPARSPAKGSRRKSNDVTVKSETDLLEQSKGSHDVTVKSEIDLLEQRVDVHRIGSPEGRNRMLAVCKKRGMEDMSPSLMDMYAKSNESWEAENILKQLESSQVKPDVASYNTVVVNGFCLRGLIKDAQRILSEMIADGIXPCAVTLCMTHHTLVGGYA

SEQ ID NO: 133677 - protein, 106 aa, Oryza sativa
  unsure (1)..(106): unsure at all Xaa locations
  Clone ID: PAT_MRT4530_35523C.1.pep
GGENRENMRTLARLAWRDGTLYSIPLVGVHRRSGELVSGTFAFDVLHQEKAAIRFLGSAMHDCSLFIHNGSSCSSLPCCASXQRPQPXVIPAEQPVFLPFFLDELD

SEQ ID NO: 133678 - protein, 59 aa, Oryza sativa
  Clone ID: PAT_MRT4530_35524C.1.pep
ALPVAVSLKSSRLETFNMASTTSPIGVTIDVDHLINKHDDIKVLHRIRIKIPTLMAPYS

SEQ ID NO: 133679 - protein, 294 aa, Oryza sativa
  Clone ID: PAT_MRT4530_35525C.1.pep
MAAATSTAAYWLAEHPAIVSFRWSPTGLWFSTWAFLLGFLASYVALCLALDAILAALLRRRRPLPLGPLPAAHALLMAAVSAAIFAGTLLSALAEIRDTRWSWRGRSRTTPFRWLLCFPPGTRSSGRVFFWSYAYYLSRYLHAARGLFAVLQRRRGAAARVFAHAASVAMAFLWLEFSQSFQVLAILASTLAHAVAFGFRFWVGAGLPAARGAPVALACQCALLGCNLLCHVGVVWMHFGGVAGGGCSGIGAWVFNTLLNAALLWVFLHCYGKRGVCDDDGGATAASARHDKDL

SEQ ID NO: 133680 - protein, 87 aa, Oryza sativa
  Clone ID: PAT_MRT4530_35526C.1.pep
NSLSYDGYSWRKYGQKQVKGSEFPRSYYKCTHPTCPVKRKVEMTPDGRIAEIVYNGEHNHPKPHPPRKPTLSTSYNLPDICDDGIGL

SEQ ID NO: 133681 - protein, 64 aa, Oryza sativa
  Clone ID: PAT_MRT4530_35527C.1.pep
MAVVQWIFSSRISNIPKVSLSSSGGTNINEDGDAACNSYNPPSIGILQMRHLILKGSIRPRGGE

SEQ ID NO: 133682 - protein, 156 aa, Oryza sativa
  Clone ID: PAT_MRT4530_35528C.1.pep
MGLVPSLLVAHPPVSRAASVAVVRGVTRRPACPSHREEKKSDRDEEAEKRLHMSFPLPTRLSLFFLIAPRRRFIAIAVAVVVVPVPDASNDDGGRSMPAEWRGRAEWRGAEWRRRRWLEEEEVEEEVAAEFCRLDGEDADGEGIEEEHECGLRTGT

SEQ ID NO: 133683 - protein, 53 aa, Oryza sativa
  Clone ID: PAT_MRT4530_35529C.1.pep
DKAHFTVLQHMTEVVPYVDEHLAVLRQENRVLNGVPPPVTGSNCKAVPRDLTC

SEQ ID NO: 133684 - protein, 1014 aa, Oryza sativa
  Clone ID: PAT_MRT4530_3552C.1.pep
MKFIEPGKFLLVFLVCSAHVVICSSNGNETDRLSLLEFKNAITLDPQQALMSWNDSNHVCSWEGVKCRVKAPHRVIYLNLSGQGLVGTISPSLGNLTFLRYISLQENLLAGQIPLSLGHMHHLKVLYLSNNTLQGEIPDFANCSNLWALLLNGNHLVGKVPTDARLPPNLYFLWIVHNNLTGTIPTSLFNITTLTKLSIGFNQINGEVPKEIGKSRVLQLFAASGNKLLGRFQQTILNISSLADLDLGSNYLHGELPSSLGSSLSNLQGLALGNNFFGGHIPSSLANASKLSMIHLSRNNFIGMVPSSIGKLQELSVLNLEFNQLQSSDKQGLEFMNSLSNCTKLRALSLAKNQLEGEIPSSFGNLSMKLELLYLGGNKLSGRFPAGIANLHSLSGLALNSNRFTGPVPDWLGNLKNLQIIFLAANMFTGFIPSSLSNLSLLENVVLDSNQFYGHIPRGLESLKVLQVLSIPNNNLHGSIPRELFSIPTIREIWLYSNRLDGPLPIEIGNAKQLEHLVLSSNNLSGVIPDTLGNCESIEEIELDQNFLSGSIPTSFGNMESLQVLNMSHNLLSGSIPKSIGSLKYLEQLDLSFNNLEGEVPEIGIFNNTTAIWIAGNRGLCGGATKLHLPVCTYRPPSSTKHLRSVVLKVVIPLACIVSLATGISVLLFWRKKHERKSMSLPSFGRNFPKVSFDDLSRATDGFSISNLIARGRYSSVYKGRLLQYGDMVAVKVFSLQTRGAQKSFIAECKTLRNVRHRNLVPILTACSSIDSQGNDFKALVYQFMSQGDLHMMLYSNQDDENGSASIHIAFAQRLSIVVDVADAMEYVHHNNQGTIVHCDLKPSNILLDDSLTAHVGDFGLARFKVDCTISSSGDSIISSAINGTIGYVAPEYATGGEVSTFGDVYSFGIVLFEIFLRKRPTHDMFKDGLNIATFVDMNFPDRISEVVDQELLEYQNGLSHDTLVDMKEKEMECLRSVLNIGLCCTKPSPYERMDMREVAARLRKIKEAYLSSN

SEQ ID NO: 133685 - protein, 117 aa, Oryza sativa
  unsure (1)..(117): unsure at all Xaa locations
  Clone ID: PAT_MRT4530_35530C.1.pep
SASSPVGRNIDAIFPAPIPIVASTFLNAVDTTRACPPSRCTAAPFLPRPTTSQPHXRCLVPQLARGPATHVGEAGSRREVAGYGQGTLDPMALPCHHRPGRHRLCTVVPTGSASPST

SEQ ID NO: 133686 - protein, 57 aa, Oryza sativa
  Clone ID: PAT_MRT4530_35531C.1.pep
NPPKRCGNPGKVSRPQKKKKILFSPKKKKKKKKKKKKKKKKKKKKKKKKKKKKKKKK

SEQ ID NO: 133687 - protein, 218 aa, Oryza sativa
  Clone ID: PAT_MRT4530_35532C.1.pep
RSPPRSPTERFTQGRAREQPGGGGRGIDGLSAAAALVDRKGKRKIGEGSFTVSDDREQARRKEERTSDSPKVKLLRSSIRAYHGDAEEKLSDRKGEPVNYPFHNCGASTSKLPAHVYHKKIPMGEAANHYFRNIDNSFQQPEVGLRLKYLSHHYSEFRPVHRDEECFYRSFIFSYLEQVVDSIGTREEDRLLAAVRALATKAENLQWASEFSQKHKSI

SEQ ID NO: 133688 - protein, 69 aa, Oryza sativa
  Clone ID: PAT_MRT4530_35533C.1.pep
MADEEPVDPKKYLEERCKPQCVKPLYEYEKCVKRVEKDDTGHKHCTGQYFDYWSCIDKCVAPKLLEKLK

SEQ ID NO: 133689 - protein, 127 aa, Oryza sativa
  unsure (1)..(127): unsure at all Xaa locations
  Clone ID: PAT_MRT4530_35534C.1.pep
TPPAIDVRDKPRHTPSGTYRGWXEGSSVISDLDKFVLEEENYAVVDYGLMNXEQHRLWPTGXRAITCQIRGPNLYKNPCLHLFYFNLAYTMVPTIPILCKYRSRDLKRRQPPNSSNSKWSEEPEPTL

SEQ ID NO: 133690 - protein, 76 aa, Oryza sativa
  Clone ID: PAT_MRT4530_35535C.1.pep
PPHAPAPAPTPAPTPAMYGLHLRRPYLLIGASASHATTSAGSTIPSSTLASPGHNSREDEEGREEREIGGARKKMR

SEQ ID NO: 133691 - protein, 83 aa, Oryza sativa
  Clone ID: PAT_MRT4530_35536C.1.pep
QPPPHQTNQSPAPPSPHNDLASRLATFTNNLSCVTSTFISQLSFLPLLTPMLPTLEQIEHQRTTFMHACTNGLPATAYPLSRH

SEQ ID NO: 133692 - protein, 83 aa, Oryza sativa
  unsure (1)..(83): unsure at all Xaa locations
  Clone ID: PAT_MRT4530_35537C.1.pep
NMVMVKNXGGQGNMVNLTVKGGKRVKWXPLQRSWGQLWKTEAILAGESLPFRVMTGDPRKATSWGVAPRDWTYANPYQAKKNF

SEQ ID NO: 133693 - protein, 212 aa, Oryza sativa
  unsure (1)..(212): unsure at all Xaa locations
  Clone ID: PAT_MRT4530_35538C.1.pep
MVNTRNGDHATGDGSSSEEXTGGANTSGATSNGPPPPLENSTIAQVLAXRRISYNDMQQMQKQHQYMQXQMMHHQALQQLNQQFGPPPPHXVQTTXFLHVRPPTFSSTINPMEANDWLHAIEKKMNLLRWNDXEKVVFATYKLQGPASAWWDNYMVTRSAVTYVTWAEFCRSFRKAXVPDGTVAQNKREFHALHXGNKIAIEYLHEFNRLLL

SEQ ID NO: 133694 - protein, 178 aa, Oryza sativa
  unsure (1)..(178): unsure at all Xaa locations
  Clone ID: PAT_MRT4530_35539C.1.pep
XXXXGPPFPRXVLXXLEIXXXXKGLCXSWXXGGXVLGLGPQLGXPAPXXXGXFXIVGXVXPXPPXWXWPXGGGYXPPGXXXGVXXQXXXXLFXXXXFFPAXXXXGGXXXPXLGGXXGPXXXXGPXXVCRXGLGXXXXXPXXARXXRPAGGRVXGDXRVGLXVXXLXPPXXXXPXLAXX

SEQ ID NO: 133695 - protein, 206 aa, Oryza sativa
  Clone ID: PAT_MRT4530_35540C.1.pep
MARLAGVAALSLVLVLLGAGVPRPAAAAAAKTQVFLSKLPKALVVGVSPKHGEVVHAGENTVTVTWSLNTSEPAGADAAFKSVKVKLCYAPASRTDRGWRKASDDLHKDKACQFKVTVQPYAAGAGRFDYVVARDIPTASYFVRAYAVDASGTEVAYGQSSPDAAFDVAGITGIHASLKVAAGVFSTFSIAALAFFFVVEKRKKDK

SEQ ID NO: 133696 - protein, 257 aa, Oryza sativa
  unsure (1)..(257): unsure at all Xaa locations
  Clone ID: PAT_MRT4530_35541C.1.pep
GPVAGALGEILPALTVFFPLDEECRSCIASPPSLKSLASXLSHGGELAARVSAAVVLRELASSGDRHALEAIARAHGMCDALVGLVTSPVSSQATKAALVTAYYLVSSGDRAAARFAELGVVPAAVELLVDADKGTSEKALAVLDAALCADAGVESARAHALTVPVLVKKMFRVSDMATDFAVSALWRLCRAGAGAAPCRAEALRVGAFQKLLLLLQVGCAGVTKERASELLKMLNGSRGSVECIETVDFKGLKRPF

SEQ ID NO: 133697 - protein, 141 aa, Oryza sativa
  unsure (1)..(141): unsure at all Xaa locations
  Clone ID: PAT_MRT4530_35542C.1.pep
QGKLIRAVHDHSSGIIKALSKHWXLKHLVCFCPGPKCFSQHHFQVHSSSGILYQQVHSGHXHTQCSTAGWGAIQVQSCPCPCAPMLALIAAAHAQSVVHHLCTMLSQPSPXIPPHPTLLITFTASGVHQHWLAQACTLVPN

SEQ ID NO: 133698 - protein, 160 aa, Oryza sativa
  Clone ID: PAT_MRT4530_35543C.1.pep
MTLDWSRRLKELATGGEEESGSKDRANVRRNVEVATGMRGSVWRYLGAEGVLSPFLMLAVVRDGYSQWNAGEAQRHATNGGRPTWREVARPEATGPWKSEATSGHETEIKAICTCETMEHQGVASLFVQIAPAMQLYKFQGGSGCSQNVVACDVPSNMQT

SEQ ID NO: 133699 - protein, 58 aa, Oryza sativa
  Clone ID: PAT_MRT4530_35544C.1.pep
SKLQNTKINPNPKIKFQTKHHNKKYSSHFMLKVHLNFPWNSLIVSVLIQYLVSLSMTT

SEQ ID NO: 133700 - protein, 429 aa, Oryza sativa
  Clone ID: PAT_MRT4530_35545C.1.pep
MDRLLACLLGFLLIASVGSHAARTPEQYWKSALPNSPIPSSLSQLLSTAGGGTSVNVGGGGVHVDAGHGKPGGTTVDVGKGGVGVNVKPGYGKPGGTTVGVGKGGVGVNVKPGYGKPGGTSVGVGKGGVGVNVQPGYGKPGGTTVGVGKGGVGVNVQPGYGKPGGTTVGVGKGGVGVNVKPRGKPVHVNVAPFIYNYAATETQLHDDPNVALFFLEKDLHPGKTMAVHFTATTAGEKFLPRSEADAMPFSSEKVPEILSRFSVKPGSVEAAEMAQTLRDCEAPPAQGERKACATSLESMVDFATSSLGTSHVRAASTVVGKEGSPEQEYTVTAVKRAAAGGDQDQLVACHAEPYAYAVFACHLTRATRAYAVSMAGRDGTGVEAVAVCHADTAGWNPKHVAFQVLKVKPGTVPVCHFLPQDHVVWTRSG

SEQ ID NO: 133701 - protein, 179 aa, Oryza sativa
  Clone ID: PAT_MRT4530_35546C.1.pep
MAEVGGGGLPPSRAVLASRFRSNSDHLMRLHSTWINSAATPAAAPYSRESLAMLAARLLSVSDDHLQRQQQQHVSMIISTSLPGCTTGGVAPAFKEAIEALRDVVVDQLAPAAECAICLHGQDAATAAAGRWKEMPCGHRFHGVCLVKWLRVHGTCPMCRHQMPAKEAAAAAAAEGRRS

SEQ ID NO: 133702 - protein, 124 aa, Oryza sativa
  Clone ID: PAT_MRT4530_35547C.1.pep
GRKSTFIIIIIIHVCTKNREQISHNLITMHPITARRDRNYKIKNQQGRKLERAHRGESSRHRAHQPDLAARRKAEATRCAPPWSRRRERPPTAPSVTPPGRPPAEPTPWGGPPKLPPHVRPPEE

SEQ ID NO: 133703 - protein, 430 aa, Oryza sativa
  Clone ID: PAT_MRT4530_35548C.1.pep
MSWRWALARRVAALGATSGGGDGATAQAQRLFSSAAALLGRHPPPPSPPHYQIRSKVVGCRGATFVSSRWLHDAQYQVRQDGLSRSEEQQDPFELVADELSLLANRLRSMVAAEVPKLASAAEYFFKVGAEGKRFRPTVLLLMASALKFPLSDSTEVGVLTILANKLRTRQQNIAEITEMIHVASLLHDDVLDDADTRRGVSSLNCIMGNKLSVLAGDFLLSRACVALAALGNTEVVSLMATAVEHLVTGETMQISTSREQRRSMDYYLQKTYYKTASLISNSCKAVAILAGHTADVSMLAYEYGRNLGLAFQLIDDVLDFTGTSASLGKGSLTDIRHGIITAPMLYAMEEFPQLHEVVDRGFDNPANVELALDYLQKSRGIEKTKELAREHANRAIKAIEALPDSDDEDVLTSRRALIDITERVITRTK

SEQ ID NO: 133704 - protein, 141 aa, Oryza sativa
  Clone ID: PAT_MRT4530_35549C.1.pep
MRLVANPPLFLEDDYPPIVENGLWYCRMLARLLHHGSLPSLLVDDLHVKLELELHLWHFHDVAINNDYGQHGLCSEDVSPLIPPPPTKGDACNASLRPCASAFACMQLSQRKKEELTPHIESLLHECRFACKCMCKDTLYS

SEQ ID NO: 133705 - protein, 95 aa, Oryza sativa
  unsure (1)..(95): unsure at all Xaa locations
  Clone ID: PAT_MRT4530_35550C.1.pep
MNNTFMKQDKIYFAKEYQXTYIQPLMGGRKTMDIQVEAADRISVTLTLHVSTHGRCNLXKKGWATFAANNGIHLRSVYIFHFHKAPQLQTTIDVC

SEQ ID NO: 133706 - protein, 85 aa, Oryza sativa
  unsure (1)..(85): unsure at all Xaa locations
  Clone ID: PAT_MRT4530_35551C.1.pep
RWXGXXXXEVGVXMPXXSPGGAGXVAXGFSXFFWSXGXICXKXQSPSXSPNTKPGPXSXSFXPLPVGGTLSXGXCXAGKDQKIVG

SEQ ID NO: 133707 - protein, 276 aa, Oryza sativa
  Clone ID: PAT_MRT4530_35552C.1.pep
MMKKTSKELDYVLVPMGMAVMVAYHAWLLLRIRRRPATTVIGINAINRRIWVRHVMEEASGKHAVLAVQTMRNSIMASTVLASVAITLSSLVAALMASGVAHGIFSPGAGDGQGEIVVGAGGETALSIKFFAILVCFLVAFLLNVQSIRYYSHTGILVNVPLHAHRHRRRRPGLAVDYVTATLNRGSYFWSLGVRAFYFSCPVFLWLFGPIPMFASCLAMVCALYFLDVYTEWDEKPEEEEELNGNGDGDDGGAAACHEQPKMAAGNRVTPQQDVV

SEQ ID NO: 133708 - protein, 74 aa, Oryza sativa
  Clone ID: PAT_MRT4530_35553C.1.pep
LRTCTTRVSSSSKTSWQLRHHPNDSSDGGGQTLYDLTVLLCSPSIWRFLSFSSPDLTTMRMAELLLLLSAAGFA

SEQ ID NO: 133709 - protein, 102 aa, Oryza sativa
  unsure (1)..(102): unsure at all Xaa locations
  Clone ID: PAT_MRT4530_35554C.1.pep
MKLSMKQPLYNRTSRVGIDLAGAPELLSLLETXWTPGVHEDXSSWSGYCQSEVVERLCRSKSHSLGHXAYVMGKSRSTSTGKVYIHCSQSVEEKPLLVCLRT

SEQ ID NO: 133710 - protein, 97 aa, Oryza sativa
  unsure (1)..(97): unsure at all Xaa locations
  Clone ID: PAT_MRT4530_35555C.1.pep
LLSLRNLTPLFPPSPLKRNFMLSLSGDSSDAXGDPQVTSSPTRFPPSAMSTSANPSSAPSVASXHLSNLVAIPSLSHENHYFLGPIGSLDPLNLGHL

SEQ ID NO: 133711 - protein, 67 aa, Oryza sativa
  Clone ID: PAT_MRT4530_35556C.1.pep
CLLMVAIEFSKFISVSRFIQVWVSVIGVQIVFILLPNHGFILWKLRNNNVNVYYIVKYIPILLLIVS

SEQ ID NO: 133712 - protein, 112 aa, Oryza sativa
  Clone ID: PAT_MRT4530_35557C.1.pep
QHIIRHQLSTGHLYWTRFSALQSSPQLVGRKASRPEASSGSVLLFLPKRWTLSSTMKIFLVAWCTFPCWILDDVCTPLTEILSPSFVETIQKKYIMHPKYGVLVGFLKKKNQ

SEQ ID NO: 133713 - protein, 64 aa, Oryza sativa
  Clone ID: PAT_MRT4530_35558C.1.pep
MAGLRMKALAVAAIAASLVASAAADHAPAPAPVSDAAPAFKEHEYRVLHGDTCMMLIVIYWPIV

SEQ ID NO: 133714 - protein, 74 aa, Oryza sativa
  Clone ID: PAT_MRT4530_35559C.1.pep
KTKNGGAKKKPGAKGDHKILSEGKTVSTPTGRPQQIGPFPPKTLLSRGLIAQGIKKREHSRSKLCSARGSFTSP

SEQ ID NO: 133715 - protein, 339 aa, Oryza sativa
  Clone ID: PAT_MRT4530_3555C.1.pep
AEDWKSKSDECETGIDELKEKNGSVAAALAKLDRQVKSKEGKLVQLRSQEREIHEKCELEQLKLPTDAWAMDTGSSSQIPILDYSQLSENYLQDMRLSERDKLEAEFKKKIGDLVAQIEHTAPNLKALDQYETLQRKEKDVMEKFEAARKEELEIADKYNSVKQRRYELFMEAFDHISKGIDQIYKELTKSQTHLLGGTAYLNLENEDEPFLHGIKYTAMPPTKRFRDMGQLSGGEKTVAALALLFAIHSFRPSPFFILDEVDAALDNLNVAKVAGFIRSKSCQRVDEQDNGGCGFQSIVISLKDSFYDKAEALVGVYRDSERCCSRTLTFDLTKYREA

SEQ ID NO: 133716 - protein, 855 aa, Oryza sativa
  Clone ID: PAT_MRT4530_35560C.1.pep
MSSNSGGSAKEKDPENAPELVALPLVRTLRPVHAVIDPAADPRSAQLSWPGHVVLLPPYATWPHHVPTLPPAVNPANPQQNVDVAAADVSPDVGCCDEKMLPKVDMLFDGEKEAYDFYNAYAEMVGFFVRRSTLWTTSKNIITRRTFVCSREGFREKKRGTKEAKCPRPETRIGCPASMTIRLNTNGKYRLTEFVPNHNHQLATASTMRMLKAKKIRLKARAARENLVDDTVRTPEFGSEDEAYEFYSMYAGKIGFNVRRASMTMNAENVITRRMFVCSKEGFREKKRGAKRVKKPRPETRTGCPACMVIRLTSNGKYHVTEFVTFHNHQLGATVPSDLVATSQSTETGQDDGLDLVDGSADANIHRQNLIIGNIMATSLEVKSDDDGNLTNFLWSDSKSIMDFVHFGDVGYGRPLALFTGVNHHKQTVIFAAALLYDESVEAFRWLFDTFKMAMNGTQPKTLLTDRSDAISEGVAASWPATAHRYCVWQIYQNALQQLSQAFHGSKTLDYCFQKCLFDSEDEPEFLTAWREMLEKYDLEDNQWLADLFSLKEKWALPYGREAFCADMKSVQQKESLGTELKKHLSLEFDLLSFFKQFERVLCDRRSTELQADVDASQSTKKPPPMRVLRQASNIYTPAAFKMFEREFELYMDCMLYNCGEMGTISEYRVVIEDNPKDHFVKFDSLNSMVNCSCKGFEFVGIPCRHMLKVLDTRNIKDLPPQYFLKRWRKDAKSGSPNCSYSFPLDGDPQLVQTKRYNLLCRMFSIAAARAATSIETFAYMENQSSIFMDQVEQALQTRPPDIAAMIGAHCDQTQNPIDNIVAGGLHSHTNFINGPADGSLTFPFTLGAGVLDYR

SEQ ID NO: 133717 - protein, 87 aa, Oryza sativa
  Clone ID: PAT_MRT4530_35561C.1.pep
MAPPQYAARPHGLDRTVVGYSRELGVGNNEPPWPCIRVARMRRQASPERRRVIPVPRGKEDAPECPSSRLPVRRWRLGQCAICPRGS

SEQ ID NO: 133718 - protein, 127 aa, Oryza sativa
  unsure (1)..(127): unsure at all Xaa locations
  Clone ID: PAT_MRT4530_35562C.1.pep
YSVNEGHAXTGNGPTTKYVKKCRFPKDGSFAKSLRYVGSMVADVHRTLLYGGIFLYPADKKSPNGKLRVLYEVFPMSFLMEQAGGQAFTGKKRALDLVPEKIHERSPIFLGSYEDVEEIKALYAAEE

SEQ ID NO: 133719 - protein, 154 aa, Oryza sativa
  unsure (1)..(154): unsure at all Xaa locations
  Clone ID: PAT_MRT4530_35563C.1.pep
STNSTGQHGNFNGFSSTTSILXYHHHTSVQAWPSQAQCMSSTCSHNRLGAGGCQHSLLPAFKHLQATCMFPPPCGSLDNTSSWAVVHRSSRGELHSSQQSTNHWTVIHGFGRXSATQKMLCVKGFPHYPMHTQYTYLPTKMVYFFEFALTNRSL

SEQ ID NO: 133720 - protein, 62 aa, Oryza sativa
  Clone ID: PAT_MRT4530_35564C.1.pep
VECLTLGMEVRKAFEKVCYLHCSSGSFKLKSGVDEEFGRALNSRDVGFGVKVKEILCSPPNG

SEQ ID NO: 133721 - protein, 91 aa, Oryza sativa
  Clone ID: PAT_MRT4530_35565C.1.pep
HVQAILDRFTFCASVCRVFTDALHRMPEVHKKDLLVLQLCVPSYDCGQRRMCDPSLPLVSSSPTSPLAAALFLPVFPLDGWLLRSRRGCAS

SEQ ID NO: 133722 - protein, 232 aa, Oryza sativa
  Clone ID: PAT_MRT4530_35566C.1.pep
RQTLVPPIITTPLYFLIFGQLIGSRFGEMNGVSYIQFFAPGLVMMTAITASYVNTASSFFLSKFTHNFEELLVSSLSTHNIIWGYVVGSIVRGGLSGILVTLISLLFVSYQIHSWSIILLTLLMTTIAFSLGGLINAVYAKSFDDIGSIPTFVLTPLTYLGGVFYSITLLPEFWQTLSKFNPIVYMINAFRYGFLGISDVSIAYSFSVLIIFILILYYFAFSLIEKGVGLRT

SEQ ID NO: 133723 - protein, 215 aa, Oryza sativa
  Clone ID: PAT_MRT4530_35567C.1.pep
GGRDFRAPFPLSPAALSLSRRYKNVARALLLRFRRSPLALAVGIVLAPCSSLSAVAVDRRFAAAVAPLFLPARRPLLRHRRIAADPVRRSASSADRRSTVVVVIPSRAATFFLSVRRSRRRRCLGVSRRPPFAFPLPSSLSGATPPRRWSPAATIGALVRAAPVGRAGEAALGRALAGRRPPPAACARSTVDRAADAWAPLPVDPVRAPAPRLTQ

SEQ ID NO: 133724 - protein, 275 aa, Oryza sativa
  unsure (1)..(275): unsure at all Xaa locations
  Clone ID: PAT_MRT4530_35568C.1.pep
DVSCLARFPTRRLRLQRRAAEGRARGPGPREVGPTRQPLGPRWTGRTRLAAVGAVGPARQPHPRARAADGRAHLAAARARPRAASPARPTGXAHPRPDGRRRRPTARRSGTRERGGKGETNGTVFGSPRDNXTTRTADGEEEGGGAVRDDDDDGAPAVDGRSGAADGVGDDAAKPTEGREGAPEGRPRPGRGRREKRAPAPPMKAAARFGMTMTTVLRRSTGEAERRTGSATMRRSRRRGRRVGRKSGATAAANRSTAATAGRRSTARARFRRRE

SEQ ID NO: 133725 - protein, 358 aa, Oryza sativa
  unsure (1)..(358): unsure at all Xaa locations
  Clone ID: PAT_MRT4530_35569C.1.pep
GLKHFASQRLGFPILVLSLVCPLATIDLQAIGLKQVDLSGLEGDVGEEEMWRTIKELPGDXALAPDGYTGLFFQTXWGIIKQDLMRALDKFFQGNFQNLDMLNSTMIILLSKKEAXALLKDYHPISLIHSFSKLATKVMVTRLAGXMGELIPYTQSAFIRGRSIHENFMFVKGMALLCHRGHKPMVLLKLDISRAFDSVSWPFLLRLLQYKGFGVRWRRWVCSLLLTAISLYADDAVIFLQPTEQDTXAIKAILDLFRAATGLKVNFTKSTITTIRCSQEHXALVQSIPCCQLDQFPITYLGLLLSLRQLTKQDVQPLLDRXAKKFVGWKPNFLSTGDRLVLIKLVLLALLVHQLQQL

SEQ ID NO: 133726 - protein, 62 aa, Oryza sativa
  Clone ID: PAT_MRT4530_3556C.1.pep
SQCQFINRKRCCIHKYDILGNLRRHFLVECLQVALNTILNNSYPGKLTGLLGVMIVFICHFT

SEQ ID NO: 133727 - protein, 467 aa, Oryza sativa
  unsure (1)..(467): unsure at all Xaa locations
  Clone ID: PAT_MRT4530_35570C.1.pep
MAATTTILSSAAPTPLTAPPRARARAPAARRRRLRARDILGAALGLANGGASAALAAPLSYEETLRLSTDSGGGGGGGGGGEFALPDLGLGGVLDFVAQNPLAAAAGVAAVALPLVLAQVLGGASKPYGVVSAAAAYRALVEEPGAQLVDIRPPGDARQSGAPDLREAKKKAAAVPYDGEDKNGFLKKLSLRFKDPENTTLVILDKFDGNSELVAELVTANGYKAAFAVKDGAEGRRGWLSSSLPWTAPKKGFSLSDLIGDGTDGLPVTLGLAAATGLGILAYTEIETVLQFLGSAAIVQLVASKLIYAEDRKRTLKQIDDFFNKKVAPKELVDEIKEIGQALLPSTGTKSQPAITEAAPATAEAAPAAATATAAPPAAPVEETSTEAAPAEPTPLSPYTNYPDLKPPSSPSPLAPAEATKNESESESAATESAPAEAAPPAAPRPLSPYXNYPDLKPPSSPSPSAP

SEQ ID NO: 133728 - protein, 418 aa, Oryza sativa
  Clone ID: PAT_MRT4530_35571C.1.pep
MNTRYGFEKKVSSLTSTPTVVRRWVPKHPPPNTAISTDQNKRKHIYDGVNGHLHPSLITETSKRLVFGTPNPPPLISINTVLLESWHELAHRCHRNRYEQWQCANTIKPQLGLPAAARPMDRAYDKHKLITLSDLFGEPTRASRRGALQACNGIMQSEGKRTRAAYGPRGVARHDFSKEACEAARRDVAGEVYSRLQRHEPARRRGALARGHMTCRYLVRGRSMDHQLDPNAKLQSQKDKGNMSNLDFSKEHRPNLTHIPKPQYRISRPQLLKLVQFNFLIGFEERFRWRDAYGGGIDPILLSPHSSPSAIEGRRQVRGQAMAPCVNKQWRVVVQAEPRPYHLDVAAIAPAVAEFRCTSFYRLRACDQVNTAMWTPRQRNHHPKPPRESNYTGFMGRDIRYCSSRIQIRFGRQLRESK

SEQ ID NO: 133729 - protein, 257 aa, Oryza sativa
  unsure (1)..(257): unsure at all Xaa locations
  Clone ID: PAT_MRT4530_35572C.1.pep
EAVDGRSSRCTPRRRPPASRSRPRRRRAPPRRGRRRRRRRRRSGSAAAHPRHLVCRSGRSCSSGRRSRRWRPARCSSRATPTSSSPPTCSTPSSPSSPSHILPPPPPXPPPPPPPPRSSSSGRSSSSAPRPARSRSSSPTTSSSPPTTRSPTSPPPPPTPPCCAGTRSWRRSTRSSSATARRGGGRPSWTPSKKSSPPPPVTPPPPPPPPPPPEDPPXSRPPLPRQARQPPPARXPPPPPPPPPSSAAMAARWRAPA

SEQ ID NO: 133730 - protein, 357 aa, Oryza sativa
  Clone ID: PAT_MRT4530_35573C.1.pep
MKVLCSACEAAEARVLCCADDAALCARCDLHVHAANRLAGKHHRLPLLSSSSSSSSPSPPTCDICQDAHAYFFCVEDRALLCRACDVAVHTANALVSAHRRFLLTGVHVGLDAAADDDDKHPPHPLSSSLPRNTAPPPQPPPKRSPSPIYSDDDVIDWATGGHDIGITGNLPDWSLVDEQFNTPALPPVVTKTPPKRASRGPVTAGTAAAVFGNLAGGSPDWPLNEFFGFADFSSGFGFAENGTSKADSGKIGSMDGSPNGGRSSSSSSSSSAAAAGGGGGGQDFFGQVPEVHWAVPELPSPPTASGLHWQRDPRYGGGATDASAVFVPDISSPENPFRCFAAAAAGDHTMKRRRRC

SEQ ID NO: 133731 - protein, 79 aa, Oryza sativa
  Clone ID: PAT_MRT4530_35574C.1.pep
VILDWEEIGEMENAKWPLEIQCSYSKPFCQRFRFLRSMYDDHSHERFGFFCCHQNPSLRHLHHLCISHILEERRSPTQL

SEQ ID NO: 133732 - protein, 53 aa, Oryza sativa
  Clone ID: PAT_MRT4530_35575C.1.pep
PTPELPPFCHDQVSKSLGMPRNKALNVAGLSRSSISYVARRFLFEASKSFTFR

SEQ ID NO: 133733 - protein, 145 aa, Oryza sativa
  unsure (1)..(145): unsure at all Xaa locations
  Clone ID: PAT_MRT4530_35576C.1.pep
MLWHRRLGHIGPAAIQSLRTMSSISLLIQASMPPSYWAEALATATXRVFCCLCYPNMSATTPHKLVPRSTACVFLGYLSRXAPSSEVEKPRPLTVAPSMEVEQPYVPLFGRHLPNNTVTAASGACSAGAPLVGASSPGTTPSAGA

SEQ ID NO: 133734 - protein, 140 aa, Oryza sativa
  Clone ID: PAT_MRT4530_35577C.1.pep
MSSPDKEYAQEAWVFRVDIGITPIPKHLGLALQRARQTIGHFMGPCNHEITAIITILLQPAGDICTEVKNTVNGGGSQTEASALLLTSLVSGIGGFPTPAYVRGRRPSNGNEMVVGHGGRWRWGAKGKRGPFVKIHGHYQ

SEQ ID NO: 133735 - protein, 99 aa, Oryza sativa
  Clone ID: PAT_MRT4530_35578C.1.pep
RCVTCPIFSSLCWMSNVVIPPYVYSQFKVVGTSRLGRRWEEEEAEKWYEEEARGLIGGEVGKSRQSVGKFNTSAIAPIGDGGLVTHWSSSQLTGLFIFY

SEQ ID NO: 133736 - protein, 96 aa, Oryza sativa
  Clone ID: PAT_MRT4530_35579C.1.pep
FFGAFVRKPLLQSASDWKVPTTFIYGQQDWMNYQGAQQARKEMKVPCEIIRVPQGGHFVFIDNPSGFHSAVFHACRKFLSGDGEEGLSLPEGLTSA

SEQ ID NO: 133737 - protein, 227 aa, Oryza sativa
  unsure (1)..(227): unsure at all Xaa locations
  Clone ID: PAT_MRT4530_3557C.1.pep
MKRHGWWADDKGARRRAVDGAIAGGGWSDGGWRVVGGGSGGRRWAAGAAVGGGVAGGGRSDADNAGSPPLSLSTLGSSSSSSXSPLSLRGTAAAAGHGQSGGASGAAATSPRTSRAPPTREERQCAWCATAGGRGLAAHTSRRVGGRGAAAGGWKRSGGSRASPPTARCRSISPRRRSAPLPPTARRQPLTVHRRPPLHLPPAAVLLRSVAAPSVAPQRRHSPSLRT

SEQ ID NO: 133738 - protein, 102 aa, Oryza sativa
  Clone ID: PAT_MRT4530_35580C.1.pep
MALDHDSADDRELGRLNRRHLHEEDNDANSPVQRNTTNDDRRRAPTAARLGLMSAAALTRDAAAAKGRTGCSSTWRTRRWRRKAAAATTAAARLKQRRRQRR

SEQ ID NO: 133739 - protein, 84 aa, Oryza sativa
  Clone ID: PAT_MRT4530_35581C.1.pep
TPIQRPVQPPKRRPFWQPDQLLLLTLGLRPPRQFLFNSQPSGLNVVWDAIRPLNNSSQIFSPPIKKPFKILPPPMFVRSLSTKV

SEQ ID NO: 133740 - protein, 69 aa, Oryza sativa
  Clone ID: PAT_MRT4530_35582C.1.pep
MGDGGSQAGGAPLPCKHHRGREEVVEVGLTTACCPPPARIRYLLLSHHREGEHAEKGPEEQVVAFSRSQ

SEQ ID NO: 133741 - protein, 90 aa, Oryza sativa
  Clone ID: PAT_MRT4530_35583C.1.pep
MAAPSTSTPAPASSAFPLAAAAAACFPRASSSTRALALALALAERHRLSEVGGGDRSVAAGRRSFQGLIPAHVLSAGDDAEGAVCALFFS

SEQ ID NO: 133742 - protein, 46 aa, Oryza sativa
  Clone ID: PAT_MRT4530_35584C.1.pep
LVDQRPPLCARYAGLAGKHSKIERSSVPINENHSRLCSPFYCCMQG

SEQ ID NO: 133743 - protein, 107 aa, Oryza sativa
  unsure (1)..(107): unsure at all Xaa locations
  Clone ID: PAT_MRT4530_35585C.1.pep
MVLTDTTNDVGRRTATSLCGGGGSVDGGDGSPATGDSGERSPRLLLHRAHXTAATGGGGDDARGGARRLLVGRRRRPLGRRGGGATEHXRTREMGQTKEDAKGMLYI

SEQ ID NO: 133744 - protein, 82 aa, Oryza sativa
  Clone ID: PAT_MRT4530_35586C.1.pep
MRGEKNLTGSGEPIRLAFNGKTLPVHYEANQPNTICTARLASCFIKPHYQQNGCIDEIAVPCMRQTWELHPRWDNHDATSIS

SEQ ID NO: 133745 - protein, 339 aa, Oryza sativa
  Clone ID: PAT_MRT4530_35587C.1.pep
MEEKDNNECPSSLDPKLAPLLLFGGDDDDDATFMYSVRTRALLPRRSTTTTTWTPRREPTGGGPRHRAGCSWRRAAVRPHRARRLSYGTLSPAAGSPCLPTTTHGTLLTHSCDRMCLLSRRRPTDPGCVVVVVDFDDTVLWYCRPGDLHGVVHHYLQPGTPHHEHRDCVGWAIGNLTAIDGKFYTDFTDHVAVLEFSPEPVFTVTAVDGDHGCPAGYTRLTGNLVESNGDLHHVFFSHPIGCSRIVARVSVYKLSVATQKQRSAWVKVDSLDGRVFFVGIDSLGVGASLDAKETGLKGNCIYYWGINGKVLNVYDMKRGTTVVINPGENLPPQVLMPTR

SEQ ID NO: 133746 - protein, 101 aa, Oryza sativa
  Clone ID: PAT_MRT4530_35588C.1.pep
VLFKGESERDGGEPGDRLCGWPEDADAQRRLIGCATRARGCAAFQCMMHGVPFELQAEMKAMVRALLDLPDDTKSTNADIITGSDYRLAGTGNHGYEGFGL

SEQ ID NO: 133747 - protein, 120 aa, Oryza sativa
  Clone ID: PAT_MRT4530_35589C.1.pep
MPMRWSTARCGQIWSSSLPLTAVICLSLSLSLSPIEVVNGEPPVATAAADEDEEVAGRRLWMRARARRGGSRVPCEAPRSPAREQISLKKRREADGREERHGLRRALFGECSAGRWEKCG

SEQ ID NO: 133748 - protein, 66 aa, Oryza sativa
  unsure (1)..(66): unsure at all Xaa locations
  Clone ID: PAT_MRT4530_3558C.1.pep
MTASALHQTTSFLGTXPRRDELVXXVXDSGXRIXMXRTXKSAPQSIWYXPXRXKYXXPXXEQNGVP

SEQ ID NO: 133749 - protein, 247 aa, Oryza sativa
  Clone ID: PAT_MRT4530_35590C.1.pep
MAERAGKQEEGRPTRGAAPPPKPRVNPSFFARGRSEEGRERFWGSSGDPIPRNSASCTRGCRRGCSERRGRRLGDERSGGGGSEEEPRDQRRLRGGAAGKVAPSRRSNGGGVSTMRLRCGGGFKEVRRGGGSESEERPRCAAVELESPPLPPATADHARICRALGRRRPAVLGDGDLPSRTATSPPLGDLDLKDGDLPSPWRRGPPVWRRPAAAPAVGSSRGQRPMAPSVVAPSCPCGYAKPMPMLA

SEQ ID NO: 133750 - protein, 62 aa, Oryza sativa
  unsure (1)..(62): unsure at all Xaa locations
  Clone ID: PAT_MRT4530_35591C.1.pep
GGEAALVLSVSLLVVAVASACTYCPEPPTPKPKPPAPRPPTPGGGXLACPIDRLTERCPTAR

SEQ ID NO: 133751 - protein, 202 aa, Oryza sativa
  Clone ID: PAT_MRT4530_35592C.1.pep
MYKMSNERLPPSDNRRGEAREREEAWLPQQLPELELVQLMRRCYALVTACLWTLVASNVVFWWRSPRSESEVGGLWHKQELVAPLRLNSGACYSAPPPQPILFLSSRECHRSIYTGRRLAIVFSISLKSLTKKGLSMSSVLVAAVMAGVFFSALVSTDTAQQITNVAAAAGADDNRGLVLPPPFSPSSFVCHLASNLVTQHP

SEQ ID NO: 133752 - protein, 122 aa, Oryza sativa
  Clone ID: PAT_MRT4530_35593C.1.pep
MTCAIPLLFSTATACAPLLLLAAALCAPTLLRCIQRLHLQDGGFIATSWGAARFGFHELGGGQLDHELEGALLHFPLRHRSLSIAPLASTSPWITGYGKLGAGSGREVEGDPIYAAAGGPPR

SEQ ID NO: 133753 - protein, 124 aa, Oryza sativa
  unsure (1)..(124): unsure at all Xaa locations
  Clone ID: PAT_MRT4530_35594C.1.pep
AHGTAAGNAEHLRHRQAAQTAQPPPXATRPNEGSXTQESTPPXARSKRTPPAPPPPPQPPQRAEXPPAQPAPPTPPTHPPKTTERSREPAKAAAPRRTHHQTTGPDTPPARYAAGEEQRALVQD

SEQ ID NO: 133754 - protein, 71 aa, Oryza sativa
  unsure (1)..(71): unsure at all Xaa locations
  Clone ID: PAT_MRT4530_35595C.1.pep
GLAAAASLGTAAWAATALAFGVACREIHDAAAAGPGGAARGWRMRALEGLIVTLAVTQLLYXLLLHAADTG

SEQ ID NO: 133755 - protein, 219 aa, Oryza sativa
  unsure (1)..(219): unsure at all Xaa locations
  Clone ID: PAT_MRT4530_35596C.1.pep
HGPWALGARCPEALTQPPRGRESGWSRRLCSAPPTAHRSHPRKPHGAIIAGSPLPRSPRAAPSSLPPTIRHRPRTTPPPLASPPRRPSTSSRPSQIVTAVISAASPISSAPPPTIRRRPHTAPPPSTISRLSTAPPPXPPAAVPDKSSPPSPHRAGAPRLSTAPPPSPLRRIGLQVSADSTEHDELNTKSSKRGPSPSAGEHLLFSYFLICLPYQVARH

SEQ ID NO: 133756 - protein, 510 aa, Oryza sativa
  Clone ID: PAT_MRT4530_35597C.1.pep
MWKGFLSKLPRKTSASGRGADLDSGQCSNGAGNGNPIQRTSSCGSIPSGRSTSTIKRMSSAIFPSSVVAGIEPLVSFKDVPNSEKQNLFVSKLNLCCAVFDFSDPNKSSAEKDIKRQTLLDLIDYVDSSSSRFSEAVIAASSRMFAVNLFRVFPPNYRSSSSGGGEGEEEEPMFEPAWCHLQLVYELLLKFIGSSSLDAKVGKKYFDHSFIVKLLNLLDSEDPRERDCLKTILHRIYGKFMVHRPFIRKAVSNIFYHFVFETDRHNGIAELLEVFGSVISGFALPLKEEHKIFLWRVLVPLHKPKSVGVYLQQLTYCVTQFIEKDPKLASSVIIGLLRYWPITNSQKEVMFLSEIEEILETISTAEFQKCMVPLFRRIAQCIKSSHFQVAERALFIWNNDNVISLIAQNRQMIMPIIVPALEHNSQNHWNQAVLNLTDNVKKMFSEMDDVLFSACLVKYKEDEERQASLESKRRLTWEKLESAASFQPVTGHTAVLVGRQPSANLIATLI

SEQ ID NO: 133757 - protein, 51 aa, Oryza sativa
  Clone ID: PAT_MRT4530_35598C.1.pep
LPAFIHLITCWENLMVWPWILAPKLKGKINHLDAFRVMNVDELELLELNGA

SEQ ID NO: 133758 - protein, 164 aa, Oryza sativa
  Clone ID: PAT_MRT4530_35599C.1.pep
MAKERFSLERVIHDMEHKLLSKILTIQQELTEIKMHDTLPTRVYNLEVDYTDDYILTKEDEEVLHFVRNSYIWATIALIADIPLAINFLLPNVNGGWLYDTVIDAYGYTANIANHNAGVITTFQSNLLFDDFEDFDSRFDHHWVSQVGKICVVRHMVHYTHLMN

SEQ ID NO: 133759 - protein, 99 aa, Oryza sativa
  unsure (1)..(99): unsure at all Xaa locations
  Clone ID: PAT_MRT4530_3559C.1.pep
KGAEXXXGLAAKXGVAEVTELMAPADGKAFRRLMALCVHRPXQVHXXDFLVRDLLRVPTYIHTYTYLTVYVYENSFNNPGECSPVHCMSTKYIYKNFKR

SEQ ID NO: 133760 - protein, 143 aa, Oryza sativa
  Clone ID: PAT_MRT4530_355C.1.pep
VLADLFSFDIRDYLDEAEEDTSSKALAPLSDDLVHVEKSKLDQLSEGIIKSNIDRLEARKIDLMAQLQECNAELDMEHKKLADLPQAVEEQKAKLKSAIKNVADMTKSLKVIPGTDAQDAQAIEEVEQIRQKAISAIQQYLSQ

SEQ ID NO: 133761 - protein, 397 aa, Oryza sativa
  unsure (1)..(397): unsure at all Xaa locations
  Clone ID: PAT_MRT4530_35600C.1.pep
MATIKFPIVFSVVCLFLLCNGSLAQLLSQSTSQWQSSRRGSPRECRFDRLQAFEPIRTVRSQAGTTVFFDVSNELFQCTGVFVVRRVIEPRGLLLPHYSNGATLVYVIQGRGITGPTXFPGCPETYQQQFQQSEQDQQLEGQSQSHKFRDEHQKIHRFQTGGCGXPGFVAHWCYNDGDVPIVAIYVTDXIYNSANQLDPRXRSKARESSKNIFDGFSVELLSEALGISSGVARQLQCQNDQRGEIVLVEHGLAFLKPYASVQEQQQEQVQPSEYRQTQYQQKQFQGGHSNGLDETFCTMRNALLSPFWNINAHSIVYITQGHXRVQVVNNNGKTVFDGEXIVGKNSIFRALPNNVLANAYRISREEARRLKHNRRVELGVFTPSHAYSNYQDISVSA

SEQ ID NO: 133762 - protein, 496 aa, Oryza sativa
  Clone ID: PAT_MRT4530_35601C.1.pep
MATIKFPIVFSVVCLFLLCNGSLAQLLSQSTSQWQSSRRGSPRECRFDRLQAFEPIRTVRSQAGTTEFFDVSNELFQCTGVFVVRRVIEPRGLLLPHYSNGATLVYVIQGRGITGPTFPGCPETYQQQFQQSEQDQQLEGQSQSHKFRDEHQKIHRFQQGDVVALPAGVAHWCYNDGDAPIVAIYVTDIYNSANQLDPRHRDFFLAGNNKIGQQLYRYEARDNSKNVFGGFSVELLSEALGISSGVARQLQCQNDQRGEIVRVEHGLSLLQPYASLQEQQQEQVQSRDYGQTQYQQKQLQGSCSNGLDETFCTMRVRQNIDNPNLADTYNPRAGRITYLNGQKFPILNLVQMSAVKVNLYQNALLSPFWNINAHSVVYITQGRARVQVVNNNGKTVFDGELRRGQLLIIPQHHVVIKKAQREGCSYIALKTNPDSMVSHMAGKNSIFRALPDDVVANAYRISREEARRLKHNRGDELGVFTPSHAYKSYQDISVSA

SEQ ID NO: 133763 - protein, 486 aa, Oryza sativa
  unsure (1)..(486): unsure at all Xaa locations
  Clone ID: PAT_MRT4530_35602C.1.pep
MEVVSSSHSCLAFNRTPSSAWRFPGNGLGPGHAKLTRPRSAILCVRSGTASNPADSGKVHASHGFYVSDVDAALQGIPKKVGEIEKMIIPSLPEGPESSLISTGFWEWKPKLSVYYEKSGIDNSKAPSVLFLPGFGVGTFHFEKQLKDLGRDYKVWTMDFLGQGMSLPCEDPAPKSTSGELDEDTYWGFGQELQPWAEELVYSIDLWRDQVQHFIEEVIGEPVYIXGDSLGGFVSLYLAASCPHLVKGVTLLNGAPFWGFLPNPATSPRLSKIFPWAGTFPLPSFVRKLTETVWQKISDPRSIQGILKQVYADHSTNVDMVFSRIIETTQHPAAAASFASIMCAPKGQISFEEALSRCQRQGIPISLMYGREDPWVRPIWGIKVKQQVPESPYYEISPAGHCPHDEVPEVINYLLRGWLKNVESEGSVGVPFLEEPSYAENGVSRELEFVRGGSKKSVHVRLFGSKISLWSQLRSLLKSNTRVISR

SEQ ID NO: 133764 - protein, 81 aa, Oryza sativa
  unsure (1)..(81): unsure at all Xaa locations
  Clone ID: PAT_MRT4530_35603C.1.pep
MDMSCSSSSRSNSPPPPTPTMTSSIAPPPPSGTPPSXSPTSCAPPSSPPRTQETPPPPPSPTTPAPPPPPRSAPSAGTAPS

SEQ ID NO: 133765 - protein, 342 aa, Oryza sativa
  Clone ID: PAT_MRT4530_35604C.1.pep
MAGDEPLPGDGQRRRYLIGYALAPKKQQSFIQPSLVSRAAGRGMDLVPVDPSRPLPEQGPFHLLIHKLYGEEWRGQLDAFSAAHPAVPVVDPPHAIDRLHNRISMLQVVSELDVPLHAHHHHTFGIPSQVVVYDAAALSDSGLLAALRFPLIAKPLVADGTAKSHKMSLVYHREGLRKLRPPLVLQEFVNHGGVIFKVYVVGAHVTCVKRRSLPDVSSDVLQDASAEGSLSFSQVSNLPNERTAQEYYDDMRLEDAIMPPTAFINDIAAALRRALGLHLFNFDMIRDARAGDRYLVIDINYFPGYAKMPGYETVLTDFFWEMVHKDDDTPNLNPNPNDEDVK

SEQ ID NO: 133766 - protein, 61 aa, Oryza sativa
  unsure (1)..(61): unsure at all Xaa locations
  Clone ID: PAT_MRT4530_35605C.1.pep
RTALAPXGQRXXHELLLPPRLLPLRHIDREFGISPTTXSXSPLHYTLSRLCSSAICIGLAR

SEQ ID NO: 133767 - protein, 49 aa, Oryza sativa
  Clone ID: PAT_MRT4530_35606C.1.pep
MPPSRLKGEGTHWAHGGRWAKVAWMERSDSSGGEGREEAAASEDSERTG

SEQ ID NO: 133768 - protein, 51 aa, Oryza sativa
  Clone ID: PAT_MRT4530_35607C.1.pep
QSFCMSVSAVGHVVYYYQTVESGAGVHAAGLDELVHLDELHGRGAHPGCVG

SEQ ID NO: 133769 - protein, 83 aa, Oryza sativa
  Clone ID: PAT_MRT4530_35608C.1.pep
FNFVTSASFAGRGYIVETAPTHNLMTQMLAIKFNVQVPWTSPPEGQEGGIGAPIRVEKCQRGWRPGRRADLRRSTCPQAHRAH

SEQ ID NO: 133770 - protein, 44 aa, Oryza sativa
  unsure (1)..(44): unsure at all Xaa locations
  Clone ID: PAT_MRT4530_35609C.1.pep
RRHGKAKAFLLAVGPHXFPFFFFGMLNKHWSMTNYIVRKLKQTF

SEQ ID NO: 133771 - protein, 47 aa, Oryza sativa
  Clone ID: PAT_MRT4530_3560C.1.pep
GVVGIDTERVGKGAFSRKFDCIVWDEVSRLCYVLEYCRLVLCVVINF

SEQ ID NO: 133772 - protein, 360 aa, Oryza sativa
  Clone ID: PAT_MRT4530_35610C.1.pep
MEHEQLLQASTELMNHSLGYIRSMALGCAAKLGVADAIHHAGGRATMDDLRAALSLHPSKLPYFLRRVMRVLVASGVFAHDEEEDDDDIYRVTPVSSLLVTATGGNGGRSLLPFVLLQLSPPIYVTPATSMAEWLTSGEEETPFEMTHGAGLWTVCSRDPELGELFNDAMAADSAFIMDVAIRGAGRQVFDKITSLVDVAGGTGTAARVVAAAFPHIKCTVLDLPHVIDSIPADHRGRDVVKFVAGDMMDFIPRADALLLKFVLHDWSDEDCMKILKRCKEAIPSREAGGKVIVIDVVVGSSTQAMCHGTQLLFDLLISTTLPGMQRGEKEWCKVFKEAGFTDYKISPVLGIRSIIEVFP

SEQ ID NO: 133773 - protein, 400 aa, Oryza sativa
  Clone ID: PAT_MRT4530_35611C.1.pep
MAIVSRSRRLAVTLLLLLFAVVAAAAVATKAEAGTEDAASKEDESWTGWAKEKITEGLGLKHHVADVDEEEDAARKAGHAAKSAQHTASEAGRQTSKKAGDAKEAAEATASGASSKAEQAKEKTKEAAKGAAGEATRRAEQAKHKTKEAAEAAGERGAEVHEQSKQGKAKVEETAKEKAGEGYDAAKDKAGKAQETLRQSTDAAKDKAGKAQETLRQSTDAARDKAGKAQETLRQSTDAAAEKAGAAKDSAWERTSSAKDAAAEKAGSAKDAAWEKTSSAKDAAAEKAGAAKDAAREKAEAAGEKARQSKEAAKGKAGAAKDAAWEKAEAAKDAAWETAEAAREKANEGYEKVKEKAKEKVEEVKERVTGADDAADHGKEKKHHHRHVDGKQKPRTVDEL

SEQ ID NO: 133774 - protein, 208 aa, Oryza sativa
  Clone ID: PAT_MRT4530_35612C.1.pep
MACESAWDPCGPHMSGRHVIRREHGGDQRQRARALRQVEWGNSEAERRRAKPARRRQVEKAGEAVAREAGDTVADNNDDGDGDEVGPKVTASNPMEATMNLGINGNAGEARADAAGVATVAKRMLVSTRGEEGGDTIAGQGFKSAKSTSAPTESTVAAWPLLPCRSATVSPLLPCHSATVSPLLSHPMSPVAGAAQLIPHRRRPVLPR

SEQ ID NO: 133775 - protein, 35 aa, Oryza sativa
  Clone ID: PAT_MRT4530_35613C.1.pep
AIKKVGVSLEVGMEPIFYLGYLTMKQKALQRTKCV

SEQ ID NO: 133776 - protein, 154 aa, Oryza sativa
  unsure (1)..(154): unsure at all Xaa locations
  Clone ID: PAT_MRT4530_35614C.1.pep
DVTMATXDTTVAHIMDQQEYINIKYSKCWNPIRPPATLLTSNGRXICIRALFSTRVYLMKSSRSHLSNVSSLIAKFLLSHLQLNKQGVVSPTVGLWACNFIRDPVPSXGPSGVHPNLVEHDPRDPLVILQSPIASAEGRGARTGSTGVGPTRQP

SEQ ID NO: 133777 - protein, 98 aa, Oryza sativa
  Clone ID: PAT_MRT4530_35615C.1.pep
LNYYKPRRERKKKKTMAPLYGHQLTILYTYSNPSSNLLVAWWCPRCSHHTLAAGATGYLAHIYISMYVYICIPRAVYICIYICIYIYIYVYIYIYIYV

SEQ ID NO: 133778 - protein, 246 aa, Oryza sativa
  Clone ID: PAT_MRT4530_35616C.1.pep
MSSLYPSLLSLSESPAEYRQVGGGRYAGEDVVDDDDDMAAVADAVSSYLSFDMDDVEYYTPEVGFHSKQHNPPPVAAAPLEAGGGREQSRREAAVNLGKMDRGPAPVSGGAATGGVPRSKNGSKIAFKTRSEVDVLDDGYRWRKYGKKMVKNSPNPRNYYRCSSEGCRVKKRVERARDDARFVVTTYDGVHNHPAPLHLRPQLPPPGGYSIAGAPAVVAPHGRLGLEEAEVIALFRGTTATSLLLP

SEQ ID NO: 133779 - protein, 144 aa, Oryza sativa
  Clone ID: PAT_MRT4530_35617C.1.pep
RVTREKKRHRAQGPEKKPGTPDPGGAPPPPKGPPPGGGGQKKKGPPGGPRAPPGEPLPGGGGEPGGKKNPPPGGKKQKFPPPKWPPRGGGTTGGGAPPPGKGGGGAPPPGGGGLLPGGAPPGAGGPPFPPGGPGGGNPRGPPRR

SEQ ID NO: 133780 - protein, 156 aa, Oryza sativa
  Clone ID: PAT_MRT4530_35618C.1.pep
MQRVLTIVLMLQFFQQASDIDSVVLYGPGVLAAAGVTPNTLLLGLNVVFGVAKASSILIAMALTARVRRRPLLLASTGGMTASLLVLGSVFAAFGGARDDAAVAAVAVAVVVAFACAFSVGIGPLAWVYSSEILPLRQRGQGASVGTAMNRVTWSP

SEQ ID NO: 133781 - protein, 37 aa, Oryza sativa
  Clone ID: PAT_MRT4530_35619C.1.pep
YTIKYTRASCNSAHALVVRHPHPNIHPHLCKKKKKKK

SEQ ID NO: 133782 - protein, 261 aa, Oryza sativa
  Clone ID: PAT_MRT4530_3561C.1.pep
MAAAVREMVRSMGAEQLDEAIAFATMELAGRDIPFEDVFRLCDEQELRRAKKSSMAEEVERIKGKLVGGEDGGRPSSDSSEETVVELLRALRSTPMTFETLEASRIGKTISGLRRKHSSEKVRGLAAALYKNWKAIVDEHLTRSSSKPPAPAPTKTASASDHAKKTDMAAAHKPAPAPSPRKTASNKHEAAPARADDAKLAAARRKLQDGYKEAASAKKQRVIQVIDTPKKVNRRPVAVVERRRIMPGVATVAPLRMCRAV

SEQ ID NO: 133783 - protein, 198 aa, Oryza sativa
  unsure (1)..(198): unsure at all Xaa locations
  Clone ID: PAT_MRT4530_35620C.1.pep
RHEGESRIREKRNKREARRGGGGGXREGAMVRQGVVVGGGGEITQAGSGSGSIAGSATAPAASPHQVAVEIDEQIYSPAFGNIVVPDSRGCCSGFTSSVTRVVFILHLLAFIALTIFLGVQASSRQNPTYKPFANFVPLASSVIVSIIAGCFWVILAVINPPKAIKTSLWAAPVLALACDVVILLVGNAALGMVLIVV

SEQ ID NO: 133784 - protein, 77 aa, Oryza sativa
  Clone ID: PAT_MRT4530_35621C.1.pep
MPECLPSFLLLLLLLLFVVVFFFFFFFFFFFSSLSLSGLSRECSLGYRLLEGPSGLALFKKFYPTFRQRADAVVDDE

SEQ ID NO: 133785 - protein, 40 aa, Oryza sativa
  Clone ID: PAT_MRT4530_35622C.1.pep
SIAHIHIYVNESRHIYVFRFINIYMNMDHARKSYNMKWRE

SEQ ID NO: 133786 - protein, 32 aa, Oryza sativa
  Clone ID: PAT_MRT4530_35623C.1.pep
FYPPSAATYTQRVTRALWFTSPSFPSYCLAEY

SEQ ID NO: 133787 - protein, 78 aa, Oryza sativa
  Clone ID: PAT_MRT4530_35624C.1.pep
MTKGVVAALKGNDAREEAARSGFGGSSLPTDGGDGKWVEGGGEVMAVLGRTEADPAGEWIQQLSGANPHRRCSAAAAR

SEQ ID NO: 133788 - protein, 46 aa, Oryza sativa
  Clone ID: PAT_MRT4530_35625C.1.pep
TLLKLKRIMEPSGAESCAGHLKFCYKPPFVLFVKKNKNATFKFFRP

SEQ ID NO: 133789 - protein, 454 aa, Oryza sativa
  Clone ID: PAT_MRT4530_35626C.1.pep
MAHVAVVTFPFSSHAAVLLSFARALAAASPASTFSFLSTAASFAHLRKTAAAGDLLPGNMRFVEVADGAPPPDAPPPRRMAVFMEAAEAGGVVEAGLEAARAAAGGVAVSCVVGDAFVWMAADAAAKVGARWVPVWTGASSALVAHLRTDALRDDVGDEAASRAVELLTSHPGLESYRIRDLPDGVVSGDLNYVINLLLHRMAQRLPRAATAVALNTFPGLDPPTVTAALTAVLPTCLPLGPYHLLATAPANDDDPNGCLAWLDRHAPRTVAYVSFGTVASPRPDELRELAAGLEASGAPFLWSLREDSWPLLPPGFLERTKQHAAAGLVVPWAPQVGVLRHASVGAFVTHAGWASVMEGASSGVPMACRPFFGDQRTNARSVSHVWGFGTAFDGAMTRGGVATAVASLVGGEDGRRMRARAQELQAKVASAFVEPDGSCRKNFAKFVEIICAS

SEQ ID NO: 133790 - protein, 97 aa, Oryza sativa
  Clone ID: PAT_MRT4530_35627C.1.pep
PNGIASNQPTHQCTAAVLCTVCTQGPCLPPCYVRSSIAIFHPSCCLPAVPGNQITCIAMLCIILANLGAHIVPLSASCLVASHATFAACRSAIGIAT

SEQ ID NO: 133791 - protein, 350 aa, Oryza sativa
  Clone ID: PAT_MRT4530_35628C.1.pep
MSSHDLCWINTLTASTSSKPEGVVAHFSTGIPDQAGTELNPKTNRPNASFEPVTRPTAATRVRVVLERRHRRHGDVALLAETAGLLVGPVQTGPHACDFDDSQYPLSGHGQCIGRVKRAKEVGKNVSPGERCGAGGQTLRHQPSPATRAHGSTARVRGMMGGTMRAVGLRSGIMLSFSIDPLRRWAMAMITRQSGRDGVTPMGSVAHAWGKAGAARRIRQGRSASVGLLVREMGVHCCRFWARTPMQGTRILPARSGLMDQIGTLTNRKAIDLARLKAEEREPSTEGIPVTLNASGDAEWRPRGAPRRPKRYSRTNLRYARRGPCPATLEFGFDAVPVLGLDLDTCCCTR

SEQ ID NO: 133792 - protein, 399 aa, Oryza sativa
  Clone ID: PAT_MRT4530_35629C.1.pep
MSEAPPMEKVDTAVKDKRWQKKDGRKWVLLACVPHVVRGDYFEAGMDNVIKAALAPRATRLVVHRSIAPRRKTIDDHPFVAGADCHGRLLLYASQGPEPEPPVLDGFYRGPLGEHHGFPKAYFICDTLKHKSTRLPDHGFPILHPGNAGLVAITKTIFHVADLHPIVGSDKAALLIYFSVPEIWATHVVDYPPRDRPWGGNGVVVHKTIVWWVDLSYGLLSCDISARRQNLRFVPLPPDCELPPGTPDLDKRRCVGFRGDDLRYMGIHEREYDGKPVVSMWTLVDQDAGTWRLDCQPLVKDIWNDEGYKATKLPREIPTVAFIHPELPGNVAYFFMRSRLFGVNLYTRKVLEWQFFAMLNPPMRYHSSRFVRAWACPNSVGSTFYMPHMEHDVFSFVYQ

SEQ ID NO: 133793 - protein, 106 aa, Oryza sativa
  Clone ID: PAT_MRT4530_3562C.1.pep
NPPKPNLRGPLSGKKAPKKGGPTKGPTQKPFFFWGKKKGELGNPKKKTAPWGGTYRPPRGGGPRGGGAPLWGGETPRGGASLKWLPKKKKPLWAGGNPPLARNFPL

SEQ ID NO: 133794 - protein, 82 aa, Oryza sativa
  unsure (1)..(82): unsure at all Xaa locations
  Clone ID: PAT_MRT4530_35630C.1.pep
MAVGSGGLTVGSYRNGCERWTSVGGGDKARKWLGGGGWRRRTTEDREDGVDGAPCLAPLEEXEREGKENGRGVAGIVEIERV

SEQ ID NO: 133795 - protein, 84 aa, Oryza sativa
  Clone ID: PAT_MRT4530_35631C.1.pep
KDNPKTDECKVCENKNPWPKNGLGKVQKNTPLKGNEAPPFSVPGQNCQPKKTVPGLAARTLFPFDKGTHTCQRKNPAANPGHFL

SEQ ID NO: 133796 - protein, 258 aa, Oryza sativa
  unsure (1)..(258): unsure at all Xaa locations
  Clone ID: PAT_MRT4530_35632C.1.pep
HASAPLRVRRARLGTDVLKCEIWMRSCARRLLDDQLLGFARLAQDFSLSSTDLSHSPAGTIRLSLALHSGPPGDACPPPERAAAEPSITSEVVILEPAPPVDYARIEFPDLNAVKENDDMAVQYLPFLHLADAQAMDDDDCEMATSPREEKPASSDDGSKNASTSTTTAVSDDNRXAVTRKARPDADDAATXPMSCRSPDTPTSNGGXPSSSDKEKGAAEDVFDSPPLRDIDMEAEQSAMQRQIWEMYMKSMQQFTES

SEQ ID NO: 133797 - protein, 91 aa, Oryza sativa
  Clone ID: PAT_MRT4530_35633C.1.pep
MALVGRAAMTEAAVPTPSMATCVKAFDDSSGPRERIRRWRRPLRLDSTVVAVLAAGFSGGVGGVTTTATRGDDSAMVAVLLNAGSLYAFKT

SEQ ID NO: 133798 - protein, 397 aa, Oryza sativa
  Clone ID: PAT_MRT4530_35634C.1.pep
MMESARFVYELDHGGEGEEEEEEDACFLDIYVHGARGIHNICIYAAQDVYARLALTSSPDDAPALDTRVAAGGGANPRFDERLPPLRVRRARLGTDVLKCEIWMRSCARRLLDDQLLGFALVPLAAVAAADGARLAQDFSLSSTDLFHSPAGTIRLSLALHSGPPGDACPPPERAAAEPSITSEVVILEPAPPVDYARIEFPDLNAVKENDDMAVQYLPFLHLADAQAMDDDDCEMATSPREEKPASSDDGSKNASTSTTTAVSDDNRAVTRKARPDADDAATAPMSCRSPDTPTSNGGKPSSSDKEKGAAEDVFDSPPLRDIDMEAEQSAMQRQIMEMYMKSMQQFTESLSKMKLPMELDGDNGVVVQKEEKPEAEVKLQPKKDGARVFYGSRAFF

SEQ ID NO: 133799 - protein, 54 aa, Oryza sativa
  Clone ID: PAT_MRT4530_35635C.1.pep
LFSDYVQCPERGIDPEYAVDGSLIPGYFLTRAMRAGYRAGTHEHALEVILMPGR

SEQ ID NO: 133800 - protein, 92 aa, Oryza sativa
  Clone ID: PAT_MRT4530_35636C.1.pep
MRDTAAIPASLRYYFIEADCRRDLSVSENDCKSDEMDLKHPGQNDPRIAANHHSYVLGLQQQEQQKDEQNLSQKIVHGLHLGLNLHAGSHQE

SEQ ID NO: 133801 - protein, 513 aa, Oryza sativa
  Clone ID: PAT_MRT4530_35637C.1.pep
MASFGMNWNQKSPVFWDWENPAPFGPNTMENPKSIPHPEPRGVVVAAANHGSTNSSGGTFTSSSELANGSSKSSLSASFDSSSKLGNSLEFRFASVKGHGKNMCKDGEAGRVEDSGTSPAVAVSHGEPVIGLKLGKRTYFENVCGGQNVKSSSAASGVTCPSTVVKKMKVSQQSTQSSYCQVEGCKVDLSSAREYHRKHKVCEAHSKAPKVIVSGLERRFCQQCSRFHGLAEFDQKKKSCRRRLSDHNARRRKPQQEAISFGSSRLATMFYDARQQTDIYFGQSPFGQVRSNAISSCDNLGGFKFTEAKLPWMKPMKTIGLEDLNFSTLQMPGNVVSHTVHHHDFDGLIPFKGNTPKVLNQACFMDKLEPQIVSQKNKNKNREARSTNYLLQAFWTSCLGVDPACAVVSSNSNGAPDLRRALSLLSSDSWGPADVQAGSQVHPGGVMPPLAVAAATVTAPTNPVSVMHALHPSTGGGGFWQDGDDPPPLDHASQAQAFMHPGNGSSSGYGHLH

SEQ ID NO: 133802 - protein, 324 aa, Oryza sativa
  Clone ID: PAT_MRT4530_35638C.1.pep
MAGLREMESTLPPGFRFCPSDEELICFYLRNKVANHRVASGTLVDVDLHAREPWELPEVAKLTAEEWYFFSFRDRKYATGSRTNRATKTGYWKATGKDRIVHEGTTRAVVGMRKTLVFYLGRAPNGQKTTWVMHEFRLETPNSQPKEDWVLCRVFDKKKPSTIEAEGGGSSGSDLFIPGATDGSTDPSSPTTMAPLLGSSPDPTVVDRFDHRSAAVPPLMVLMQGGGDQMISGSGVHCSNNDNSGSSSALLNLTMLQYSFLEHRPTGDDMAVGAHFGTCQGGNNDATMALGMGFEEHGMGEIIEMEPAWRQGGSNCVYRDELYF

SEQ ID NO: 133803 - protein, 46 aa, Oryza sativa
  Clone ID: PAT_MRT4530_35639C.1.pep
GYFGEQQQQPGMTRVRLTRARQYPGQLPSMCPGEPQQSSIFSPGQD

SEQ ID NO: 133804 - protein, 107 aa, Oryza sativa
  Clone ID: PAT_MRT4530_3563C.1.pep
GTVLDPVIILKKGSAFRVSECHITMPKCPRLHRFYSVSHCPNAASRSRHDYFFFSPPHQLTFIQIKGNDFLQGWVIGGNYKYNHHWWKLENNQETRLTKTCSGTSSS

SEQ ID NO: 133805 - protein, 191 aa, Oryza sativa
  Clone ID: PAT_MRT4530_35640C.1.pep
MSSKLMRVGDGEGAGGGLPRSHPSNLPLPAPHSDPNLQFSGTDDDFSNRHSSSSATGGASPGYYSDYPSSFSGECSPYNMSPWNQTMASPWSHHSDASMAGLGGAPAMAPGTSLIGSLVREEGHIYSLAAKTDTLYTGSDRKNIRVWRKQKDSRGFMSSSGLVKAIVISGKRIFTGHQDRKIRVWQASAKN

SEQ ID NO: 133806 - protein, 264 aa, Oryza sativa
  Clone ID: PAT_MRT4530_35641C.1.pep
MAPLLLILLVFMPCQTMLFTFDRVTSSPPLFSIISSWWMNPLPQHSSCSTRSTPQDSMVRLDCAQQFRGNGFVVFGSGNTGLILTCEHNLPKTESNGTVAVVVVGFHTGVRFDARVVYVDAGRDLALLRADTFSVPCTPLRFWEDGDVVSGIDVVLLAFFTMKYGQVLVEPGTFPGKILSEPVWDEETDSGEIRSDYTSESGTSGAPVFLQRVNKVVGVNSGALGGTVKTAISVRTIHAALRQWLQPGDENITIEEMLKRIAEQ

SEQ ID NO: 133807 - protein, 59 aa, Oryza sativa
  unsure (1)..(59): unsure at all Xaa locations
  Clone ID: PAT_MRT4530_35642C.1.pep
CNYVLILCPAGKLFTMLKQMLTVEHMKXITRDLSPLCLSFKANLPIWQVSAGQINFPPS

SEQ ID NO: 133808 - protein, 217 aa, Oryza sativa
  Clone ID: PAT_MRT4530_35643C.1.pep
MWRCMSLLVAHVAPEKKPNDCWGDGLGDSAPRINQDSLDELMNDELPTVANKLSIAEDIPSPLCNLAQVDWDKIMNERSLINFVEPLVNHQEAPGNSGSALLLIGGGSILLLLEVSMVQLYGNIEHTIDPLWTAQTGGHVIHETCHLTASPNGIIVANGPLKCLLGYYISHADKSQEGWGGWPGKRGSVDAASTAETADDQTGKASEPTSSLISQLI

SEQ ID NO: 133809 - protein, 169 aa, Oryza sativa
  Clone ID: PAT_MRT4530_35644C.1.pep
MAEEAAAASSAAEGRMTMVVGVDESEHSYYALQWTLRHFFAAAAGQPPQYRLVVVNAKPTAASAVGLAGPGAADVLPFVEADLKKSSMRVIEKARELCAQVSDALFEVLEGDARNVLCESVERHQAEMLVVGSHGYGAIKRAVLGSVSDYCSHHAHCTVMIVKKPKHKH

SEQ ID NO: 133810 - protein, 104 aa, Oryza sativa
  Clone ID: PAT_MRT4530_35645C.1.pep
QKVHQPYTYSKKILCDLFLSSCIMYTKLYDSMRKKKERPVCRTKKRPTGPWGRRDRSHKLLTNHIHTARSRLHLNRNVKTALISGFPYLHWNGSALCIKHTCLI

SEQ ID NO: 133811 - protein, 304 aa, Oryza sativa
  Clone ID: PAT_MRT4530_35646C.1.pep
MASQRRRSSATAVLLSLLLLLQLAAAYPQGKRQNVAVFWGRNKAEGSLRQTCDTGDYNIVIISFLSVFGHGKYWLDLSGHDLRDVGADIRHCQSKGVYMLLSIGGDGYQYSLPSSKSAADVAENLYYSVLGGDRPGAFHPFGDDTIVNGVDFFIDNGPADHYDDLANRINDYNQNIRDPIGIMLTATVRCSYPDPRMKAALDTKLFRRIHVRFYDDPSCSYNHAGLAGVMAQWNKWSATYPDGQIFLGVVAANLTGKNDMVAVGELRDKLLPAVQNTDTYGGVMLWNSYYDSLTHYGRYVKDLA

SEQ ID NO: 133812 - protein, 105 aa, Oryza sativa
  Clone ID: PAT_MRT4530_35647C.1.pep
GENLSLGQRQLLCLGRALLRNSRVLVMDEAPAAVDYETDFLIQKPIRTEFSKQTVVPKGHRINPIIDSVRVLVLAKGKLAEYAPPSNLFNNPKGIFYFLVNKTHD

SEQ ID NO: 133813 - protein, 68 aa, Oryza sativa
  Clone ID: PAT_MRT4530_35648C.1.pep
IQRCPMIPALHPCRQCRRRSQKTRRRSPRRSHCRRLSERPTSGVSCRIRRCRSTKTQVRSRDHIDRSS

SEQ ID NO: 133814 - protein, 81 aa, Oryza sativa
  unsure (1)..(81): unsure at all Xaa locations
  Clone ID: PAT_MRT4530_35649C.1.pep
GCRNSGTXPXPRLXXXHWXXXXXXXXGGXKXMXDXTXSDLRRQKSXPGSCSDHSLPRIASAASHWPRPXXGXXSCHXTXXL

SEQ ID NO: 133815 - protein, 60 aa, Oryza sativa
  Clone ID: PAT_MRT4530_3564C.1.pep
MASSGTFDDLYNGEGVTKEGLVSEDCRATAKEFHMINYFGEGKYQVGKSKVPCWIQHSSY

SEQ ID NO: 133816 - protein, 120 aa, Oryza sativa
  Clone ID: PAT_MRT4530_35650C.1.pep
ALLFQPGIQCTLVIGQHQHQLPAQVVIIAPCPLLLVQKLMIFPTPDGGRQARNEKVAGRSLKPCSPSPSPVWGIRGAPSTPSIGISSPESPRPSSASASTHCERRETQQQRAGRWIDIKE

SEQ ID NO: 133817 - protein, 61 aa, Oryza sativa
  Clone ID: PAT_MRT4530_35651C.1.pep
PRVRKKKKKKKKKKKKKKKKKKKKKKKKKKKKKKKKKKKKGAALLKNQILLTLACKVIFFF

SEQ ID NO: 133818 - protein, 111 aa, Oryza sativa
  unsure (1)..(111): unsure at all Xaa locations
  Clone ID: PAT_MRT4530_35652C.1.pep
WSENGKVRNLLGVDLQQIRNIIKYSVLGGHVLTTKFGNIGIGKEDWIEAKSEAEIEFXTEQESAGVQIGYEXDRLGLSRARDMFGQKSAAKTYGILEFVRDSSRVHNGHIL

SEQ ID NO: 133819 - protein, 133 aa, Oryza sativa
  Clone ID: PAT_MRT4530_35653C.1.pep
MAGVVGGPRKIWRVGAARAVAGPAAQPRLMGGTAPGFVNEYFEIQSMIFKAEKPNHRDLHDRPQPPQISYGEHQAIEVTPCWLNSSDKHIAEGISIGHFFFFGIIVSEGAGTASHYRKGFSHRGKGRFEQEKK

SEQ ID NO: 133820 - protein, 71 aa, Oryza sativa
  Clone ID: PAT_MRT4530_35654C.1.pep
SFQPSYIVASFFYTILNVGSAGGDIPLLSLTCELLFGSEKFKPPCLLLSELRDRDIWANYHTPFFFPTVGR

SEQ ID NO: 133821 - protein, 791 aa, Oryza sativa
  Clone ID: PAT_MRT4530_35655C.1.pep
MTATSRAPRRPRVRAPARAPPPTPIRTARGARSAAADELVLAEFLEASLRVPDLALPPKMSSRRSFRYPAPPPTPDVLAGALLSGPDPDAARTAVGAAAESGAFRVGGAVDAGEVRAAVEAAEAVFRAPEEVKRELGRWFRRRDRVAGEEFYWFRPATASSDDDRVLDAALPGSTYQVLRYTRTPHSACAFYAAICRAASILCLTLYNCNKLKTHWSEFGSTNPPNSYALSIHLSGRDQEICLRNQSGSTFFSLPAGSMLVTIGKQIQEWSNGEFKNAVAFLGLSFLYFFINRGGEHRTGGGDDSFFVVSVQHVVTTPPPHPTPTHILDLWSFMVIDLQKLGLVRSSKTRHRKKGSRRDPREGSRNGTGPRDKKTGVQLELNGHPQRDATAGTQSSPVAARTLSATIRKALHVGIALAFGSDDDQRTQSCKRCALPLLLVFFFTGCRHLKDGRATNQNAVLRDRLLLLLLRRRRVARVVAVTKVVATRRRRKGCGGDWWATGRDANLSTSTVLCAIDVLVYVLLVSSTGCLLLPASPVSPPPWHALSLCMHIHVDSRNTLKNGTRELHHVVRTHRRWRAGSPCWYWYSRTDGRTAGKMGGQWWTRCSRVFTRCQYAKNSVAVIIVARCERHGGCFQSFPYGRIVLCCNICQGNELLARGHANGDIVICGTLCCSGTNGAELQLLEPFQGYDPYVMISSNCSYANTTIFNTTKTFAFYSYCGKHHVLEKEHTTSKFRLQTALPTSCELKKIAIRKMALAGERSRGQDLSNVIVDKRRVMEDPFGMLLKSVLV

SEQ ID NO: 133822 - protein, 58 aa, Oryza sativa
  unsure (1)..(58): unsure at all Xaa locations
  Clone ID: PAT_MRT4530_35656C.1.pep
MQSQKVREEQKKNHRFRPRDALASPAGVPNRRYNDGEGPIXALYLTDLNNRADQLDSM

SEQ ID NO: 133823 - protein, 539 aa, Oryza sativa
  Clone ID: PAT_MRT4530_35657C.1.pep
MAPAAEVSSSSAETTGSSAGSAPSTAAAAATSTSHSSYRRTAPPLLLLASLAALLIISTGDDTAAFDSAAVGRSIKDVSLENPEVTFVPSSLGGQFCERVRLSGIPKLHIGSYANQIRVKMNVSQSMPEKFHWKIEICFHGNASMGLCQCETGEWQNLQNGMWNAVKSPYGNKYVDVKVADKTSTRFSISIQEEFQKWRLACLGIGFILLFLSPIVSKWAPFYYSSSMALGVLLVVLIVLFQGMKLLPMGRKSLFYLTIYGSVVGVGSYAVHYFSTLVASILENFGLSEEMHNPVSIFLLVAIVLTGAGFGYWMVRRFILSKDGSVDAGIAQFVKWAMRVVAICFVMQSTLDPLLALFALAASWWICSVFTAYRAPKSMTLKQKQSKASTQPMYNKGSPNPRQIQFLSPSKRDIGRTTSNSSATQYGWSNLANGGLVSPTLTKRVVPDNQDEDHYSTFHNIQPRKYSKEEWDDFTQKSTRKALMECTATPEFARWVADNAHRLRVEQQDDASEDELIESSSNSSEETAQEADTGLFRWY

SEQ ID NO: 133824 - protein, 114 aa, Oryza sativa
  unsure (1)..(114): unsure at all Xaa locations
  Clone ID: PAT_MRT4530_35658C.1.pep
GSVFVETCASKMKNAPDKSVETNVDRKKFCKASTSCPMQFISSPPLGTLGVRPVSVIKQWAFKLFDKVEKTFKRFVLVYHGGSRFKDXIELAKXHVVTATYTNVANLKQKKKKK

SEQ ID NO: 133825 - protein, 291 aa, Oryza sativa
  Clone ID: PAT_MRT4530_35659C.1.pep
MDGEAADLNDWELLLTSPTAADEAAAAETRDGGGDDEAGAIKYDYFELGSDVKYPERVSFSKELEEEGEGEEEEGVASGNASWVEPDPDDLVFPGPDRAALWSDSSDDGERREEAEATEPLPVEAAAAEVEAGEGAVTKGGGAGAGVVRWWHLPMGVLRAWALRAARSVWSLPVAVALLGIAVLGRRLYRMRRQSKAVARVRLVLDEKGENSIKFQLPYPLKTKGAVLKSQTKHKPFYFRNLILLAKHKASQFKAQASRLNESFPMARRAPIMKPLLPANGVTPWPVLGHI

SEQ ID NO: 133826 - protein, 89 aa, Oryza sativa
  Clone ID: PAT_MRT4530_3565C.1.pep
QLVRIEKRALDSTERAPHSPQSPTPAAVAAAARGGDAAVPGADAAVAVAAADSGVHAASRSRHHPGGRAPPRHGRVRPRGHADRDPHDQ

SEQ ID NO: 133827 - protein, 179 aa, Oryza sativa
  unsure (1)..(179): unsure at all Xaa locations
  Clone ID: PAT_MRT4530_35660C.1.pep
TGTRLPLPPPLPRRRPSGRAARRTAAAGLRPRARPGGGGGGGLGAARGRGTARADLAVGQPAAGLSGGAATTSGGGGGGVXEVLVAAEETARSEPGSGRMATAAGYGPPGGRGGGGSEFVAMAAXFAATTAGRLRRVPSELVDGEKMRELPTTWSASMRGSLEPHARSAQGEGFGGGAV

SEQ ID NO: 133828 - protein, 807 aa, Oryza sativa
  Clone ID: PAT_MRT4530_35661C.1.pep
MTILLVILGLHLCSLHLPAISAAADTLSPGQSIAGDDRLVSSNGKFALGFFNTGSKSSGNDTLSYWYLGIWFNKVPNKTHVWIANRGSPVTDATSSHLTISPDGNLAIVSRADSSIVWSSQANITSNNTVAVLLDTGNLVLQSSSNSSHILWESFDHPTDVFLPSAKIGLNKITGLNRRIFSRRDLVDQSPSVYSMEFGPKGGYQLVWNSSVEYWSSGEWNGRYFSRIPEMVVKSPHYTPFIFQIEYVNNDQEVYFTYRIHDETIPLYTVLEVTGQRKALAWLNDTQGWQAVFTHPNDQCEVAATCGPFTICNDNTFPSCSCMEGFSIESPDSWELGDRTGGCRRNIPLDCVSSRSDIFNAVPATRLPYNAHAVESVTTAGECESICLGKCSCTAYSFGNYNGCSIWHGKLVNVKQQTDDSTSANGETLHIRLAARELQARKSNKGLVVGVVVSASLSALGILTLVLLLIMIRRHRKKLHCQALNSIYAGTGVIPFRYSDLQRATKNFSEQIGAGGFGSVFKGLLNGSTAIAVKRLVSYCQVEKQFRAEVSSIGVIHHTNLVKLIGFSCKGDERLLVYEYMSNGSLDTHLFRSNNSVTLNWSTRYQIALGVARGLAYLHESCRDCIIHCDIKPQNILLDDLFVPKIADFGMAKLLGRDFSRVMTTARGTIGYLAPEWFSGVAVTPKVDVYAYGMVLLEIISGKMNSHRESNSYADHIVCFPLEVAHKLLEGDVLSLVDGKLNGDVNVEEAERACKLACWCIQENELDRPTMGKVVQILEGLLELDLPPMPRLLQSIVQSSWKTETQH

SEQ ID NO: 133829 - protein, 278 aa, Oryza sativa
  Clone ID: PAT_MRT4530_35662C.1.pep
MAFGGLALALALLVVSVNLLQVASSDGDHARCEGVVKGWAASVAGSEGKDGDKLSLRDLLFFLHIPRTGGRTYFHCFLKKLYTNAEECPRSYDKLRFDPSHPDCKLVVSHDDYSFMSKLPSERTSVVTILRNPVDRVFSTYEFSVEVAARFLVHPNLTSAKLMTSRVLTKSRAVSTLDIWPWKYLVPWMREDLFARRDARGIDKVRSSHRVNAYDVEDMVMPLHQYINDPVAHEIIHNGATFQITGLTNNSYLSGAHEVRHCVRKHPDLGHFVLQVAK

SEQ ID NO: 133830 - protein, 324 aa, Oryza sativa
  unsure (1)..(324): unsure at all Xaa locations
  Clone ID: PAT_MRT4530_35663C.1.pep
MAADARLSPIPSTFRRAASAVAERGEDTAAAGGAEEGDAAAGEDAAAAATAGDAKAAAVAAGDEEDDEDGDEGVETTLGRWLRRPWRRGKPRGGSGXRGSGAEEVAAAARRGFPPSPRPTAAVVRAILVVVILMPPLRRHPPPPRHLPQPPPAAASLAAATARSRVTCRGRRPHPSSSAQPVAAASFPRHSAPPTTAASSLCRSAPPAAAVSSSTTASPSSAPLGAARRCRVLPCRHVLPALRHRPHAAAASSPAASADPFEREREKREDEEYDRSMNARQNGNMPGFVHLVTSEFESDRASRYSRFQEYDLVYIIGLSYYASR

SEQ ID NO: 133831 - protein, 166 aa, Oryza sativa
  unsure (1)..(166): unsure at all Xaa locations
  Clone ID: PAT_MRT4530_35664C.1.pep
MESELTTLDIATVEAEWLRELLMDLPVVKNFSTSEVFGERYTRLLLFVFLCIVCANMSNTGDNSNIGDKEKEAPVNTNGGNTASNSNGGPFSXGYNDLLLPFVLHFLLLSVAMLLRCLIYSDAYFILNMLMLYISSTITRSIQIANIKIYXIMTKFPTVKKRLFSY

SEQ ID NO: 133832 - protein, 114 aa, Oryza sativa
  unsure (1)..(114): unsure at all Xaa locations
  Clone ID: PAT_MRT4530_35665C.1.pep
PPRTWHFLTYRTTPTNDLGRRTRTYHSLRTTPXTTTVLTNHFLYFLRTLLYTYGLDTFLSRSPRFLRLHHTPPRRTTTTTLPRGPTTPHSTFVHLGSTTYLRLTHVPTGPITLL

SEQ ID NO: 133833 - protein, 117 aa, Oryza sativa
  Clone ID: PAT_MRT4530_35666C.1.pep
MAATAMPSSMPPPPPAIATFAAPLQPDYQGSVTAAAEGAAARGHGGGGSIGTFFAVLAAVLVLTLLSCVLGRVCARHADGPDERYERYQPRNGTCGVAIKISVVEVQGDQKAAVVDK

SEQ ID NO: 133834 - protein, 54 aa, Oryza sativa
  unsure (1)..(54): unsure at all Xaa locations
  Clone ID: PAT_MRT4530_35667C.1.pep
SVFRALQNDVLANAFRLARGEAQRPKHNMXDEFGAFAPGRNKSAQEVYNAAPSS

SEQ ID NO: 133835 - protein, 153 aa, Oryza sativa
  Clone ID: PAT_MRT4530_35668C.1.pep
MGATATTGAHTLQFLPHLRVALPADEIVEGKDEIVDGKDRKNIINPAETTSQDPPTGRASGRGCSLGGRQRRRCGPARTRPSSHDSVGRSGEERRGVTALGRRSLLAACAQIALESSGARCLIHNLSARRHSEAGLQTTGLVTRCPGKENGGD

SEQ ID NO: 133836 - protein, 144 aa, Oryza sativa
  Clone ID: PAT_MRT4530_35669C.1.pep
MEETSPTNMRRKYSWWWNSHICPKNSKWLQENLTDMDSKIKMMIRIIEEDAESFAKRAEMYYRRRPELMALLEELYRAYRALAERYDHAAGELRQAHRKIAEVFPEQVLVDLDDDLPAETASIETEMDNPDMAPYFLSFINASD

SEQ ID NO: 133837 - protein, 729 aa, Oryza sativa
  unsure (1)..(729): unsure at all Xaa locations
  Clone ID: PAT_MRT4530_3566C.1.pep
MAEERESFEGQWAPSDVTEENLKEMVAHGVLPAKEIIGWRPACGEAFPTPDMHEIVVFSNFFYGGFSLPTSKFFRGILEFYGISLHHLNPNSIVHIANFVHACEAFLGIRPHFALFRRIFFLKPQPNKNKPCVVGGAGFQLGGTLSQKYFSMPFKTSNKGWHANWFYVQNPEPALPEYSCLPPTYQDTWNSLSMGDEAAQALTLPDRMLKLKEQGLHGEQITRHFIKSRLAPIKERYRTAFEFDGKNDPNREDPESLEFKIMKERMYKIFSSGIVVDYSHILXVVPYHAFNPXLLQMRKLVLSDDEGDVAEKAGSKEAAGKQPKQANPPKKTTSSRPIPKIRKSSRKPSDIDPSGKDLNLTNNETGSATANEAGTTKENRPTGSQSATDDVETGNERPTGNHKDIPETEEQASSPPLNDTNTGPEASSFDKVQGPARPPPKIITGNNPLNTDRKGPMIGDEEEVLRIRSAEDSRLPILVKWWDDEMQSQGIVINKQKQDKEVSLLTRTLNQATRLVNRIHLRNEAKTATLEKLVPHLGSLEETRAKLRETRELARKTEHDLRDRVAELQEANFELSGSSKVQAAKITELERQIKALEKDKGDLTKERDLAIKDVEDRKIKSEAQFDVLITKIKKLEGARDEVANAATPLIEAMFYNNNGPSTIDAVEVFDKLRTAPDTYFKNIKEVGSMGASMALAMTKSLYPKIDIDAVDGFADGTSEEDALDLINDA

SEQ ID NO: 133838 - protein, 66 aa, Oryza sativa
  Clone ID: PAT_MRT4530_35670C.1.pep
MLAAASRTTMLGIPDSGQLVAALTGLGEEDEHIRDAGRDDDIAWEAEPAAVRNGSGGGEFNGAIGG

SEQ ID NO: 133839 - protein, 120 aa, Oryza sativa
  Clone ID: PAT_MRT4530_35671C.1.pep
DETRAPAPSPRPLVLVLSLRRTCPLLSSTPSSARRRPPCQPASARGSQHPHFLPTAKNPHETLVLPSVPHHPCTDAPRRHPIDRSPREAPRARPLSRLKSEIPTLSPIFTSPVRHGSRRA

SEQ ID NO: 133840 - protein, 245 aa, Oryza sativa
  Clone ID: PAT_MRT4530_35672C.1.pep
VAELRDAADIWGKSVWETEEHLKTTLQDPLTRISGIGRAGENQVLFAAVVNDLHRAAGRSGVGAVMGSKNLKAIAVRGTKGVGNIRDPKAFMAETFARKKILHDNAVTGQGLPTYGTQVLMNVINEVGALPTRNHRDVQFEGAKDISAEAMATPRASDGKKHLVTNQACFGCTIACGRISKIDETHFTVVNKPQYWGASGGLEYEAAWALGAANGVNDLECLQYVNLLCNEQGIDPISFGATVGA

SEQ ID NO: 133841 - protein, 342 aa, Oryza sativa
  Clone ID: PAT_MRT4530_35673C.1.pep
MSAVERKTACVTGGNGYIASALIKMLLEKGYAVNTTVRNPDDMAKNSHLKDLEALGPLKVFRADMDDEGNFDDAVAGCDYAFLVAAPMNFNSENPEKDLVEAAVNGTLNAMRSCAKAGTVKRVIITSSDAAISRRPLQGDGHVLDEESWSDVDYLRTEKPPAWAYSVSKVLLEKAACKFAEENNMSLVTVFPVFTLGAAPAPEKNQMIYNMKLREYFSGDETHLEVLKPLQWVTGSVSIVHVDDLCRAEIFLAEKESSSLSSARYICCSFNTTVLALARFMAGRYPQYNVKTDRFDGMPEKPRVCCSSEKLIREGFEFKYTNMGDILDDLVQYGRALGILPH

SEQ ID NO: 133842 - protein, 360 aa, Oryza sativa
  Clone ID: PAT_MRT4530_35674C.1.pep
MSAVERKTACVTGGNGYIASALIKMLLEKGYAVNTTVRNPDDMAKNSHLKDLQALGPLKVFRADMDEEGSFDDAIAGCDYAFLVAAPMNFNSENPEKDLVEAAVNGTLNAMRSCAKVGTVKRVIITSSDAAISRRPLQGDGYVLDEESWSDVDYLRTEKPPAWYKIKGGKIVFPYYWMRAYSVSKVLLEKAACKFAEENNMSLVTVFPVFTLGAAPAPVARTSVPGILSLLSGDETHLEVLKPLQWVTGSVSIVHVDDLCRAEIFLAEKESSSLSSAESSARYICCSFNTTVLALARFMAGRYPQYNVKTDRFDGMPEKPRVCCSSEKLIREGFEFKYTNMGDILDDLVEYGRALGILPH

SEQ ID NO: 133843 - protein, 167 aa, Oryza sativa
  Clone ID: PAT_MRT4530_35675C.1.pep
MKITALLVLKSPGDGDSSSGGGGGEQEQEQQAAVVVANATDNGLCAIAFTDDHYPVRSAFSLLNTVLEEYHKTFGERWRTAKTDNTQPWQYLDDALTKYQDPAEADKLLKIQRDLDETKIILHKTIDSVLSRGERLDSLVEKSSDLSAASQMFYKQAKKTNSCCTIL

SEQ ID NO: 133844 - protein, 337 aa, Oryza sativa
  unsure (1)..(337): unsure at all Xaa locations
  Clone ID: PAT_MRT4530_35676C.1.pep
PTNRGDVGVRDRRQRVYRFGAHQDAAAEGIRCGCAYAFLVAAPXNFNSEDPEKELVQAAVQGTLNLMRSCAKAGTVKRVILTSSNAAISSRXLGNVKHVILAESWSDVDYLTEKPPGNGAYCVSKVLLEKAACKFAEENNMSLVTVFPVFTLGAAPAPVARTSVPGILSLLSGDETHLEVLKPLQSFTGYVSIVHVDDLCRAEIFLAEKESSSLSSAESSARYICCSFNTTVLALARFMAGRYPQYNVKTDRFDGMPEKPRVCCSSEKLIREGFDRSSSSTRIWATYLMTLWSKAGPWEFYHIERTAHAALLSTYSLRQKNETKTGCDISFRPKKRN

SEQ ID NO: 133845 - protein, 99 aa, Oryza sativa
  unsure (1)..(99): unsure at all Xaa locations
  Clone ID: PAT_MRT4530_35677C.1.pep
KKGSKGAKTEKFPIFKKTPTSMKARPVLSEDALKKLIPKPTHGLIPSRLITSFGNGKQMGKKAXYEPLLDTWGGGGRRSHPGFGGDPGWHGGTQVGAAG

SEQ ID NO: 133846 - protein, 55 aa, Oryza sativa
  Clone ID: PAT_MRT4530_35678C.1.pep
HSVPGDGVWYMMESPAPIFGVFIVYSSQVCGGMVLSRSRVVLARKSILVSIFSSP

SEQ ID NO: 133847 - protein, 98 aa, Oryza sativa
  Clone ID: PAT_MRT4530_35679C.1.pep
FFWLFFFFCVLPTCFFFFFYFFFCPLVFFFSMKTTEGCTPQILLVQQALEKKMKGCAPPIQNLKCNGTLDWGSARDRNPPAFRRFLKKPHGSKGWGPT

SEQ ID NO: 133848 - protein, 245 aa, Oryza sativa
  Clone ID: PAT_MRT4530_3567C.1.pep
MRSTASRALLIGAGWEALKVLDFRTDTTERINKFEEEEEPQTVHRGNVIEEQEQLNEQRRHGGEDGDGAVAQETWLTLTDASIPPAPLPDEVDGAAGCPCVGPTLSVPRFSFQEHGGSGREARMAMSPCEHLLRCISIAGGEEVVKEIHQGLCGAHQAARTVASEEFRQVYIGQPYSKWGHDIIGPFPMARNGYRFAIVAIEYFSRWLEAEPLHTITSAAVQKFLRKTIVCRFSVLKEFITDNGK

SEQ ID NO: 133849 - protein, 135 aa, Oryza sativa
  Clone ID: PAT_MRT4530_35680C.1.pep
MKIQYELNSDRDLNRSPTGLGGPSDGSYIFVRGVTGGGIASPWKYGEENARVGEGRAGAIGYFLYIDARYFARVPSTSQRLLPLHSASSVGAPTTTPQAAQRADGPDPGIGSHDASPGDGEEEEAPSPRPSSTGC

SEQ ID NO: 133850 - protein, 81 aa, Oryza sativa
  Clone ID: PAT_MRT4530_35681C.1.pep
MVVIVAFFRRSGLIHCVVASFCQCRLVHCGRGRRVAAIVLSPSSTAIGVFVRPSHLSTQQWTFSSNPIHLFFRPPLAAPHA

SEQ ID NO: 133851 - protein, 101 aa, Oryza sativa
  unsure (1)..(101): unsure at all Xaa locations
  Clone ID: PAT_MRT4530_35682C.1.pep
RFGSNPQRFFLILGEKERGEREDQNPLKTRRNRSPIGANLEVEGSGSGSAGGWRXEMDPTGGPHLSASTKKGSGRXSAWAGMGRFGRERERGCWAENGPTA

SEQ ID NO: 133852 - protein, 107 aa, Oryza sativa
  Clone ID: PAT_MRT4530_35683C.1.pep
FEVFGSQNIFPVKIPAVQHQLLGFDLKVPEPPKFVQLGVGVAFRPTLAGVRRVAPRRLGRGPAGHAVEVAQRVGLQSCRIIRGQVRVAAPRPRSHHGGLSWVQGWVA

SEQ ID NO: 133853 - protein, 79 aa, Oryza sativa
  unsure (1)..(79): unsure at all Xaa locations
  Clone ID: PAT_MRT4530_35684C.1.pep
GDGKQAPDGSAQPSDNGATDGSLGNQGDGAQGLXGGDLNRNSDVAQDCFNNFQDRVDYALHQQLSRRRQHQLPYLRCQR

SEQ ID NO: 133854 - protein, 243 aa, Oryza sativa
  Clone ID: PAT_MRT4530_35685C.1.pep
MPGIICSVITDRALEIEALVIQDLPSGRDRKKDDRFNKADDKHDNEAQLQRIQLDMEALHEEKSSLEVILNGKINEASKLSSRIADLESQLNDEKEACERSQARFERFADLLASDTLKPCSKDQGSSAAKEDPYNAYEMSPSDQRQNHETTRKRSVALSTSEEGRNGKKRRESYDNRDPMSEKYRPEDALEPFQSSKGTEAKELLSVKKNLGDGDNNEKGNVVSSANVFTDRMEIDKDFSSKE

SEQ ID NO: 133855 - protein, 175 aa, Oryza sativa
  unsure (1)..(175): unsure at all Xaa locations
  Clone ID: PAT_MRT4530_35686C.1.pep
DDDDEHRRGSVEGEARPRTTLPLRCRRRRWRRWTAHGHGGRDCRRRRXEEEGEVXRGGGGVPANPRAGRGGGRIRDVDEGDGDVGRRSGAATGATEGGTVAATPLFCRXGRVSGGFPAKRRADRGREGGCEAAGGDGATGRRSGEEGEVAGGGRRGGKRRATAGRGYTTTGRLGM

SEQ ID NO: 133856 - protein, 135 aa, Oryza sativa
  Clone ID: PAT_MRT4530_35687C.1.pep
INEASKLSSRIADLESQLNDEKEACERMASKTKKLIKAHARYVKAQDDLKRSQARFERFADLLASDTLKPCSKDQGSSAAKEDPYNAYEMSPSDQRQNHETTRKRSVALSTSEEGRNGKKRRESYDNQGSYVREI

SEQ ID NO: 133857 - protein, 41 aa, Oryza sativa
  Clone ID: PAT_MRT4530_35688C.1.pep
PCHRRHAPEDGHNLSERCETNRPRNRDVSRPPRRSALRSLA

SEQ ID NO: 133858 - protein, 66 aa, Oryza sativa
  Clone ID: PAT_MRT4530_35689C.1.pep
MLIVVMPTCCSPSLDFAAVRTQKLQLGKKKRRLDEVCLERFQQYSRTYIQSWILQGKVLWDGRVGI

SEQ ID NO: 133859 - protein, 180 aa, Oryza sativa
  unsure (1)..(180): unsure at all Xaa locations
  Clone ID: PAT_MRT4530_3568C.1.pep
MGNDDDDVSGSVTTGGGSGVHACRRTTARQRERREPTCRGRRDELTGDQNNGGRSTDGNGVEEEAAATFGLTTATVFRRRGXTRSATAWXPRRGDGGARLHGARALQTAAGKGEGGGGGWSYRHRPWGWTSARKARLSDGQHNTCASRRSRRAAPAWSSCCSNDERGNDAEPQAQARGPS

SEQ ID NO: 133860 - protein, 164 aa, Oryza sativa
  unsure (1)..(164): unsure at all Xaa locations
  Clone ID: PAT_MRT4530_35690C.1.pep
MALTWRPHGSHVGGEADGPDLPPGRSDSGGRMRPARTGLGSSRPGAIAXRRRDTGGDRRAARRQLCGGATRGKDRGKXRGCPHRRGPTGVEGDDGERRREMTERGQRAADGVRDNLRSKMGEVRGGERDHRRRGRRPKAATMAELTNXGAEWVPAPESDGGGVD

SEQ ID NO: 133861 - protein, 150 aa, Oryza sativa
  unsure (1)..(150): unsure at all Xaa locations
  Clone ID: PAT_MRT4530_35691C.1.pep
CQPHSSLHPSPSASLTPLTSTAAAPSPSTPPTSTASSPPSPPPQRTPPHXPPPRLPPPPQMRRHGGGHPVSSSSSSPMLGYMSRRPEGQHDEQWPAGKKDTARRPGRCRRRRCRLVPRSGGWPPVAIGSLEACCLVPSVRRTSLLGKTPP

SEQ ID NO: 133862 - protein, 175 aa, Oryza sativa
  Clone ID: PAT_MRT4530_35692C.1.pep
RVRLKKEYDGKIADVWSCGVTLYVMLVGPRACPHVREPKNFRKTIQRILGVQYSIPDYVHISPECRDLIARIFVANPATRISIPEIRNHPWFLKNLPADLMDDSKMSSQYEEPEQPMQSMDEIMQILAEATIPAAGSGGINQFLNDGLDLDDDMEDLDSDPDLDVESSGEIVYAM

SEQ ID NO: 133863 - protein, 220 aa, Oryza sativa
  Clone ID: PAT_MRT4530_35693C.1.pep
MTTSESVQETLGLDFPHPSKPRVLLAASGSVAAIKFESLCRSFSEWAEVRAVATKASLHFIDRTSLPSNIILYTDDDEWSTWKKIGDEVLHIELRKWADIMVIAPLSANTLAKIAGGLCDNLLTCIVRAWDYSKPLFVAPAMNTFMWNNPFTSRHLETINLLGISLVPPITKRLACGDYGNGAMAEPSVIDSTVRLACKRQPLNTNSSPVVPAGRNLPSS

SEQ ID NO: 133864 - protein, 139 aa, Oryza sativa
  unsure (1)..(139): unsure at all Xaa locations
  Clone ID: PAT_MRT4530_35694C.1.pep
PNRADTYRPGAGXVTNLTAQNFPILSLVQMSAVKVNLYQNALYXAFGNINAHSVLYITQGRARLHVVNINGXTVLNCXSWRGQVLIIPQHYASAKNAHIDXCADIAFKTNANCMRSHIARKSSIFLALPNDVVSNAYGI

SEQ ID NO: 133865 - protein, 478 aa, Oryza sativa
  unsure (1)..(478): unsure at all Xaa locations
  Clone ID: PAT_MRT4530_35695C.1.pep
PRRTAAVAADDGXCSRIGRDALRDGGNAVDAAVAASLCLGVVSPASSGVGAAPSCSSGSPTAPPSRLYEAWKRHGKLPWKRLVMPAAKLARAFRVSPYLRKQMEATRDGILQNKGISGVYTSNGDILNVGDVCRNIRLARTLVAVAEKGPDVFYKGAVGDQLAKDIQEVGGIITMEDLKKYQVKIRRPLLENVLNILTQYGLPAGFSGSLGIHRLIESLKHYFAIRMNLGDPEFVNVNEVVSDMMSPKFAADLKKTIYDNMTFDPKHYGGRWNILQDHGTSHLSIVDSERNAVSMTTTVNAYFGSLILSPSTGILLNNEMDDFSMPANTSANSPPPAPANFVRPLKRPLSSMTPTIILKDGNLKAAVGASGGSMIPAGTMEVLLNHFVKNMDPLSSVMAPRVYHQLIPNVVQYENWTTVTGDHFELDAATRADLRRKGHVLEPLAGGTISQLVVDDVERHGGLTAVSDPRKGGFPAGY

SEQ ID NO: 133866 - protein, 159 aa, Oryza sativa
  Clone ID: PAT_MRT4530_35696C.1.pep
MDIRTFRNKDGTLLRLVIISMRGSVTFGSDAINNIIKVPQASVGLKKFGLALAEKYYRTNLEKILQISTTMIKQRRLRRAVAAGRAAAEGHGGGLSGGWRPAVAGGGPSGVGCGGQWRRAERRLAAGGGGRAGGPATSGEHICSSFPKNPLPTPVAMRR

SEQ ID NO: 133867 - protein, 574 aa, Oryza sativa
  Clone ID: PAT_MRT4530_35697C.1.pep
MNARRLHKWAATARLVLLLLAAAAAAAAAAAGRREVVTSPHGAVAADDGRCSRIGRDALRDGGNAVDAAVAASLCLGVVSPASSGVGGGAFMLVRLADGTALAYDSRETAPLAASQDMYGGNETLKARGALSIAVPGEIAGLYEAWKRHGKLPWKRLVMPAAKLARAFRVSPYLRKQMEATRDGILQNKGISGVYTSNGDILNVGDVCRNIRLARTLVAVAEKGPDVFYKGAVGDQLAKDIQEVGGIITMEDLKKYQVKIRRPLLENVLGLTVLSMPPPSAGGAGLMLVLNILTQYGLPAGFSGSLGIHRLIESLKHYFAIRMNLGDPEFVNVNEVVSDMMSPKFAADLKKTIYDNMTFDPKHYGGRWNILQDHGTSHLSIVDSERNAVSMTTTVNAYFGSLILSPSTGILLNNEMDDFSMPANTSANSPPPAPANFVRPLKRPLSSMTPTIILKDGNLKAAVGASGGSMIPAGTMEVLLNHFVKNMDPLSSVMAPRVYHQLIPNVVQYENWTTVTGDHFELDAATRADLRRKGHVLEPLAGGTISQLVVDDVERHGGLTAVSDPRKGGFPAGY

SEQ ID NO: 133868 - protein, 67 aa, Oryza sativa
  Clone ID: PAT_MRT4530_35698C.1.pep
PPPPPTRRLAGDAPINPSPPPSRAPCKARRRARRDSCSPLDGLEIREEQASHLDSLRQRWLSLNLII

SEQ ID NO: 133869 - protein, 617 aa, Oryza sativa
  Clone ID: PAT_MRT4530_35699C.1.pep
MAPARAFVLVLLAVASASTAAANTATTTPTNPVAAPTQWQKAHATFYGGADASGTMGGACGYGNLYSQGYGTRNAALSTALFNDGASCGQCYKIACDRKRAPQWCKPGVTVTITATNFCPPNWNLPSDNGGWCNPPRPHFDMAQPAWEKIGVYSAGIIPVIYQRVPCVKKGGLRFTINGHDYFQLVLVTNVAAAGSIKSMEVMGSNTADWMPMARNWGAQWHSLAYLTGQGLSFRVTNTDDQTLVFTNVVPPGWKFGQTFASKLQFKFDRLQAFEPLRRVRSEAGVTEYFDEKNEQFQCTGTFVIRRVIEPQGLLVPRYSNTPGMVYIIQGRGSMGLTFPGCPATYQQQFQQFLPEGQSQSQKFRDEHQKIHQFRQGDIVALPAGVAHWFYNEGDAPVVALYVFDLNNNANQLEPRQKEQAQQQEQAQAQYQVQYSEEQQPSTRCNGLDENFCTIKARLNIENPSHADTYNPRAGRITRLNSQKFPILNLVQLSATRVNLYQVVSNLGKTVFNGVLRPGQLLIIPQHYVVLKKAEHEGCQYISFKTNANSMVSHLAGKNSIFRAMPVDVIANAYRISREQARSLKNNRGEELGAFTPRYQQQTYLGFSNESENEASE

SEQ ID NO: 133870 - protein, 883 aa, Oryza sativa
  Clone ID: PAT_MRT4530_3569C.1.pep
MEFKAMERMEFKVMVLRSCKGEILIRIVMRHKILADCSVNANVGTTEMLDLGANNHGTEKRIRFENKFFYGHGPFRFKNTIAGLLACGTGTCTTRPQAPGRKIRVSLHESGTTTTGTATHRTRFTQPFALLCSPSISRGRDDCLALSALSSLPLPPLPLGPARVNFSALPHSSAPLRSPLTPPPPADMSSRGGEDDDHASLLRSHPAAGAGAGSGSSSPCPSPRAVGGHHHNQHADVEAVGEATVTASPRRSGGVRGLLRHLDRRLSARGSGGRRSQQPPQQLDRPEPSPTSSPQQRERVGEELGDGAPPEWALLLIGCLLGLATGICVAAFNRGVHVIHEWAWAGTPNEGAAWLRLQRLADTWHRILLIPVTGGVVVGMMHGLLEIFDQLKLVKPPQKQGINFLAAIFPTVNAVQAAVTLGTGCSLGPEGPSVDIGKSCANGCSEMMENNRERRIALVAAGAAAGIASGFNAAVAGCFFAIETVLRPLKAENSPPFTTAMIILASVISSTVSNVLLGERPAFIVPAYELKSAAVYPALGGLGAGLIALKYPGILYWGFTNVEEILHTGKSASAPGIWLLTQLAAAKVVATALCKGSGLVGGLYAPSLMIGAAVGAVFGGSAGYLINSAVPGNAAVAQPQAYALVGMAATLASVCSVPLTSVLLLFELTKDYRILLPLMGAVGVNDLELTSLRTDNYDTYNEEMLLDDLKVSQAMSKSYVKIPTSAMVTEALKLLHDKQQNCGLVVDCEDFLEGIVTLGDIRRMGFELHGDSFTSGDQLKPAENSSTISLCLTRGFQYEGNERGLLTCFPDTDLTTAKNLMEARGIKQLPVVKRGVGHRTEGKRKLIALLHYDSIGHCLREEIENWKAIYQIKEDFHLIANGH

SEQ ID NO: 133871 - protein, 611 aa, Oryza sativa
  unsure (1)..(611): unsure at all Xaa locations
  Clone ID: PAT_MRT4530_356C.1.pep
NAWAKLAVGSIVGAGGTWWLLQSWLNLVVMKFVNRPSVTQAEFPRLEPIEDSDGEERTHRRCTSFGEYASTPTDAGAKLSAEMLKDWFCSFYEGFQKEARVWFLYEDSTLLEHPLDFRFEDINHDRYXKPREIFSTAISPCILTVSIHQGRNIQVSYEFYHPMSSARQFGMGQLPIGLFFADKIQCEGXISSTLMMNRLLNLQGPPLGSIENIELARFRSRNFDRWWGEWKLHLFHQPASMYMTDLFPDVVPQTTESSPPHQSNSGKDIEYAPGLIPNGGGPSPPFIGYDAPKIAALLXGLIREPSDAGKKRKTRSSAVDTSGPALKKKTKSKKTKPTDDLPALDPSIEQALDEEEIEEDVDQAAAEVSDTERTPSASPKQTPPTPSAPAHFSRLESGNLIPSAADSHNVEEEEQPATPTIPILADLFSFDIKDYLDETEEDTTSKAIAPLSDDVKRTLEYISHRLEASLDNLVTNCGSIRVRFTDIQALLPDELADALIPAVYLEQHQFKLEKARQRLADRRERKDIEATIHHNQQLVHVEKSKLDQLSEGPIKSNIDRLEARKIDLMAQLQECNAELDMEHKKLADLPKSIEDXKKARLKSAIKNVADL

SEQ ID NO: 133872 - protein, 216 aa, Oryza sativa
  unsure (1)..(216): unsure at all Xaa locations
  Clone ID: PAT_MRT4530_35700C.1.pep
MATIAFSRLSIYFCVLLLCHGSMAQLFGPNVNPWHNPRQGGFRECRFDRLQAFEPXQFQQFLPEGQSQSQKFRDEHQKIHQFRQGDIVALPAGVAHWFYNEGDAPVVALYVFDLNNNANQLEPRQKEFLLAGNNNREQQMYGRSIEQHSGQNIFSGFNNELLSEALGVNALVAKRLQGQNDQRGEIIRVKNXPXLLRPAFAHTQEQAQQQEQAQAQ

SEQ ID NO: 133873 - protein, 137 aa, Oryza sativa
  Clone ID: PAT_MRT4530_35701C.1.pep
MSVEILDGKTIRSFVEDEGAFNSSVDGRFAALDTNRDGLLSYSEMAKELMSLRVLEKHFGVDEAAMSSDELVEMYRGLYARFDHDGNGTVDLEEFRAEMKEVMLAVANGLGFLPVQMVVEEGSFLKVAVDRELAKAA

SEQ ID NO: 133874 - protein, 73 aa, Oryza sativa
  unsure (1)..(73): unsure at all Xaa locations
  Clone ID: PAT_MRT4530_35702C.1.pep
NGLDENFCTIKARLNIENPTNADTYNPRAGKDHTSHTVRSSPFLTLVQFXVPTRVNLYXNAILSPFWNGLMPP

SEQ ID NO: 133875 - protein, 135 aa, Oryza sativa
  unsure (1)..(135): unsure at all Xaa locations
  Clone ID: PAT_MRT4530_35703C.1.pep
WSGWETDWADLRNWCMAEVPEGNVGIARPLALFVGDWTLEALVMSDHLLVQSGWWLALVPFKHGRGSDANRCKHCGVLEHPHVNVVRIHNVAYXFCSGRNEKMGDAPFVAQNSXWGSFYLVPWGNXTPFXTVFYL

SEQ ID NO: 133876 - protein, 731 aa, Oryza sativa
  Clone ID: PAT_MRT4530_35704C.1.pep
MAPARAFVLVLLAVASASTAAANTATTTPTNPVAAPTQWQKAHATFYGGADASGTMGGACGYGNLYSQGYGTRNAALSTALFNDGASCGQCYKIACDRKRAPQWCKPGVTVTITATNFCPPNWNLPSDNGGWCNPPRPHFDMAQPAWEKIGVYSAGIIPVIYQRYQYKYSNYFGHYGENSAYPDRCFHMKISYSCDDFYRVPCVKKGGLRFTINGHDYFQLVLVTNVAAAGSIKSMEVMGSNTADWMPMARNWGAQWHSLAYLTGQGLSFRVTNTDDQTLVFTNVVPPGWKFGQTFASKLQFKFDRLQAFEPLRRVRSEAGVTEYFDEKNEQFQCTGTFVIRRVIEPQGLLVPRYSNTPGMVYIIQGRGSMGLTFPGCPATYQQQFQQFLPEGQSQSQKFRDEHQKIHQFRQGDIVALPAGVAHWFYNEGDAPVVALYVFDLNNNANQLEPRQKEFLLAGNNNREQQMYGRSIEQHSGQNIFSGFNNELLSEALGVNALVAKRLQGQNDQRGEIIRVKNGLKLLRPAFAQQQEQAQQQEQAQAQYQVQYSEEQQPSTRCNGLDENFCTIKARLNIENPSHADTYNPRAGRITRLNSQKFPILNLVQLSATRVNLYQVVSNLGKTVFNGVLRPGQLLIIPQHYVVLKKAEHEGCQYISFKTNANSMVSHLAGKNSIFRAMPVDVIANAYRISREQARSLKNNRGEELGAFTPRYQQQTYPGFSNESENEASE

SEQ ID NO: 133877 - protein, 153 aa, Oryza sativa
  unsure (1)..(153): unsure at all Xaa locations
  Clone ID: PAT_MRT4530_35705C.1.pep
MALAAAPLLRLPISPPSPPPAQTPPPLLACNSVNGVRLRPQRSRQPRRAAAAAATASLAADTERRKHELLRAVQETGRGFAASPDQRASIEEAXRDCAPLGARGGVAAGPRGARWNEEAVLHLGVGRARAVRGRREAPPPAGGANIPEIRMQG

SEQ ID NO: 133878 - protein, 500 aa, Oryza sativa
  Clone ID: PAT_MRT4530_35706C.1.pep
MATIAFSRLSIYFCVLLLCHGSMAQLFGPNVNPWHNPRQGGFRECRFDRLQAFEPLRRVRSEAGVTEYFDEKNEQFQCTGTFVIRRVIEPQGLLVPRYSNTPGMVYIIQGRGSMGLTFPGCPATYQQQFQQFLPEGQSQSQKFRDEHQKIHQFRQGDIVALPAGVAHWFYNEGDAPVVALYVFDLNNNANQLEPRQKEFLLAGNNNREQQMYGRSIEQHSGQNIFSGFNNELLSEALGVNALVAKRLQGQNDQRGEIIRVKNGLKLLRPAFAQQQEQAQQQEQAQAQYQVQYSEEQQPSTRCNGLDENFCTIKARLNIENPSHADTYNPRAGRITRLNSQKFPILNLVQLSATRVNLYQNAILSPFWNVNAHSLVYIVQGHARVQVVSNLGKTVFNGVLRPGQLLIIPQHYVVLKKAEHEGCQYISFKTNANSMVSHLAGKNSIFRAMPVDVIANAYRISREQARSLKNNRGEELGAFTPRYQQQTYLGFSNESENEASE

SEQ ID NO: 133879 - protein, 126 aa, Oryza sativa
  Clone ID: PAT_MRT4530_35707C.1.pep
SVAVAVGAAAGAGRRHGAPRQHGEQKRRVLVDDAGRVVALPVDARRVPAGRPERPRRGRRLRSGDQEDHHERHEPHGDGTAPAAAAPGCHSFADDPLSLAREGRCGAYEAASELRHEEEEEFEPSS

SEQ ID NO: 133880 - protein, 104 aa, Oryza sativa
  unsure (1)..(104): unsure at all Xaa locations
  Clone ID: PAT_MRT4530_35708C.1.pep
MQPSFAVLFCCRKIRICFVXLETFRKIRCMKTAWSPDQIRTTYPVRHGVRISYARLIRFGYAERRSCGRLDQATYLYVNRAAGFTQHTRNQSRVCLLLYAARRS

SEQ ID NO: 133881 - protein, 593 aa, Oryza sativa
  Clone ID: PAT_MRT4530_35709C.1.pep
MADATAALSARSKVQAFLEAAMAGDPASLKKLAAALDEEGKGVAAVAAAVKDANKRTALHFAAREGRTHVCHFLISDLALPVDPKDDDGNLDLMKLFLSKGVDVESESDAGTPLIWAAGHGQQEAVKLLLQHDAKASLCLALNHLSISRSCGLSLTFLLKLVIAWQPNTENDDGITPLLSAVAAGSLPCLDILIQAGAHPNIRAGGATPLHIAADGGNMEIINCLLKAGSDPNACDDDGLKPIQVAALRNNREVVELLLPLTSPIPGVSSWSIDGIIEYTKSVEEKAQVKEATTQKADRLQVPQLVEVSSEAKERSLEAKSRGDDAFRNKDYLVAVDAYTQAIELNPNDATLHSNRSLCWLRAGQAERALEDARACRALRPDWAKACYREGAALRLLQRFEEAANAFYEGVQLEPENGELISTKLIDQLARDDEKIKKKTRKPKPKKTVKQHQQEPQDNSRELPASEPKAPPGWPLQPPMYLPVTPAPPPPPPAFSELEAIRAVLEESEKVQEKLDKQHAGMRDELIKKSKDLRDKEFKLPYQNPTPCTEERSNCRQCYVSNAQDPLKCAEAVKRFEACVRLARQRGNTKVAQ

SEQ ID NO: 133882 - protein, 213 aa, Oryza sativa
  Clone ID: PAT_MRT4530_3570C.1.pep
MDSPVTPVGLSPPLLSLVPRNEPCYTKGKRGLLRQRLGFAVNRVHGGGSRKRTAEIDSSKTDGQDPSVHDRATGNDDDDVSGTTGGGSGAQGCRRTTARRRERRTPTRRGRRGELTGDQSNGGRSTDGDSVEEEAAATFGLTTATVFQRPTVTTEGQTRSATAWRSRRWLSRAATTTGATATHGWSCGGDGGAKLHGARALRAATDEDEGGDG

SEQ ID NO: 133883 - protein, 60 aa, Oryza sativa
  Clone ID: PAT_MRT4530_35710C.1.pep
PSFFIARCSSFHAVEAALLSNRQLFSVSIVVQVFHVSLRCRYEIFRPLPFECRPQSCMMT

SEQ ID NO: 133884 - protein, 130 aa, Oryza sativa
  unsure (1)..(130): unsure at all Xaa locations
  Clone ID: PAT_MRT4530_35711C.1.pep
IKIIKRREGWNALGVSAPFPTYVVLFRSLVEKKRLYYALWICKNFFSIKAPPPFXAVQGLVXGLVKGGKFSKAKDVFPQINLFFKGDSKMAWGKISGELSPEGTPCFNPWFALGMFVPGSLFIKSYVLAP

SEQ ID NO: 133885 - protein, 175 aa, Oryza sativa
  Clone ID: PAT_MRT4530_35712C.1.pep
MADAAEQHHRQEETAAATTTPQQMMMRRRRARASSEYLGVRRRPWGRYAAEIRNPYTKERHWLGTFDTAEEAAVAYDLSAISISGAAAARTNFLYPDMHHHHPSPPQHALSPAVPPPPPPPPPSPLYDDDYLSPAAAEEEVEAGDDESLTIATILQSFQYQQSVPPASSGSMFYY

SEQ ID NO: 133886 - protein, 233 aa, Oryza sativa
  Clone ID: PAT_MRT4530_35713C.1.pep
MDGDLHGCPPNVLLMGRHIPTSTSTGGRRVVGTWLCADDMSSVRPVTNRSFLSIACQLSNVQVCPSSHNILPLMVRMKPGIHLTRANVSSLRDRIKERAALRCMQRDTLDQTAINAVRSNPTPPSGKSGGGRTPHPRARRPRRADVSTGEVRRRQAGPTGQRPGRERKGRRLAGPLVSGSGGEGRGRRHPARPAQGRRPRRWRRRACEPFAGDATGGGATAQKAMRRRLPNGG

SEQ ID NO: 133887 - protein, 67 aa, Oryza sativa
  unsure (1)..(67): unsure at all Xaa locations
  Clone ID: PAT_MRT4530_35714C.1.pep
LLCFCNNPYLRFRFDPIFISDALKRNFTXLSLSGDSSDAQGDSXATPSPARSPPAMMSSSASPSAAP

SEQ ID NO: 133888 - protein, 215 aa, Oryza sativa
  Clone ID: PAT_MRT4530_35715C.1.pep
MVFYFKVRPEAGDYTIFMGLDKFENEDLIKYGFPEDIWFHVDKMSSAHVYLRLNKGQTMDDISEGVLEDCAQLVKANSIQGNKTNNIDVVYTPWYNLKKTPSMDVGQVGFHNSKLVRIVKVEKRINEIVNRLNKTKVERKPDLKAEREAVSAAEKAERKVQLRDKKRREEMERVEKEKQAEIRSYKNLMVQEKMTSNKQVASGSKTLEELEDDFM

SEQ ID NO: 133889 - protein, 129 aa, Oryza sativa
  unsure (1)..(129): unsure at all Xaa locations
  Clone ID: PAT_MRT4530_35716C.1.pep
MPGLTLGDVVPDLELDTTHGKIRLHDFVGDAYVIIFSHPADFTPVCTTELSEMAGYAGEFDKRGVKLLGFSCDDVESHKDWIKDIEAYKPGRRVGFPIVAXPDREAIRQLNMIDADEKDTVGGELPNRA

SEQ ID NO: 133890 - protein, 75 aa, Oryza sativa
  Clone ID: PAT_MRT4530_35717C.1.pep
MGGAGDDDRVELVVDGSHEDTRMPMSDDERGYFRLVGEITSPASMTIMETLRSCGSESMTGDGDESEVVPTTVYI

SEQ ID NO: 133891 - protein, 677 aa, Oryza sativa
  unsure (1)..(677): unsure at all Xaa locations
  Clone ID: PAT_MRT4530_35718C.1.pep
VDSRGSPEKTRKYGLKMNPTKCAFGVSAGQFLGFLIYERGIEVIQRSIKAIKKIQPPDDKKKLQELIGKINFIRRFISNLSGRLEPFTPLLRLRADRQFTWGVEQQKALDNIKEYLSSPPVLIPPQKRISFRLYLSAEFDLRYDSPKAIKGQAIADFIVDHRHGSIGSVYIVPWTLFFDGSVCTHGCGIGLVIIPPREASFVFSYTIKPYATNNQAEYEAVLKGLQLLKEVEADAIEIMGDFLLVISQLAGEYKCKNDTLVIYNEKCRKLMDGFRLVTLKHVSREQNVEANDLAQGALGYKPMMKDVKNPSQSASRKLCYKALKYTLLDDELYYRTIDGVLLKCLSVDQAKVAIGEGCEDCQKFGAIRRAPASVMNPIIKPWPFRGWGIDMIGMINPPSSKGHKFILVATDYFSKWVESIPLKKVDWGDAIQFVQEHIIYRFGIPQTITTDQGSIFVSDEFVQFADSMGIKLLNSSSYYAQVNGQAKASNKSLIKLIKRKISDYPRQWHTRLAEALWSYRMTCHGSIQVPPYKLVYGHEAVLPWEIRISSRRTDLQNELTASEYYNLMPDEREDVVQSRLRALAKVTKDKERVARHYNKKVVPKSFSEGELVWKLILPVGTRDNKFGKWSPNWKXPFQIHKVVSKGAYMLQGLDGEVYGXALNGKYXKKYYPSVWVN

SEQ ID NO: 133892 - protein, 64 aa, Oryza sativa
  unsure (1)..(64): unsure at all Xaa locations
  Clone ID: PAT_MRT4530_35719C.1.pep
FFFFFFSEQXDSFLFFSFIXIHANVTIIYTTFTEGFFCWWHWRDDLFDGNEVANGTVDKSPTQE

SEQ ID NO: 133893 - protein, 148 aa, Oryza sativa
  Clone ID: PAT_MRT4530_3571C.1.pep
MTSSPATARPRVLAGKRRHGGANGGHLRIADGTANSPVTKTTAEDQRMTTATRKSGGDDRVNGGDDAPAADSDGERADEDGDATATTAVTSPSDDDDWSDCGARLERRRRWRREAARRLELYRLRETKARVAAGIELRKIRENFREYN

SEQ ID NO: 133894 - protein, 70 aa, Oryza sativa
  Clone ID: PAT_MRT4530_35720C.1.pep
YRWYHNVNCVHLSTCKRHPLHVHLSVKVWTETNYCSIQRSSLSLCVRRYMNMYVQQACSPLFAMLFLLHL

SEQ ID NO: 133895 - protein, 57 aa, Oryza sativa
  Clone ID: PAT_MRT4530_35721C.1.pep
MAFAWVGRVARPSARASVRLAPGGDGGGSGLRLVSDSRMRWVGSRVGLGATLTVERG

SEQ ID NO: 133896 - protein, 794 aa, Oryza sativa
  unsure (1)..(794): unsure at all Xaa locations
  Clone ID: PAT_MRT4530_35722C.1.pep
MEMILCRLSLMQKNMSEVIPEMNFEAQVDSVQPWSLDLFNLQESIEQQSSIQSSDKGESTIEMIXDLNEEFLTEEDIEQFLDEEQQEASKGNNASIDRKYIPELNQKFKSIDEAQNYFNFYAYMAGFSIVNAHSARTVSXKKRNGEVIRVTFKCNKYVKSDCNKKEETVTSERKTNEVIGTECKCVLYMSTEEKILIRTLKECHIPTRNKIVILSVLRGGLTSLPYTKKDISNVRTAINRETSSNDLMQCLXFLKKKQEEDPNFFYEFDLNENRKVKNFFWTDGRSREWYYKFGDCISFDTTFLTNRYNLPFAPFVGVSGHGNTILFGCAFIHDETTKTFEWLFRAFLKAMNGKQPKTIITDQDGAMRAIKNIFTEAKHRNCFFHIVSKALKRSGSLFKKRQGLYDIYNDIIHNSLTEEEFEFLWEDMIQVFNLQDINFLRNMWEIRKRFIPVYFKTNFCPFIQSTALSEGTNSRFKKNVGPQYSIRSFLTEYERVMDTIQNLEQHDDHESRTKRPSRMWSHYCIEYQAVRLYNNKIFKKFQFQLSKTNELEIEEIERMKCYAVFQSKNVINKEIRHRKYLVILDLDSEEFTCICCMFQKDGILCSHVLKIILHLKISRILEKYIIQRWRKKQMTADNIKRKSIIPVSESSVLRFNILSRKFCEITSRGAKTIPAYEFLMEEADKINEKLNDLIDNDNEVGVDEVNNDQDANMNDNSENNVVQDERLPEEDFIEDPDIANSKGRPRQRYKTIREQIAEQESYHCSHCGRTDHTFPTCPFKHIEFDLPRKKKRKV

SEQ ID NO: 133897 - protein, 103 aa, Oryza sativa
  Clone ID: PAT_MRT4530_35723C.1.pep
KYDGELQRYLEISTQTSAQFYAFRGITLLLTQEFNFADTIHIWDTLLSDPDGPQETLLRICCAMLILVRKRLLAGDFTSNLKLLQNYPPTNISHLLYVANKLH

SEQ ID NO: 133898 - protein, 758 aa, Oryza sativa
  Clone ID: PAT_MRT4530_35724C.1.pep
MKSSSVLIKCTDNMFFVLIAKCLIIKCTEIYLCFVFTGLTDENLKGFVGETAKKQQLIDLDLNKKISQSGLQLIEQNYNRTRSFIIDAKKSSTRSSTAQSGILKDLRERDKNIEKKTISKDEGLGLLEQNYNTMRSYMLEDGKGDTKTGNTQRDSEIDKGKRIAVIENVKTMENERIQFEEDMLGEQDMNYAEEIHQTNVLSLLDQDFIDDKFTSYTSLMEHIISSQPTRCNDLENSILSLMQKNMSEVIPEINFEAQVDSVQPWSLDLFNLQESIEQQSSIQSSDKGESTTEVDPDLNEEFLTEEDIEQFLDEEQQEASKGNNASIDRKYIPELNQKFKSIDEAQNYFNFYAYMAGFSIVNAHSARTLSKKRNGEVIRETFKYNKYVKSDCNKKEETITSERKTNEVIGTECKCVLVISERNSIWVISRIDLDHNHELSPPDEARFLRSHKYMSTEEKILIRTLKECHIPTRNMIVILSVLRGGLTSLPYTKKDISNVRTSINRETSSNDLMQCLNFLKKKQEEDPNFFYEFDLDENRKVKNFFWTDGRSREWYYKFGDCISFDTTFLTNRYNLPFAPFVRVSGHGNTILFGCAFIHDETTETFEWLFRAFLKAMNGKQPKTIITDQDGAIRAAIKNIFTEAKHRNCFFHIVSKALKRSGSLFKKRQGLYDIYNDIIHNSLTEEEFEFLWEDMIQVFNLQDINFLRNMWEIRKRFIPVYFKTNFYPFIQSTALSEGTHLVLLAITQIKNCNYRDKKL

SEQ ID NO: 133899 - protein, 73 aa, Oryza sativa
  Clone ID: PAT_MRT4530_35725C.1.pep
HWSTVRGERRVVGGLGPRWARAVESGGSGLRRGMSWAGAAMRGLDGRRSRIQPGRIHRRQVMATVGWDRERRA

SEQ ID NO: 133900 - protein, 120 aa, Oryza sativa
  unsure (1)..(120): unsure at all Xaa locations
  Clone ID: PAT_MRT4530_35726C.1.pep
MILFVAPMSLAPWSNMTAPMTLAPSPSRPSPCSATAPRASTPCLPTPPPREQRRTRAQGVHPXPAATARRATGRPPMRRRRLGASPRCPGVPRPAPPPSTPRTATPPGAPHEGNSSPATP

SEQ ID NO: 133901 - protein, 45 aa, Oryza sativa
  Clone ID: PAT_MRT4530_35727C.1.pep
FFSRFHSFTFVFSHFFRCPIVLLVCVLLQSLSSALCFPFCELTPL

SEQ ID NO: 133902 - protein, 92 aa, Oryza sativa
  unsure (1)..(92): unsure at all Xaa locations
  Clone ID: PAT_MRT4530_35728C.1.pep
VHPNRRRISRGGTLALSGVYQTTSLLGTDPCLDELVRSVCNSSGQITMXRRPIKSAPQSIWYGPDRSKYLRPVSEHTPSDLDGEVPGDYGGD

SEQ ID NO: 133903 - protein, 114 aa, Oryza sativa
  unsure (1)..(114): unsure at all Xaa locations
  Clone ID: PAT_MRT4530_35729C.1.pep
AEVGGYCQGYRSGIPSTPRYTSRINMVYPRVHGXVPLTXRKLFVKSMDEERPSRXELGYPRIMPGLVYSSPTRTAPNLRYKRDPREXIDHRISEPTQPTQPTKSEPARSQVDES

SEQ ID NO: 133904 - protein, 235 aa, Oryza sativa
  Clone ID: PAT_MRT4530_3572C.1.pep
RKRGLLRQRLGFAVNRVHGGGSRKRTAEIDSSKTDGQDPSVHDRATGNDDDDVSGGVTTGGGSGVHALRRTTTRQRERREPTRRGQRDELTGDQNNGGRSTDGDGVEEEAAATFGLTTTVMLRRPTATTEGGKEVAAKAHGDRRRDGRFRGRPDLEGDGGAARLGFRREEDDESDRNNREDKETLGEGLRAMEDHRGCPSQGISLLSEVIRVSTRVITRGDVVTTGLKNVFVQEA

SEQ ID NO: 133905 - protein, 100 aa, Oryza sativa
  Clone ID: PAT_MRT4530_35730C.1.pep
MTADQAAPVTGVSGLRSRRTGQLPSRVSLTSFSSGPTLSRLLAVPLRGSRPPRPPQRRPPSAVAHAKATANAAFSPGAKPVYRASALSSRVPSRPPPRAA

SEQ ID NO: 133906 - protein, 48 aa, Oryza sativa
  Clone ID: PAT_MRT4530_35731C.1.pep
LHIPNHISHPPVDAIPAALHTARSPPAALRPAHHASRSRYRPGPGLAA

SEQ ID NO: 133907 - protein, 348 aa, Oryza sativa
  Clone ID: PAT_MRT4530_35732C.1.pep
MGTVEGHHRFAIRGYSRLRALLAAGEYVRSAAFTVGGYDWAVVFYPRGATHADRDHAAVYVQLLTDRAAAAATFDLRFVRADSGRALSVHPPLAAPRTFSTVLRSSSAAMYGVKVEAIQALQANYVRRDRLTIDCAVRVVGKPRVSAAAPLTAADVPPPDLAAHLGRLLDLKSHADVTFDVRGVQFAAHRVVLAMRSAVFAAELFGPMRNNAGGAIKVGDMQPAVFKVLLGFIYTDTLAAMDDLDADEDDRRELARHLLVAADRYDMGRLKLICADMLARSLTAQTVASTLALADRHGCRGLREACVEFVIAMGMNDEVVISRHPDQLSCISLFKYFFYQIGSLLKIH

SEQ ID NO: 133908 - protein, 130 aa, Oryza sativa
  Clone ID: PAT_MRT4530_35733C.1.pep
ALIYLLLRGIVQKVQSLKNSRKFIFGPIELGMLYDTVQPSALSSLMGGFSKEETLFAIRQMDRNNAPGPYGFGPSFYQATWHLLSTEEAEDKSLADDLNLGPLWRSLQSLIPTVQDLSSVQVGDGFRTSF

SEQ ID NO: 133909 - protein, 663 aa, Oryza sativa
  Clone ID: PAT_MRT4530_35734C.1.pep
MGMALPIRSSQVHPVLFSSSMQCSHLNISVSLRSAMDFTSDESELSDADIDDYADKCYMDLKSGKPVVSLGNEKFRCPFCLGKKKQDYRYNELLQHAIGVGASNRAPKVKANHMALANLLKNDYADAAGSLPSRQAIGPSNPPRPLQDQEAYVWPWMGILANVPAEKTKEDGASLMQQLANFNPLQFTAVLCSEGRYTGYAVVGFSKDWIGFTNALAFHNYFKSQRLGKKDWAALGQEKYICGWMAKEEDYKSSDPVGRFLSANGDLKTVSGLENDLSRKTETLIANLSHQITAKSKYLVELECRCNQMNLSVKRAMEETDLLHKSYNEEMRNMQSAAREHSQKIFEETDQLRKQLDDKENAIERRSKQLSKFVAQTDIERRKLESEMKKNSEQNDSIHMARIEQQKSDKNVLKLVEKHKKEKEIALNKILQLEKQLDEKQKLELEIQQLRGRLLVVQHMEGEGVDVKKRTDELTEELNEKIEEMEYMEGLNQTLIIKERKTNDELQDAKKALISGLSELLGPRSTIGLKRMGELDEKPFLAACKKRYGTADGEAEIKAAEFCSEWQENLKDANWHPFKIVTRGGKTEQIINEDDEKLVGLKEQLGDEVYKAVTTALLEINEYNASGSYVVSELWNNKEDRKASMQEALQHVLEQWKLRRRRR

SEQ ID NO: 133910 - protein, 107 aa, Oryza sativa
  unsure (1)..(107): unsure at all Xaa locations
  Clone ID: PAT_MRT4530_35735C.1.pep
SGGRRRRLGDNGDERRGNDFGGDPWTKARRGRHRAXRRGAKDEDDDGAAAAHLTDTDDIRDRPCRCDAGEDGDVGRHTGTAAGAAGVGAGDVMSQNDRIIENVLEKC

SEQ ID NO: 133911 - protein, 69 aa, Oryza sativa
  Clone ID: PAT_MRT4530_35736C.1.pep
PKPHTERHTSEPRPCRARQVCPPGHLAPCAAPCATPRPCGPAARPSPGFPRVAAPPRAPASPRPITSRH

SEQ ID NO: 133912 - protein, 161 aa, Oryza sativa
  unsure (1)..(161): unsure at all Xaa locations
  Clone ID: PAT_MRT4530_35737C.1.pep
MTRDWQGGGRQKAKQAGAAGECSGERRSEQSKKGAGRITCGPCDNHGAIQCGRSHYTKAILAVQSLKRLTSSDRXLGRLLKSDLLAXMAELQRHGYWSXRAEPWYHADLAIYATFVSSSPIIEDGAAAPVDALVEAFLEENEQGGRFVEGEEDLYKLTRWW

SEQ ID NO: 133913 - protein, 446 aa, Oryza sativa
  unsure (1)..(446): unsure at all Xaa locations
  Clone ID: PAT_MRT4530_35738C.1.pep
NIWQLVRQRYKNVKPHYNKLWRGRKLVIAQLFGSWEGSYALLTPLLEAIKATNPGTRYQILSQPMTREGHRAFKCVAWAFGPCIEAVPYLRPVISIDASFLYGRYRGRLLIACGYDAENKLLPLAFAIVEKEDSDNWEWFMRWLRKEVIAIKWVFKQPHIGWNESDGECVHRFCSQHIAENLYKQCKDDDVVKTFKWVVKKKKPRRFNEDAIAYLGKVGKYRQEDKNEPEKSEKVFXAWMSLNNVFKYSRRLPVMAIVEETFNKCLEWFVDRRRSSLDLANSGKMWSRRVEKLLVKRGAKAGSMHVISYGDERGEYEVKVDRERVALHQGDRVVYVQGDFKYKLVMCNNAIPTCECQKPNLTSIPCAHVLAVCKDRNLNENXFIHPYYSSTTLANTWAGQFHPYGNQSEWPIIEPDARLIQLGRRRYNRNRRRSPAFSSRVPQPPP

SEQ ID NO: 133914 - protein, 847 aa, Oryza sativa
  Clone ID: PAT_MRT4530_35739C.1.pep
MIIVLVYTGGEIVYGATGAEYSIPPKITFPASEATTFEDVKNEIYGGLKYSETEYSLVIQGRYDVGAPSPHFFQLIPLYKTRSWQMIFDMTLALNSWRMVELYVEFTPTNSGFSQNHIVSEIIRENLEPTMATVAENIVSASHQSPKHGISPKIHDVSNSAPIVGLSSDNIINEAQENSQDDGYVDEETEREGDMIEEDESDGEAEEDVNDNTYGQPVVKLIKSLPLVGRSDKHPVSAFHDISVLQNTTADERFFGSRKHFNSPLAKGRTFDSKEHLQFAINEFHISTNQEVKVTTSNKSRLSMKCIDNTCLWKLYGKPTKIGSSWKIQTCPYPHTCRAPADRLDRAQLTSAVIADVIRDDLKENLELSIMNIRQLVRQRYKNVKPHYNKLWRGRELAIAQLFGSWEGSYALLTPLLEAIKATNPGTRYQILSQPMTREGHRAFKCVAWAFGPCIEAVPYLRPVISIDASFLSGRYRGRLLIACGYDAEHKLLPLAFAIVEKEDSDNWGWFMRWLRKEVIGFGKFVCVISDRHKAIKWVFKQPHIGWNESAGECVHRFCSQHIAENLYKQCKDDDVVKTFKWVVKKKKPRRFNEGMEAISKTCPDAIAYLGKVGKYRQEDKNEPEKSEKVFQCMDGGHRWGIMTSNGSESLKNVFKYSRRLPVMAIVEETFNKCLEWFVDRRRSSLDLANSGKMWSRRVEKLLVKRGAKAGSMHVISYGDERGEYEVKVDRERVALHQGDRVVYVRGDFKYKLVMRNNAIPTCECQKPNLTSIPCAHVLAVCKDRNLNENQFIHPYYSSTTLANTWAGQFHPYGNQSEWPTYNGPIIEPDASLVSNEKTKRAHHAIN

SEQ ID NO: 133915 - protein, 103 aa, Oryza sativa
  Clone ID: PAT_MRT4530_3573C.1.pep
EYVARGTAARGHLGFWDRCRKEAPATVSGIKRGQLVHGLDCICFFDPLHECGPSVCWQPELDQLCRRPSGGTWDWEHQTTILGTPLRLNTAGARRHRNPGRPI

SEQ ID NO: 133916 - protein, 416 aa, Oryza sativa
  Clone ID: PAT_MRT4530_35740C.1.pep
MGGKRKARAPPAADATAAALDYRLLAHILLRLPSPAALARAATVCRRWRRVASSPTFLRLFRQLHHPPPLLGFFVCNNGFAVSRSIADSELVGEVVDPTFLPRLTPRGFLGAVNRCIDFSLDSLPYDEHWALADTHDGLLLLCTKFADRMDIPDNFAICDPVSGRSVLLHVAPVTNSAYLGAALRTDDSDGGGVVCSFEFEIILVTCYNMWEPRLYVFSSRSGQWTVHAYIPMLPMLSAFSGDMHANGSVYWLIDDGGDGGAYLLALDARTKQFSIIKLLSSMRTRYDGNMRVIRSDDGELRVVAFAAAAARLEFWHLDKSRSSRGRWVRESRVELAHVDGVMELCVDADDDVARIMDAGEGFDFLKHYGSEWVFALDVQAMVLFRLPHRRYYFGPALPYRLVLKPPLPASCGLIN

SEQ ID NO: 133917 - protein, 616 aa, Oryza sativa
  unsure (1)..(616): unsure at all Xaa locations
  Clone ID: PAT_MRT4530_35741C.1.pep
PGTHQPTEFQCCSPCEVKINIAATNFPTHKLVLKEGSVVMLLRNLNQSIGLCNGTRLLLIALGETILQCTILTGSNIGETVYILRITLSTSKMKWPFALQRRQFPVRVCYAMTINNSQGQTLEQGNSIHVQIYPPAMIKLRTLLQEGKVYYFDSFSVRYANXTYRPVTNPLMISFTKWTTLEECIDASDDFPAITFSLTPFQDVPSLVDKNAFYVDIMGVITEIGATDTLRPKSRNTETLKRTMQIWDASYCNKLLILITKNLXSFYKTSNSTLPITLWGNTAAAFNAEELYNAGQKKPQVIVFVGTVVKNYKGIGLTLNGSSPCKWXINLDMPEVLELKERTSKPYGSTYKCTSCSNVGIPVPRIAQRLVRKPVETLIDQNPPDSEYIPDEIVALFNQTFIWNISFTQDTIMKNQETLQVNNIISSNAEVQGLLPISPSSSQQTLAIMPADSSSSLQLAPATSEGSTGSKIEAQTTESMLPMDSPSTPTRYTISSASDQTPTSKANAPAPSKKSYVLSVSPKPAQDKQISFSHDATTETKIKGEPPQIASSVELSSATQDKKAKALAIAAEDTPSASPSPPTKNIPPKRPAASASASAAKKLFKDDSQQKHKKSG

SEQ ID NO: 133918 - protein, 538 aa, Oryza sativa
  Clone ID: PAT_MRT4530_35742C.1.pep
MVVAVASPSSAPGPGAAGRPHPTYKEMILRALKELPDPIISSRRAIAKYISDNFSGLPSHHDALLTVHLRRLRSQGLLLMSGHSYLLSTSATAARGRGRGRPPKKASSSAPPQKRGPGRPRKNTALFPVPVLEAKPGRGRPRKNPLPVASSTSSAAAAATALSLRVKRGPGRPRKNAAATPLRLGVKRGPGRPRKNAAATPLRLGAKRGPGRPRKNATATPLSLGVKRGPGRPRKNAAAAASPVAPPPASPLKRGVGRPRKNATPLVKPGPGRPSGFKRGPGRPRKNATPPVLSVPPTAAAVLGVKRGRGRPRKDKPLQSWSVLSGGAAMTKRGPGRPRKKRPLEAGGVVAAQVDTADGGEAGAVQNGGEVRCLLSDGASSMGNRGPGSPRKEVLLENEPTVSTLVGKRGRGRPKKEKPSAARPAETGDAKSMGIKRGRGRPRKDSSFQAVFAEAAGQVSRDVTAAQPEGDADLLARKEPETAAVVSVENKETRPADAGGVVVSEEKTSIDPVEAGSVMPCVNAEVDRMNSDLRTANP

SEQ ID NO: 133919 - protein, 49 aa, Oryza sativa
  unsure (1)..(49): unsure at all Xaa locations
  Clone ID: PAT_MRT4530_35743C.1.pep
FTSMSPGPVPAELSTGVRAPSRGRAXAPRRTDSPPRRRRGPCRTTPTCS

SEQ ID NO: 133920 - protein, 58 aa, Oryza sativa
  Clone ID: PAT_MRT4530_35744C.1.pep
AIMQRDENCRQKEAVFFMDLMLFLAAVACALIPLETKGRQIHVATTEMHQLALNSIQG

SEQ ID NO: 133921 - protein, 68 aa, Oryza sativa
  Clone ID: PAT_MRT4530_35745C.1.pep
ETQIPLTRRFIALQNHMLCYRLDPRHAHPSDRGIIIYDNWLSRTCGDETKTIEPLDRIARDIQPATHA

SEQ ID NO: 133922 - protein, 62 aa, Oryza sativa
  Clone ID: PAT_MRT4530_35746C.1.pep
CPRGASSPDSTMLILTLLKTSCNNNRSCRLLIQQSQVEKFMYTMRLTLQEGTLVVVGHTHLP

SEQ ID NO: 133923 - protein, 1105 aa, Oryza sativa
  Clone ID: PAT_MRT4530_35747C.1.pep
MAAAAAAAVVGSGCEGEKTKAPAINSELWHACAGPLVSLPPAGSLVVYFPQGHSEQADPETDEVYAQMTLQPVTSYGKEALQLSELALKQARPQTEFFCKTLTASDTSTHGGFSVPRRAAEKIFPPLDFSMQPPAQELQARDLHDNVWTFRHIYRGQPKRHLLTTGWSLFVSGKRLFAGDSVIFVRDEKQQLLLGIRRANRQPTNISSSVLSSDSMHIGILAAAAHAAANNSPFTIFYNPRASPTEFVIPFAKYQKAVYGNQISLGMRFRMMFETEELGTRRYMGTITGISDLDPVRWKNSQWRNLQVGWDESAAGERRNRVSIWEIEPVAAPFFICPPPFFGAKRPRQLDDESSEMENLLKRAMPWLGEEICIKDPQTQNTIMPGLSLVQWMNMNMQQSSSFANTAMQSEYLRSLSNPNMQNLGAADLSRQLCLQNQLLQQNNIQFNTPKLSQQMQPVNELAKAGIPLNQLGVSTKPQEQIHDASNLQRQQPSMNHMLPLSQAQTNLGQAQVLVQNQMQQQHASSTQGQQPATSQPLLLPQQQQQQQQQQQQQQQQQQQQKLLQQQQQQLLLQQQQQLSKMPAQLSSLANQQFQLTDQQLQLQLLQKLQQQQQSLLSQPAVTLAQLPLIQEQQKLLLDMQQQLSNSQTLSQQQMMPQQSTKVPSQNTPLPLPVQQEPQQKLLQKQAMLADTSEAAVPPTTSVNVISTTGSPLMTTGATHSVLTEEIPSCSTSPSTANGNHLLQPILGRNKHCSMINTEKVPQSAAPMSVPSSLEAVTATPRMMKDSPKLNHNVKQSVVASKLANAGTGSQNYVNNPPPTDYLETASSATSVWLSQNDGLLHQNFPMSNFNQPQMFKDAPPDAEIHAANTSNNALFGINGDGPLGFPIGLGTDDFLSNGIDAAKYENHISTEIDNSYRIPKDAQQEISSSMVSQSFGASDMAFNSIDSTINDGGFLNRSSWPPAAPLKRMRTFTKVYKRGAVGRSIDMSQFSGYDELKHALARMFSIEGQLEERQRIGWKLVYKDHEDDILLLGDDPWEEFVGCVKCIRILSPQEVQQMSLEGCDLGNNIPPNQACSSSDGGNAWRARCDQNSGNPSNGSYEQFE

SEQ ID NO: 133924 - protein, 64 aa, Oryza sativa
  unsure (1)..(64): unsure at all Xaa locations
  Clone ID: PAT_MRT4530_35748C.1.pep
TAPRRTPASTPSPSSTAGTTFPSRGRAXPGLRSVSPFHHRNHPSTVHPEPPPPYAASSRVPPSP

SEQ ID NO: 133925 - protein, 41 aa, Oryza sativa
  unsure (1)..(41): unsure at all Xaa locations
  Clone ID: PAT_MRT4530_35749C.1.pep
XXXXXXXXWAIWLHIIYIQICIKELQQKLTDAAKGLWIHRI

SEQ ID NO: 133926 - protein, 397 aa, Oryza sativa
  unsure (1)..(397): unsure at all Xaa locations
  Clone ID: PAT_MRT4530_3574C.1.pep
MRQIRQHNVFPVDAHTGKAGVGSRSGERRWHQAVVEEKDEWVTASRSWAGRVRRSTARRRLGVVGKAAAAVAGLLAEAAQSHDGEGSGACASWEEKEGRRLSWRLGFAVNRVHGGGSRKRTAEIDSSKTDGQDPSVHDRATGNDDDEVSGDVTTGGRSGVHARRRTTARQRERREPTRRGQRGELTGDQNNGGRSTDGDGDXRKSGGDDRVNGGNDALAADSDGERADEDGDATVTTAVTSXRATTTSGATAAHGWSGGDDGGARRHGARALPATRDXRRGWRRGAAAKAHGDRRREXRFRVRRREIDPNRTQIRRFPKRFRRCFQKGKGRVDHRDPFPSINFTGNGKGRWDLPVSGGRTRARGRLGLGRLGLRERESGLGRLLAQNQKGLLKTFFP

SEQ ID NO: 133927 - protein, 1123 aa, Oryza sativa
  Clone ID: PAT_MRT4530_35750C.1.pep
GEKTKAPAINSELWHACAGPLVSLPPAGSLVVYFPQGHSEQVAASMQKDVDAHVPSYPNLPSKLICLLHNVTLHADPETDEVYAQMTLQPVTSYGKEALQLSELALKQARPQTEFFCKTLTASDTSTHGGFSVPRRAAEKIFPPLDFSMQPPAQELQARDLHDNVWTFRHIYRGQPKRHLLTTGWSLFVSGKRLFAGDSVIFVRDEKQQLLLGIRRANRQPTNISSSVLSSDSMHIGILAAAAHAAANNSPFTIFYNPRASPTEFVIPFAKYQKAVYGNQISLGMRFRMMFETEELGTRRYMGTITGISDLDPVRWKNSQWRNLQVGWDESAAGERRNRVSIWEIEPVAAPFFICPPPFFGAKRPRQLDDESSEMENLLKRAMPWLGEEICIKDPQTQNTIMPGLSLVQWMNMNMQQSSSFANTAMQSEYLRSLSNPNMQNLGAADLSRQLCLQNQLLQQNNIQFNTPKLSQQMQPVNELAKAGIPLNQLGVSTKPQEQIHDASNLQRQQPSMNHMLPLSQAQTNLGQAQVLVQNQMQQQHASSTQGQQPATSQPLLLPQQQQQQQQQQQQQQQQQQQQKLLQQQQQQLLLQQQQQLSKMPAQLSSLANQQFQLTDQQLQLQLLQKLQQQQQSLLSQPAVTLAQLPLIQEQQKLLLDMQQQLSNSQTLSQQQMMPQQSTKVPSQNTPLPLPVQQEPQQKLLQKQAMLADTSEAAVPPTTSVNVISTTGSPLMTTGATHSVLTEEIPSCSTSPSTANGNHLLQPILGRNKHCSMINTEKVPQSAAPMSVPSSLEAVTATPRMMKDSPKLNHNVKQSVVASKLANAGTGSQNYVNNPPPTDYLETASSATSVWLSQNDGLLHQNFPMSNFNQPQMFKDAPPDAEIHAANTSNNALFGINGDGPLGFPIGLGTDDFLSNGIDAAKYENHISTEIDNSYRIPKDAQQEISSSMVSQSFGASDMAFNSIDSTINDGGFLNRSSWPPAAPLKRMRTFTKVYKRGAVGRSIDMSQFSGYDELKHALARMFSIEGQLEERQRIGWKLVYKDHEDDILLLGDDPWEEFVGCVKCIRILSPQEVQQMSLEGCDLGNNIPPNQACSSSDGGNAWRARCDQNSGNPSNGSYEQFE

SEQ ID NO: 133928 - protein, 665 aa, Oryza sativa
  Clone ID: PAT_MRT4530_35751C.1.pep
MGVATVTELRQSFSGKRALRPTLTSRHANEWPPTDVSSDLTVEVGTSSFALHKLLAQFPLVSRSGKIRRAVAEAKDGKLARLGLHGTPGGAAAFELAAKFCYGVGVDVTVGNVAMLRCAAHYLQMTEDFSDKNLELRAEAFLRDAVLPSIAGSVAVLRSCEALLPAAEDVNLVPRLIAAIANNVCKEQLTSGLSKLDQLKPPPPPQAVVVAAAAAGDLDSPGDWWGKSVAGLGLDFFQRLLSAVKSKGLKQETVTRILINYAQNSLHGLMARDIAAAAKCGGGGGDTDAVKKQRAVVETIVGLLPAQSKKSPVPMAFLSGLLKTAMAASASSICRADLEKRIGMQLDQAILEDILVAAGPVSAAAAAAAVEHTLYDTDVVARIFAVFLNLDDDSNDEDAVVVGGGCGAFDYDSPRSPKQSLLVKASKLLDSYLAEIALDSNLLPSKFISLAELLPDHARLVTDGLYRAVHPNIKEAERYRMCKAIDCQRLTPDACSHAAQNERLPVQMAVQVLYFEQLRLRSAIQATGTTTTTTNTSIGGAHDAALFFGCAAAAAAPRSGSGVGSGAMSPRDSYASVRRENRELKLEVARMRMRLTDLEKDQVSMRRELVRVGPANRLLRGLARRLGSLFHFRGAAAEPGLQQLGAKATADAKVLFQRRRRHSIS

SEQ ID NO: 133929 - protein, 142 aa, Oryza sativa
  Clone ID: PAT_MRT4530_35752C.1.pep
GTLMRPPIYTVVCGITSFDIYTSRLPPTVRLAHDARVTPEQQIGRGLGTRKFTCGRVPALIRRAEAIAPPWIGMLCLPRFNSLSFPPPRANSRMDRVRQQMRAVYMGPVVASPHARTLPTPSQQHGPYSNSHPGWNFTKKSI

SEQ ID NO: 133930 - protein, 207 aa, Oryza sativa
  unsure (1)..(207): unsure at all Xaa locations
  Clone ID: PAT_MRT4530_35753C.1.pep
MVIARSVLWGPGSGSRHHGFVFFRLLCPSAGFLLCRMSSLRVCGFMWGVCSPRVVGFYDIVLWCILMPLFALTPFWGGVFPPYGNVSSGPQTFTLLRAPFARLRSGARCLRPARRSRSLRVRVYVVGARRRWSTAQPVKRGYAGAVATGASPVCQQLQVVLQPPAAQPTPTGTGGTDXWAPHAQVIYLSNRATIIIIRSLSSLFLWN

SEQ ID NO: 133931 - protein, 92 aa, Oryza sativa
  Clone ID: PAT_MRT4530_35754C.1.pep
MPSHRDAGDPSLRSLRRRFPPGDSLRHLAREAFHATAPPSALAPSHAVVHLDICSGSGRCRRRSQSTATTLLPDAEGVEGEVRGGILLCTKI

SEQ ID NO: 133932 - protein, 318 aa, Oryza sativa
  unsure (1)..(318): unsure at all Xaa locations
  Clone ID: PAT_MRT4530_35755C.1.pep
PSPSGRRLSPSTLFKPSPSSSPPFPPLAALFPPRKRARTALLSLRHRCRAPVRRHRRPGPPPTSAPPTSASPRHRRHRPPPRRARRPPERCRPRRPXPHRHLSPLRPPPTSPXIARGEPWTAASFPPFPFPLSRRGPPSTTSXSDHRGTGAASRRPRRRGRLRARRVAAWGSAVSHTXPRVRLTRGAHGADRXSPSAPSPPWTHLGHXIRTGLRASVAKHYRXFHMSSGTNEGYTSCGPIVEMSRHRAGVLLLGAQPWLPVXGIPAIARVGSMYTSDQSIIYSNSRALGYGQAXQCTQVSGLFFKTCLTTTGMPLAIL

SEQ ID NO: 133933 - protein, 50 aa, Oryza sativa
  Clone ID: PAT_MRT4530_35756C.1.pep
LKGRVFWWPSGFYLFLSISGPEGKYLTGWKLGYATDHAQGNAGVINSLVP

SEQ ID NO: 133934 - protein, 249 aa, Oryza sativa
  unsure (1)..(249): unsure at all Xaa locations
  Clone ID: PAT_MRT4530_35757C.1.pep
VPQSTLDTISISSNFVPFYIAVKRERHRAHXALERTPTTAMGFSSSFRLNRTTPSRTLAPPGSPRRPLQDASRTTRIGESRREIXRHLLQLRLPAPSLNSPIPIYRTKLSLXSRHHPPPPSRSASHRRRSSXPILSDCLVSTQGPVRLTCMHPSSPTQALAPHAPSSRHPPPLPPPSPSIPATXKAVQTLQSLKTNRLAVLAVMSSMWICVEYRLVFILLNAECYLQIMMRFENDLLAAMDGNEVYIYT

SEQ ID NO: 133935 - protein, 72 aa, Oryza sativa
  unsure (1)..(72): unsure at all Xaa locations
  Clone ID: PAT_MRT4530_35758C.1.pep
SRRPPAPXXTXPAASRTRXARGXPPRAPPPPRVSSPSTRTRTXPVAXRXRDGRQVARLQRQLXQRHCRVELH

SEQ ID NO: 133936 - protein, 181 aa, Oryza sativa
  Clone ID: PAT_MRT4530_35759C.1.pep
VVIRDGWISPTDFSLTYARLLDDVSRLDENAIDDANKLAEKVSEQSAAGQFAASLQTFTGLIDLIDKSSGGVNIFNFLFNTSGVDLRVLAAEDKQKEVRGSPLMRFVGQDLSGSSGPNTIEGIMNGVIKEKLKIIPNNLVWQLATVAVFNALENEFMKPAINEVDELLSLGVNVTVYNGQD

SEQ ID NO: 133937 - protein, 88 aa, Oryza sativa
  unsure (1)..(88): unsure at all Xaa locations
  Clone ID: PAT_MRT4530_3575C.1.pep
KAVSKDFEGESEDISARATSVAYGVYMAVSSNLRYQILAGVIEQRMLXEPLLHHHKLVLSALCFAVRTGNTFLGSLLWVDYAKWIGIQ

SEQ ID NO: 133938 - protein, 130 aa, Oryza sativa
  Clone ID: PAT_MRT4530_35760C.1.pep
KSARRGDLLLVSSVEPLPAASVAAAQPFRTRASSETTMLVTGATGSRGGLGGRNGPDELVADLGPTCVVFFDVTEAGTLLIDLFSRGPIHAAVCYSAASPTAAVASRTRGAWKVGEGRKKTKNEEDGWKK

SEQ ID NO: 133939 - protein, 55 aa, Oryza sativa
  Clone ID: PAT_MRT4530_35761C.1.pep
ITHGFNLGLISTPTNHTYVGGFNGGQIKGGDSPAERVWFLCDLTCRTCRECRSSF

SEQ ID NO: 133940 - protein, 61 aa, Oryza sativa
  Clone ID: PAT_MRT4530_35762C.1.pep
MCGETIISGVIPPSAVVAAEAAVANKQQGMRVTADGLWPTMLRKGKAADDEEDFEADLREI

SEQ ID NO: 133941 - protein, 94 aa, Oryza sativa
  Clone ID: PAT_MRT4530_35763C.1.pep
SIDVVVVVDAGVASVYLANVVPVTAWAIAFSAVASVAVAAASAVEAAAHAPPPFWIRENLAARIPTVTFTPTHPIEPERAAVQVAIVAHGGARH

SEQ ID NO: 133942 - protein, 482 aa, Oryza sativa
  Clone ID: PAT_MRT4530_35764C.1.pep
MAASTSAAAAGDEPCRCHVVAVPFPGRGHVNAMMNLSRLLAARGAATVTFVVTEEWLGLLSSSSAPPGVRLRAIPNVIPSENGRAADHAGFLDAVGARMEAPFERLLDRLRLEEEEETAAPVAAFVADFYVPWVVDVGNRRGVPVCSLFPMAAVFFSAYYHFDSLPSWLAKPPHQPVAGATTDNPDQRLEHYISSLASSSIMLSDLKPLIHSERTVEYILACISSIRKAQCLLFTTIYELEASVIDSLESLVTCPVYPIGPCIPYMTLENEHTKSNGEAPGRIDYFAWLDCQPENSVLYVSLGSFVSVSSSQLDEIALGLATSEVRFLWILREQSTRVRELVGNTNKGMILPWCDQLKVLCHPSVGGFLTHCGMNSTLEAVFAGVPMLTLPLFFDQPINGRLIVEEWKIGVNLRDSTDKDRLIRREEIARAVKRLMASEEAEMKAIRRHALEWKEISHRAVDKGVSSHCNLASLMEMICPSR

SEQ ID NO: 133943 - protein, 92 aa, Oryza sativa
  Clone ID: PAT_MRT4530_35765C.1.pep
QHIRLVTARIFSYPCMAAPAPRTMNPHCTTGATFLPRTGCEGSPGAPKIRDCIIHIYSFSVIKPHHSTFPYQCPEHTMSRVPHHENNLVHRV

SEQ ID NO: 133944 - protein, 304 aa, Oryza sativa
  Clone ID: PAT_MRT4530_35766C.1.pep
MRPPSSSATPGTGRVSAFTMRAVARMSRARWFIFLRRVYQYQNGPRSDLGSNPFNSPGWLALELGVIMAQMVVTTAVVATSPKERPAWPLRVWVAAYNVGNVLSLPLLYWRHRHSSSGARGGTLSDDPEMHGANDPLRNRSYLMNKARAFLELFFAMWFVMGNVWVFDARLGSFHRAPRLYALCIGLLAWNAVVYSLPFLLFLLLCCFVPAVGYALGYNMNSASVGRGASDEQLAALPQWRFKEPADAPRDRDHDDQECCICLAQYKEKEEVRQLPCTHMFHLKCVDRWLRIISSCPLCKQELS

SEQ ID NO: 133945 - protein, 148 aa, Oryza sativa
  unsure (1)..(148): unsure at all Xaa locations
  Clone ID: PAT_MRT4530_35767C.1.pep
MSDFPRSGAPSLCSRRLPPPACAWPPPCACQPLPCACQPPPLRAREPTPPLAXPPLPCARNPPPAPLTRAASASLEQPAAGAPDQPLLPLTSQPPPPXPTGVPDPPAPPSAAPCQPLPPCGREPPARLPCRRWSPLSSPPLPPLTISP

SEQ ID NO: 133946 - protein, 826 aa, Oryza sativa
  Clone ID: PAT_MRT4530_35768C.1.pep
MKRKSVNERPRNYHVNEKGIYIFFEEILSSTNQIYMFLNLFVHCEQGSAVSTSQLRTGMAKPNGKEKTGDTGLSMAPPKISKDRFDAAIRAMADIGILKETAAPVLNNLLNLFDYNWVHIEADNYLALADAIFCDSDPKEGQKRQANETNLDADQSNKKLKTKKRSQNPTSKMHGNDNREFVEAPPQQGRGTLSARTVNGKKVTRAHLELPSSQLLIKEPHTCPSIAKNTTIVENNSAVLCHGQDLQTFEVPVATTCPQVVAPSTRKDARRTSGARHDQKHEGVSGAHERNRAVACSNQEIVSSKDSPSNIEVVLSNYGAGKLSFTYNSSLANRSDFHLPDIKLICKKMEARCLRKYKSLEPNFSFKNLIKDTCQCIVESSGPRHEGIIQTVPALDILSKPSVPQILQSNQANSAFMPPNNVMSLGGTSSSCTVAGVSQNSSNMPVVPHQLHIGANRPPHDVNDITKGEERLRIPIINEYGNGILPPPFHYIPHNITLQEAYVNISLARIGDDNCCSDCFRDCLAQSLPCACAAETGGEFAYTTDGLLKGAFLDSCISMIREPLKHPHFYCKICPNERMKIEVNSDSSNTEMNPGPCKGHLTRKFIKECWRKCGCTRNCGNRVVQRGITRHLQVFLTPEKKGWGLRSTEKLPRGAFVCEYVGEILTNIELYDRTIQKTGKAKHTYPLLLDADWGTEGVLKDEEALCLDATFYGNVARFINHRCFDANIIGIPVEIETPDHHYYHLAFFTTRIIEPFEELTWDYGIDFDDVDHPVKAFKCHCGSEFCRDKTRNEWFYAAALVWFINEIALADKSLYTATGSKSRARV

SEQ ID NO: 133947 - protein, 201 aa, Oryza sativa
  Clone ID: PAT_MRT4530_35769C.1.pep
MGKNQAYKAMQRARLGSSSGAPGATDSPEDGMTDGSFHSPEWHAARLASLNKTHTVTWEEFKKKQKEDELKRGEMEADKDKMMREYRAQLDAERAQKLALGRNHSRSKSSSSKKEKKDKDAKKRSKKRRKHRSSSESSSSSSSESSSSDDEDRDSRKSRSRSRSKRTKKDKKYRSRSKHRGSDSEEEGPVRLSKFFGNPKK

SEQ ID NO: 133948 - protein, 131 aa, Oryza sativa
  Clone ID: PAT_MRT4530_3576C.1.pep
AKETEGRGSQLLRRPHPCRRPRRRRLSGRLHSTGILDGSDETNLFETSSTEKDFNSGNGQPPFRAAVNPEADQPDTPADPTPSRPPSPGADVSKGWGGADMRAPLGEGGGGKRPPTAAAGEKTTAAGDAGD

SEQ ID NO: 133949 - protein, 120 aa, Oryza sativa
  unsure (1)..(120): unsure at all Xaa locations
  Clone ID: PAT_MRT4530_35770C.1.pep
PSETEGSTPPDSAPPPPPPPSPPASRPLIYRLINTSAAKAAAAXIGGKRXDRIXEAGXVXEGEMGWHETLGRAKGASSSPPPARAAARLGVVLRRGGFDCVLGKEEEEGFQKTSPVEGKE

SEQ ID NO: 133950 - protein, 207 aa, Oryza sativa
  unsure (1)..(207): unsure at all Xaa locations
  Clone ID: PAT_MRT4530_35771C.1.pep
MASRRLLAARWWRVTTQWRFVEAVAGVGGSGDGGHDCGSGGDVGVGEGDGDGEVAGYSAAAAVVVVSVSAVTGGMAASVDXPRAWETAASGRHGIVRWRGRRLAWCKEVQPMAPEAGSAREARAAEMEVGLAREARPMERGRIGVRGASSGGGRLGAERRGQRWRRRPRCEELPVGVTRPSVREGXLAGDAGAGVPHVGKACVVVEH

SEQ ID NO: 133951 - protein, 468 aa, Oryza sativa
  Clone ID: PAT_MRT4530_35772C.1.pep
MAAVLRGAVDWPRWRLGGAAQRRQQRQPRLGAAAALARNVKAVALEIGTRPGIGVWGGAPGGGWGCILILTLKQYLVAARASFMQVVALPDKQHSLEMTTVGCLFLSTWIRCFTDAFSRGMSWKGDFTLDDFKIVDGHVRRIKKPKRSCCREEMQDDVSKFVEEIERIFRNDDSRLISKHPPYFRDFIYRLRNMEIISDALSPRHKLLIESHMCFMTSSSRVSFIIKLYCKYEGANESDEPKWATAIQDARSSSEWRSTVSRVIIFKDLIVRADKAESPYGSTRFEAFRLVRNAAMHAAEYRFDGRRNAIVERFPNDSGIELMIPCHFEEFIPHIVANIIKEGVDITQEYDIINKLSSRNSDLRSALVNGEDRGYAQGGVEVTRVWILGGQLRSTVGIGTKLREELRSRRSRIPGDEVGYNMAYGGWTSCRRDLRNGLHEVCVQASVFAKVAMQWLGWIQTVSAWRAR

SEQ ID NO: 133952 - protein, 200 aa, Oryza sativa
  Clone ID: PAT_MRT4530_35773C.1.pep
NHHQVSYLWVYFTLRPILVLNYITLKSRFRTPFASHPWCQSLLWDTSQAVHRLPCSSPLYCSLQASVACSLAACSITHSAHSHPTVQGHWQYLQFFPAQCWLDEGVQRYMSMHCASSLGIPSTLVLSFQAQPSHCLLGTCIHINESPGRKAPPIHTPPDLFPNSYSNEFATRSIALCNPISAPKLCSNWTFPSTTGESRT

SEQ ID NO: 133953 - protein, 213 aa, Oryza sativa
  unsure (1)..(213): unsure at all Xaa locations
  Clone ID: PAT_MRT4530_35774C.1.pep
APAPPPSPRPPTPPPSRATAVSRRPPPAVTRRPCPRRLAPLCASPSPSTPLTPMPQRRCPLATLPXPPPTPMTPRRXPRRPTPGRRPPASPPPPSPTPPNPNPSPAAADKTLDPPRRPPPPAPGRRPIPPLPHRRRISPPPQSILRTPHIAAPAPTSSPSTVRHRRPPLSRTHPVTPTPPTPPSSLIAPSSTRTTAETLDPHRPRPPPVASRL

SEQ ID NO: 133954 - protein, 75 aa, Oryza sativa
  Clone ID: PAT_MRT4530_35775C.1.pep
MATKVRRRLLNYYSSGCALRSSVNVGGDRRDTAIHPWGRVTGSHDAFGIKQAVGKVGTKVPTTVWSGAPSGQGAQ

SEQ ID NO: 133955 - protein, 2154 aa, Oryza sativa
  unsure (1)..(2154): unsure at all Xaa locations
  Clone ID: PAT_MRT4530_35776C.1.pep
MWGVRRMDWGGGEMRRRWGSGGMGRRPGAGGGGRRGGSRVLSAAAGDGFGLGESESKKETPETNIIDTEQKRTGADTAERGAAARQGDDARASGGEVRRRGVIGVGGGEEESPVGIGVEALVSAAWTATGAAVSISRPSLAAMAHVFRLCLSSPPSCPEAGAALHAIALGTKHPQFQKQGYNFSPSIILSIPQPPQLDDGWQHSELQQRTAAPQPPPKQRLGGRRRRRKNSPRPLLSLPATSARRATAAARELIGAPPLPGGNEGSEGDGSSARASGALHSQPATRARRTTVAARIRRESSSAPSTSGRRQGDGAPRATVAARIQSDGDPDGGERGSRESSRQPVKESNCMAESLLLPVVHGVIGKATDALVQKVTRMYGVDGDRRKLERQLLAVERLLADAESKSETNPAIKRWMKDLNTADDEADDVLDEFQYEVLHREAMSLKSLGHKVRSYMTPLEFHFTMRRKLAKVLKKINELVEEMNTFGLLLRDEPQQLSYRQTYSVLPSNELDDIFGRDDDKELLQKELQKAVGRRRFLLVLDDVWNEEKKKWEEDLKPLLSSVGGGDGSVILVTTQSQRVASIMGTLEYHNPACLSDDDSWELFSKKAFSKEVQQQAELVTAGKLIVKKCKGLPLALKTMGVFPKDHEMDKEVLIQLWMANGFIQEDETMGLEQKGEYVFCNLRMPPNISLLKNLRTLTTFVLDTEPGRGIEELKDLNHLANRLELESYGQAGTGRLGYSESSLIGERGKMAGERAPDAMSCCSSSTAYSCSYFSPASAIPVRCFGSHASRPAPPADYRVVGRAEEEAHPRDVVKSSKEMAGFQICAAREHAYMEGFRVGEPELRLGTGRCVLSWTVGMEHNEAWLNQHSLLAMVLKTRPSVSPGEMLEAIVQHTGINESNVRVDVTHTEDFLVLFRMLQDRNLVLHCSHEIFVKGVPTSFKLWSRRSWADSSDLKFFTKISLDGLPAHLWEREVVRNLVNEXRGSSSRASLPTTPDVWASSPGSRILTSFLNGFRXEVNDPMLLHAPDKFYNDDGDDDVTRRNTFDCWAKWFNSAGLWPSDRGGSTRYGGASGSAGGLECQAFDLLPSVIQQPVRLFNTEEAVSAIVRFGSSATGEDLLPSSPDAAAVVGTRELGTQVPVMVLVSPEVVVDTVEVISPSLPRVFELAVPGAVEGSSPQGGNSAGEHFRAGGPAPTEVVRGLYLAIPQVAQEQVVPFDRVYSRRKEAGSKLGMLPTQIAVSATQEVQSAAAAAQEAILVAADENMCVQVNIFVDAISTPSSSSVLSKPPASVPITKSRCRPVIPVDFKPWRSPRLALQGSGARHHSISKAQRVTMKNLGIIEEEEEANDEAMEEYVQLFDEPLPPHHFEALAELLHLELAEPEFQALADESVVSSNALVVCFQESKLEVVDRVTVFELCGPDFDRFEFLPALQTRGGIIVAWKGDLFQGTLVHVGQWSVTVNLDWRQGGRSWAVTSVYGPQRDDEKLLFSEELSVIKNCCLGEWMIAGDFNLITAAEDKNNTRINRRLMNAFRSKVNDLELKEMYLFGRRYTWSSEQAIPTLVKLDKLFISTQWEDLFPEAHLQALSSSVQESWGSEVDSSDPFCILYVKMARLSKALGKWGQRKISSFRLQLQIDINGTLSDPFKPMRGLRQGDPLSPLPFVLKAMSAGLLDKVNHRSRAPNNSLYADDAVIFFKPVRHEAMLVKAVLDLFSEATDLLPNFSKSAVSPIRYTEEQSSLVQDILHCKLQNLPILYLGLPLSVRKPTKAELQPLFDRLAKKVAGWKSKFLSPDGRLCLIKSILMAIPVHFLSVMQLPKWAIKDIERRCRGFLWKVAWRAVSMPVEFGGLGIRDIELFGKVLRLKWEFNRLEHEDRPWTMANWESDKDVRDIFSSIAQHMDELQQVSLQDGQSDSVLWRFTASGAFSVSSAYEFFFYPSVKCPHARSTACRMVAAGASLFSVKDNERVRMSLGSWPSLTKLDVSSSYNKMSTLEVGTNQGPLENLRSLTLYRLNCFTDVSGFSKIHLGLCKCFAFVEDLSISGCDGLVRWPIEELMSLIHLRSLSIETCRNLEGKGSSSEDGQLHIPMLPASLEKLCLVYCPRLVALPSKLGNLARLKIMSLQHCYDLKELPDGMDGLISLEELKIWNCPEIEKFL

SEQ ID NO: 133956 - protein, 628 aa, Oryza sativa
  unsure (1)..(628): unsure at all Xaa locations
  Clone ID: PAT_MRT4530_35777C.1.pep
MGAALAGAVVVGDWRLGEAAARCGSVAQDPHGAPSLPPDLISPSICVCAPAFGRPHDHVRLKEKESDFHACLDNKFSFKGTSSKPKDLAEGSGVGGGVAGGEPGGRREHGSSGRPPCPPLPPPSGSSSPPLPFLPWPDPAEGRGLSGGAAGGDRGCRRRVARRPAATTTRARAASPADNDEEAAGGAEAGGDNDEGAGSVFGRRRRQGGGGVAGGFFFEFFSGDGGGGHPRSGAGGSEGGGRPELRRRRGRRRAGCAGNAGRWTWWRQAAQGRGVGGGRRRREATRRGVGRGGEGGGDRACDLGHHRICLGHRRIWSQVRERRRVAAGMQWRRQVAGMLARAAGMQARLWWWWRVEDRGGEAGGVEAGAARGDAAGGMAWRPVRPXGAAWRCCRQREAGAARRGAAGSVEAGDGAWMCGWRCWCCDGGGCERPLLARWQPPAAPTGVLAAVQRGCGRXVATVASRASMTGPLAALAGCWRKPCRAXAGSMTMTPLAPFPFLKALSWRSPICPTNLQVKTLLRLRTSGGGVTRRVLLGGVASGKFLXTSMTIEGLFGSKAFFPWCLARPKPLGFASLXGGRHTLRLFLRRKSELLAAGVRRRLTTMTCCGLFQRVGAGHVKEVALSWLG

SEQ ID NO: 133957 - protein, 765 aa, Oryza sativa
  Clone ID: PAT_MRT4530_35778C.1.pep
MAGGRWIRHGMAMSVVATGNCGRSVGGQEARRLHLYCRAVAGATSADPAQHGCGPGDDGRVQKKMASTSTYSGVHLRGDIPPPSPPAIDDVLDVLPIAGQDIPEDVVPLIGTMFESEDAAYSFYNRYARYAGFGIKKGKFDNARRARFLHCTRQGNHTYKGEELACYCKKAENKVEENSDDVNKLLMFFKEMKVKNNNFYFDIQADEKDAIQNIFWCNASSRAAYHHFGDCITFDTTYRTNMFNMPLAVFVGCNHHMQSVILSVALLRDERAESFEWLFKTFLKCMGGKAPMCILTDEDPAMASAIREVLKNTIHRLCRWHVLKKYKKQLGVLYEMFKHRNFKEKLHFVINHPLTPSEFVAAWKDLVEEFELQGCECEPVLSTRYAFEEQLSKLYTRAVFTLFKETLFDSTAFLVNEVSNAMGAYVVTHGKTIRKNPWSQHAFQVTADVESGLYECECKTWIHTELSLHCNKQCLLLQLQCEPVLSTRYAFEEQLSKLYTRAVFTLFKETLFDSTAFLVNEVSNAMGAYVVTHGKTIRKNPWSQHAFQVTADVESGLYECECKTWIHTGLFCPHIVRVLSHLQVEKILPRYILKRYTRSAKEGGVFDDHDYRRFGLDSTSEIYRHTVLINEATKVAKKASKSTQCYDRAMEVFKELDIEIDGIPCEQLLNNEENNIGEMETDPVQAPLTAPPISTTKGRKKDKEKLVSKQTESKQRKDHSRRCSVCHKIEGHNARTCPSRSKRQKTTTRQARDDYDEEDEEDEEE

SEQ ID NO: 133958 - protein, 700 aa, Oryza sativa
  Clone ID: PAT_MRT4530_35779C.1.pep
MGTLESHNLACLSDDDSWELFSKKAFNKGVQQQVELVTAGKLIVKKCKGLPLALKTMGDMMSSKQQVKEWETIARSNTGDNDRGEDDILPVLKLSYRHLPPEMKQCFAFCSVFPKDHEMDKEVLIQLWMANGFIQEDETMGLEQKGEYVFRNLVWRSFLQDVKQESQVINPKHLRYLDLSGSDMDVLPSSICTMYNLQTLRLNRCKKLRYLLEANSQNLEMLNIAIITLLPKKEASTLLKDYRPISLIHGFAKLATKKAMSAGLLDKVNQWSRAPNNSLYADDAVIFFKPGCNEEEVLESLKPHAKLKILELHGYSGLKIPQWMEDPQMLQCLTTLHFSNCSGCKDLSTVWFLVSIECMSLSKMENLTTLFMNVVGVKAEGYYIPLQIFPRLKDMTLSQLSNLEKWTESTAGEANTSLVTFPKLATLCISDCPKLASVPDCSVLKELKTYGYCSLAMSLLAHLTTLSELIYRENESMRMSLGSWPSLTKLHISSSYNQMATLEVDTNQGPLENLRILRLYGLNFFTAASGLSKMHLGLWKCFAFVEDLCIGACNDLVHWPMEELMSLIHLRSLSIEHCDNLEGKGSSSEEIMPLYYLEKFHIKDCKSLLDIPTMPASLEELCLLLCPRLVALPSNLGNLARLKTMSFEHCHDLKELPDGMDGLISLEELKIMGVPRDREISTGSPPSDSDPSIPNGSRLP

SEQ ID NO: 133959 - protein, 45 aa, Oryza sativa
  Clone ID: PAT_MRT4530_3577C.1.pep
KKELHYVSGYCDAISNRVLYQSKSRLFLLLAHKHIQFNHTFNTLC

SEQ ID NO: 133960 - protein, 2051 aa, Oryza sativa
  unsure (1)..(2051): unsure at all Xaa locations
  Clone ID: PAT_MRT4530_35780C.1.pep
MAHVFRLCLSSPPSCPEAGAALHAIALGTKHPQFQKQGYNFSPSIILSIPQPPQLDDGWQHSELQQRTAAPQPPPKQRLGGRRRRRKNSPRPLLSLPATSARRATAAARELIGAPPLPGGNEGSEGDGSSARASGALHSQPATRARRTTVAARIRRESSSAPSTSGRRQGDGAPRATVAARIQSDGDPDGGERGSRESSRQPVKESNCMAESLLLPVVHGVIGKATDALVQKVTRMYGVDGDRRKLERQLLAVERLLADAESKSETNPAIKRWMKDLNTADDEADDVLDEFQYEVLHREAMSLKSLGHKVRSYMTPLEFHFTMRRKLAKVLKKINELVEEMNTFGLLLRDEPQQLSYRQTYSVLPSNELDDIFGRDDDKELLQKELQKAVGRRRFLLVLDDVWNEEKKKWEEDLKPLLSSVGGGDGSVILVTTQSQRVASIMGTLEYHNPACLSDDDSWELFSKKAFSKEVQQQAELVTAGKLIVKKCKGLPLALKTMGVFPKDHEMDKEVLIQLWMANGFIQEDETMGLEQKGEYVFCNLRMPPNISLLKNLRTLTTFVLDTEPGRGIEELKDLNHLANRLELESYGQAGTGRLGYSESSLIGERGKMAGERAPDAMSCCSSSTAYSCSYFSPASAIPVRCFGSHASRPAPPADYRVVGRAEEEAHPRDVVKSSKEMAGFQICAAREHAYMEGFRVGEPELRLGTGRCVLSWTVGMEHNEAWLNQHSLLAMVLKTRPSVSPGEMLEAIVQHTGINESNVRVDVTHTEDFLVLFRMLQDRNLVLHCSHEIFVKGVPTSFKLWSRRSWADSSDLKFFTKISLDGLPAHLWEREVVRNLVNEXRGSSSRASLPTTPDVWASSPGSRILTSFLNGFRXERLEHGPLLLYGVFLHVEEVNDPMLLHAPDKFYNDDGDDDVTRRNTFDCWAKWFNSAGLWPSDRGGSTRYGGASGSAGGLECQAFDLLPSVIQQPVRLFNTEEAVSAIVRFGSSATGEDLLPSSPDAAAVVGTRELGTQVPVTQGFEVAATAVGVAASVTPEVMVLVSPEVVVDTVEVISPSLPRVFELAVPGAVEGSSPQGGNSAGEHFRAGGPAPTEVVRGLYLAIPQVAQEQVVPFDRVYSRRKEAGSKLGMLPTQIAVSATQEVQSAAAAAQEAILVAADENMCVQVNIFVDAISTPSSSSVLSKPPASVPITKSRCRPVIPVDFKPWRSPRLALQGSGARHHSISKAQRVTMKNLGIIEEEEEANDEAMEEYVQLFDEPLPPHHFEALAELLHLELAEPEFQALADESVVSSNALVVCFQESKLEVVDRVTVFELCGPDFDRFEFLPALQTRGGIIVAWKGDLFQGTLVHVGQWSVTVNLDWRQGGRSWAVTSVYGPQRDDEKLLFSEELSVIKNCCLGEWMIAGDFNLITAAEDKNNTRINRRLMNAFRSKVNDLELKEMYLFGRRYTWSSEQAIPTLVKLDKLFISTQWEDLFPEAHLQALSSSVQESWGSEVDSSDPFCILYVKMARLSKALGKWGQRKISSFRLQLQIDINGTLSDPFKPMRGLRQGDPLSPLPFVLKAMSAGLLDKVNHRSRAPNNSLYADDAVIFFKPVRHEAMLVKAVLDLFSEATDLLPNFSKSAVSPIRYTEEQSSLVQDILHCKLQNLPILYLGLPLSVRKPTKAELQPLFDRLAKKVAGWKSKFLSPDGRLCLIKSILMAIPVHFLSVMQLPKWAIKDIERRCRGFLWKVAWRAVSMPVEFGGLGIRDIELFGKVLRLKWEFNRLEHEDRPWTMANWESDKDVRDIFSSIAQHMDELQQVSLQDGQSDSVLWRFTASGAFSVSSAYEFFFYPSVKCPHARSTACRMVAAGASLFSVKDNERVRMSLGSWPSLTKLDVSSSYNKMSTLEVGTNQGPLENLRSLTLYRLNCFTDVSGFSKIHLGLCKCFAFVEDLSISGCDGLVRWPIEELMSLIHLRSLSIETCRNLEGKGSSSEDGQLHIPMLPASLEKLCLVYCPRLVALPSKLGNLARLKIMSLQHCYDLKELPDGMDGLISLEELKIWNCPEIEKFL

SEQ ID NO: 133961 - protein, 471 aa, Oryza sativa
  Clone ID: PAT_MRT4530_35781C.1.pep
MSTSASPSVAPSAKYAEHLSNLVTIPSLSHERHYFLGPIGDLDPTDFIIAKTNRIPVRLANPNLGHWKNTRSLGHLLRKPPLRKAVPHGPMTLTLIDNTMITGLDVTSSANPMSLNTKNQIDFKTKSIGGWSSYVAAYMGKGPITSREHVAFLLMWLEKFLFYGSSCAPTTNWQFVAEALESKRQFPLGKILLGYLYQMLNNASAKIAVGSVVGADNRIFPSTPKQQWQGHRICSRPLTKWWWTSSSSHRLPCPQDLKPTSRAYERTSRCWQEKEDQGQKAIDPSALALKKKAKKHKPKPADDLPTLDPSIEQALDEEEIEEDADKAAAELQKKIAVKKKSAATTLKPAPPVLVDLFSFDIKDYFDEETEDDTTNKALAPLTDDVKKILEDISRRLEASSLDSLVVDYGSIRTRLHKVQALIPDELVNAPTPAVYLEQYQFKLENAKLRLAEHRERKNIEATNPSQSAACS

SEQ ID NO: 133962 - protein, 358 aa, Oryza sativa
  Clone ID: PAT_MRT4530_35782C.1.pep
MVKIEAPAAAGLEEPAAVLAIKMDKTTIIVSAVVGSLGLLSAILGFAAEGAKRTKATVGLGVCGAILLVITQVTVAAIGGCCGCCKSRAIPSETKRIVGVVCAVFSWITAVIAFVLFLDGAIVESNCVLVRGGFFASAGVLTLITTALGMTSYFMLRAQPDEPAAPAARRPPGPAGGDEPTPIVGVPTAVPAGFPPPVSSPNPLLVPVPAAQAPPNQQFAHPATSQALPHARFADAAVPDPAPAAAQGYGSQASNQQHFPANPRGRSEVIGSSPALSDAAAGGRRVAAGGSGQWVAGCGTLNSVGCGGRRQRPTQLSRRAAAEAAGESVARAGEGASICYPGLKGVANRGYKGFVQQL

SEQ ID NO: 133963 - protein, 341 aa, Oryza sativa
  Clone ID: PAT_MRT4530_35783C.1.pep
MDRDSNSSTMQTQVPTNTREGPTFTQLLLGDEDFDLPPYVPEAEENNQFYQQTMNENLNMNQLGNNGIETAELEPQEHIMTFASSFGVGSQLLGSQAIEVVDVVGGLTSQWGTQLHGGHLARVISYIRAFHDPEQQILSNLVTHQSIETMLNHYAQTAEMSYSMRYPENAVTRGPQNVSGFPQTNGQINTLNNMNSEFHFLLEQAKNPENNSMRLINIRGHLCAFSIDPFGSRFIQHKLERATPAELAMVYEEIVPHAHMLAIDVFANYALLGYGPTFYRRELIGKLTGHVVALSLHVYGCRVMQKAFEVSDMDQRIEMANEVEKEKEKMKVIKIVFFLRF

SEQ ID NO: 133964 - protein, 81 aa, Oryza sativa
  Clone ID: PAT_MRT4530_35784C.1.pep
SFRFNLGTIDRWLQATWSHTLILICLPTLKLKTHWKEWQVILKICLSLKDLRNFYCHGKPVLETMGSILRHIMLILFGTTE

SEQ ID NO: 133965 - protein, 196 aa, Oryza sativa
  Clone ID: PAT_MRT4530_35785C.1.pep
MPPFRIFALDDVVSRLLIFGVCSASHSRCEVSVEVVTTLNITEVLPVRVRNRAISGSTWARFTSLVQSGSNLSLPDYTLLQHFHTGLDKESALYLDITAGGSFMHKSPVEGKEILDRISENTSFVGQCVEPHPEAFEAFVSGREEPSFVEPELEPSTSPGLTKESFLEPSPDSIEIQAPGFCEEEQRRRFGEEEDA

SEQ ID NO: 133966 - protein, 72 aa, Oryza sativa
  Clone ID: PAT_MRT4530_35786C.1.pep
AFCDCYQTIERASGSCDFARVITMVGHQPLLGGCVLRPYIAVAGHTAIVDQSTVNLPASDGLGGWIKIIDLL

SEQ ID NO: 133967 - protein, 100 aa, Oryza sativa
  unsure (1)..(100): unsure at all Xaa locations
  Clone ID: PAT_MRT4530_35787C.1.pep
HQSEKQTVLYNQLTTFRFNLGTIDRWLQATWSHTLILICLPTLKLKTHWKEWQVILKICLSLKDLRNFSKKKNPFFSLTNLYFYYSHQRASQGIDNXNCI

SEQ ID NO: 133968 - protein, 101 aa, Oryza sativa
  unsure (1)..(101): unsure at all Xaa locations
  Clone ID: PAT_MRT4530_35788C.1.pep
SGAXFFPTAPXSLQHQHQHSISISIHHQCHHLGHITCARILQVTTFXSSPAHTVPTLASSTAHQSITTGGSNRAFLGAFSYIGPFKGPPPIGILHPPNSXP

SEQ ID NO: 133969 - protein, 64 aa, Oryza sativa
  Clone ID: PAT_MRT4530_35789C.1.pep
MIDAWVRFSKTAPHGRHDVKAPPPLVRKPDQGFHLEIGSDEGKHHNDAKGAAFVSHPKARQGFR

SEQ ID NO: 133970 - protein, 285 aa, Oryza sativa
  unsure (1)..(285): unsure at all Xaa locations
  Clone ID: PAT_MRT4530_3578C.1.pep
MATMPLTFSPPRLLHRHRRREAKPQRRSATRVSLLPRRGAASARRPLYCAPGGGGEVSAPPATEQQEQAAKEEEEEYTLLAITGSDFNEVIMTTSVPSEMSPKVXTVGTWRTCFRLRXVWTNSYWDEFVSLCVAPLLMALFLCVLGICTXETLKCTRIRXWKVIGSEIDPKIIELSRDYFGLSDLEKATESGGSLSVRIGDALSPSATIEGGFAGIVVDLFADGKIIPQLQEVETWLVIAKSCPRSFHMTEYWFVSSVSLDRCNGWYFPFYEGSEESNHAVLLLV

SEQ ID NO: 133971 - protein, 83 aa, Oryza sativa
  Clone ID: PAT_MRT4530_35790C.1.pep
QVRPWLCSRVHPRRCIGLSSSLGKSHSLLADFSSPLPSRHSDGMSIWPRTIWLLIIGDSRFGACNGWGAILHFTDLFAPHSLL

SEQ ID NO: 133972 - protein, 171 aa, Oryza sativa
  Clone ID: PAT_MRT4530_35791C.1.pep
MARNNGVAVMFAAVVVVAGALVAGAAAQSGCTSEMVSLAPCLDYMQGNASRPTASCCAALSSVVKSRPECLCAVLGGGASSLGVTVNTTRALELPAACGVKTPPPSECSKVGAPIPSPAPGGAAAPNAPPAAGTGSKTTPTTGASSAGESVGKAASVAMVIVSAAFAMLYA

SEQ ID NO: 133973 - protein, 59 aa, Oryza sativa
  Clone ID: PAT_MRT4530_35792C.1.pep
TRPARSIGAAVIFNNEKAWHNHWIFWVGPFVGAAIAAFYHQYILRAGAIKALGSFRSNA

SEQ ID NO: 133974 - protein, 70 aa, Oryza sativa
  Clone ID: PAT_MRT4530_35793C.1.pep
FFFFFFFFFFNKSHTLGIKDPTGSRATTPSSELPHPPKMGAKLGGTYPGSSQGRIYILAFSRSFLTSEFA

SEQ ID NO: 133975 - protein, 297 aa, Oryza sativa
  Clone ID: PAT_MRT4530_35794C.1.pep
MTIKRSDDRQTGSIAGKKGCTKIAGGDRRLGLDEANPIHALTLSPLSQAAVTPGDRNVRSRTRDTEREARRGDDCQVLRLLHMSTSPPSHLAEHQVLVPLHREFGDRFPFSDDFAGRDYDVWVEYDMSEMVTVQFLDLRIHRMPANDVLQLRRRLPPLELNCVQSVDQFKRFQAFLAIVTSQTDLARICATRGEELDELGIVEEYDDDDDDDDDDDGDEHYVYGGLDMFEPATTDEEDANAQVDADDLYYLGVSDDENEEVGSDGGTDDDGGDDAGGDGGRAGPLRWDNLWDDDPPQ

SEQ ID NO: 133976 - protein, 186 aa, Oryza sativa
  Clone ID: PAT_MRT4530_35795C.1.pep
HASAHACGQTQLHQELGDWGSQGENPTPSRHPTPKAGDSFGSIAGKKGCTKIAGGDRRLGLDEAAVTPGDRNVRSRTRDTEREARRGDDCQVLRLLHMSTSPPSDMSEMVTVQFLDLRIHRMPANDVLQLRRRLPPLELNCVQSVDQFKRFQAFVRKNEEKEKRDEEEAELNTSLPIFLLPLILAN

SEQ ID NO: 133977 - protein, 130 aa, Oryza sativa
  unsure (1)..(130): unsure at all Xaa locations
  Clone ID: PAT_MRT4530_35796C.1.pep
ERSSRRQRQREARGDDGDSGWPASGSSTRQRRRPLSRGVCHSGAAXAQRGDMAQPVVACGGCPARGTGVVVPTRWRRFRWQWSIGVSTVDRQAVDGGRIYGQCSNRPVAFNATWQDVRRPLMGVRQATGF

SEQ ID NO: 133978 - protein, 334 aa, Oryza sativa
  Clone ID: PAT_MRT4530_35797C.1.pep
RTRGLSSSSSQASKSESKMMKKLVRLLIMVEVVAMAAAPRRAAALSMDYYGMSCPFAEMVVRSVVSQALMGDPSLAASLLRLHFHDCFVQGCDASVLLDSTPDNTAEKDALANKSLRGFEVIDRIKDALESRCPGVVSCADVLALAARDAVIMAGGPYYGVATGRRDGTRSSAADTVALPPPFLNATALIQLFGTHGFTAQDMVALSGGHTLGRAHCANFKNRVATEAATLDAALASSLGSTCAAGGDAATATFDRTSNVFDGVYFRELQQRRGLLTSDQTLFESPETKRLVNMFAMNQAYFFYAFQQGMLKMGQLDLKEGDAGEVRTSCRVVN

SEQ ID NO: 133979 - protein, 127 aa, Oryza sativa
  Clone ID: PAT_MRT4530_35798C.1.pep
MEQAKNLAVVSTAGFSLGVPGPAPHVPVAWGHGSLRKRRESQGMDRICANSRTGREKGLTGLVKTKATISAGDLGAPFLTRYGACTDKTTTSQVHRERKEKLPVEFGIPKESPALGVGWRDGVGFSP

SEQ ID NO: 133980 - protein, 243 aa, Oryza sativa
  Clone ID: PAT_MRT4530_35799C.1.pep
MQSAWAVLNSILELEEEKRLLAIVLMYGWWNERNRRREGEGRRVASVLAFSVQKQVDELLNLALQQRREHKNRTVKKWTQPAAEVLKINVDGAFKHQLLLGGWGYVIRDVGAHVIQAGAGSSSRMQDAFHAEVMAGVKGLQAAANLGMANIQLESDSLTLIQALREENFRYAPLGGLLLEAKNIITSSFVSCQFSYCPRECNKVADAIASIGCNSPLNTDLVWDGVPPGVEDLVVGDYAASLG

SEQ ID NO: 133981 - protein, 681 aa, Oryza sativa
  Clone ID: PAT_MRT4530_3579C.1.pep
MARHPRPPTPSPPRASSDTDAAFDPVVEWLLDLDQAPMADEVAKGLGIAEEPASFDAGKVSGGSVSESRGVEEKGNALPEQSGASFDGELDVEMEPKTGSGGLVPQLVQDQHPASDIGDLAVREDGSEIMVDVERSTVPVDADMNNVSLALVKEEAEGGGDREDKSDEEESESSKEESSEASSSSDEEEDKRESSEASSSSDEEEQMAKKTGGAGDTDSLFEEGELMLASDDDDEEAPKGPIKSKHEVEVLPPVPKIDVQLEPHHQTLPVGTISAIMGERVIVEGSVQHNPLNEGSILWITESRIPLGIVDELFGPVKNPYYLVRYNSAEEVPADISAGTAVSFVAEFADHILNMKELYAKGYDGSGENDEDQTDPEFSDDEKEAEYKRSLRLAKRQTDRQHEGKKTSGDKKRAQPRGSGFRKDMPPRSHDGPAPGRQSQPHFHRPDKAPVVDAIRPLGSQDGPMSAPTKLPPGPVHPVMPAANQLTNQMGGRFMNPSQQFLPQQPNVVWPGGLTPTPHPNMGIEGAAFAANIMQNLLIGANQYQQQFQNHNFGGFLNQMPVPPPQFMSQGGMPSNPMAFGGPTMAQMNPPFGPPQLPMDQGNFGQAPHMAGHTVQQGPPAGFPNGQGFGQSASPQGDGEQPPMQFSSGQFNQGNSSFHGRRQQQRGGRHSSGRGGGRHRR

SEQ ID NO: 133982 - protein, 222 aa, Oryza sativa
  unsure (1)..(222): unsure at all Xaa locations
  Clone ID: PAT_MRT4530_357C.1.pep
MALISAMTWLPRRIDDRKHENGSYQRTTRQQPRGGRSSPRSCDPEGGDGERRRRWTATNGAAEDGTDRLHGDDGLPGVFDDGEVEAGLLLLLANPTAAAATKGDDHSDGAGLLERRPEVEREGERGESDSGEIRRKGTGGRGSSHPCEAEGGDGAGRGRPXGGATRLEGHRRRRRLGXRRRRRYKRRLGLGLEANGRGGRGDVIYSRKRERSARERMESATD

SEQ ID NO: 133983 - protein, 86 aa, Oryza sativa
  Clone ID: PAT_MRT4530_35800C.1.pep
MRRALAARARDRGRRTSVRAGGERETAGSRRGSGSRERGGRACGVAGAGRAARSAVSRAGVTPIDPAVGVAAVERSRAIELSYRNV

SEQ ID NO: 133984 - protein, 114 aa, Oryza sativa
  Clone ID: PAT_MRT4530_35801C.1.pep
DVEGRGSGDLLFRSPVHAGEREGVVYERRGSTEVPARSPLRVTEPDKSRETYPDSTSFSRTGFFGMFPKQNKSEFPAAKEAASVRLHLHKGEEPILRTIRRVRRAHAPPTRRGE

SEQ ID NO: 133985 - protein, 221 aa, Oryza sativa
  Clone ID: PAT_MRT4530_35802C.1.pep
MEVGGGKILRPLIPTPMDPLFTIEPCYTHEESSRPKECGGLGIHNLELQNKCLLSKWVYKLINEEGVWQNLLMKKYLAKKCITQVDKQPGDSHFWSGLMAVKESFFSCGSFEVHNVPRRTFIWNLSIPLKIKIFLWYLWRGITLTKDNLAKRKWKGSIKCCFCNSNETIQHLFFDCHLVIFKGTYWAQQWSLLLKEEDGHKLNEYCKMLEVRVIELYAKYG

SEQ ID NO: 133986 - protein, 87 aa, Oryza sativa
  Clone ID: PAT_MRT4530_35803C.1.pep
SSVASKVVFFAGALMAAMVAICGAQLNESKMRFMDRQRQREVQDSPLDACRHVLYRQLTGRERFHSMIRRPGALGLRMHGCHELHDV

SEQ ID NO: 133987 - protein, 1784 aa, Oryza sativa
  Clone ID: PAT_MRT4530_35804C.1.pep
MKAKVVGGKGADGGRRLTLALGASANLWSQPAVPKETWGVAQGEEEDERNWWSEVLAATPCRTSPEVSTWDKKGCSRGGFSAPTKCYAVEPLCVPKPLALGSRFWALGDESSEDEVDREEHRSEEEVQGGSVLPEESFVKKAIDQGFTVDEILKAGEHLLCMSSPPKVSSCSMNSDFVGNRKLAKKMVEKVVNQKTTTCKPWKGPLPKARVSQPLTFGDVIGVALKKKKRASVASPARFTTVNGVNSPVAEENLDRANKSLSSMRLPVAHTCSIMEKAAAAPPAAAVRSSLDDNAKTLKFLMNLDKREKEGRIVLMSPGGQCTSDIEASKRSVELLSKGGSEHKFVSFGVRSNLVQFKCCQGLGRLLSRAGQHMWATEGATRQKRSDVTVGLRTTQLVQTSQTRERKQSVGEQSGGAQGERSRREVTMAWRGEGSGRSDGHGRERGDGFWEEEEEFFGARFDAGRLGFEPGYGFGQQGNHGWGQQRSGFRPRGSRSFGPRQGGFAGRPGRGGWENNRFSMKRFGERPLLKNEGRPGGGINKAGGGSKFAAKGEVGGGVSGGGGGASAGKGKVKVGDMEVVVNQMDGAAVVTDDPETNSELAILDCDPSLFVDQHVREDISKTQAKLKVCSSVEHVNHRCLVLKQSRPAAHAVGYSVDGLGFYHIPHPPLQKSKKGSKTALVRIEGGCLTKEKAVSQLQRIISTKWKWEPVEHEENSFVVPFPSKIELQRAIAYGGANVKENGVLTGARLKFEEWNEKEEGFLLPKVWVRVFGLRKKLREYLNIWAVGSLLGATQTMDMKMTRKNDFGRIFVDVLNPRIIPKNLDVVIGDHFFELEIEVEKMGFDENGKEVEIEQHDRDGDGLEENKEDKHDGDGRDGRVTKRAKNDDMLVDGKENGTTEGKYDAALNGNQCQHKMKESEISAIALGILDVAVGKVMNEVCDMVMEETEQPIEEEELPLDSNLGDEEKGEQEQEQEQEELTLVENNIEEAFKERVVRAANVKETVMTPKRSSARLGCNSGVHSVEKAWKNLELQQGNEVNSFLSFSNSSITSSLQNLGVLLGASSDEITDSVCSLKKTEVERINSSLSLVRDNLDKLDDGDSSEEEDDLNYLVLGHLCGDLMDEVMDEETSHLSCDSKTVLKAYKSKSRRIFWNSRGLRDLAKFRFLSDITKEQKLDFIALLETCKSDFSNACLKNICGGDFYVKFHVRNKENAFQWILVAVYRAAQEEYKEAFLTELVRSCRKESLPILIGGDFNIIRNPSEKNNDKYSDKWPFLFNAVIDSLDLRELELTGRTGTHANKQPLFKFELGWLLRDGFYDLVANVWEKEAKGSTGMERWQNKIRRLRQFLRGWAKNIIGAYKKEKARLIEKADELDKKAEVQILTKQELDLKNFLKNRLAHLLRQEEIKCFKIFTKVMANRIALVAQKVIRPSQTTFLPGRNIMEGVVILHETIHEMHRKRKNRVILKLDFEKAYDKVDWGFLQQALRMKGFSPMWCKWIDQIVNGGSVAVKVNDDIGNFFQTKKGLRQGDPLSPILFNLVADMLAILIQRANDQGKFEGVIPHLIDNGLSILQPKECGGLGIHNLELQNKCLLSKWVYKLINEEGVWQNLLRKKYLAKKCITQVDKQPGDSHFWSGLMAVKESFFSYGSFKVHNGTQLRFWEDCWVGATSFVPRRTFIWNLSIPLKIKIFLWYLWRGITLTKDNLAKRKWKGSIKCCFCNSNETIQHLFFYCHLVIFKGTYWAQQWSLLLKEEDSHKLNGYCKMLEARVMELYAKYGWNLRRRLV

SEQ ID NO: 133988 - protein, 1061 aa, Oryza sativa
  Clone ID: PAT_MRT4530_35805C.1.pep
MKAKVVGGKGADGGRRLTLALGASANLWSQPAVPKETWGVAQGEEEDERNWWSEVLAATPCRTSPEVSTWDKKGCSRGGFSAPTKCYAVEPLCVPKPLALGSRFWALGDESSEDEVDREEHRSEEEVQGGSVLPEESFVKKAIDQGFTVDEILKAGEHLLCMSSPPKVSSCSMNSDFVGNRKLAKKMVEKVVNQKTTTCKPWKGPLPKARVSQPLTFGDVIGVALKKKKRASVASPARFTTVNGVNSPVAEENLDRANKSLSSMRLPVAHTCSIMEKAAAAPPAAAVRSSLDDNAKTLKFLMNLDKREKEGRIVLMSPGGQCTSDIEASKRSVELLSKGGSEHKFVSFGVRSNLVQFKCCQGLGRLLSRAGQHMWATEGATRQKRSDVTVGLRTTQLVQTSQTRERKQSVGEQSGGAQGERSRREVTMAWRGEGSGRSDGHGRERGDGFWEEEEEFFGARFDAGRLGFEPGYGFGQQGNHGWGQQRSGFRPRGSRSFGPRQGGFAGRPGRGGWENNRFSMKRFGERPLLKNEGRPGGGINKAGGGSKFAAKGEVGGGVSGGGGGASAGKGKVKVGDMEVVVNQMDGAAVVTDDPETNSELAILDCDPSLFVDQHVREDISKTQAKLKQSRPAAHAVGYSVDGLGFYHIPHPPLQKSKKGSKTALVRIEGGCLIKEKAVSQLQRIISTKWKWEPVEHEENSFVVPFPSKIELQRAIAYGGANVKENGVLTGARLKFEEWNEKEEGFLLPQGVGATQTMDMKMTRKNDFGRIFVDVLNPRIIPKNLDVVIGDHFFELEIEVEKMGFDENGKEVEIEQHDRDGDGLEENKEDKHDGDGRDGRVTKRANDDMLVDGKENGTTEGKYDAALNGNQCQHKMKESEISAIALGILDVAVGKVMNEVCDMVMEETEQPIEEEELPLDSNLGDEEKGEQEQEQEQEELTLVENNIEEAFKERVVRAANVKETVMTPKRSSARLGCNSGVHSVEKAWKNLELQQGVLLGASSDEITDSVCSLKKTEVERINSSLSLVRDNLEKLDDGDSSEEEDDLNYLVLGHLCGDLMDE

SEQ ID NO: 133989 - protein, 233 aa, Oryza sativa
  Clone ID: PAT_MRT4530_35806C.1.pep
PAAPHFWSGLMAVKESFFSYGSFKVHNGTQLRFWEDCWVGATSFGKLYPSLYNIVRKKNVVVADVLNTEPLNVSFRRAIVGDNLVAWHDLVSKVVSVNLSEQNDVFRWRANKNGIFTVNSMYNALMYCDVVPRRTFIWNLSIPLKIKIFLWYLWRGITLTKDNLAKRKWKGSIKCCFCNSNETIQHLFFYCHLVRSVWNTVFITFGIRPPTSVANMFGSWLNGVQSRLKYQIF

SEQ ID NO: 133990 - protein, 261 aa, Oryza sativa
  Clone ID: PAT_MRT4530_35807C.1.pep
MKYFVLAHVISRALHNIASRSYHQLSSQENHYLLEQKLDFIALLETCKSDFLNACLKNICGGKDFLWHWTRPKGRSGGILLGVNLEFFDVSSIDEGDFYVKFHVRNKENAFQWILVAVYRAAQEEYKEAFLTELVRSCRKESLPILIGGDFNIIRNPSEKNNDKYSDKWPFLFNAVIDSLDLRELELTGRKFTWANALQNQTFEKLDRVLMSMDWEVKFLLATVRALNRELSDHTPLLLDAGSGTHANKQPLFIECLVLDV

SEQ ID NO: 133991 - protein, 135 aa, Oryza sativa
  Clone ID: PAT_MRT4530_35808C.1.pep
MVCIYAIESYRTPICMELAQSILLLIIDHQLLHPHHVVHIELNIVHIFLIKRITLTREYNHQKENHTKNSLLLPVQSTDTDGSGERSHQRTYMLHERVTGRWLRMHMIEIQVRIFNFIAKFSIAIIGTVEHKLYG

SEQ ID NO: 133992 - protein, 66 aa, Oryza sativa
  Clone ID: PAT_MRT4530_35809C.1.pep
RRNTTITLIHKNARASSLIKFLATCHDMILSSLRDQLKIDSWAAPARMTIPSELKSFGPPGSRSQG

SEQ ID NO: 133993 - protein, 148 aa, Oryza sativa
  Clone ID: PAT_MRT4530_3580C.1.pep
MVVDSTRMQLVMAKATRNRPETTAAAWICSAVVAAARMRHAAATAAPMQFVVAMATRIWSAAVAASRMRPVAGADAQMRPAAVAAAPMLPAATAAAAMLPAAAAVWMWPAAATAAPLLPATATAAPMQAATVSVVWMCLAMAAWMRLG

SEQ ID NO: 133994 - protein, 86 aa, Oryza sativa
  unsure (1)..(86): unsure at all Xaa locations
  Clone ID: PAT_MRT4530_35810C.1.pep
RVLLVMFYALDPEKELXMARQVVLYKKSLRQYSNIKTKDYLSGFEETFATGTXVIDTVKMSQLHCCRSGVGSVKYSFLITKCSTEF

SEQ ID NO: 133995 - protein, 83 aa, Oryza sativa
  unsure (1)..(83): unsure at all Xaa locations
  Clone ID: PAT_MRT4530_35811C.1.pep
IHVLCHDNVPFFMQTNCWPVVVRPSIRASRKRAGISACTHSASFXNQCIIMCIIPEGHMPITSRGNTACXFIHFAAFSTFFLI

SEQ ID NO: 133996 - protein, 152 aa, Oryza sativa
  Clone ID: PAT_MRT4530_35812C.1.pep
CFPGTRTQWCGAFSHISDSIMTVFLSDRVKRFNANAAAGIDIDLKKLEEFADDKFHSTGLSELRKETTFRDCLVEIRQLTDLLLSNQPENFMNPVIREKNFGSLDHKKVSIICDKFRDAPESLFGSLSGRSTVQSARKKSLDVLKRRLKDFS

SEQ ID NO: 133997 - protein, 153 aa, Oryza sativa
  Clone ID: PAT_MRT4530_35813C.1.pep
APLSLLHALILSPSHTPPPISFDKAPPVLPPPRPSRSHAAVPPPRRSPAPAHLTTTSIPWSPTLRHLLRAGLPPPPTSQLRPLRGGGLHRRLPFLRAQRQSAIDEASGFWIRLPPSVTWRVASPRWSSLRQIARRRTDPIPLFICPVVKVWIS

SEQ ID NO: 133998 - protein, 112 aa, Oryza sativa
  Clone ID: PAT_MRT4530_35814C.1.pep
MPPREVPVRPRAGRHRAHGEAPADDRGGPGDEDRGGHRHPERAGEEQERAEDDKRDEGDGERDAREDKERREGDSQGEETDEPRGVVRVMLDAPAEREVRVRLAAQRPGRTG

SEQ ID NO: 133999 - protein, 509 aa, Oryza sativa
  Clone ID: PAT_MRT4530_35815C.1.pep
MPAPIAPPLCPLALSASPTATTGSGAAPESGGGGRSGIRRGSAATEGHTGAQQGRALGAMDAKKGSGEPEFFSEYGDASRYEVTEVVGKGSYGVVAAAVDTHTGGRVAIKKINDVFEHISDATRILREIKLLRLLRHPDIVEIKHIMLPPSRREFRDIYIIFELMESDLHQVIKANDDLTPEHHQFFLYQLLRGMKTIHAASVFHRDLKPKNILANADCKVKICDFGLARVSFDDTPSAIFWTDYVATRWYRAPELCGSFFSKYTPAIDIWSVGCIFAEMLMGKPLFPGKNVIRNEKARRYLGNMRKKPRVPFSQKFPGADPMALHLLERLLAFDPKDRPTAAELCVKALTDPYFTGLANSEREPIAQPISKLEFEFERRKLAKDDVRELIYREILEYHPQMMQKYLRGGDQSNFLYPRERVVRNGDEPDPTADYCIKLHVGEQPGHSSVTDGLNKPLLSARNFLKSESIGASQCVVIKEKREKDEESMSEYMNEAADGVPHKIAQLKT

SEQ ID NO: 134000 - protein, 313 aa, Oryza sativa
  Clone ID: PAT_MRT4530_35816C.1.pep
MVVKSENITSPTGREIDGKYLDATEKVCRLLRQEYPTIVWQPCVAHTINLILKEVGKMPDHDMVIQSARKICRWLYNHSKLHAMVTTTIGGELVKWNATRFGTNYMFLQSFLRKRDQFMKCMASSSFMQSEFSGTAEAAALNPRMHYAYIASATVFQDLRQAFERMTNIEMVAATLLEVEMYRYNATIKSPNAFDVFKIKMTCYSAFAAQWRSMFTSGMPNLKKLVLRLIDQCCSSSGCEWNWSTLASIHTMIRNKLTHNKLNKLVYVNYNLRLQIQQTNTQVRKDDDDPLQRPADLSFYDTNNQISYTVKEC

SEQ ID NO: 134001 - protein, 84 aa, Oryza sativa
  Clone ID: PAT_MRT4530_35817C.1.pep
MKPGIYLGGTDVPTPGGSTPAPARDECLEALINPTGRGEAGSGRPCPRGRNGSGPTPRGDKRRGGLVTLGPDPGHVGDCGYPNL

SEQ ID NO: 134002 - protein, 87 aa, Oryza sativa
  Clone ID: PAT_MRT4530_35818C.1.pep
MARQMTERGAPHRETAQAPLCRKLHVCPSSYNDFLAMVAMKPGIYLGGTNVPTPGASTPAPARDECLEALINPTGRGEACVRPPVAT

SEQ ID NO: 134003 - protein, 360 aa, Oryza sativa
  unsure (1)..(360): unsure at all Xaa locations
  Clone ID: PAT_MRT4530_35819C.1.pep
MSAYCGKYKDELIKNAAYIGTPGKGILAADESTGTIGKRFASINVENVEDNRRAFRELLFCTPGALQYISGVILFDETLYQKTKDGKPFVDVLKEXAGALPGIKVDKGTIEVAGTDKETTTQGHDDLGKQCAKYYEAGARFAKWRAVLKIGPNQPSQLAIDLNAQGLACYAIICQENGLVPIVEPEILVDGPHDIDRCAYVSEVVLAACYKALNEHHVLLEGTLLKPNMVTPGSDAKKVAPEVIAEYTVRTLQRTVPPAVPAIVFLFGGQSEEEATLNLNAMNKLSAKKXPWSLSFSFGRALQQSTLKAWAGKTENVEKARAAFLVRCKANSEATLGTYKGDAVLGEGAAESLHVKDYKY

SEQ ID NO: 134004 - protein, 52 aa, Oryza sativa
  Clone ID: PAT_MRT4530_3581C.1.pep
QLLTITRPAVFNYSKIFRVKKQLNTAHGIKCKCLILELTPMCSWDLGWKRPD

SEQ ID NO: 134005 - protein, 37 aa, Oryza sativa
  Clone ID: PAT_MRT4530_35820C.1.pep
RVDRGPLCGHGSRDALVGRVTTNWCDGPGQHRYTSWG

SEQ ID NO: 134006 - protein, 465 aa, Oryza sativa
  Clone ID: PAT_MRT4530_35821C.1.pep
MGMLLLSRLMPTRRPRRRRPHKSRRSGLIAKSAKRKRSHCQQDDDDSQGGKRMRNSVPTLPEDIWCHIHSLMPMRDAARVACVSRAFLSSWRCHPNLTFNERTLGLDEYVFETDFISKVDHILEKHSGIGVKTFNLQVPYELDVCDHVDHWLQFAITPRIEELNLMLYGTVQEYNFPCSLLSDGIANYIRFLDLGHCAFRPTVELGSWRSLKRLCLSFVHITGDELGCVLSNLFALEWLELIYCDKIASLKIPCTLQQLSYLKVSECSRMRVIESKAPKVSNFYFTGYKVVNTPMLTTKFLYLKYLSISLSGLTVSPSYDYFSLVSFLDASPFLETFFLAISKEQMKRESKFRDSSHMRQIQEHRHEHLKSVTIIGFCSAKSLVELTCHILENAVSLECLTLNTTLGFASRSEHSPGTCFPMGKAVLMGVPKALSAIQTYIVGKVPSTVRLNVMEPCNLCNGIGH

SEQ ID NO: 134007 - protein, 56 aa, Oryza sativa
  Clone ID: PAT_MRT4530_35822C.1.pep
NSKSLRGGRRPPARLVHLPRERAPAHALGRYAHGAPAAAAASRTARYAYRRRSLRA

SEQ ID NO: 134008 - protein, 71 aa, Oryza sativa
  Clone ID: PAT_MRT4530_35823C.1.pep
GKNAAVGGQRRQGQNGGGRLRARVVIGPPFRGAQVFKSLIGFGAFGHFCYGGGMGIRGFKGLKILGLWLKR

SEQ ID NO: 134009 - protein, 42 aa, Oryza sativa
  Clone ID: PAT_MRT4530_35824C.1.pep
FGLHHVIKGAQSLMKKKAAGKKNPGNGGPPGGLFKMAQGFIK

SEQ ID NO: 134010 - protein, 79 aa, Oryza sativa
  Clone ID: PAT_MRT4530_35825C.1.pep
MGKVAGPEKLTGSSYRPYPHLASPPPNAAGENRASPEMTTDLVFSSPPLLPRRGCGARWDSVEEFDDTEGELNGAEKER

SEQ ID NO: 134011 - protein, 100 aa, Oryza sativa
  Clone ID: PAT_MRT4530_35826C.1.pep
HPRHRFKIHPINIGAQTHEIVTVTTQEAMDMARRLAREEGLLVGISSGANAAAILKVAAREENKGKMIVTMFSSGGERYLNSELFAQVKEECININKAFC

SEQ ID NO: 134012 - protein, 376 aa, Oryza sativa
  Clone ID: PAT_MRT4530_35827C.1.pep
MAATSARSVAWQWLAVAAAVAAASLIGGTPAEARRGGKESIGFYELRRGEFSVVVTNWGATILTVNLPDKNGHIDDVVLGYKDIGSYVNDTTYFGALVGRVANRIAGGRFTVKGHAFHTYKNDGKNTLHGGHRGFNQVFWSVRERATGHFPYITFYYRSYDGEQGFPGALDVLVTYKIDGDYSFSVTMYARPVDDGKPTPVNLAQHTYWNLRGHGNGTILDHSVQIFASAVTPVGAGLIPTGAVSPVSGTPFDFRAPAPPGARIADVPGGGYDINYVLDGEADGQGVRKAAVVSEPTSGRVLELWSDQPGLQFYTGNFLKGDEGKGGARYVKHGGLCLETQDYPDAVHNAKFPTEIYRKGQEYKHYMLYKFSLAKK

SEQ ID NO: 134013 - protein, 578 aa, Oryza sativa
  unsure (1)..(578): unsure at all Xaa locations
  Clone ID: PAT_MRT4530_35828C.1.pep
SASAAAACRRPSSPSPATTSPAAAAPLKTTTKTTTAAEADATAASTRRGSRGGGGSTGDXGGGGGGGGGRKNAILGDAADVKTAAGFAERYRLGAELGRGEFGVTRRCSDAATGEALACKTIRRKRLRRCRGDAEDVRREVEILRRISALGAGADSVVRLRDACEDSDGVHLVMELCEGGELFDRIFARGHYTERAAAKLARTIVGVVQLCHENGVMHRDLKPENFLFANKSEDSPLKAIDFGLSVFFKPGERFTQVVGSTYYMAPEVLNRSYGPEADVWSAGVILYILLCGVPPFWGDNDEKTVTAILQGGINFQREPWPKVSPHAKDLVSKMLDPDPSTRLTAKEVLLRLFLLLQKTEHPWLKNADRAPNVSLGEIVRSRLMQFSAMNKFKKKALGHLPMKVVAKNLPVEEMDKYTQMFHKMDKDNSGNLTLEDLKLGLQINGHPVPETEIEMLLEAGDIDGNGTLDCEEFVTVLLHIKKMSNEEYLPKAFKFFDKDGNGFIEMEELMDALGDELGPTEQVVKDIIRDIDTDKDGRISYQEFESMMISGSDWRNASRRYSKANFSSLSRKLCKGNS

SEQ ID NO: 134014 - protein, 71 aa, Oryza sativa
  Clone ID: PAT_MRT4530_35829C.1.pep
DWIPKTLPRMKFGFYIQTQGVHAGGKIFLFFYLGRPGGTPALKICGGGGPGQEETKTPWGPYHQWAESQGG

SEQ ID NO: 134015 - protein, 82 aa, Oryza sativa
  Clone ID: PAT_MRT4530_3582C.1.pep
MEAEGDDEEEGMSIQLRACQRSIEDALVSEDQRRRTDLAITTYLLAVGFDKVKDSGVESPRFSPEYPTLAAVKKFVRPPLLC

SEQ ID NO: 134016 - protein, 121 aa, Oryza sativa
  Clone ID: PAT_MRT4530_35830C.1.pep
PRHTPSGTYRGRQEGSSTISDLAEYGFKEEDYLVVDYELMNKEQHRLRPTGCRAITCKIRGPNLYKNPCLHLFYLNLAYTLVPMIPIPSKYRSRDIKRRQLAEVLHHEQNPSRHSPPRAKP

SEQ ID NO: 134017 - protein, 142 aa, Oryza sativa
  Clone ID: PAT_MRT4530_35831C.1.pep
INPPSSKGHRFILVATDYLTKWVEAIPLKKVDLGYAIQFVKEHIIYRFGISQTITTDQGSIFVSNEFVQFADSMGIKLLNSSSYYAQANGQAEASNKSLIKLIKRKTSDYPWQWHTRLTEALWSYRMACHGSIQVPPYKLAC

SEQ ID NO: 134018 - protein, 280 aa, Oryza sativa
  Clone ID: PAT_MRT4530_35832C.1.pep
MYRRASASPTQVLVAHLSAKRSALERLDVYRLRLPKAEEDLHHKEDKRRVVPDALKKASAENKSLVGENKSLCTDLEGVNNRAAERERQLAMAEEKVKSLEARLGPAEAAAEALAPTTESAKQACYTLRLALNYLGAHVEGALGEDGSAFDFSEWTQDAAGSVVEAAGAYGDCCARVAVGFMLSILHEHGCYHVEDFPQTVKKDWPESSQSVTFALKAFRKNFWESGGKDGAKTRLREQLEKIARAEDATAANTGEDPEPSGPAVGREGQGTESRHHPEV

SEQ ID NO: 134019 - protein, 46 aa, Oryza sativa
  Clone ID: PAT_MRT4530_35833C.1.pep
HQPKMGWFGPAHGSVEPPSPPLRLGFGVDVLDCIPMTVGGHFGHFP

SEQ ID NO: 134020 - protein, 115 aa, Oryza sativa
  Clone ID: PAT_MRT4530_35834C.1.pep
GDLSLGMLLSEANIRAFLAGINLVEAKKGGLNLALMVPLHLGNEQKGVGPPPKFPGPITGIGGFPCCPKLAVKLFGGPPPLGLLGLEVFVFLTKGLHGAFLFRNGVLQLGVFAGG

SEQ ID NO: 134021 - protein, 78 aa, Oryza sativa
  Clone ID: PAT_MRT4530_35835C.1.pep
SVTSSPITKSQSPPVARGPAENKNIVDKQRLEEEKKRWGVSTLLCGVCIPSTNQTVYYLFASLFLIYVDSMLFINQHF

SEQ ID NO: 134022 - protein, 469 aa, Oryza sativa
  Clone ID: PAT_MRT4530_35836C.1.pep
MGDLGGGGETKDVIDVEAVVVGAGIAGLATALALRRAGFAARDGGGGGGVVVLERHAELRATGAALTVFPNGWFALRALGIAHKLTPRYQPYETSVVTNLESGATQVFRFGGHKSRSGEVRVRPVHRRELLEAMAEELPPGTIRFSSRLASIGTEPAGGGGGGEELAVVGLDDGTVIRSRVLVGCDGVHSAVARWLGMAEPASSGRSCVRGLAVYPGGHGVRKELRQFLSHGLRAGMVPISDTDIYWFVVNNTVPAGKPAQMPRIKICSNLMIKREAAGDPEKILREVTDNLGRHLPEEFLDVARHSDPDNLTWAPLLYRAPWAILTGRAARGPVTVAGDAFHPMTPDMAQGGCAALEDAIVLARALSSRSPSPSPADGVAAYVAERRGRAAWIVAGAYLSGYVQQGSTSAPGVRAAAVKLFRDWIFYRFVFPLLADTMWFDCGDLVAPPPRDGGGEEEAADCKKSHVH

SEQ ID NO: 134023 - protein, 49 aa, Oryza sativa
  Clone ID: PAT_MRT4530_35837C.1.pep
CNNNWFPWFSLIYVRSVIPLKKKTPQKNKGGAGQLRDAIALTLRRAVHA

SEQ ID NO: 134024 - protein, 76 aa, Oryza sativa
  Clone ID: PAT_MRT4530_35838C.1.pep
TWLKYYPRVKTFSPSETSSSSTRVVYLRSYRLLGTASQQFLAPPSGGLWCVCPASTTECPSSASEHNGWLPDLLEP

SEQ ID NO: 134025 - protein, 97 aa, Oryza sativa
  Clone ID: PAT_MRT4530_35839C.1.pep
IFSNPKEWEFSLSYWLSFSPLGPIDRDKIRANWLLRGGAPHTNKISDFISLVKAVINLKKRSLLQTRWNKLKNQILKFTLLIKIHNPRTWLAGYAPP

SEQ ID NO: 134026 - protein, 325 aa, Oryza sativa
  Clone ID: PAT_MRT4530_3583C.1.pep
STPAPSADRGTRRSPRSAASASGRRRTRPACCTPPPPPPTMPSASTRRRPPAPTSACPSSTRRRPAASSVRRTGGCSQATGTPTLTSSTRSPAPAPRSRRPRRSGASGAGGSSSPPATAAAGASRTTSTSAGGRAAPPTSGRSWRGGRGGGCTAGWRCRRALPPPPAASSCSCTCRSGSCPSPGRATSAGRRSSTAASGPATAPPSSTPSTTPATAYSTCCRTPAPAATPWCTPSTSPRRRRRRPPRWPRCSCSRRRRVRATTTSRRPCAGTSPSRRSTRSTSPAASNSSSWSGGGAGRGATTTRARRRCTSSCSGLSTSTSTSR

SEQ ID NO: 134027 - protein, 584 aa, Oryza sativa
  Clone ID: PAT_MRT4530_35840C.1.pep
MGTLPVTMPPPQSPELRSLRSTLDQRGELRAPLLSFDWGFPGGIARWEGEEGRLRRAAGAARAAATEMWAFARKDPRKPVFAAKVATALALITLLVFLREPTDLANHAVWAILTVVVVFEFSIGATLSKGLNRGLGTLTAGGFALAVSELSSSMGNFGNVILIICTFVVAFGATLTKLHPKMKPYEYGFRVFLLTFCYVTVSGYNTGKFIATAISRFLLIAIGAAVSLALNIGIHPIWAGEDLHNLVAKNFDGVAKSLEGCVDGYLKCMEYERVPSTILTYQASDDDHLYSGCRAAVESSAQEEALLGFAIWEPPHGPYKMMKYPWMNYTKVGGALRHCSFSVMALHGCILSEIQAPPESRQVFSAELHRVGQEGAKVLRELGHRVKTMTRLSSQNILSEVHFAAEQLQKKIDQKSYLLVNTEKWQALIRRHGGGAKDGGLVPGRRAIASPGAVHKSSSFASSTSHSSLNSAPRTDASYKPQPPWPIRQPSFHPSLPFEAAAAEARTYESASALSLATFASLLIEFVARLRSLVDAFEELSESANFKEDPVEEPSAISRENGGVLYRLRRFFGLEELRQRAGEP

SEQ ID NO: 134028 - protein, 419 aa, Oryza sativa
  Clone ID: PAT_MRT4530_35841C.1.pep
MASYCYYGNTSNPNPNPNPSPAPSAPPLYPTLSMADLAPVQIGPSSPSSPRSPASPATPVDAYANAPPPSEDVLLRIPGAQLHLIDRHRSYPLAAGDLSLLRIRSGDTSLAAIALLHPIQWPLARDVASVKLDPCHYSFSLTVPPSADDPNPGPLHYGLTLSHPDPRLDGILATYTSFSVQSVVGGEALASKVRDEVEAAAYWTAVAPNVEEYGGKVANAIATGAGHLAKGILWCSELTVDRLRWGNEVLKRRMQPGDADAEVSPEMLRRIKRVKMVTKMSEKVATGILSGVVKVTGYFTNSIANSKAGKKFFNLLPGEIVLASLDGFGKICDAVEVAGTNVLSTSSTVTTGLVSHKYGEKAAAATNEGMDAAGHAIGTAWAVFKIRQALNPKSVLKPTSLAKSTIKAAAADYRAKQKK

SEQ ID NO: 134029 - protein, 150 aa, Oryza sativa
  Clone ID: PAT_MRT4530_35842C.1.pep
MGKTWALISHLHAFAGPTLTLIYPLYASICAMESTSKVDDEQWLVYWILYSLITLMEMALHKVLYWIPLWYEAKVLFVAWLVLPQFRGASFIYDKFVREQLKKDRVKLHEHHAVGGGAADEHQSHVVVHARTPRPWPWHADEHQSHVVRG

SEQ ID NO: 134030 - protein, 111 aa, Oryza sativa
  Clone ID: PAT_MRT4530_35843C.1.pep
MATLLSDAKRVRVLAESLLLGPPGVFPTRTPNLVSTVGFEVHPWASTVWRIMDGVNGATQARVEFRVQTSQVHFTRSVQEKQRTVEKQRNRVPTPPSGIKTSGVVEDESQE

SEQ ID NO: 134031 - protein, 65 aa, Oryza sativa
  Clone ID: PAT_MRT4530_35844C.1.pep
MDEQVDDIRPMHRDLASWMWACGARRIVQSDSIEKSNWIASYGGYEWQVLRLAACVDPAGERHTP

SEQ ID NO: 134032 - protein, 318 aa, Oryza sativa
  Clone ID: PAT_MRT4530_35845C.1.pep
MATQWVLVVVAVMAVLFAGGAAGGQLSTRYYDGKCPNVQSIVRAGMAQAVAAEPRMGASILRMFFHDCFVNGCDASILLDDTANFTGEKNAGPNANSVRGYEVIDAIKTQVEASCNATVSCADILALAARDAVNLLGGPTWTVQLGRRDALTASQSAANGNLPGPGSDLATLVTMFGNKGLSPRDMTALSGAHTLGQARCATFRSRIFGDGNVDAAFAALRQQACPQSGGDTTLAPIDVQTPDAFDNAYYANLVKKQGLFHSDQELFNGGSQDALVRKYAGNAGMFAADFAKAMVRMGALLPAAGTPTEVRLNCRKVN

SEQ ID NO: 134033 - protein, 82 aa, Oryza sativa
  Clone ID: PAT_MRT4530_35846C.1.pep
GALAILGPPGAVLLAGDGCAGSLGVGCGGLGVAYVEESRGSLRELLFCRRGVLRGLYGGILLGETLWQTSRDGMTFAGVLRE

SEQ ID NO: 134034 - protein, 64 aa, Oryza sativa
  Clone ID: PAT_MRT4530_35847C.1.pep
SKSLNHLYAYHFLVSENMIASRAVFSINVPSICFLLIFQHLQSLVPNVFISSQLGALAPLYSLF

SEQ ID NO: 134035 - protein, 117 aa, Oryza sativa
  Clone ID: PAT_MRT4530_35848C.1.pep
MGRLAPMQLLVLCLISVTTCAAAHGLRRGLDQQGMRGRILADATAAPPGGAVVPLHWSGAHYVANFTIGTPPQAVSGIVDLSGELVWTQCAACRSSGCFKQELPVFDPSASNTYRAE

SEQ ID NO: 134036 - protein, 195 aa, Oryza sativa
  Clone ID: PAT_MRT4530_35849C.1.pep
MRRHYAVLLRRAASLPSLPLVASLHAAALRRGAVLAPSLIHAYSACGDLASARNLFDELPPRDRTLSARTALASAMSAHGRCREVLDLFAGLAEEEMDDKAVTAVLAACARAGMVDEGRRVFATVRRRPALQHYTCMVEMLGRAGEVEEAERLVARMGARPDRVICAVLLAACRVHGRVDVAGRVHGLMRRYGIA

SEQ ID NO: 134037 - protein, 150 aa, Oryza sativa
  unsure (1)..(150): unsure at all Xaa locations
  Clone ID: PAT_MRT4530_3584C.1.pep
METTRTTRIVSILVSLVLLGQGGIYGYKYKPPXEERGHTNKPQDXTDQYKPTHAKTSRRISISEISLDKPNMMSVEANKRDLVLSLISPSADSRRKTTLLSTTSWLSMPPSRRQLDKLFQLLYCLTYTLVPMIPYYAKYRSHDLKRRHSI

SEQ ID NO: 134038 - protein, 53 aa, Oryza sativa
  Clone ID: PAT_MRT4530_35850C.1.pep
KLAVFVRGERRLAVPGHGGYRHYFKFVVYVQRDPSHYMESRWRDVKVYTKIVD

SEQ ID NO: 134039 - protein, 154 aa, Oryza sativa
  unsure (1)..(154): unsure at all Xaa locations
  Clone ID: PAT_MRT4530_35851C.1.pep
KAELRILRDMAEVYTLAVXKIFAEEVMQSLNCDIFYCGDVDAENKDIENFLKIRGDPDLDSSPSPQVAKGNQIMASKPKGIELKRKEICGSARPIGGLEKSSQNGKKKKNDDSPAEVVELQPVTEMQPQPYATVLGNLEVPNDQAFLHVSQSAF

SEQ ID NO: 134040 - protein, 206 aa, Oryza sativa
  unsure (1)..(206): unsure at all Xaa locations
  Clone ID: PAT_MRT4530_35852C.1.pep
HASAVSWGSFGIYGEEAYDFYNAYAGEKGFNIRRSSYXHVGNTKIIKNKTFCCSYQGTRGIDKRAEAAGYGDSFSKPETQCKCQACMKISLIDGLYSVYHFVPEHSHNLATKSQAHQLRSQRKINEAQVASVEVAKSVGISTKEAIDLMAKQACGFENLGFTSVDMKNKLYSKRSLQTKQGDAGRVLEYMEKKASEDGRSKNNFDK

SEQ ID NO: 134041 - protein, 798 aa, Oryza sativa
  unsure (1)..(798): unsure at all Xaa locations
  Clone ID: PAT_MRT4530_35853C.1.pep
MERGAERGGERGAAGVGGDVNRGGGGVMVEIGGGLAARERERREIRAGEAWAGMGEGVRLRGARSFGAQRRLASRATGGGASNGNFSTTQNRLAPQDRGVDDSSLLDINVKDQGKNGTSDATKSMEDKVPKVGMKFNSEQEAYDLYNAYAGEKGTRGIDKRAEAAGYGDSFSRPETRCKCQACMKISLIDGLYSVYHFMPEHSHNLATKSQAHQLRSQRKINEAQVASVEVAKSVGISTKAAIDLMAKQACGFENLGFTRVDMKNKLYSKRSLQTKQGDTGGVLEYMEKKASEDVKFFYSIQVDEDDLITNIFWADSKMVSDYEDFCDVVCFDTTYRKLDDGRPFGLLVGVNNHKKTTVFGATLLYDETANSFVWLFNTFLNVMSGKKPKTIFTDEDAAMAKAIKIVFKGTHHRICVWHMNQNACKHLAGCVKDYKKFNADFQNCIYDQEEEEEFIHAWNQLLDKYELQQNTWLRRLFDKRHQWALVYGRNTFSADMSTTQRNESLNNELKGYISVKYDMLTFFEHFDRYEEVREMRXDFKATQSTLKLKAELRILRDVAEVYTPAVYKRFEEEVMQTLNCDIFYCGDVDAEKVYKIKLQEVRIRRHPVLSCTEKYLTSTISNQSRNTCRAAKSEETYSMSTNCAEKLAEDIENFLKIRGDPDLDSSPSPQVAKENQMASKPKGIKLKRKEIRGSARPIGGLEKSSQKRKKKKNEDSPAEVLELQPVTEMQPQPYATVLGNLEVPNDQAFLHVSRYYAALDASTSNPTHVLMTPENQGLHQQGRSIQQFDTDLYNLFN

SEQ ID NO: 134042 - protein, 120 aa, Oryza sativa
  Clone ID: PAT_MRT4530_35854C.1.pep
MAKTSRARLDPRPVLREVAPHRGFPRRAPLSADRCPLGAPTPAAGIAASGEVVGTSSSSVGLPHPPTPHGIAVRLVLLLRCVQRFNKGLSATAHREQDDKTFASWVRMNYTEMFRTSYAC

SEQ ID NO: 134043 - protein, 174 aa, Oryza sativa
  Clone ID: PAT_MRT4530_35855C.1.pep
MARGSTPLDDSVLPPSRIVSERQVGLPRKSMPTLPRREAVILGAARPALCYPGKSVFFLSFAMAGLILPFSSFYDVLDFYGIQMAHHTPNTMMILAIFAHLCEMFIGPLPLPHAHTLHRYINCMLRKKWDDRKNDWFYTALPDHAHLRLPTAPPAVIRNSAVRGGFSKYQEGIG

SEQ ID NO: 134044 - protein, 455 aa, Oryza sativa
  Clone ID: PAT_MRT4530_35856C.1.pep
MANPRPPYVLLERVVFFGGRELPDGTWKDAAGIVIGWSRARLLSRREAMEAMEPHPFLADPPQVSSLRMMSPTPAHAQQLGSIRDGDIASTHKGIVVIYAGFYRPGCSDDLGGCYLLYDAPTNALTAIPPLPDSPRFPTLLHLGRTAVLVDASRSADDYILADIVTNSGLGLPEATIFAWSSLTMKKSGGEWVKSSIPRLPLPAHLCGPKHLFQIDLAFSLDSGRICWVDLLQGILFCDRILAPDGPKLGFIPLPTGYCIDVHHRLRHQMMPLARRSMACVSGAVKFVALVGLEDIHCPPNEVMLKTWVLSPDFKEWKEDSRSLSVEEMWASESFKQMGLPCVVPVSPVLSLTQDGVMYTILNVIEQVPAQVDEFGIVVVDDDLVPIANYMIRFDIRRNKVLSSTKISQHGELQWLIPNLIATDFTAYLQDHQRAEEAGKVGASAKGKRKQMEYY

SEQ ID NO: 134045 - protein, 186 aa, Oryza sativa
  unsure (1)..(186): unsure at all Xaa locations
  Clone ID: PAT_MRT4530_35857C.1.pep
MLRRPMADGDRRWELDLETAXEGAARPVXGXPLPLGLXRGPXVTRTXXLXFLXRFMASPHVXXYXAXGAGLSVHHAXLVXXAXXLSXXXLXXLXVXXXVAVVXXXLSXLXXVSXSXDIQRVPAXXVMSXXVGXXSXXXPPXXXXXXXAXQSXKRGNXGKVHIXTXLXXXXXXXXXLLAXDYKRVGF

SEQ ID NO: 134046 - protein, 128 aa, Oryza sativa
  Clone ID: PAT_MRT4530_35858C.1.pep
MALLLRSPLLLEVSAASWLPLFLRRLSSSSRPTAEESRAEGEEREGAAHPLRLRCRRRPSPPPAPPSTPPPASPPTPLSSTESGRRGEGRGSNAAGGSRRRRVRGGPHKVPPAKIILPPFKFDRHILA

SEQ ID NO: 134047 - protein, 157 aa, Oryza sativa
  unsure (1)..(157): unsure at all Xaa locations
  Clone ID: PAT_MRT4530_35859C.1.pep
SQXGXMQCTSTGVRRLASQAXPQAMQLNSRGTFHRHSRLQRPGASLTPPFNTHFRQAQAHRQHSTSSLTSTLTQATHAAQHRLRHSIGTSSTSGRRQAGIWQPTLTPIGRLRHSQAQAQASGHQALTFNTPHSQHGSARSWLRLLGLRHLGLGGQHA

SEQ ID NO: 134048 - protein, 140 aa, Oryza sativa
  unsure (1)..(140): unsure at all Xaa locations
  Clone ID: PAT_MRT4530_3585C.1.pep
CPEALKIIFDFAILAIAACIAXAQNEVLGQSYRQHQLHEPVLLQKQALIPYNECAWHXYDISDSPYLQSVADQLRNTQVWQQLTLVAHQSHYQDNNIDHAISHRVQLQQDGDLYSDRNMTQAQALLAINVPSIYGIYPRY

SEQ ID NO: 134049 - protein, 84 aa, Oryza sativa
  Clone ID: PAT_MRT4530_35860C.1.pep
MSSLVDIWTVERERIRVSGAQAFRTTVASKRGCTARSDDGQNKPDGAAVETAAKKQQAAAVGGAPASVIQEDAFLSILIDCFGQ

SEQ ID NO: 134050 - protein, 114 aa, Oryza sativa
  Clone ID: PAT_MRT4530_35861C.1.pep
MVKLVTINKALPGDSPDYYGKFLLVFLTTTDKSGNPRNTAVALHLRVTPKGYRTQGTCVIYLRLRRSKDNNYRISGTEFRAVTTYRLPLTNLWDTQQTKELPSLSGVLVLEHLV

SEQ ID NO: 134051 - protein, 798 aa, Oryza sativa
  Clone ID: PAT_MRT4530_35862C.1.pep
MAGGGRAGTEKGAAAGRGQTAIQSTIQSIKEVVGGHSDADIYAALRECNMDPNETTQKLLNQDPFHEVKRKRDKKRESAGQKTVPDASAQAEHNSQWTKPRTQRVENDQRRAYSHGQASGNTAESHGPNREFRVVRDSRHGVVENRPELGHKGSPNVKVSDRSVPVVQTGRNHPPATTSEGQITQGAKHSYNSDVHQVKRQAQGTAQKYVKPHLKNSQDEQHPPTSDPAHTRPNLKAAEGAVGSVRRHVGVVNVQRQPSGRSSSHLHVQSGGSHVNNQRGNFVPGGPSGRHFMSKNMQSVHRTALDSVHRGRSGGRSFVASSSKYQQGPASNQKVTQPAKEWKPKSTKKSSNIDTDNNNGTDVITTSASNTENSNVLDENALCEKTSQACIHEVEHVIIPEHLRVPEYEQTGLSVQEPVQLVVEDDSLRAGHDEVDVEARSSQLNLSTLTAEISLPPSEDSVEMNGEEVENDDGLGLVQSDTPLAPVDGQNMQSASNLTAFSTYGHEDPNMHPSNEAQLYRLVEPNVHPQVMASPSQGYPSENPEADNAVQVFRIPESNAISSQIVSSSPVAISQQLQHMSQPQQAAQLYPPVHMQHYPNFMPYRHHIYSPVYVPPMAMPNFPTNIPYPSNGNNYLQMPGGGSHLAAGGMKYGVSQYKPVPAGSPSGYGNYTHPAGFTFSSPGVGVIGGAVGVDDVNRIKYKDNNLYAPSPQVETSDIWIQTPREMPTLQCPPYFNLSGQATSGAFVPNPGNASFNATAQSSHAQFPGLYHAQQPSSIKWFSNFDIGPAGVVYFDMKL

SEQ ID NO: 134052 - protein, 103 aa, Oryza sativa
  Clone ID: PAT_MRT4530_35863C.1.pep
FSWNQWLSQPINNKYHQIINQVSFTILQSWSLRPGKRLSDAHVNYHPPSPRKISHSFFQFHLNQGKNSGLREASSNVEPLILPCPKYTITDQPGFQASNLKPL

SEQ ID NO: 134053 - protein, 869 aa, Oryza sativa
  unsure (1)..(869): unsure at all Xaa locations
  Clone ID: PAT_MRT4530_35864C.1.pep
RRRGVRASPPTTHPLLPLPTKTHALARLGRRASFDAISAAITTTTTTTTRSSGVAFGRSRGGGGDGXGGRAGTEKGAAAGRGQTAIQSTIQSIKEVVGGHSDADIYAALRECNMDPNETTQKLLNQDPFHEVKRKRDKKRESAGQKTVPDASAQAEHNSQWTKPRTQRVENDQRRAYSHGQASGPNREFRVVRDSRHGVVENRPELGHKGSPNVKVSDRSMPVVQTGRNHPPATTSEGQITQGAKHSYNSDVHQVKRQAQGTAQKYVKPHLKNSQDEQHPPTCDPAHTRPNLKAAEGAVGSVRRHVGVVNVQRQPSGRSSSHLHVQSGGSHVNNQRGNFVPGGPSGRHFMSKNMQSVHRTALDSVHRGRSGGRSFVASSSKYQLATXEGPASNQKAQPAKEWKPKSTKKSSNIDTDNNNGTDVITTTGLRFGSFFLLDSGADQVSSSESPSESEEQEHVQEPVQLVVEDDSLRAGHDEVDVEARSSQLNLSTLTAEISLPPSEDSVEMNGEEVENDDGLGLVQSDTPLAPVDGQNMQSASNLTAFSTYGHEDPNMHPSNEAQLYRLVEPNVHPQVMASPSQGYPSENPEADNSVQVFRIPQSNVXSSQVLSSSXSISSKNLSSSPVAISPQLHHMPEPQQAAQHYPPVRKQLYSNFLPSPNHIYNSLSNIPYPSNGNNYLQMPGGGSHLAAGGMKYGVSQYKPVPAGSPSGYGNYTHPAGFTFSSPGVGVIGGAVGVDDVNRIKYKDNNLYAPSPQVETSDIWIQTPREMPTLQCPPYFNLSGQATSGAFVPNPGNASFNATAQSSHAQFPGLYHAQQPSSIVSPHPMVHQQVQSAIGPNGGVGVATPAPQVGAYQQPQLDDCHWRPGF

SEQ ID NO: 134054 - protein, 299 aa, Oryza sativa
  unsure (1)..(299): unsure at all Xaa locations
  Clone ID: PAT_MRT4530_35865C.1.pep
PPGPTPPQCPLTPTSHPPPAPAPSPXRPTHQPSPHPRPGPSPASQPPSHRPPPSPPPPPTPPPTHPPPPAATPPTTQPPQPPAPPLTHTPTPPQPXQPPPTYATPDPPPPPAPPPPPPLRAPPPGAPPPPPPPPPGPAAPRPPGTPPPARPTTPATPRSXSWPPPAPTCHPLSPTLLPPPSPSLSPLSLPLPPPQSPXPDMSSPPPQRPAATAAPPSPPPXARHPRPRQPRPPPPADPSXPSSPPRPPRPNAPPXSPTPAPPLPPSTPPRQQNRPPIPLRESNCTGFNSSGSRSIQFSG

SEQ ID NO: 134055 - protein, 272 aa, Oryza sativa
  Clone ID: PAT_MRT4530_35866C.1.pep
MVGWLKALCYGAGGMAVVGLAALVALQERLVYVPVLPGIARAYPITPDRLRLIYEDVWLRAADGVRLHSWYGESDGYPSQKGIINDAQAALDHLVQRKDIDTSRIVVFGRSLGGAVGAVLAKNNPGKVSALILENTFTSILDMAGIMLPFLRWFIGGSSSKGPKLLNCVVRSPWSTLDIIAEVKQPIIFLSGLQDELVPPSHMRLLYEKAFEHNKNCRFVDFPNGMHMDTWNSGGDRYWRTIQLFLDQYAPEVQSCNTSCKSEIANDDEAEE

SEQ ID NO: 134056 - protein, 104 aa, Oryza sativa
  Clone ID: PAT_MRT4530_35867C.1.pep
TAGTQLTNRRLDARAGDASQGTGSHPPRRGRVIFGPGPNFWGQQQTFQTRGGGDYYRGGPNKTKPLVGARRGTTPGGPFIEQGGLLLFQKPPSLKWRDRQIDLI

SEQ ID NO: 134057 - protein, 412 aa, Oryza sativa
  Clone ID: PAT_MRT4530_35868C.1.pep
MAHGELKKKVLPSVTPSSPNPTYVVAQSKKIRECFNCGEMGHLMRDCRAPHKPSYGRGRYGDKGGARGGRGHAGRGNRGRGYEYRGDHKANVVTLEEGSSRPTNVDVANLVHSTSHNSNQAFMSINRSLSNWILDSGVSRHVTAALALLEIIDLLLENLILELSNASLYAIHLARRGISVGVHQNDEPFGHDSQQMEGEILGPKGHKLSKKEKFVVGSIPCPMSSPIAQEQEWSKPYEEENLQVYTSITRSPIIQQVEEDNQVVEDVSHDDSILRSYNFSVLSVLPIYSKLIKAGLRIWLYSGDADGRVPVIGSRYCVEALGLHIKRDWQPWYLNRQVAGRFVEYDGMTMVTIRGAGHLVPLNKPEEGLTLIDTFLLGLKLLVTFVGKASQVSSNYIDKIVLNIQRINKGKF

SEQ ID NO: 134058 - protein, 79 aa, Oryza sativa
  Clone ID: PAT_MRT4530_35869C.1.pep
TPPRAYRCRPPPPPPRPPATGSTTAAAAAAPARASGSGRPPVRRPACRRCCRRRRPCSRAGSASVTAPPPVPGKKETMR

SEQ ID NO: 134059 - protein, 114 aa, Oryza sativa
  unsure (1)..(114): unsure at all Xaa locations
  Clone ID: PAT_MRT4530_3586C.1.pep
KSPPASGERSPPGSPAPTPFLSPARPSWSPPAAMAPPAPAASGSKLPPTAPSRPSXPSYVMIPPCAPPPPRNFLSPPSPRRGRFYFLKVVVFLCAPSEKKMMGVIMNYYVGSQM

SEQ ID NO: 134060 - protein, 45 aa, Oryza sativa
  Clone ID: PAT_MRT4530_35870C.1.pep
TKSKVQLKYKCCVSNSGSYTHVMPEHYLFAHLQNTTHQGLTFRTQ

SEQ ID NO: 134061 - protein, 108 aa, Oryza sativa
  unsure (1)..(108): unsure at all Xaa locations
  Clone ID: PAT_MRT4530_35871C.1.pep
YEVLQLEEDEILAPHTHFCGICGKGFKRDANXRMHMRGHGDEYKXAAALAKPPPPPEGEEQPPQPERRYSCPHAGCKRNRMHASFQPLKTILCVKNHYKRSHCEKRHV

SEQ ID NO: 134062 - protein, 123 aa, Oryza sativa
  Clone ID: PAT_MRT4530_35872C.1.pep
MASLLLLLRAIVIGVDVEVEAARSAARGRRRRRRRGLVRSIRRCPGDAASSPTTMWRKNGGWSHACGGLESIARQLGCKRSDQTYPDKHIFQDNIYSRVLAYRMEICWTFPINVILCEKKKKK

SEQ ID NO: 134063 - protein, 489 aa, Oryza sativa
  Clone ID: PAT_MRT4530_35873C.1.pep
MGGAHFPGEGEVVAGEGDAVVPLRDVGKMEHGCEHYRRRCKIVAPCCGEVFACRHCHNDATASGDRHTICRQDVEKVVCLLCDTEQPVSQVCINCGVNMGEYFCDVCKFYDDDTEKGQFHCYDCGICRVGGKENYFHCAKCGSCYAVALRDNHQCVENSMRQNCPICYEYLFDSLKGTRVLDCGHTMHMECFSEMVEHNKYTCPICSKTALDMTHHWALLDQEIEATIMPPVYRYKICLRFTQPREPAHWEGIQGVRRFAQEGIGCRDFIPFHMIFGLAMGEYCSSSSNQSKVPIILLFSASTIVQSSIVNWFSVHSSSGTILMIMTCMHPFVSAMRLKIEKCLLSFEQIVVLKYHGSFSENITRLGRTKVRSCVAHVKESWVQCWNAITSTVLKCILTQPQARNTMEDNENTKVRAVNADIKDKDIILLSCWMFASCNDCNKVSEVDFHVIGHKCSHCNSYNTRSTSRPADLSGSSSPSTSDSSENNP

SEQ ID NO: 134064 - protein, 34 aa, Oryza sativa
  Clone ID: PAT_MRT4530_35874C.1.pep
VHQLSVLIFIPSSFCFTDWFSLFLNSSIKYHIFL

SEQ ID NO: 134065 - protein, 401 aa, Oryza sativa
  Clone ID: PAT_MRT4530_35875C.1.pep
MINSVMSAIPNYFMSCIKWPDKTIEAVDRLRRAFLWKGDKKVKGGQCLVAWPTVTLNKEQGGLGIGDLRAHNLALLMRIGCRLLSDSSEPCFQWLRTQHMANEIPIKAKPTETPIWKTVCSVIEPIIASTKVTIGNGQLVQFWRDHWTAAGRFNLIYPTLASYATNINCTVSSQHTNGTWTIDLHPVLSSRAQTELQSLMDILLDQHIQQNVPDKRTLLLGSTDITTSANYNLLTYHGILWQPATLIWNKAIPNTCRIFLWLAFRDRLNTNANRVNKKWDSNPHCMSCPAIETANHIILRCKLAGEVWKKLNLYETAVRSSNIQDFVESILDTLPEHQKPGCPACFAACSHGLWKARNQLVFKLTETSVAYILPLWPDGWQLAILNSPYEVHSHAWSKPGA

SEQ ID NO: 134066 - protein, 149 aa, Oryza sativa
  Clone ID: PAT_MRT4530_35876C.1.pep
MAVLVSGDCDIFHGSGCLPPPPTIAMRRTTRTGVATRSGPVARMLGCCDVARGWEAEGREARRRPSGAGHCRAGQARGAEAASGEPSSQRAGCGLWAAGEATPRPRPPTGHSGVRRRRGARRRAQAASGLGSATGDGEARGQAFVVELR

SEQ ID NO: 134067 - protein, 105 aa, Oryza sativa
  Clone ID: PAT_MRT4530_35877C.1.pep
MDDIFNQYGMQLAKCMEVIDNLAARFEARKTQPDTNGMVTKSSYTCEIIRIVLWCALNNCEPNSKVLDPGFGIFKTDRVPYILCADNIIPNTICTAPIKEMELKP

SEQ ID NO: 134068 - protein, 642 aa, Oryza sativa
  Clone ID: PAT_MRT4530_35878C.1.pep
MATYYSSPGNERDSQAMYPADSGNSSYPVPSAIGNMLYPGNGSSGPYTEFSGIIQHQQNFMELPGHPTAISQDSSSREPNMVASYMDQRSFGPAKDMRNEMLMHLMDGAHNAGADLIHNDTHSSAQIEFGLLNNHNSMSVAPAPGQGLSLSLNTHILAPSYPYWSAKTELLTPHSYHGDDNRMKNMQSEASQAIRNSKYLKAAQELLDEVVSVWKSIKQKAQKDQAEAGKSDNKEAEGGSKGEGVSSNPQESTANAAPEISAAEKQELQNKMAKLMAMLDEVDRKYKHYYHQMQIVVSSFDMVAGSGAAKPYTAVALQTISKHFRCLKDAINDQINVIRKKLGEEESSSGKEGKLTRLRYIDQQLRQQRAFQQYGLLQQNAWRPQRGLPENSVSILRAWLFEHFLHPYPKDSEKLMLARQTGLTRSQISNWFINARVRLWKPMIEDMYKEEIGEADLDSNSSSDNVPRSKDKIATSEDKEDLKSSMSQTYQPSQLGESKANIGMMSLGGAPAGFHNEGNQDDSFMNLMLKDQRPGEAEGSLLHDAVAHHSDENARFMAYHLSGLGRYGNSNVSLTLGLQHPDNRLSVQNTHQPGFAGAGEEIYNSTASLGVAAASSSDYESTNQIDQRQRFEPSPLMHDFVA

SEQ ID NO: 134069 - protein, 309 aa, Oryza sativa
  Clone ID: PAT_MRT4530_35879C.1.pep
GPHKSLSALPCPCGGAKGRNGGGGGGQRRRKPASAAAPLSGRRRGRPKGSGRRQILATLGQSGGSFTPHVIIVGTGEDVAGRIMSFSQKGPRSICILSANGTISNVALSQPGSSGSTFTNKSKGRFVAPQLNPPTSLAEKSGEGIMRRCRLPPGAGEGRRVGGRVRSRRRGVPTTRGTSRGSWRSKGSTAWSATRRTGPRGPASARRRPSPAAAASSPGRGPTAPSTPNSSPPRPPSIPTTPTTTRATAPESTRRLPRRSSSARWRSPRSPRPGTASTSSRRRRCSSKSSSSRVSRRAAPAISHFGADV

SEQ ID NO: 134070 - protein, 127 aa, Oryza sativa
  unsure (1)..(127): unsure at all Xaa locations
  Clone ID: PAT_MRT4530_3587C.1.pep
LVRSTNRRGLPYRLSINRLADMSXEEFQASRLTTAHNCSATLAIDHRMLDATAVPETKYWTADGTASPSTDPGDSGPSGTATTDGSIEPSSPHGTGTPVFSSQQKPAVXATAYSNLRCAGCLPSDAY

SEQ ID NO: 134071 - protein, 132 aa, Oryza sativa
  Clone ID: PAT_MRT4530_35880C.1.pep
MSSGKPVSAINLVVSAMSNLGKRKMATGPHRQWRWERRRLRCRTDTGVGDGRDVGGSGVFSRIRSTEEIDRMQKGLGNLSAWHPKHGDAILHHHHHRRTDVTDASFCFVTASAASVHSPQSRLVTPTGTKDG

SEQ ID NO: 134072 - protein, 143 aa, Oryza sativa
  Clone ID: PAT_MRT4530_35881C.1.pep
MKVGALLTSAGINISLCILFLSLYSVLRKQPQNVKVYFGRRIAEENSRLREAFILERFVPSASWILRSLRCTEDELLATAGLDAVVFNRILVFSIRIFSLAAFLCVLGVLPLNYFGQDMLHVRIPSASLETFTIGNMQERSRW

SEQ ID NO: 134073 - protein, 129 aa, Oryza sativa
  Clone ID: PAT_MRT4530_35882C.1.pep
MGFGTFFATLSVAAAGAAAAAGGCELRWEFECEPVAGTAKEALAARLQDGIDGMARRVQEALAGRRGDAAAAAAVAMEAANSGDVNKLGTMSYVEINGMSYLEKSVNISVKFNDGTMVDIALDMYNDRA

SEQ ID NO: 134074 - protein, 89 aa, Oryza sativa
  Clone ID: PAT_MRT4530_35883C.1.pep
KINMLKIKNKLRCSELETKLSTLQRYGKRLSRRGSCPGHHRTPPRAPPSLLCLPSLVSAPSHIGLVITNVYDRGSVFSPEVLDLPEEDL

SEQ ID NO: 134075 - protein, 52 aa, Oryza sativa
  Clone ID: PAT_MRT4530_35884C.1.pep
LTRQYTLQPPLATVTRNPSRSELSVSPDTKTTTTNAGAPVWNDNEALTVGAR

SEQ ID NO: 134076 - protein, 735 aa, Oryza sativa
  Clone ID: PAT_MRT4530_35885C.1.pep
MVIGRNIYRNKGHWRSYYRHVLLLAYQSCGVVYGDLSTSPLYVYKSTFIIGSLRRFQDEEIVFGVFSLVFWTLTLIPLLKYVFIVLAADDNGEGGTFALYSLHGWRHAKKTPILTALRRFLENHRKSRTFLLVTVLFGASLVIGDGVLTPPMSVLSSFSGLQVHSTALTSGEVEILSCTVLVCLFMVQHWGTHRVAFLFAPVVIVWLLLLGALGVYNIVVWNPRVLRALSPYYLVRDRSHVAFVGLIYPCLVLQYMGQAAFLSKSPHCDIHFVFFESIPTGIFWPVLVIATLAAIVGSQAVISATFSIVRQCTALGCFPRVKIVHTSRRIHGQIYSPEINWILMLLCIAVTMGLRDTTLIGNAYGMACAGVMLVTTLLMALVIVFVWQYSCLVAALFLVAFGVVEAVYLSAALMKVPQGGWLPLVLSLVFVAVMYVWHYGTRRKHQFDVQNKVSLRWIHALGPSLGIVRVPGIGIIYSELATGVPAIFSHFVTNLPAFHQVLVFICVKAVPVPHVRDEERHLVGRIGPREFRMYRCVVRHGYKDVLAEDTDFENDLVLRIAEFVQMEADFDQRCSISDDGVVASVEVEGRMAVVPRPSDLARTGLLMREPGEEESVVARAAAAAKPESLIHSMHTMHEAESPGFASRRRVRFEVANQHTDPRVKEELSALVEAKHAGVAYIMGHSYIKARKSSSVFKKFAVNVAYAFLRKNCRGPGLVLNIPHISLIEVGMIYYV

SEQ ID NO: 134077 - protein, 806 aa, Oryza sativa
  Clone ID: PAT_MRT4530_35886C.1.pep
MPVADCESGLSPADVTGAGAANGNPGHWRSYYRHVLLLAYQSCGVVYGDLSTSPLYVYKSTFIIGSLRRFQDEEIVFGVFSLVFWTLTLIPLLKYVFIVLAADDNGEGGTFALYSLLVRHAKFSLMPNQEAADEELTSYYRPGYAPQETPILTALRRFLENHRKSRTFLLVTVLFGASLVIGDGVLTPPMSGERAYRNTTTTWCVVWVADVIDDRSFVLAAGWAVLSSFSGLQVHSTALTSGEVEILSCTVLVCLFMVQHWGTHRVAFLFAPVVIVWLLLLGALGVYNIVVWNPRVLRALSPYYLVRDRSHVAFVGLIYPCLVLQYMGQAAFLSKSPHCDIHFVFFESIPTGIFWPVLVIATLAAIVGSQAVISATFSIVRQCTALGCFPRVKIVHTSRRIHGQIYSPEINWILMLLCIAVTMGLRDTTLIGNAYGMACAGVMLVTTLLMALVIVFVWQYSCLVAALFLVAFGVVEAVYLSAALMKVPQGGWLPLVLSLVFVAVMYVWHYGTRRKHQFDVQNKVSLRWIHALGPSLGIVRVPGIGIIYSELATGVPAIFSHFVTNLPAFHQVLVFICVKAVPVPHVRDEERHLVGRIGPREFRMYRCVVRHGYKDVLAEDTDFENDLVLRIAEFVQMEADFDQRCSISDDGVVASVEVEGRMAVVPRPSDLARTGLLMREPGEEESVVARAAAAAKPESLIHSMHTMHEAESPGFASRRRVRFEVANQHTDPRVKEELSALVEAKHAGVAYIMGHSYIKARKSSSVFKKFAVNVAYAFLRKNCRGPGLVLNIPHISLIEVGMIYYV

SEQ ID NO: 134078 - protein, 61 aa, Oryza sativa
  Clone ID: PAT_MRT4530_35887C.1.pep
SCTLFMECSSQATPEVPSVKVSRVICFSITCLYRPVLNGVVSLYHHGNKSHKFHVSWLALT

SEQ ID NO: 134079 - protein, 41 aa, Oryza sativa
  Clone ID: PAT_MRT4530_35888C.1.pep
PGMYIIYLVRTTYNYCLGICIMLCMLQCIITYLSLASLLFV

SEQ ID NO: 134080 - protein, 74 aa, Oryza sativa
  Clone ID: PAT_MRT4530_35889C.1.pep
MDGPPSHDGSDDVDRGWIRPRWWRSRTDPAAAVPADPSRLPPAVDLTAAAASAATACASDSGPVQQQIRRLLLP

SEQ ID NO: 134081 - protein, 104 aa, Oryza sativa
  Clone ID: PAT_MRT4530_3588C.1.pep
MTDDGGSAYPKAAATGSGYHKGVVAGSVITRPHMSDMPPPPPSLRGYGETATHHGLRLAGREEVSPRGGKPRVDNGGRGQPMKVEAQPSSRTGEGIARAGTRRR

SEQ ID NO: 134082 - protein, 73 aa, Oryza sativa
  Clone ID: PAT_MRT4530_35890C.1.pep
FPPPCLIYLEKSGTFFFHYHTLSGLGGSHVFFGGLDFFLEVTQTPTREWFFFFPSHQAVGLMCHLLSAMGHVN

SEQ ID NO: 134083 - protein, 110 aa, Oryza sativa
  Clone ID: PAT_MRT4530_35891C.1.pep
HLHVLAAAAGSHFSPGCLRLPSSMAAVMLRALGNGAPDVMGERRGRDGERRGDERDGPDDERGDFLVVKYVLPRNPLSCCSMITTAVPPMNPGQPLAAHSNKISLSRRNR

SEQ ID NO: 134084 - protein, 90 aa, Oryza sativa
  Clone ID: PAT_MRT4530_35892C.1.pep
RIAAAPRSRGPSQPRGLTDQIPGPFLGFREEEEETRTGDDDAVAGGLDGLELREVVRHRHRARPSPHAASAPSPTAPCGVPLAPPPPPVR

SEQ ID NO: 134085 - protein, 76 aa, Oryza sativa
  unsure (1)..(76): unsure at all Xaa locations
  Clone ID: PAT_MRT4530_35893C.1.pep
HACGHASRIYRSGADKKATQRISXGGLHFPVGRIARFLKAGKYAERVGAGAPVYLAAVLEYLAGEVLELAGNSCEA

SEQ ID NO: 134086 - protein, 465 aa, Oryza sativa
  Clone ID: PAT_MRT4530_35894C.1.pep
MGCKGSKHALHGGVPAAAAAAAERRMCSSRRSVAVRSAAVSFAAGVGDGVMLVKGGGGGGVGYTSATVGQEKRCRRAPPRTPTKTPLRAPEEINVWELMAGLDYDDEEEEEEEEVVVDGHGGERQVKSAPGSPAFDPDVLAAFRKAVEELPPESPPRDAAAAADDDDNKKGEIQKFPGVVRARIILFQKEIDAKLAKKAPPPPPPESARRVVVYLTSLRGIRQTYEDCCATASILRSYGVRVDERDLSLHAGYKDELRAALGDGAGGGGGVPGQGRPLPQVFVDGCHVGGAEDVRRMHESGELTGTLLKACDTAAAAVAAVGKGGRQLAPPSEPCGGCGGVRFVPCDACSGSCKVFVDDDEDGGAFRRCPECNENGLDVLDFMGSEGHKLDEGTKRRPTSLPSSHPPTFAHAAANTDRFPFNPVIVLCRSALVLPVDHLHVVATTYKLFETSTVIPGEPQRACYR

SEQ ID NO: 134087 - protein, 53 aa, Oryza sativa
  Clone ID: PAT_MRT4530_35895C.1.pep
PQINRSGASCIFRSSKDQKKDLAQARAPRPVSQKPKHRHDAAVLKLVLPRKGW

SEQ ID NO: 134088 - protein, 428 aa, Oryza sativa
  Clone ID: PAT_MRT4530_35896C.1.pep
MEDTEEIVEREVAAWLEEHKDEEEQEQAATENEHAAAEEEEKKRKAIVPRSDVWGSFSKQYEKAFERYSDEDPYYKLDLEGHDGPGVPEKSDWDKARKMAEFLEHFYELTLRVSATSRPTSHTFFHEIAGVVVLLRQWCNSEDLLCAEMALDPRYKLNSYIKMATMVMFGDEIGEQLWTTVGSLSTSKRLMRSIVAQQMSNNGASRSIAKSELDKYFSEDNEEDTKGFDILKYWKDNSTRLPLLSRMARDLLAIPISSVASESAFSAGGRTLDDFRSSLTPTMVERLICANDWLRGCNSISVEENAKDLSKLEEEIWKVGNGCIIGRGFCLHIETSTQKTVKPYMRTDSVGKNAAKFFRRHTPPPSSGLARLRPSPSDRRPPPLPTVVLRAPPTFELAPAAPPRQNRSSYTIGRSTAASRIAAALCRH

SEQ ID NO: 134089 - protein, 792 aa, Oryza sativa
  Clone ID: PAT_MRT4530_35897C.1.pep
MGQRRGGDGRRDGDGSQQRRGARGGRLASRRWNGRAARGREARGDATSVRRGSGDGDGGCYSGYGLRSQNPTGEDDTQGGGGDMEDTEEIVEREVAAWLEEHKDEEEQEQAATENEHAATEEEEKKRKAIVPRSDVWGSFSKVKISNGEERAKCKYCQKLFRCDPRTNGTSSLKNHLKICKKNPNKPVIDNQRTLQITPGSGGSSVGTCSTWKFDIEDLRNSFAEMIIEDEQPFVLSERPGLRKFLAKACPRFTLPSRRTTTRACVKVYDVQRLKLKKFLKENCERVSLTTDTWTANTNQNYMCVTAHFIDNDWKLHKKIIGFFLVKGHRGEDIGKSLDNCLSEWRIDIVLSITVDNASANNNAIKYMKRVLNESKGCIAEGEFLHMRCVAHIINLIVADGLKEINKSICRVRAAIKFVKAGPARLAKFKKCAELAKVQTKAFLTLDVCTMWNSTYHMLNIAQQYEKAFERYSDEDPYYKLDLEGHDGPGVPEKSDWDKARKMAEFLEHFYELTLRVSATSRPTSHTFFHEIAGVVVLLRQWCNSEDLLCAEMGKRMLLKYQKYWGEIGPGVQNLNLIVFFCVALDPRYKLNSYIKMATMVMFGDEIGEQLWTTVVNSFHSLFHEYKEIYTPNEPVAAPNDIQGSLSTSKRLMRSIVAQQMSNNGASRSIAKSELDKYFSEDNEEDTKGFDILKYWKDNSTRLPLLSRMARDLLAIPISSVASESAFSAGGRTLDDFRSSLTPTMVERLICANDWLRGCNSISVEENAKDLSKLEEELVGQDITEDTNATKA

SEQ ID NO: 134090 - protein, 72 aa, Oryza sativa
  Clone ID: PAT_MRT4530_35898C.1.pep
SPSNGRPAPKTSPCTSCPHSMEHLRKCLMCLPTYLPLAFPSPPLLVGVGAGSNGCGGELKPPFGGETQVEHS

SEQ ID NO: 134091 - protein, 48 aa, Oryza sativa
  Clone ID: PAT_MRT4530_35899C.1.pep
ECFTVLHTNSLRLLECHMNELKVMTYYYRCCFINKKLHYSLARCTSPW

SEQ ID NO: 134092 - protein, 428 aa, Oryza sativa
  unsure (1)..(428): unsure at all Xaa locations
  Clone ID: PAT_MRT4530_3589C.1.pep
MRGNHLEAHQPEHDVAHKLYRGPSPFTELNEFGEGCAAAESLLIRALAAHCSAKKFTLVRLDGYRLRLRKAEEDLRDKEDERRVMADALKKANAESKSLSGENKSLCTDLEKSKKNAAEREGRLAVVEEKIRSLEARLSSAETAAKALAPAMESTKQACYTLRLALTDVGACANSAPGEDXAYDFSEWTQDAAGSVVEVAXFPRIVKKDWPENSQSASVALKAFRKGFWECDGWSNAKTRLGEQLERIVKAERAAAAATTDEPKPSGAAADNEGEGNEGQDHPEGVRRKSCVWPPFGDWRNKNEKFVAVKGLPKVRCPFRPVYREMQINGNGYKVLKVAGWMRAHTGRTLEDYDRYHVARREDSTNSWRNFKRSSRQEAITRRCYSLVCACPPSPLRVVYNISSDDKPCSPDCTIGVDECADDDVIFL

SEQ ID NO: 134093 - protein, 56 aa, Oryza sativa
  Clone ID: PAT_MRT4530_358C.1.pep
FILCLQANEALSPVILITHKMHHTSPKIAHPVRLFTRNLITVLHIHKVGIQDLAKT

SEQ ID NO: 134094 - protein, 199 aa, Oryza sativa
  unsure (1)..(199): unsure at all Xaa locations
  Clone ID: PAT_MRT4530_35900C.1.pep
CRSTFHVRGVNRQPASDTQPTVTPRAPPLPESSAASTEDIYLLPPXDSEASGAPRATATNGIRLLLAEILAPALRPPPSRATAAPRVVAAYGTPPSDPPSPCRGLRRGRRGGTESGAAQRGTVGADSGGGGPPSPPILWPPPSPTPICRQKEEDKTAVTVMGGGQRRQRQETGGRWWRLEDEDDGGGWRMRMTSAVAGG

SEQ ID NO: 134095 - protein, 68 aa, Oryza sativa
  unsure (1)..(68): unsure at all Xaa locations
  Clone ID: PAT_MRT4530_35901C.1.pep
GGDNDVGGCDCGWRRRADGRRRQQVEAGKESGARXGWRQXGGWPFGSNGCGGGDHDCGGRRHGGLGRL

SEQ ID NO: 134096 - protein, 79 aa, Oryza sativa
  Clone ID: PAT_MRT4530_35902C.1.pep
ALLVEHAPSPLGHDRDPKPTYTYTYSGKGTFITTPGYIYFGLLEGRYQRFVGTHSTKAATHTGLSYPPNQRAGIPRNHL

SEQ ID NO: 134097 - protein, 449 aa, Oryza sativa
  Clone ID: PAT_MRT4530_35903C.1.pep
MTGALAMMPSTSSPYPLLAPPTCSSRLPPLRCFVGLRWSAPRIQVREYPDAVAGIAKGAGGRGGRFRAPASSISQPCSRTIIITNEHVQNADFPPNYSKREKKPFPIPVLELRRRAKERAKKAEGKPKRSLPPPKNGMLIKRLIPVAYKVYNARILLINNLKRLMKVIPVKGCKHCSEIHVGSVGHPFRTCKGMSSDKRRGQHDWGGTLVEAVFVPVEAYHLEDRLGKRIPHDQRFAVPRIPALVELCIQAGVNLPEYPTKRRRKPIIKIGKNEFVDANEDDLPDPEPYKLEHPILEELNDNEIIAPASPEEIVALAEETLEAWEVVRDGALKLMKGYAVRVCGYCPEVHIGASGHKARNCGAFKHQQRNGQHGWQAAVLDDLIPPRYVWHLPESGEDLQRDLKSFYGQAPAIVEICVQAGAKVPEKYKATMRLDIGIPTSLREAEMVV

SEQ ID NO: 134098 - protein, 98 aa, Oryza sativa
  Clone ID: PAT_MRT4530_35904C.1.pep
HMTNDASNAYLVKSGLKRCTHLDLNSEHDMSKEALTTSVFSQFLYQKGINLCFKFVCCQVQYNLNGSADEFIVKCNTTRTGQQTDSYIGHQPFSPVLF

SEQ ID NO: 134099 - protein, 43 aa, Oryza sativa
  Clone ID: PAT_MRT4530_35905C.1.pep
HMTCVQFLWHIYIHIQVGTPRFYTHSNGGGIEPTTPPTSLILQ

SEQ ID NO: 134100 - protein, 154 aa, Oryza sativa
  Clone ID: PAT_MRT4530_35906C.1.pep
MAALSSAAVTIPSMAPSAPGRRRMRSSLVVRASLGKAAGAAAVAVAASAMLAGGAMAQEVLLGANGGVLVFEPNDFTVKSGETITFKNNAGFPHNVVFDEDAVPSGVDVSKISQEEYLNAPGETFSVTLTVPGTYGFYCEPHAGAGMVGKVTVN

SEQ ID NO: 134101 - protein, 140 aa, Oryza sativa
  unsure (1)..(140): unsure at all Xaa locations
  Clone ID: PAT_MRT4530_35907C.1.pep
MLPLWSTRPPSSPWESTRPPSPSRESTPLPSPTRTISPPPLRPQXATPPPLAAARATPPTSPPGKSMPPTSVTACSGMVLAPTAAGMTGEEDRAARTTGRRKSRHWGSLRRTRRPRRRPAAAAPTSSSFSCVASSSSFPC

SEQ ID NO: 134102 - protein, 357 aa, Oryza sativa
  Clone ID: PAT_MRT4530_35908C.1.pep
RLSFLGVFGCFGLQMLESKAPNLCSFHFEGKQAQFSLEEPVRLKNLEVVFPNSVCYARVELPFSMPDIETLNVILSCEMVDTPTGPGKFLHLRYLRITFATWRFSWAYDYFSLASFLDASPSLETFILCISQKEKHDLTFKDPICLRQIPEHRHDKLKNVKITGFSATRSLAELICHIMENTTSLECLTLDTLCTQLRCSDGNIDVCLPLDQDVIKGVHNSLLAIRTYIEGKIPSTVKFNVREPCSRCHGWSVPPLIYLELLITDLCNLRKAENRWYFTCLPLAWLRFGGLEQGTLAGSAPSSAPGENRGRWSLVTGSADGVIVVSSPNADEAGGSVLEASLAKRASTPNLIAKRCG

SEQ ID NO: 134103 - protein, 119 aa, Oryza sativa
  unsure (1)..(119): unsure at all Xaa locations
  Clone ID: PAT_MRT4530_35909C.1.pep
VVWFVSVCSNKPPVTPRLXPGRARLHLAAFIGHRLPSQTNTSLFCTLCPHSCAXGSRIPVSHPSQIAPNQARLTLEFFRDWLPEKKLQLVDMSILVILLSPRPGCPPGVPFYIAGQAVS

SEQ ID NO: 134104 - protein, 163 aa, Oryza sativa
  unsure (1)..(163): unsure at all Xaa locations
  Clone ID: PAT_MRT4530_3590C.1.pep
MEDPLIEKKITRKMDEMKRRKVAAFSIGSVCVGVMVLTSAASATWLPFLPMCIGCIVGALLLVAGLGLLCWIDQDDGRHSFGQSGGFTCPFVPLLPVLSILVNTYLLINLGGEAWMRVGIWLXLIGVLVYILYGRTNSSLKDVIYVPVAQADEIYKSSSGYVS

SEQ ID NO: 134105 - protein, 147 aa, Oryza sativa
  unsure (1)..(147): unsure at all Xaa locations
  Clone ID: PAT_MRT4530_35910C.1.pep
AGARREGGAATAAGGDGVFVDAGVAAIDIETKKRKEEMKAREAKSRAAAEHGDLALITVEGPKTTTSEKIXLRPPMLQAVRLSSSPHSPSIPQFIVXKSKLLPEGSVFQKELDDXKYAGVALAGQGVYVAVTRLXFPPEQKRPVDPG

SEQ ID NO: 134106 - protein, 644 aa, Oryza sativa
  Clone ID: PAT_MRT4530_35911C.1.pep
MGTIAAKILPWEAPSRETLLRTINAALDDGNVDDVLQAFANYKTLHGLPEPRVLDRMIVSLSYASSRRWLQRAFDMVLSVYQCNGNLLNCGSLMKLALALARDQMPIPASTVVRIILESGKLPDVDMLTMVYLHMVKSQVGSYLAADVLCETCECFLEQIGDRRQLKKLDPIKSNVTLFNMVLKSCVDFKCMIKAQRIMELMSLVGVVADVNTVAIASLVFEMVGQQVELVNMKRSIDSFASLPFIQHYLYFYGSLLNLHFKYNDMDAAAQLLVDLYRQQKPRAFVGDSVHKQGVIQIGSGNLKTGFRIMFDPIKVDKGFVLDTESQFGLLAVIDGNIRPSEKALAKFIVGCLKASKVRALSSFLITLHKEDLKGPSHSDVISACILMGWLHAAHDILDDLESAEIPVLICTYMSLLRAYEKENKPEEVNRFLQQIQKKAYTMADFHTNPSFTIKDVAKIVKDEMPLRNSSLLSSLVQEIEHYSSREHLTFEFNNSILFFCKANMMDDALSTYKRMREQNVRPSLHTFCHILCGYSSLGMHREIAMLWGEIKRRLEYGELTVDRDLLDCLILNFLNAGYFARVMEVLSYMANRKMYCDKWKYKQVFLKLHKNLYRNLNLLHEKTEQQSKRIEDVRAFRSWAGVK

SEQ ID NO: 134107 - protein, 82 aa, Oryza sativa
  Clone ID: PAT_MRT4530_35912C.1.pep
RTCQATCDERRRTPGASPGEASTPADSWRGTAPRTAPTPWTSARTRWTSASTAAVTLFPTRTTPWSPRARTTTPLRSPRTRS

SEQ ID NO: 134108 - protein, 687 aa, Oryza sativa
  Clone ID: PAT_MRT4530_35913C.1.pep
MPPMLHAILLLAVAVAATSASAATAPAAARNSTSNCTVPLPDAGIVTAAFKNVANFPLPRRPSCRPVRRLAYSSRNLAGVVGWAALGNLSGLLTVDLSGNSLEGDDGFGGGALWRAPLLRAVDVSRNRLGGALRLGASARMASLNASRNGFTSVVGVDGLAAGLVVLDVSGNRIAAVPEGLRRLTRVRRLDMSQNSMAGKFPDDLPPLDGVEFLDISDNNFSGVVNSTWVTKFGRSAFLRAGNATSLVIEDNPPASAPAPAPATMTPSSGGKKHKRVVLIVVVVVCGVVAVSAAVAFMALAGCVACGFSRRRKRGKKAAAAWEDDEVAVGAVKVAATAPVVLVERPLMELTLADLAAATSGFGRESQLADVGGRSGAAYRAVLPGDLHVVVRVVDGAVAGVGGDDGDVAAAAAGLRELARLRHPNILPLLGYCIAGKEKLLLYEYIEKGNLYRWLHELPASSMDMEETGADMWDTTEQDKKSIDDWPTRYHIILGIARGLAFLHQGWAGSSGRPIVHGNLVPTNILLDDDLEPRISDYIHPVDSNNGELTPESDVYSFGVLVFELVTGQVRWDDSTVSWARGVIRNRKSLNIVDARLREEEEEGGTSGAAKTTMTVAEREMVECLQVGFLCTAHSPEKRPSMQQVVGVLKDIRAGASSSRWRRRRDAMMETTMTVHAREHAQFLHRG

SEQ ID NO: 134109 - protein, 62 aa, Oryza sativa
  Clone ID: PAT_MRT4530_35914C.1.pep
TLDVIIYFFRACISINFDRSNADWKYISIGAILMRYNFFRAIWKGFDHNNTDCKGVQSLIYS

SEQ ID NO: 134110 - protein, 175 aa, Oryza sativa
  unsure (1)..(175): unsure at all Xaa locations
  Clone ID: PAT_MRT4530_35915C.1.pep
EVSIEELPDSIGNLKHLRYLDLTWNRTLKFLPNSLCKLINLQTLDLYRSDHLVKLPRDVKKLISLKYLSLTCKLKHLPETGLRGWASLTSLQLHSCSELTSLTEGIGYLTSLEMLWISDCPKLPSLPASMKNLSALREMLIDNCPELDLMHPXEEAMDGLQSLRSLQIIGLPKPR

SEQ ID NO: 134111 - protein, 634 aa, Oryza sativa
  Clone ID: PAT_MRT4530_35916C.1.pep
MARAGRLAEASALLDAAPGPDAGAYTALVSAFSRAGRFRDAVAVFRRMVDSGVQPAIVTYNVVLHVYSKMAVPWKEVVELVASMKEHGVAPDRYTYNTLISCCRRRALYKEAAQVFDEMKASGFEPDKVTFNSLLDVYGKARRHDEAIEVIQEMERVGCPPSVVTYNSLISSYVKDGLLEQAVALKQEMEVKGMKPDVVTYTTLISGLDRAGKIDAAIVEYDEMVRNGCKPNLCTYNALIKMHGVRGKFPEMMAVFDEFRSAGFVPDIVTWNTLLAVFGQNGLDSEVSGVFKEMKKAGYIPERDTYVSLISSYSRCGLFDLAMQIYKRMMEAGIYPDVSTYNAVLSALARGGRWEQAEKLFAEMEERDCKPDEYSYSSLLHAYANAKRLDKMKALSDDIYSERIEPHNWLVKTLVLVNSKVNNLAEAEKAFLELRQKRCSLDINVLNAMVSIYGKNRMVRKVEKILSLMKESAINLSAATYNSLMHMYSRLGDCEKCENILTEIKSSGVRPDRYSYNTVIYAYGRKGQMKEASRLFSEMKCSGLKPDVVTYNIFVKSYVSNSMFEEAIELVRYMVTQGCKPNERTYNSIVEGYCRNGKLTDAKIFVSNLPQLHPGYSKQEQQNLFEVIAKYTQR

SEQ ID NO: 134112 - protein, 617 aa, Oryza sativa
  Clone ID: PAT_MRT4530_35917C.1.pep
MVRVVVGSRRVHVQLLILQLLAAMVAAAEEPAVPTAKKIKSCTTSCGNISIEYPFGVEPGCYHTVGFNLTCDHSYHPPRLFLGDGTVQVLDISIPNGTVRINSGRINLEYDGRGSANGTWGGGLPDGGPFFLSESGSSLVLMGHDSQVDVWGLGGDNPIASCSVICPRIPSAIFGISACSGICCCQTNIILGYSSYLIQIHGDANFLNIYMVDQGFNYTNFINSNVDLIIFDSDRDPQALPALLEWVISNSTSYCPRNSSAPECRSAHSSCQDTDAWANNGYRCKYSYGYQGNPYIIDGCKGLSIALIVSGGSIVLILVLATPLVARVVKQRREKKLKEKFFKQNHGLLLQQLISRNTDFGERMIITLEELQKATNNFDRSCQVGDGGHGVVFKGILDLNVVAIKKSKIIVQREIASSMPIYHRDIKSSNILLDDSLTAKVSDFGASKYTPIDRSEITTTVQGTIGYLDPMYYYIGRLTDKSDVFSFGVLLVELLTRKKPVVDTFDGDGLVSHFILLLSEGNLINIIDPQVKEEEDGEVHEVAALCTKLKGGERPSMREVEMALENILSKKGPFHKGNRESSRPSKNQISALYMSIEGVATEASSQSMEEEMLSFPR

SEQ ID NO: 134113 - protein, 83 aa, Oryza sativa
  unsure (1)..(83): unsure at all Xaa locations
  Clone ID: PAT_MRT4530_35918C.1.pep
TISXALVSXSSSTTXVAXXPXAXASSFLGGAXRSGRLLLRQAESSSAXASXAXAXAPDRPIWFPGSTPXPWLDGSLPGDFGFX

SEQ ID NO: 134114 - protein, 59 aa, Oryza sativa
  Clone ID: PAT_MRT4530_35919C.1.pep
SGADSSESCRTSTYSRWKLYLGLYKQQTSDWRRTHLHRALAEYKKSTLLIWYSCLYIAA

SEQ ID NO: 134115 - protein, 98 aa, Oryza sativa
  unsure (1)..(98): unsure at all Xaa locations
  Clone ID: PAT_MRT4530_3591C.1.pep
LPPNLHYQKGIYNHFSFNILRPPQTPDPPSHKKKRGAPPPGTLGKPPXPPTGPTNPQISSPGTPKPPQDPSSPSFIPQCQNPPLSVPFFRHTTPHFFF

SEQ ID NO: 134116 - protein, 112 aa, Oryza sativa
  Clone ID: PAT_MRT4530_35920C.1.pep
MGKAGQQQKGKWTSAMQVCCQSFGTSKCILEREGEKGLGIYGRKWRGCVACILLLGLRYLEEGFIYHEALRFLLSSNSILLDPSFNENDIVKKFNHVQMSLSAKFVFVICTR

SEQ ID NO: 134117 - protein, 74 aa, Oryza sativa
  unsure (1)..(74): unsure at all Xaa locations
  Clone ID: PAT_MRT4530_35921C.1.pep
DGVAAFTSDLSRVVWQVVFKPPGITKYGANSGFXSWLTVYGLAIRAAGGDSKARLKSPSRFAMSPSAERKLEKA

SEQ ID NO: 134118 - protein, 58 aa, Oryza sativa
  Clone ID: PAT_MRT4530_35922C.1.pep
SLLLFLDSEQHLAVEERRPNFNYESNTNHSHITSGRHTLFTANVLRVNAYSFWLHEST

SEQ ID NO: 134119 - protein, 104 aa, Oryza sativa
  Clone ID: PAT_MRT4530_35923C.1.pep
MRSRCGGSTGRGRRRDGGGNRRWESSCTDCSTTSHSMSWMTSLGRTIVVDEGGWHWRVQDRRTAPQVKREALGRGRWGKWMGGRIRLVSNDGSGGGVSNDGGAR

SEQ ID NO: 134120 - protein, 205 aa, Oryza sativa
  unsure (1)..(205): unsure at all Xaa locations
  Clone ID: PAT_MRT4530_35924C.1.pep
MGSGMAGIEAGAGKTAETASSTCPVTKGDLRTDDLVPNHALRRVIQAWCVANNLPPRRLPASPLPAPQYCSSPAPETASPVDREELKASPAAACPLLATTFTNPVDFRCKSCLLHLSFAAASESSDSSASSVLLNNVLAVLVLVMPLDEEAIVAIGSSITTSVALLANVAKHGDLQRRLQAVVVIMEIVXLSSCCSRNGGATTAI

SEQ ID NO: 134121 - protein, 214 aa, Oryza sativa
  unsure (1)..(214): unsure at all Xaa locations
  Clone ID: PAT_MRT4530_35925C.1.pep
AGIEAGAGKTAETASSTCPVTKGDLRTDDLVPNHALRRVIQAWCVANNLPPRRLPASPLPAPQYCSSPAPETASPVDREELKASPAAACPLLATVRCSCSTRIHWMEATAATTCGGQRASSCLLHLSFAAASESSDSSASSVLLNNVLAVLVLVMPLDEEAIVAIGSSITTSVALLANVAKHGDLQRRLQAVVVIMEIVXLSSCCSRNGGATTA

SEQ ID NO: 134122 - protein, 450 aa, Oryza sativa
  Clone ID: PAT_MRT4530_35926C.1.pep
MASSPLPAFTVRRGEPVLVTPAAPTPREVKALSDIDDGEGMRFYSSGIHLYRNNPAKKGQDPAMVIREALARALVPYYPLAGRLREEAGRKLVVECAGQGVMFAEADADLTADDFGDVQSPPFPCFERFILESTTVAGVEPVVGRPLLYIQVTRLRCGGFIFGQRFCHCVVDAPGGMQFEKAVCELARGAAAPSVSPSWGREMFMARDPPRPSYPHLEYREPAGGADRLLATPPEDMVRVPFFFGPREIAGLRQHAPASVRGACSRFELVAACIWRSRTAALGYAPGEEVRLSFIVNARGRADVPLPEGFYGNAFAYSVAATTAGELCGGDLGYALGLVKKAKSAVTYEYLQSVADLMVVAGRPLFALSRTYIVSDVSHAGFKSVDFGWGEAVYGGPAKGGEGPLLGVTNYFSRSKNGKGEQSVVVPICLPKDAMDKFQLEVQALTAELS

SEQ ID NO: 134123 - protein, 117 aa, Oryza sativa
  unsure (1)..(117): unsure at all Xaa locations
  Clone ID: PAT_MRT4530_35927C.1.pep
MDISETNEGYRASISIIKVSWHRTGISVATPEGCSDVVGLNPXPTCPGIPAVGGVASVLLFTTRMGEGLCHVFMMGSXAIECRVKVFLLGWPRLTWDELGPGYXGCQFGLTHRRPLG

SEQ ID NO: 134124 - protein, 337 aa, Oryza sativa
  Clone ID: PAT_MRT4530_35928C.1.pep
MALKCAIDLGIPSAIHRNGGSASLPDLLATLPIAENKRPFLHRLMRFLTVSGIFTSADDGVYQLTRVSRLLVDSIPLNLLPFARGAVNENSRKISETSGNFHTVFTRNFRSFLCLGEWFRDGGDTTPFAMAHGIDVWGAMSLDRALAAGFSASMAADSKFLAEIAIRRHVEAFMNVSSLVDVGGGDGSMARAIVKAFPHIKCLVLDLPHVVRGIPADGFVEYVAGDMMDFVPPANVVLLKLVLHDWSDEDCVRILSRCREAISNREGGKVIIIDTVIGSQSQQIYEAQLFLDLCMMTVTTGKEREEKEWHMIFLKAGFTQYKILPILGIKSLIEVYP

SEQ ID NO: 134125 - protein, 84 aa, Oryza sativa
  Clone ID: PAT_MRT4530_35929C.1.pep
MFGLAEPGSSPLGTLFNRALAFTEEDTKGAGVNERWLYRMVWPRSRKTEAPVPSPVAAVSFVWPWPIKTKPMRADVGVTELKAF

SEQ ID NO: 134126 - protein, 120 aa, Oryza sativa
  unsure (1)..(120): unsure at all Xaa locations
  Clone ID: PAT_MRT4530_3592C.1.pep
AHLSVGLSDLTFPSLRPATEAVTAGVAGEKGAARGRQPTAGEERHMCTGGGXEERSGVCARPMAGEKGAARGSRGEASPTTPXEERSPTMATCVGGGVGHRARELDGVDEAVAAGGLPAP

SEQ ID NO: 134127 - protein, 1011 aa, Oryza sativa
  Clone ID: PAT_MRT4530_35930C.1.pep
MEAAVVSSTEGVVRILLAKLGEFLSDKYVLLSGVRHEIQELKDDLESMNACLRDLAAVGDYHQSQQTRTWMKQVREVAYDAEDCIDSFRYHVGGDRNHDEGLLVVAGWLRRTALRPLTTLRAMYKLAVEVQSLKARALKVSERRLRYRLEPPAAASSSGEYAPRCYDDLDRRLPALSVDESRLVGVRSKTRAILKLLEHKDDGDDDGLARRKVVAVVGFGGLGKTTLAAMVYKSPAVQGIHHRAFVTVTRSCNLRAMLESLLEQLFAPARDPRCSRKEIMAMEKDEILRGIETKDIPQLLAHCSTHLSDKRYFIVVDDLWSLEDWASLKPAFPDNDKHSRIIISARNRQVAESCCSLPGDRVHFMDVLPNDQSRELFFKTVFQKEHCPSEYRSLEGISGDILTKCGGLPLAIVSVGGMLAQAENKTPVEWTKVCGKLGSGLSTSAAVRGMRRILSLSYHDLPYHLKACFLYLSVFREGYEIKRGPLVRRWAAEGFVGGGREWTPEEAAGKYIDEFVGRSIVTPTRVATNGVVRCCKVHDIMLEVMTAKCVEENFISLLGSVTSYGRHQHTAATTTGHDKIRRLSVHGSHMPQGQQSRSGGGDEDIFRFRRRRKKGEGEGQDDVLSSVDLSCARSLLMLRCIEKPLPSISFKRLKLLRVLDLEGCRWLSSRELDDICKLSLLRYLSLRDTGVQRLPRSVGRLKQLMTLDVRETDVRELPETITRLGHMRHLLSGRYRYYTRSHRVKLFEPFEAMTIPPGLSAMESLQTIAHANVTSSGIAMGELGDLPSLTKLCVMNCEKGPNKWKPFIVSLNKLSYSLRSLSILHWLNEDAGLEELLDLDSPPIFLEKFFLWGKLSMLPPWVSHLGNLVDLSLRENFLDGKEVIEQLGKLPSLLSLKLYYQSYMGRELHFREKLFPRLKQLIVDNMPNLDELSFQGGAPELERLTLAVLKEPADGISGIDKLPRLKEVEFFGHVIVDSVVESMVAVCKKHPNKPRVYRGDRPMEMDSELSS

SEQ ID NO: 134128 - protein, 86 aa, Oryza sativa
  unsure (1)..(86): unsure at all Xaa locations
  Clone ID: PAT_MRT4530_35931C.1.pep
IPFPKFPHMMARKIXDTDSVEELKKPSRVFSKHQNGFIXAPELSHVIPTLGDKLTTQKVDEMIPEAHVNGNGQINYEKFVKVIMAK

SEQ ID NO: 134129 - protein, 238 aa, Oryza sativa
  Clone ID: PAT_MRT4530_35932C.1.pep
MCGIKQEMSGESSGSPCSSASAERQHQTVWTAPPKRPAGRTKFRETRHPVFRGVRRRGNAGRWVCEVRVPGRRGCRLWLGTFDTAEGAARAHDAAMLAINAGGGGGGGACCLNFADSAWLLAVPRSYRTLADVRHAVAEAVEDFFRRRLADDALSATSSSSTTPSTPRTDDDEESAATDGDESSSPASDLAFELDVLSDMGWDLYYASLAQGMLMEPPSAALGDDGDAILADVPLWSY

SEQ ID NO: 134130 - protein, 99 aa, Oryza sativa
  Clone ID: PAT_MRT4530_35933C.1.pep
VSTPPPFEYASAPGTTVAGQCASSPPPPSVVPTCAAPSSAVAGRASSHRPPPLPTASTMSRRPPPPHRAGLVHLLALRRPPSPTPMPPRTMSPPHHSTP

SEQ ID NO: 134131 - protein, 393 aa, Oryza sativa
  unsure (1)..(393): unsure at all Xaa locations
  Clone ID: PAT_MRT4530_35934C.1.pep
LKLILSVFEKLYGLKLNFHKSXLFCFDQAKDYYDQYSNMFSCKXVLFLGSFPVRYLGIXMHFRKLSNKDWQTIDKRIEKKLSRWKGKHMFVGGILVLINSALSSLVIFMISFFNIPKGVLXKNDYYRSRFFXQEDDHKKKYILTXXDIICQPKDRGCGGLGVHNLEIQNRCLLSTXLFKLINKQGVWQDLLKMKCLSNLSIFQVDRKXRDSHFWXGLMEVXDYFLKHGFLDXNNGEQVRFWEDKXLRNLHFKDKYPSLYAIIRRRNSSXPLNVSFRRALVGQNLANWNELCASIVHIQLTQXNYCFRWNFHHNGQFXFVRSMYLALINNXIKLKLPLKIKIFMWHMLKGVVLTNDNLARRNWNDSLMCSFCTKNETIHHLFFGMSLCKVSLEQ

SEQ ID NO: 134132 - protein, 86 aa, Oryza sativa
  unsure (1)..(86): unsure at all Xaa locations
  Clone ID: PAT_MRT4530_35935C.1.pep
MCPHSQVKWMXVPMRPEHKGRTSGRTDRSGAVEFGSGPPLAGSGLDAQVGGESGSRGGDRGARASRRRRRRWRPQREGRTEDEAVA

SEQ ID NO: 134133 - protein, 135 aa, Oryza sativa
  Clone ID: PAT_MRT4530_35936C.1.pep
GGNVRQRLTAAATRRSATTACARGKQRAARRFGRRGSGTRQGSGAGQRRRRRRGTGGDHAGACAKQRRAGPISRAGSSRGWRRGEGERGGGARRGSGRAGREGDRFLLCSRIDLCLRLHFDLISFSDADVTKFGC

SEQ ID NO: 134134 - protein, 648 aa, Oryza sativa
  Clone ID: PAT_MRT4530_35937C.1.pep
MAMSSIPILLEDDGDGGANKTWRPAAVLLELPCTARSQQERSGGGILELMEQEIGGGGAGDLLRRQSSSTSLAFPSVRTAGEPKLKVRLSCRLQELYLLHEIELASELELLGDVEFGGVQPGTGGAPPGSRNRSMRPLPPAVAARLAAVRADPAAVPLPFFNSLLSALASSHAHLPLHLFRRLLLPRRRPDAFTLSSLAASLLPPAHSPSASVTAAAAAAGCLHAFSLRLGLLRADPVLANSFLLLYLRAASPGLARRLFDEMPARTASTYNTLISHSPPGVDVWPVVRHMVEDGCVPDRFTVSSILPACESELRGRELHCFALKSGMCGAGDFHVGSSLVSMYFRVGQPGHARRVFDGMEQRNVVSWTAMVGGFTESGMFEDAVDAFRAMWVIGAVLPNRIALISVLSAVEALTDLAAGKQVHGFAVRMGLSGEVSLNNALIVMYVKCGVLWYARQIFDDGRWCKDVISWCSMIQGYGLHGKGAEAVALFDQMHISGVKPDSITGLGVLSACSRAGLVFKGLEIYNSLVKDYGVHPTEEMSACIVDLLGRSGMINQALDFIKSMSIEPGPSVWGALLDASIVHNNKEIQDLSCRYLLRLEEGNPSNLVSVSNLHAFDGSWNIVEHVRAKIKQGALKKIPGFSWINPT

SEQ ID NO: 134135 - protein, 99 aa, Oryza sativa
  Clone ID: PAT_MRT4530_35938C.1.pep
LTPPQDVDTGLEDNRANRNASSRSGAMVTPGMEVAAPVANAGSVGHADLGGSHGGGQEHDRNPIEARKEGDKARERPWMASACRGSAGAGLPRLGQDMG

SEQ ID NO: 134136 - protein, 203 aa, Oryza sativa
  Clone ID: PAT_MRT4530_35939C.1.pep
MRGPSTTTMATFKQSFLKNLLSSLKSSSKNKAAMSTLSERKRAIKSSADIAMATARTGIAGAARWPHAILASSSSSSSSSSSSSSSSSMPRTTFPCKMMQGKVRRRCKSIVRRRTPLMSSSSEVARRLVKKRDKVLRRMIPGGELIADEISLLHEAMDYVVHLHAQVDVLRRVSRAAVARRSSGLAQLKERTVQISGETENPC

SEQ ID NO: 134137 - protein, 88 aa, Oryza sativa
  Clone ID: PAT_MRT4530_3593C.1.pep
MARKRRSAAAPRRCPSPLKGRGRGARQSLLRVASATRGAPLAGRHSMPPQLLGGRGRGVPLAVAPASGHRPIGPPNRGRKMDFNGERK

SEQ ID NO: 134138 - protein, 67 aa, Oryza sativa
  Clone ID: PAT_MRT4530_35940C.1.pep
LSCAKNVASPRSWLVESVKKEKTQLAGKKGASVPDYNKHPTYNAPELDYVEYYPLQMTEDPNVCSIM

SEQ ID NO: 134139 - protein, 202 aa, Oryza sativa
  Clone ID: PAT_MRT4530_35941C.1.pep
MATFKQSFLKNLLSSLKSSSKNKAAMSTLSERKRAIKSSADIAMATARTGIAGAARWPHAILASSSSSSSSSSSSSSSSSMPRTTFPCKMMQGKVRRRCKSIVRRRTPLMSSSSEVARRLVKKRDKVLRRMIPGGELIADEISLLHEAMDYVVHLHAQVDVLRRVSRAAVARRSSASSSSSGGLAQLKERTVQISGETENPC

SEQ ID NO: 134140 - protein, 49 aa, Oryza sativa
  Clone ID: PAT_MRT4530_35942C.1.pep
KAEKEKKTRGLVAPLDSGAKSNPAKLHKYWQLPNHLIKKKRLSRAFKVE

SEQ ID NO: 134141 - protein, 92 aa, Oryza sativa
  unsure (1)..(92): unsure at all Xaa locations
  Clone ID: PAT_MRT4530_35943C.1.pep
QESLSIHCRTRRIPRLINNADAXRQIHRNQSTWPPNDVCIALNSAFTVTAADSTATVAVTDSAVPAIAVAATTAPTVIFGAAAACFIVLKHH

SEQ ID NO: 134142 - protein, 56 aa, Oryza sativa
  Clone ID: PAT_MRT4530_35944C.1.pep
MWFFTQRNSPRERGILDSAQRGVCDAQRCSPYRPDEPLGEAFAWNPFNLALKLVTH

SEQ ID NO: 134143 - protein, 133 aa, Oryza sativa
  unsure (1)..(133): unsure at all Xaa locations
  Clone ID: PAT_MRT4530_35945C.1.pep
SPLPFSFSYLFFFXNGVGTVDPKTVMMSVILVYWKRNHRNXGLPILDGSRKFMLKTMECGIITHLTMHEDDFVTSFLHHNAPHXHRYMMIIDMIISLTNNINKVQQYFKIDKLRKSKFSKVHMLCLRVNNVFL

SEQ ID NO: 134144 - protein, 1231 aa, Oryza sativa
  Clone ID: PAT_MRT4530_35946C.1.pep
MDAGKDVQVRGLIDGRTGVGENDEIGLLAGELGATIDQTLKGQRYNVKGLFEEMSTAWGLHETRRTRDLGENKFLIEFGCEADLKRVINGGPWKHKGDALIVVPYDGIVLRSLGGNDDHRFLGEKLGAVIEVQGAMFNFLRVKVQFSLANALKTCIKMRIKGRGIISCPIKRIGHAERECPEEGMSDNPVSRARGGTPANLGVRKDDEAVTELVKDDMCGADEILGKSVQQMQVEDIGPSLNLVARGPCSRERVSMSSDYGLSDDKADEPDAKDTSEDSSEAHAMLKEALVPDLDEGKLQQLRWRLGLKHFLSMKGEGSGGGIALFWDETITVDLLSMSNMYIDVLIRNPGDGFLWRCTFVYGEPKTTDRHLMWELIRRIKPVSNALWLMMGDFNETLWSFEQFSARRRPEKQMMDFREQDLLAADLGEVAVKLRKVMSSLREWSIKVFDSVSKELKDLRQKVEALLLDPSADHSDEISTIYRRMDELLYREEMMWLQRSRISWLKEGDRNTKYFHRHAAWRAKKNKIIRLKDEDSKYVENKEQLEQMATAFFQKLYTKDHSVTPAEVVDLLKSLVDEPMNLELCKPFSDEEISDALFQIGPIKAPGPDGFPARFFQRNWDTLKGEIMAAVRKFFADCAMPDEVNNTSIVLIPKVKQPENLKEFRPISLCNVIYKVISKCLVNRLRPLLSDIISSTQSAFIPERMITDNVLIAFESIHAIQRNNSPDNSFCAYKLDLSKAYDRVDWDFLERALLKVGFCRQWVDWIMECVTTVKFSVNFNGSLLEAFSPTRGLRQGDPLSPYLFLFVAEGLSSVLNREVEAGRLTELKVCRRSPGISHLLFADDSLLFFRACLQQATVVQNALTCFQACTGQLLSPGKCSLLVGRSCPDATVEVVKEILQVETPAFESKYLGLPTPEGRMHAGRFKPTEERLAKRMDSWAEKHMSSGAKDVLIKSVVQAIPTYLMGVFKLPASTCEAYTMMIRDFWWGDEENKRKIHCLCVWVLKAKYFPNCELVDAVFPAEVSPTWKGIEHGLQLLKTGLIWRIGDGTKDEDFLAWHYEKSGIFSVRSAYRLAWLNKFHPDGEGSSREADSDRSIWRRIWSTPVPPKKLIRNCASAEFAEAAACREGIWLANEWVKEPCILETDCAGVDSYLRLAAANRSQIWPLIREVRAGMRAAPEARTALIRRGANKVAHELAQLAIRNREAVVLRLQAPVCVAEQLAQDCNPYSEV

SEQ ID NO: 134145 - protein, 173 aa, Oryza sativa
  Clone ID: PAT_MRT4530_35947C.1.pep
MPKHTIAHDKHLSGGLIGGGRGGDASPLPDWVREEVQRQRRQIRRRGDNCGPDGVKAAGQTSPPPDPTAWRRQRPSRDRRGGGTASLPLLRRMAWRRRRFICDGSGSGKDSSSAEPGGEGNSLTWEEQRSDTRGAVEAVAGLDSGGCDDDGQALVRPPPPPLSQIRRLWGGGA

SEQ ID NO: 134146 - protein, 136 aa, Oryza sativa
  unsure (1)..(136): unsure at all Xaa locations
  Clone ID: PAT_MRT4530_35948C.1.pep
FFFFFFICNXKXTVWYSILYRFSHQHRPHQSHITTHFNSVSPVLHHIHSAHTXQPTQYTIARQPSHPHTXSSSTLLPSFPTSFSFGAAAHSPLLIIPNSPVPLQXHPVHRRXSQHSVLICVGXCPVPRDCIQAIST

SEQ ID NO: 134147 - protein, 86 aa, Oryza sativa
  unsure (1)..(86): unsure at all Xaa locations
  Clone ID: PAT_MRT4530_35949C.1.pep
RTCGSGFQSKYEYLYCKIDMQLKLVLGNSVGTVTEXYFTTYGPAHDEIDFQFLGNVTGELDTLHTNVFTHGQGQREMQFCLWNDPT

SEQ ID NO: 134148 - protein, 83 aa, Oryza sativa
  unsure (1)..(83): unsure at all Xaa locations
  Clone ID: PAT_MRT4530_3594C.1.pep
XVIXRXCQXLTQXXXXTSXXILDTXTXNGTXWMDRXDQTSDXSXLGRQXGILPXTPXIXVDXTPWXGXLXIFXXXAXRXXVXA

SEQ ID NO: 134149 - protein, 54 aa, Oryza sativa
  Clone ID: PAT_MRT4530_35950C.1.pep
RGLRREMEEMIGGARRGQLTLAIRVRIDSINELRCYLWPVAFLSREALNPTSQC

SEQ ID NO: 134150 - protein, 291 aa, Oryza sativa
  Clone ID: PAT_MRT4530_35951C.1.pep
MASATSTTPDLSLHISLPSGGAAVGTTAPPGLGNGGAVGGAGGGKAAGGGDPWRRLDGSTASTELSLSTPQQQQEGSTSAADVLPWRLRQPTAAAASVPVTLPTIPMDGATPKSVLELMDVKDLTLAHVKSHLQMYRTVKSTDKPAAASGPMDGSGSGSGSGDDELLAGDGRQATSSGADADRRMSFTEHRSSSEGAASHAGGGGDGDCSSSAVNSDTIRARSNSPRGLWALTSDLILADILEMCNQGPLPVLLCPLLSLPLLPVSTDTVADILRFNNRRNLCIGHQTLFF

SEQ ID NO: 134151 - protein, 842 aa, Oryza sativa
  unsure (1)..(842): unsure at all Xaa locations
  Clone ID: PAT_MRT4530_35952C.1.pep
GGSSSKRRRLPWRMTMSLAYQSLGVVYGDLSTSPLYVYKAAFAEDIQHSETNEEILGVLSFVFWTLTLVPLLKYVCVVLRADDNGEGGTFALYSLLCRHARAALLPPGGGGGGGEPGDEDQFLDAGADKKAAANGNALALSGRGGEGGAAAGVRRLLERHKVLQRVLLVLALVGTCMVIGDGVLTPAISDGVFCFXVFSAVSGLELSMEKHQHKFHILLGFGRGXVHSGQKYDVEVPIACFVLVCLFCLQHYGSEAMFADLGHFNQLSIQFSIXEKIRWPVLAIAILAAVVGSQAVITGTFSMIKQCTALGCFPRVKIVHTSDKVHGQIYIPEINWILMILCLAITIGFRDTKHLGNASGLAVITVMLVTTCLMSLVIVLCWHKSIFLAFGFIIFFGTIEALYFSASLIKFREGAWVPIVLAFIFMAIMCIWHYGTIKKYEFDLQNKVSINWLLGLSPNLGIVRVRGIGLIHTELDSGIPAIFSHFVTNLPAFHQVLIFLCIKNVPIPHVSPEERFLVGRIGPKEYRIYRCIVRYGYHDVHKDDQEFEKELVCSVAEFIRSGAAAAADAAASFKPKNVCGGGAEESEKEEEERMSVIPSGSIRMMEEDGGAGAPSSEDTVGGSGSGSGRGSSRGGGGAREIMSPSPSPPPVVVAPRKRVRFVLPAASPRPDAGVREELQELMDAREAGMAFILGHSYVKAKSGSSFFRRLVINFCYDFLRRNSRGPNYAVTIPHASTLERCDAIRASSNSDRRELGSWIMGSVGLARMLRSLCVAGDLARAVGLLWRSTVCPGEGTYALLLQECVNRRDARMGKRIHARMVSVVWRRRLHRHQAADLLRQDR

SEQ ID NO: 134152 - protein, 843 aa, Oryza sativa
  Clone ID: PAT_MRT4530_35953C.1.pep
MKSPSPVDPESPSSPDCKGGSSSKRRRLPWRMTMSLAYQSLGVVYGDLSTSPLYVYKAAFAEDIQHSETNEEILGVLSFVFWTLTLVPLLKYVCVVLRADDNGEGGTFALYSLLCRHARAALLPPGGGGGGGEPGDEDQFLDAGADKKAAANGNALALSGRGGGGGAAAGVRRLLERHKVLQRVLLVLALVGTCMVIGDGVLTPAISVFSAVSGLELSMEKHQHKYVEVPIACFVLVCLFCLQHYGTHRVGFLFAPIVITWLLCISMIGVYNIVHWEPNVYRALSPYYMYKFLKKTQRGGWMSLGGILLCITGSEAMFADLGHFNQLSIQIAFTCMVYPSLILAYMGQAAYLCKHHIIESDYRIGFYVSVPEKIRWPVLAIAILAAVVGSQAVITGTFSMIKQCTALGCFPRVKIVHTSDKVHGQIYIPEINWILMILCLAITIGFRDTKHLGNASGLAVITVMLVTTCLMSLVIVLCWHKSIFLAFGFIIFFGTIEALYFSASLIKFREGAWVPIVLAFIFMAIMCIWHYGTIKKYEFDLQNKVSINWLLGLSPNLGIVRVRGIGLIHTELDSGIPAIFSHFVTNLPAFHQVLIFLCIKNVPIPHVSPEERFLVGRIGPKEYRIYRCIVRYGYHDVHKDDQEFEKELVCSVAEFIRSGAAAAADAAASSKPKNVCGGGAEESEKEEEERMSVIPSGSIRMMEEDGGAGAPSSEDTVGGSGSGSGRGSSRGGGGAREIMSPSPSPPPVVVAPRKRVRFVLPAASPRPDAGVREELQELMDAREAGMAFILGHSYVKAKSGSSFFRRLVINFCYDFLRRNSRGPNYAVTIPHASTLEVGMIYYV

SEQ ID NO: 134153 - protein, 36 aa, Oryza sativa
  Clone ID: PAT_MRT4530_35954C.1.pep
PPEGLNFHVATQIKNEDKQNLSLNHESSGVVFRQRE

SEQ ID NO: 134154 - protein, 795 aa, Oryza sativa
  Clone ID: PAT_MRT4530_35955C.1.pep
RARLPWILSSGVLQGMEPRKRRPWRTTLRLAYQSLGVVYGDLSISPLYVYKSTFAEDITHSESNEEIFGVLSFVFWTLTLIPLIKYVSIVLRADDNGEGGTFALYSLICRHANVSLLPNRQVADEELSTYKLEYPPEVANRSRIKEWLEKHKTLQTALLIMVMIGTCMVIGDGVLTPAISVFSAVSGLELSLSRDQHEYAVIPITCVILVFLFALQHYGTHRVGFLFAPIVLAWLICMSMLGLYNIIHWNPQVYRALNPYYMLKFLRKTKKSGWMSLGGILLCMTGSEAMFADLGHFSYSAIQLAFTTLVYPALILGYMGQAAYLSKHHTLNSTYQIGYYISVPESVRWPVLVLAILASVVGSQAIISGTFSIINQSQSLSCFPRVKVVHTSENIHGQIYIPEINWLLMVLCIAVTVGFRDTKHMGNASGLAVITVMLVTTCLTSLVIMLCWHRSPALALVFFLFFGSIEVLYFSASLIKFREGAWLPIMLALILMAVMFIWHHTTIKKYEFDLHNKVTLEWLLALGDKLGMVRVPGIGLVYTDLTSGVPANFSRFVTNLPAFHRVLVFVCVKSVPVPHVLPAERYLVGRVGPAGHRSYRCIVRYGYRDVHQDVDSFEAELVESLATFIKLDALYHRCSDAGSGSEQLDDGRYERENALTVIGTNPLRRCLSYEASHDGVSSVDAARSPNGIVEVPAAAAAAPVTKKVRFVVEAASPEVEKGVVEELQELCEAREAGTAFILGHSHVQTKPGSSLLKKLAVGVGYNFLRRNCRGPDVVLRVPPASLLEVGMVYVL

SEQ ID NO: 134155 - protein, 127 aa, Oryza sativa
  Clone ID: PAT_MRT4530_35956C.1.pep
MKINTDGAFDPFTRTGGWGFAIRDHSGKVVKSGAGKVQILMNAFHAEALACAAGIRAASECGMQRVTAETDSTMLKSALEKNTFASSALGGIICEIKNFVNFAFLSFNLWVVNRKSRTFLGGMNVTP

SEQ ID NO: 134156 - protein, 64 aa, Oryza sativa
  unsure (1)..(64): unsure at all Xaa locations
  Clone ID: PAT_MRT4530_35957C.1.pep
SAASGDVPEGIXHLPYLQNFTYSYNXITGEPPCXMHXKAFDDRRNCXXGXPDXRAAXXCNSKKT

SEQ ID NO: 134157 - protein, 84 aa, Oryza sativa
  Clone ID: PAT_MRT4530_35958C.1.pep
EPKTLSPPPSVDRLWDYLDLCLIFRRFLLSRLILFFFHLALIAAARRSPLSFLSLPDGELQGLEKKRLGSAAAARAWDLGLPAG

SEQ ID NO: 134158 - protein, 58 aa, Oryza sativa
  Clone ID: PAT_MRT4530_35959C.1.pep
GGYGAGGVEKKETAPAVACDWSATVAALLCGDGKAAAWRGRQVDARGGRAARLEAGPS

SEQ ID NO: 134159 - protein, 62 aa, Oryza sativa
  Clone ID: PAT_MRT4530_3595C.1.pep
AEALTDNKPSYSYREKIQTQYPYKDVLLGKYLRRAPKGGPRVAPFKRGHLLSMRGIKTTIYG

SEQ ID NO: 134160 - protein, 170 aa, Oryza sativa
  Clone ID: PAT_MRT4530_35960C.1.pep
MGMAPVATYPSSSSSSTLARPPCAAAGRAAAAGRARVAAAGMSSRASSFVTGGAGGLAVAVAARTRAGSGAGSRGGGAMGCKCLFGLGVPELVVIAGVAALVFGPKQLPEIGRSIGKTVKSFQQAAKEFETELKKESDDGGDQPPPPTETAVSDGGEEKELEASSSKEST

SEQ ID NO: 134161 - protein, 72 aa, Oryza sativa
  unsure (1)..(72): unsure at all Xaa locations
  Clone ID: PAT_MRT4530_35961C.1.pep
SVTDESVKVNLYQNALLSPFWNINAHSVVYITQAXTRVQVVXNNNGKTVFNGRASARRTAALFITTTLNARL

SEQ ID NO: 134162 - protein, 48 aa, Oryza sativa
  Clone ID: PAT_MRT4530_35962C.1.pep
FQFIFGIINLRLCMSYCVQLKYPVDTVYVIYFASVTYFFVNYQLLKKP

SEQ ID NO: 134163 - protein, 146 aa, Oryza sativa
  Clone ID: PAT_MRT4530_35963C.1.pep
LPSLLPPLRRGGAWPPLLGRWPPRARGRILCRDDGGDQICRRDDEGGRVCHRDDRGGQIHRHDNGGGRYDDDATATGPWAAVLATGGAQALDRAASSLEVSITMAMRGRSGTDGDGWRSATPCIPSHPSPPSPRQGQIYGVPTGVS

SEQ ID NO: 134164 - protein, 147 aa, Oryza sativa
  Clone ID: PAT_MRT4530_35964C.1.pep
RVDHASLLSRCSSSLIPIATAIPPIPPSTSAEPPPHNRIPFRRCHAWDLPSPDPLPSSAATRRLSPSLLDAGRCPAFDCPRYWIKAVAHRRASSTVTAARRLAVRSSRPAPISSAHQVSSHPCTAATLATMFNYHETFSFFPLSCSL

SEQ ID NO: 134165 - protein, 133 aa, Oryza sativa
  unsure (1)..(133): unsure at all Xaa locations
  Clone ID: PAT_MRT4530_35965C.1.pep
RPRAPSGXKQIRKWLPLLAPTTERSRVPAARTXHASAPTASPDHXXRPRRAPVPRGRKEKRLPDLVRERVPRRARAHAAREPPXPMLQRIGRAGGCGFFALSYPAAAGARGGGGGGIXPLVLEVGFGWEGEAS

SEQ ID NO: 134166 - protein, 566 aa, Oryza sativa
  Clone ID: PAT_MRT4530_35966C.1.pep
MPPTSVSPPRTAPGPANPSPAHPSRVRVIHPGGGKPGGPVVYWMLRDQRLADNWALLHAAGLAAASASPLAVAFALFPRPFLLSARRRQLGFLLRGLRRLAADAAARHLPFFLFTGGPAEIPALVRRLGASTLVADFSPLRPVREALDAVVGDLRREAPGVAVHQVDAHNVVPVWTASAKMEYSAKTFRGKVSKVMDEYLVEFPELPAVVPWDREQPEGVDWDALIARVCSTEAENVPEIDWCEPGEEAAIEALLGSKDGFLTKRIKSYETDRNDPTKPRALSGLSPYLHFGHISAQRCALEAKKCRHLSPKMFEVTCVLKQSVDAFLEELVVRRELADNFCYYQPQYDSLSGAWEWARKTLMDHAADKREHIYTREQLENAKTHDPLWNASQLEMVHHGKMHGFMSKPLVHIILFDSGQTFYTIFVQLLFWIWKERKVTVPVRTFSFPNVVVVCRMYWAKKILEWTSGPEEALSTAIYLNDKYEIDGRDPSGYVGCMWSICGLHDQGWKERPVFGKIRYMNYAGCKRKFDVDAYISYVKRLAGQSKKRNAEESPNPVVKLSKSQH

SEQ ID NO: 134167 - protein, 221 aa, Oryza sativa
  Clone ID: PAT_MRT4530_35967C.1.pep
MDGWMAGLALAMDLGCMILRPFVAGLVDPPYPVAIIRRRCTSAPRRRPPRPAVVRATAARPRPAVVNADLGGRGGREPPPPHTATARRRHSRSGRKGQPGAAAARPRPAVVTPDLGGRGGQEPPPPPHGHDPPSFAPPPHGHGPPSLLQFWEGGAAGSRRRRLNCPRRRGRAAASTLLAATARRRAAPAPFRPDLGGRGRERAAAALRRHRPPPPPGEEER

SEQ ID NO: 134168 - protein, 164 aa, Oryza sativa
  Clone ID: PAT_MRT4530_35968C.1.pep
MAAFMASGSAGRELKCCYKATVDGFSATDFHRRCDFKGPCVVVGRTGGGVRFGGFSPEGYRSTDDYYDTLDAFLFYWPETDTDAAAKEAAVVVLPKVGGSGAALFDYARGGPQFCRNMNSAIIKGGSARDLKVDGCRDKGFRQVQALSMRGNTLLLFGDLNPPV

SEQ ID NO: 134169 - protein, 72 aa, Oryza sativa
  Clone ID: PAT_MRT4530_35969C.1.pep
YPILERERAARTGFLLKRIRLDDPANVPPWTPSPDPAMPPEAPAPARTRAATTPCSAFGRTRSTPTCAPTTR

SEQ ID NO: 134170 - protein, 110 aa, Oryza sativa
  Clone ID: PAT_MRT4530_3596C.1.pep
ANLPTLKREDILASFFNKFEVLFEIFTNEGFQALEEQYYNSWLHSGQKVVVQDGPEAQHADSVVTIQGLTPAGYLYAIGEDGKSYELHPDGNRVSAKEDGNVVLHEYIHR

SEQ ID NO: 134171 - protein, 82 aa, Oryza sativa
  Clone ID: PAT_MRT4530_35970C.1.pep
GLPSDPHGLLAASQSGHGGENRGHQRDERDAGNSPVQETTTDDDERRPATSSERRRRLSGDRWRRRRGARASPLPRAPDGDV

SEQ ID NO: 134172 - protein, 150 aa, Oryza sativa
  unsure (1)..(150): unsure at all Xaa locations
  Clone ID: PAT_MRT4530_35971C.1.pep
PTRPAGSPGSVSSAADSFSGVNLGEDDASSPMKNSAFHSAPAVIECKCGMPLCICEAPKPEPVPVKSISTTSSSAQSNPRPKKSSTNQQSAEXSSVKKASATSSSNSSSFLNLGLMSNDTNDKGPSEYDVTGEGLREAIKSXGDIKAVKK

SEQ ID NO: 134173 - protein, 430 aa, Oryza sativa
  Clone ID: PAT_MRT4530_35972C.1.pep
MATKQILHMNPGQGETSYARNSTIQNTLFSKTSIISKKELHLQKTAQDRMKPLIEDAIKAFCGAALPKSMVIADLGCSSGPNALTLVSAMVNAIHRYCMEHKQPQPEMCIFLNDLPCNDFNTVAKSLGEFKHGQDSSSHHIIVTSMVPGSFYDRLFTSTSVHFFCSSISLHWLSEVGMQLDSVNYMYVNSIRIPHICCHGIIGQYSPLVPFYKQAPEELVKSKIPMYDSDDKLRLLNREIVDNAYARQFRKDFTLFLSLRAQELVLGGQLIFSLVGRCSSNHASKSTQVWKLLAVALNDMASRELHELIIGIKVSFQGMISKEKFDTFHIPIYAPLDKELDSIIEDEGSFRINKTMVYDAFHATDGMLPSPNIMASMTRAVFEPVIVQHFGFSGETMADFSSAVERLSSSSFLEAEFPLVCLCLSLTRAR

SEQ ID NO: 134174 - protein, 308 aa, Oryza sativa
  Clone ID: PAT_MRT4530_35973C.1.pep
MAMETPPPFQESAHCDVCRCTFTTFRRRHHCRNCGRTLCHEHSSYHMALPQYGIYTDVRVCYDCFNKSSSRGGVGNAGSPGSVSSAADSFSGLNLGEDDASSPMKNSAFHSAPAVIECKCGMPLCICEAPKPEPVPVKFCVPPPNEHMQQSISTTSSSAQSNPRPKKSSTNQQSAESSVKKASATSSSNSSSFLNLGLMSNDTNDKGPSEYDVTGEGLREAIKSGDIKAVKKLLSQGVDSNYCDKQGFALLHLAALFNQTEIALILMDNGANIQSKNGQGETPLDCAPAMLQYKMRQRMEELAASQRP

SEQ ID NO: 134175 - protein, 93 aa, Oryza sativa
  unsure (1)..(93): unsure at all Xaa locations
  Clone ID: PAT_MRT4530_35974C.1.pep
MWQDSAIDQRSIGQTPYEATRAEGRSSASSADQGPSTPRSKHSATEQRRRTKINDRQASRXLEILRELLPHTDQKRDKASFLSEVNRISILAL

SEQ ID NO: 134176 - protein, 62 aa, Oryza sativa
  unsure (1)..(62): unsure at all Xaa locations
  Clone ID: PAT_MRT4530_35975C.1.pep
ISRESIQCDGSCLCECACIHQCACVFVSHLCVCCVNNRGWESMWFLTIGKYAXKNIKSDLCM

SEQ ID NO: 134177 - protein, 110 aa, Oryza sativa
  Clone ID: PAT_MRT4530_35976C.1.pep
GVVMSFYGITCLFIRSYLWGTILWNIGSAYDRFDRKVGVVCIFRWVFLRFLMQDIQSIRIQVKEGFFPRRILYMEIWARGHSLEKFFTVREIELYARPVFYLHSVPSLTS

SEQ ID NO: 134178 - protein, 115 aa, Oryza sativa
  unsure (1)..(115): unsure at all Xaa locations
  Clone ID: PAT_MRT4530_35977C.1.pep
PTPTARPAPPPPALIPPHREAXPPPSPVVPPRRLHPTTPLRPSTRDESAATSPPXTPPPSLNAALTFGSRRICRTPSTPPRQTPRPPSPTPPLPPRSPFVCFCPFAADRAVLKIT

SEQ ID NO: 134179 - protein, 54 aa, Oryza sativa
  Clone ID: PAT_MRT4530_35978C.1.pep
KSLFRTCSGACGRPCCCFSGDAVTKKTTTTIRKCAASYLARGHKIVYIWREVHI

SEQ ID NO: 134180 - protein, 86 aa, Oryza sativa
  Clone ID: PAT_MRT4530_35979C.1.pep
PAGSSISILPKPWGVPSLSISAAADADDGLQPVGPTGGAPAVRGDGRGQPNLKDADLTHHHRKRGRGGVAKLREQTRGRYEAGRKR

SEQ ID NO: 134181 - protein, 157 aa, Oryza sativa
  Clone ID: PAT_MRT4530_3597C.1.pep
MSSTRRLLHVQHPPPSSTSGARRPIPSLTPVPRSMSDARLPMPGSRRPSIRAGYASVDLRPPPRPALGSSADDEGRRGHSMELCLVACPPSGRRVISSKTRARVAVPCAVEVVPSLGILLPLPLGPEEAAASATVPLEIAMYTAPAGDKPEDAAPLL

SEQ ID NO: 134182 - protein, 39 aa, Oryza sativa
  Clone ID: PAT_MRT4530_35980C.1.pep
MDLTMLRDKSLRRGTRVWVWQKGKLKGVDITQGWEQKLK

SEQ ID NO: 134183 - protein, 57 aa, Oryza sativa
  unsure (1)..(57): unsure at all Xaa locations
  Clone ID: PAT_MRT4530_35981C.1.pep
LKVKEIKNGCFDMLXMLGFFVEDIVMGKGSLKNFDDNLAEPVKNNDWAYVTNFVNGK

SEQ ID NO: 134184 - protein, 46 aa, Oryza sativa
  Clone ID: PAT_MRT4530_35982C.1.pep
SGHFMDLNYLVCIYKHNHPIGNARTKNLIVALKKQEEVFYCYGTNE

SEQ ID NO: 134185 - protein, 62 aa, Oryza sativa
  Clone ID: PAT_MRT4530_35983C.1.pep
FFFFFFWSKRIHISLPQMVGVLVQFLAKVCIRHSNMDWRIHGVFLQENTCNQTTSNLIIASN

SEQ ID NO: 134186 - protein, 94 aa, Oryza sativa
  Clone ID: PAT_MRT4530_35984C.1.pep
SSAPCVTSLPPRCLCWRSPRGRPQTATRSNGRAARTWRGSRRSGSCRTRLRRVRPPCRRPSKEPFLGPRRGRTPSPPSPPPLPPPSPSEQHHHE

SEQ ID NO: 134187 - protein, 115 aa, Oryza sativa
  Clone ID: PAT_MRT4530_35985C.1.pep
MASPSASRRRRDHGKRTRRGGCRSSSSSANLSLPRAPPLSGNPNPSPSSTTRGPAPPPVAVSAGTGGRRRRRWRDWAELPMDAILAVFHKHDHIGILTGAGAAPRRVEAELWRRI

SEQ ID NO: 134188 - protein, 863 aa, Oryza sativa
  Clone ID: PAT_MRT4530_35986C.1.pep
MAQSNWEADKMLDVYIYDYLLKRNLQSTAKAFMAEGKVAADPVGNHLISAASLVAAPFVFLPGFSLVSISKGVIFSQIRTENSENWKRWGSSPPGDLVKKKKERAIDAPGGFLFEWWSVFWDIFIARTNEKHSEVAAAYLEAQQIKAREHQQQMQMQQLQLIQHRHAQLQRTNASHPSLNGPINTLNSDGILGHSTASVLAAKMYEERLKHPQSLDSEGSQLLDASRMALLKSAATNHAGQLVPGTPGNVSTTLQQIQSRNQQTMDIKSEGNMGVAQRSLPMDPSSLYGQGIIQPKPGLGGAGLNQGVSGLPLKGWPLTGIDQLRPNLGAQMQKPFLSTQSQFQLMSPQQQQQFLAQAQAQGNLSNSSNYGDLDPRRYTALTRGGLNGKDGQPAGTDGCISSPMQSSSPKVRSDQEYLIKVQQTSSQQPQEQQQQQSQQQQQQQSQQQQMQQSNRKRKQPTSSGAANSTGTGNTVGPSTNSPPSTPSTHTPGDGLGMPGNMRHVPKNLVMYGADGTGLASSSNQMDDLEPFGDVGSLEDNVESFLANDDGDARDIFAALKRSPAEPNPAASKGFTFNEVNCLRTNNSKVVCCHFSSDGKILASAGHEKKAVLWNMDTFQSQYTSEEHSLIITDVRFRPNSSQLATSSFDRTIKLWNAADPGFCLHTFVGHNVQVTSLDFHPKKTDLLCSCDGNGEIRYWNLTQLSCMRAMKGGTAQVRFQPNTGQFLAAAAETMVAIFDVETHSKKYTLQGHNTDVQSVCWDSSGEYLASVSQDLVKVWSISSGECIHEVSSNGNKFHSCVFHPSYANLLVIGGYQSLELWNMVKNQSMTIQAHEGLIAALAQSPVNGTVASASHDNSVKLWK

SEQ ID NO: 134189 - protein, 799 aa, Oryza sativa
  Clone ID: PAT_MRT4530_35987C.1.pep
MAQSNWEADKMLDVYIYDYLLKRNLQATAKSFMAEGKVSADPVAIDAPGGFLFEWWSVFWDIFIARTNEKHSEIAAAYLEAQQTKAREHQQQMQMQQLQLIQQRHAQLQRTNATHPSLNGPISGLNSDGILGPSTASVLAAKMYEERLKHSHPMDSDGSQLLDASRLALLKSASTNHSGQSVPGTPGSVSTTLQQIQARNQQNIDIKSEGNMSVAQRSMPMDPSSLYGQGIIQPKPGLGGGVLNQGVSGLPLKGWPLTGIDQLRPNLGGQMQKPFLSTQSQFQLMSPQQQQQFLAQAQAQGNLGNSTNLGDMDPRRLSALTRSVLNGKDGQPAGTDGCITSPMQSSSPKVRPDQEYLMKLYLKGTHMQQTSSQQTQEQLQQQHNQQQQQQTQQGNRKRKQPTSSGAANSTGTANTVGPSTNSPPSTPSTHTPGDGLGMTGNMRHVPKNLMIYISKAVVYLQDDLEQFGDMGSLDDNVESFLANGDGDARDIFAAPEKSPAEPNPVASKGFTFSEVNCWRTNNSKVVCCHFSSDGKILASAGHEKKAVLWNMETFQTQYTAEEHAVIITDVRFRPNSNQLATSSFDRTIKLWNAADPGFSLHTFAGHCSGITSLDFHPKKTDLLCSCDSNGEIRYWNVSQLSCMRAMKGGTAQVRFQPNTGQFLAAATENVVSIFDVETNGKKYTLQGHNSEVQSVCWDSSGQYLASVSQDLVKVWSISSGDCTHEVSSNGNKFHSCVFHPGYTDLLVIGGYQSLELWNMVKNQSMTVQAHEGLIAALAQSPITGMVASASHDNSVKLWK

SEQ ID NO: 134190 - protein, 99 aa, Oryza sativa
  Clone ID: PAT_MRT4530_35988C.1.pep
MSSPARSTVSAASAGAISASDDVADSIDALYRKDEAMAELKSEVMEALQKEVRSLDDDSWMFAAPRSRINLVSMSGGYLRKQQEKLADLGQASKKTRNF

SEQ ID NO: 134191 - protein, 379 aa, Oryza sativa
  Clone ID: PAT_MRT4530_35989C.1.pep
MMRVVAVIAVRRREGTGGGLQLDLAYRPGPLFDRVPGVHPYATGESAHTHTTVPFLLHPAPAASSSPPPPHAPPDPPTPLLTHRPPRAPLDLASIAAVAVGRGAHRLPSHEMVCFASLRRALPLLLRATTTTTPRFLLPRALSGGVGGGAAVDARALLRGHSGWRGLRVAARMMLDSFDSAAAAGQMQPQQRAAGAVACSAQDGGAAGYASGGWARDDGSTASTAVLVGGHLYVANVGDSRAVVSKAGKAMALSEDHKPNRSDERKRIENAGGVVIWAGTWRVGGVLAMSRAFGNRLLKPFVVAEPEIQEELVNEDLECLVLASDGLWDVVENEQCVSLAKTEDLPESVARKLTEIAYSRGSADNITCIVVQFHHDKTE

SEQ ID NO: 134192 - protein, 130 aa, Oryza sativa
  Clone ID: PAT_MRT4530_3598C.1.pep
GIEEEGITEKLLNVAASASPSAVFRLPSSSIVAPHLGEFPTSCSCLHIRCSAATATAAGSMASTWATLAAAEAPTGSQERDTHPTDGKEATGQLHERVDVAERKEREQRYVQRFAGLVAGGGRGIHTGHS

SEQ ID NO: 134193 - protein, 99 aa, Oryza sativa; identical to SEQ ID NO: 134190
  Clone ID: PAT_MRT4530_35990C.1.pep

SEQ ID NO: 134194 - protein, 66 aa, Oryza sativa
  Clone ID: PAT_MRT4530_35992C.1.pep
GIPPPPFLPVPRAPPPLAAPPLRPCAAASPWPTSLSHAEPPAGAPLSPFEPLPVGPALPGAPSPLP

SEQ ID NO: 134195 - protein, 70 aa, Oryza sativa
  Clone ID: PAT_MRT4530_35993C.1.pep
MRAEEELSVIAQGVGRWSYIACTEQVASYRMAAVKRERERHRCIVPWTRRCWACGVPLESREERGQVSWV

SEQ ID NO: 134196 - protein, 60 aa, Oryza sativa
  Clone ID: PAT_MRT4530_35994C.1.pep
LALSVERVLAADGGRGDGDGDGDGEAGSAASRRLWRRRRAFEESEKPRVGVADLRGLIGG

SEQ ID NO: 134197 - protein, 50 aa, Oryza sativa
  Clone ID: PAT_MRT4530_35995C.1.pep
YPRAMSTKSYGPGWQSSVAPKFTPRITSLPTTRASPPSQTASPLPRPPAA

SEQ ID NO: 134198 - protein, 55 aa, Oryza sativa
  Clone ID: PAT_MRT4530_35996C.1.pep
FSIERCISAVVSFCLECFATEQKIQGRVDQCVVGMLMNILVSDIVYLWTQFTEIE

SEQ ID NO: 134199 - protein, 73 aa, Oryza sativa
  unsure (1)..(73): unsure at all Xaa locations
  Clone ID: PAT_MRT4530_35997C.1.pep
RLRARMLRPEDTTGRLGTVXRYLFQDTDSVNNSGGLLNPSGLLRRVRMFVPESQVTSMHDSHEALFRLRTNLG

SEQ ID NO: 134200 - protein, 234 aa, Oryza sativa
  Clone ID: PAT_MRT4530_35998C.1.pep
MMVGFMGKRKELDQVVDGLSDFSLSGPAAKSRRLDIGLPPIMEEETPGPSMPFGHEMLGEEIHSVVSMPIIEDMLGGAMESHPSSEDKALVLYKSVDNTACIGPGTSNPSIIISPDLIRSLKNQAFMQRNFHGLEDKSPGCSNFLALVPWTPPQIATVSNWSASDSEKREFFEVPMESNETEVDSMDVEESPEANAAAIDGESLHQWAVATTLHDPIVATKPFSTCYVFKVTEG

SEQ ID NO: 134201 - protein, 288 aa, Oryza sativa
  Clone ID: PAT_MRT4530_35999C.1.pep
MVGGGGGGEAAMSPPSGGGKRGRDPEEDVYVDNLHSHKRYLSEIMASSLNGLSVGDSLVDNIMESPARSENTSYFRDEIISQYSPMSEDSDDYRCYDTQLPNGSQTDAMVSPSTSPMSSPHRFQKPQSGLLSANPYPLPSCSLSSVVCSNPRRGSENEGRFPSSPNDMCHGGDLRKTALLRSVQMRVQGPHAYELSFCGRQEQEHAHDHEDEHQHEHLEGLEGAERSSSHRETISDGVSYQMPENSYGRPEHDIDYIEDCTPHGCLSDLKFKQEDKDCSKLTSMDKNR

SEQ ID NO: 134202 - protein, 312 aa, Oryza sativa
  Clone ID: PAT_MRT4530_3599C.1.pep
MPLAAVSSAPPHPMAPSPSPSLAPPLLPPRRQIRPPPWSRAPDADELRREDRGEVIKDLENIENEEEAKNAKLEEKRHLGSLSLEWSEDDGTNSREDCSIILDNLEPNSILKNLKISGYVGAKIPYWIAKASVNNLISLDLGGCKNWKKLPSLAEFLLLKHLRLDNLQLPSEFLLLNQLRATAAETAAAGSMRDGNLQNSYCSSIFARPRRQARCATAPVDGGGATTSMRRRRDGLDATAARWPRWAAARQPRCDGSATTTMGDGGATILMGDGGATASMRRWHGADSRHGRPDTAEGREESLFLFARSYPC

SEQ ID NO: 134203 - protein, 63 aa, Oryza sativa
  Clone ID: PAT_MRT4530_359C.1.pep
MQVQRSDTEWSFRPAQDVLSTAEVGNELQTTCAQQEQAMNTKRSSPTEGAFMASSNFGSGSCV

SEQ ID NO: 134204 - protein, 60 aa, Oryza sativa
  Clone ID: PAT_MRT4530_35C.1.pep
HGFITLHTLILGYTHSGRIDQLLNSSISHRNNSPIMKAHTNHTHMEWQYWGLIKVEHSPR

SEQ ID NO: 134205 - protein, 160 aa, Oryza sativa
  unsure (1)..(160): unsure at all Xaa locations
  Clone ID: PAT_MRT4530_36000C.1.pep
MTRWELALDAHLGAGGQRRRPCGRASIRGGGPCWSCLICWSGILDLDKFARALRLRCFDGSDFWDSNWIGHQPLNYLTPALYNHSKGKYRSVHDALLGEQWIQDIRHDLSMALLHDFLIVFRLLWENATVLSKETEDNYLEXTSSGKYSAKSSYLAQFSG

SEQ ID NO: 134206 - protein, 129 aa, Oryza sativa
  Clone ID: PAT_MRT4530_36001C.1.pep
MAQLPFSVVENATLRTFLAKCSRAASRSREAKDGAPIHGFPKISAAVIKTNVDCVICRQGRRRQAGAGAAAAAMADAAVPIAIDLDLGVSACVMAAVSEDAIHEPSPAIRPTPTMLHGHRYMAKGEDQW

SEQ ID NO: 134207 - protein, 51 aa, Oryza sativa
  Clone ID: PAT_MRT4530_36002C.1.pep
PFEGRIGFLTLTDFLPKKFFFFYPKTCPPGSQPTLTHFINHTGQWFFPKTN

SEQ ID NO: 134208 - protein, 50 aa, Oryza sativa
  unsure (1)..(50): unsure at all Xaa locations
  Clone ID: PAT_MRT4530_36003C.1.pep
SCVPSPKLTGPCALATSVEHHLWFESISWMNXGMNLSGWNEQVPPTDAIL

SEQ ID NO: 134209 - protein, 140 aa, Oryza sativa
  unsure (1)..(140): unsure at all Xaa locations
  Clone ID: PAT_MRT4530_36004C.1.pep
GWELPPPGXGXAXXKLSGFPPGFQXFGXQXRVVPXRRAAEERXHEEXGRAVHAPKGAAXRRRRAQAAGASXRRHRRMSVAVGERASERKLRISGSNASEGNSITRVVHVCATSDILIDFCHLTCGCERMHQWVSXYDICT

SEQ ID NO: 134210 - protein, 58 aa, Oryza sativa
  unsure (1)..(58): unsure at all Xaa locations
  Clone ID: PAT_MRT4530_36005C.1.pep
RLALQRAVTRRRPQPAQLPXDPCVPPATRRRTRHRAXNRVRILTVERRXHLNLSSIQT

SEQ ID NO: 134211 - protein, 320 aa, Oryza sativa
  unsure (1)..(320): unsure at all Xaa locations
  Clone ID: PAT_MRT4530_36006C.1.pep
MRKRRRLDRSCIIDAAVWLGHGRTARGQPERRNLLRDSSVLTGGSYGGEGKRQSRLVEGGTTGGGGGPWREGIRAGANSRREGGCAGVDRRRRRLMEGGSTGGGRGPWRDGIHAGVNSRREGGYAKHGSTAVPLVEGGSTGRGGRPWRKGIRAAVNLXREGGCAERRSAAVPVEFRPIGSPPLPLPARQRGGARCPGQAERADGMADAGTGARMEGGGGSGSAGSADCSSRSTARTRRRHSSSLSSSPGPAPARRLDFRRLSLWWIRGGEEKNSQPPLLIVITRAGAGSSSVSPCDGSLEERRREKKGLEKIELTAGSQM

SEQ ID NO: 134212 - protein, 102 aa, Oryza sativa
  Clone ID: PAT_MRT4530_36007C.1.pep
DDAAQVFDQTNPLTQTIDGRKVSCSGPGGLTGRTASFRSRDIHSSHYGRICSIDTSEGIIVGLTGSLAIHVRIDHTWEGTESTSAPASGEAAHRCPPPPLRP

SEQ ID NO: 134213 - protein, 143 aa, Oryza sativa
  Clone ID: PAT_MRT4530_36008C.1.pep
MAKLLITGLSTAITCSSAVAFKGAAVAVVLLLRLVQLPGQLGCLLLCAIREAVERAVAAAFAAAGDAVAAAADAAAGAWRDAAASNGTAVVALVQAAMGRPEALLAAAGEVAAFAWEVAKQTASNSTATFLDAALFVARHARA

SEQ ID NO: 134214 - protein, 47 aa, Oryza sativa
  Clone ID: PAT_MRT4530_36009C.1.pep
MIKSLTIIVSVCNVLVRTDKEEIAGKVRTLFDGKVNILTTIPRFLMT

SEQ ID NO: 134215 - protein, 48 aa, Oryza sativa
  Clone ID: PAT_MRT4530_3600C.1.pep
MVTTTIGVQNQPQSSTINDGGKRRFLVATIGTSSGKTIGERQDWGTRT

SEQ ID NO: 134216 - protein, 355 aa, Oryza sativa
  Clone ID: PAT_MRT4530_36010C.1.pep
MASMKGENVTVSAAAAPRMKKLASMLCMKGGNGDGSYLNNSQAQALHARRMLHFLEETLDAMMERSSSDKLFTAADLGCSCGSNSLFIVDVIVRRVSEAYESRGRDAPEFQVFFSELPSNDFNTLFQLLPPLLAPVAGSLEECLAAGEGAATATRPYHAAGVPGTFYGRLFPGESIDVFTSTFSLHWLSQVPEEMKRGGAMFLACLGRSSGDPADQGGAGLLFGTHFQDAWDDLVQEGVVEGEKRDSFNIPVYAPSLQEFRDVVRADGAFAIDRLELVRGGSPLVVDRPDDAAEVGRAMANSCKAVAGVLVDAHIGERRGAQLFERLERRAARHARELVEKMHFFHVVCSLSLAP

SEQ ID NO: 134217 - protein, 400 aa, Oryza sativa
  Clone ID: PAT_MRT4530_36011C.1.pep
MASMKGENVTVSAAAAPRMKKLASMLCMKGGNGDGSYLNNSQAQALHARRMLHFLEETLDAMMERSSSDKLFTAADLGCSCGSNSLFIVDVIVRRVSEAYESRGRDAPEFQVFFSDLPSNDFNTLFQLLPPLLAPVAGSLEECLAAGEGAATATRPYHAAGVPGTFYGRLFPGESIDVFTSTFSLHWLSQVPEEVGDSASPAYNGGRVFVHRATEAVAAAYKRQFQADLARFLRSRAREMKRGGAMFLACLGRSSGDPADQGGAGLLFGTHFQDAWDDLVQEGVVEGEKRDSFNIPVYAPSLQEFRDVVRADGAFAIDRLELVRGGSPLVVDRPDDAAEVGRAMANSCKAVAGVLVDAHIGERRGAQLFERLERRAARHARELVEKMHFFHVVCSLSLAP

SEQ ID NO: 134218 - protein, 422 aa, Oryza sativa
  Clone ID: PAT_MRT4530_36012C.1.pep
MGSTGEVMLASGGGAAPAPATSRDGRGAAAGLGPVAFKDAADADAIPVRPPTEHDAAVSAMPARVFHNLKLRQHQGYWVLDAWARGAVAMQRGGGGLVPRADGDVLLASLPKSGTTWLKALAFAVMARAAHPPASPDHPLRRLNPHDCVPLVDRLFAPGRDAVLDELPSPRLMCTHMPLSLLPATVADGSSGCKIIYICRCRVPAGHGHRGPVQARQGVQRHGTLRCSSPCSPSTAAAPAYTTARTGYSWMALRRGRSHSSPDQKDALVSMWHFLKRNGLQNLYESFCEGTCFGGPVWNHILEYWRASKANPSRVLFLRYERLLQDPTDSIRELAEFVGQPFTSSEEEAGVVTEIVELCSMENLMSQKANKEGAQGVFIKFSHDSYFRKGVAGGWTSHMTPEMGRRLDAILRDKFDGSGLTI

SEQ ID NO: 134219 - protein, 65 aa, Oryza sativa
  unsure (1)..(65): unsure at all Xaa locations
  Clone ID: PAT_MRT4530_36013C.1.pep
MAKPYVKYLCFVLSIKVVRYNYVNEDIINKSELLLTYNLVHNKVHELIHGGKPIYXSLVIVHYVD

SEQ ID NO: 134220 - protein, 238 aa, Oryza sativa
  Clone ID: PAT_MRT4530_36014C.1.pep
MATLDVYNFPYLKKMEVSAAIVRVSNYQDEATKAGLNDIQAGWVIDPTTYGDSKTHFFVSWTVLIWMHDIQADYYNKTGCFNLDCDGFVPVNGAPVTPGDTLEQANNQTKISFKIFKDKNDGDWWLYFGYDINNLNRVGFWPKNIFNRMVDHATRIRWAGYAQSYKGSSSPPMGNGQFPGKMSASFQNVMYVDTDGQPYPPPVWPAGLEVYASNTKCYQASIFEDNMFYYVGPGSCTS

SEQ ID NO: 134221 - protein, 54 aa, Oryza sativa
  Clone ID: PAT_MRT4530_36015C.1.pep
AKFSPLSFFSLKVKKQVLFFCLKKKKKKKKKKKKEKPKKKKKKTKKKKKKKKKY

SEQ ID NO: 134222 - protein, 88 aa, Oryza sativa
  Clone ID: PAT_MRT4530_36016C.1.pep
RHRQVQAYLQIRQTKNISTGRISTGSHLSGVLTWYRHHLIMQNNNVWPRVQSCAIGGFKQNWFQSCYSVGLVSLSPVQSLCRIVRSSR

SEQ ID NO: 134223 - protein, 89 aa, Oryza sativa
  Clone ID: PAT_MRT4530_36017C.1.pep
LFNKNARRLLNPTRSSLGCKHSTQKSNNTQFQLKSVGVPLITWILKGNHTLTTWVQGIAHICLDILEYSGPKHGIWLAYCGDRLITDLM

SEQ ID NO: 134224 - protein, 64 aa, Oryza sativa
  Clone ID: PAT_MRT4530_36018C.1.pep
EGIWSLEKELGTPALHWPLDGINTTGQSSKSFHLPFDNGRTPPSPITFPASSPISKTPMFLSHP

SEQ ID NO: 134225 - protein, 97 aa, Oryza sativa
  unsure (1)..(97): unsure at all Xaa locations
  Clone ID: PAT_MRT4530_36019C.1.pep
GACPPPLPPPLAPPPXKLPPPXGNVATPPRPSRGARPPPLPPPRPPPTSPXPPSPPPRGARPLPXTPPPPPAPPHPPPPASPCPPPPQGTPSATAPS

SEQ ID NO: 134226 - protein, 116 aa, Oryza sativa
  Clone ID: PAT_MRT4530_3601C.1.pep
MARPAIVAAPALLLLALLIALATGGADAAPGEVPLSWELGVVGADDAFGFPGEEAADSATAVVRRVLQQGSYISYGALRRDTTPCSVRGASYYNCQPGAEANPYSRGCSAITQCRG

SEQ ID NO: 134227 - protein, 78 aa, Oryza sativa
  unsure (1)..(78): unsure at all Xaa locations
  Clone ID: PAT_MRT4530_36020C.1.pep
LRLHRRHASVAAEWCLRXPPFMGVHVFTAGMPPLPPSGASAXRSWASMSSPPACLRCRRVVPPPLAWFHWRRLVFLSP

SEQ ID NO: 134228 - protein, 64 aa, Oryza sativa
  unsure (1)..(64): unsure at all Xaa locations
  Clone ID: PAT_MRT4530_36021C.1.pep
RGPRQGRLXCVHLLFDKDDVSCPTLSRPGSTPLHLAAHAGSLTALKTSLPPIPQHDPRELCWGH

SEQ ID NO: 134229 - protein, 680 aa, Oryza sativa
  Clone ID: PAT_MRT4530_36023C.1.pep
MPISHELGEPDESFYNLWKEECEELWEEEDELWGDEDVEEELSLRHPGFNKWTVQQGAAGGDHIRAKDKNFYCFEVQVHFTGELVDGTQFVSSRENDIPERFILGQEDVMHGFNLAVSSMQPGEKAIFTIPSALTMTKAGSPASIPSNIPPNQTLRFEIELIAMFTIIDIFKDEGILKKIVKNAEPDRKQSHSSDFVFVKYDACLMDGTSVSKSEGVEFSLTDGFFCPAFAHAVHTMKEGEEAVLIVKPKYAFGEQGRPSQGEEAAVPPDATLYVHLLFVCWIRRIGEDQAIAKKTLRIGNSQRIHTQSQAVVKVDNRIVFLLESMPGEIRDSARSLQPASEVRLLGKLQDGTVFDRRGYGDDEPFEFVVDEGQVIDGLDESVMTMEEGEVAEFTIPPQHAFDAVGSDQHQFAFVPRNATVVYKIELLSVVNEKHPLYIPSRDEIVEYASRKEEEGDIYFNLGKHLRAHRRYFKARQIIEYSRFGVRRGKINLIKLLSIPTSEIDAQLEEMWISCTFKAAKCAIQLGCYMQASCYYSEVLDDDVANVQAQQQQTLLQEFPDGSSRDPDAMQRGFEQFPPEYESELQLNATFTPAAFSPRRKGEHPYRGEIIGFPDVQANSSQPASTPSTAPSTPNPATPQTNALATGTSGTPSGSAAQSSGTINTNRGFLFRCFGPSPTS

SEQ ID NO: 134230 - protein, 106 aa, Oryza sativa
  unsure (1)..(106): unsure at all Xaa locations
  Clone ID: PAT_MRT4530_36024C.1.pep
MEIQYELNSDRDPNRSPTGLGGLSDGSYIFVRGVTGGGIASPXEYSEENARGGEGRAGAIDYFFYIDARYFVRIPSTSXRLLPLRSTSSACMTSSTTNRLFFHGPT

SEQ ID NO: 134231 - protein, 607 aa, Oryza sativa
  Clone ID: PAT_MRT4530_36025C.1.pep
MGPTTRARFVHNRRRRRRRGPYAAPDDDDEEEDQQEASSSSSSSDEGEEDAEEEGSGEVDDDDGEAAEPSGKEEEVSPVAAAARSGRKASITISLKKVCKVCKSTGHEAGFKGAVYIDCPRKPCFLCKMPGSDTLHCHTTLTCPHRVAMEHGVIPASRRNTNTSLDYVFQSQVKGKIPMVKPQFLIPNQLECGNIKFHQRRVTCLEFHPTKNNVLLSGDKKGLLGVWDYVKLHEKITYDSVHSCILNSMKFDTTNDGLLYTASSDGTISSTDLDTGIGSSLLNLNPNGWNGPSTWRMIYGMDFNSDKGLLLVADSFGFLHLLDRRLKARIGDPILIHKKGSKVTSLHCNPAQPEVLLSSGNDHYARIWDTRKLEPNSAFVSLAHGRVVNSGYFSPQSGNKILTTCQDNRIRVWDYIFGNLESPSREIVHSHDFNRHLTPFKAEWDPKDHTETVAVIGRYISENYNGIALHPIDFIDTSTGKLLAEVMDPDITTISPVNKLHPRDDILASGSSRSIFIWKPKTESDATEERNREKAKEFVYGSGSRKKSNGKHENSSDDDSDGSCDGKKKKKAKKTRFTHTIKGKGKSKTVCSLHFCYQKFWASILFS

SEQ ID NO: 134232 - protein, 154 aa, Oryza sativa
  Clone ID: PAT_MRT4530_36026C.1.pep
MDRRKHPWLDPSSQAGPLHLRFQERANNSLESIQICLPIPPSANPTLNPSVGVRASQRPAAVGRRSGSGVAERRGRGARQHEERTGKRRQRRWCCGHRQRRAGGEENPSNLQELLLPWLQACNSCCSYQNHCAIGSFGVLVFEEEAEGYGYFIV

SEQ ID NO: 134233 - protein, 50 aa, Oryza sativa
  Clone ID: PAT_MRT4530_36027C.1.pep
FRGSPGRLSVIVQCHYHQCAWLCRCRRRLHCLSVGAIRQAGGARAEVRRG

SEQ ID NO: 134234 - protein, 79 aa, Oryza sativa
  Clone ID: PAT_MRT4530_36028C.1.pep
LIYVFSFGLYLKVMNQLPVVHYLEDCLAPMLSFSPWKVFSFFFFFFFILFGSLVFCNPLLYFQIKKNYININPQKLKKQ

SEQ ID NO: 134235 - protein, 133 aa, Oryza sativa
  Clone ID: PAT_MRT4530_36029C.1.pep
MPLFQTQSRLDRMLYVGLTEEHEESARLFAHMVGAQVLSQSGALNLDIKDNQPTGNDSHSSTLDPEDEETNEHLNSTHGSQNNRALNAADTVKDDHGKGNLTVGKLMEAYEGCISKLRKSQSNRRKISLRKVE

SEQ ID NO: 134236 - protein, 78 aa, Oryza sativa
  Clone ID: PAT_MRT4530_3602C.1.pep
MGPTSRHRLSPEATSKWAPKAPSCPRWKPHPHGRTGSPPRLVVPPDTRLPPPLRPCMMTSSLDPTAFRYHGLQSYAYA

SEQ ID NO: 134237 - protein, 81 aa, Oryza sativa
  Clone ID: PAT_MRT4530_36030C.1.pep
MAAGSDGKLAGDWMVGCEFGGHLHVEGDDANPMGVTAASSSGASDGAAAASAASWLPSSGSDGPLLVPASAARPPFLVLTI

SEQ ID NO: 134238 - protein, 69 aa, Oryza sativa
  Clone ID: PAT_MRT4530_36031C.1.pep
FGFFFFFFFFFCFFFFFFFFFFFNNKEEHPAPNLFLFINIITNIEKQHPNGGRVARTSKHRKLNKQRPN

SEQ ID NO: 134239 - protein, 75 aa, Oryza sativa
  Clone ID: PAT_MRT4530_36032C.1.pep
RQQQEQAQAQDQYQQVQYSERQQTSSRWNGIGGRTFGRTKGGVTLENPSRAVYSTHLPGGLPGAIGKKFPFFTLF

SEQ ID NO: 134240 - protein, 103 aa, Oryza sativa
  unsure (1)..(103): unsure at all Xaa locations
  Clone ID: PAT_MRT4530_36033C.1.pep
AAGIRHEPSRSVVLYAAMXGAGHLLPIVELAKLFLTRGLDVTIAVPATPGSGTTGSPTIAGIAASNPSITFHHLPPPPSCADPDPNLLLLMLDVLRRSVPSLA

SEQ ID NO: 134241 - protein, 269 aa, Oryza sativa
  Clone ID: PAT_MRT4530_36034C.1.pep
MNLNRKRTHAQPVRAIPAVSPRPVVHRFKHFDNVEFEDCMVNRAFSVIVMGSKMEAVVSGELATRFQNILIVGRNYTIYGVYFQPNYWKLNFRAIKRQYECFFTRNTIVESYNQPLQFPIYPKQLTEFGELSAYYNKMFVGPLQCVSNRLYKEVTLVDTRCQLVVIGVYANHLTTHVLQWASTFANNHVVVGTMLQLDRTYWCLESSDHSQFHFNPSFHALNELHNFRWFVVNGEVNLSFVDRYHVTRWVHIAEVLDSKSSFNKNIKHA

SEQ ID NO: 134242 - protein, 96 aa, Oryza sativa
  unsure (1)..(96): unsure at all Xaa locations
  Clone ID: PAT_MRT4530_36035C.1.pep
RRPVDDQLRQDCSRSSPRSTDSWSRCSAAQPHVGGIYRELGTTDVGHPMXEVFPGCRRGDLERRATXPGVCNVDIPNGTXWCLYWLGYPRTPITGH

SEQ ID NO: 134243 - protein, 32 aa, Oryza sativa
  Clone ID: PAT_MRT4530_36036C.1.pep
MGRPMHSAAAGPRWPTPPLGHPVQPGFLTWAA

SEQ ID NO: 134244 - protein, 219 aa, Oryza sativa
  unsure (1)..(219): unsure at all Xaa locations
  Clone ID: PAT_MRT4530_36037C.1.pep
LVDPPGCRLRISFSAHKDLNIKFQSHRSRDYTXPYLPVNSSAIDTLQPAVGADGRKVEAEGNVLLASIENMQYAVTVDVLHTGFSAFGTVQKIAIFEKNGGTQALIQYPDVTTASVAKEALEGHCIYDGGYCXSDKSRDYTIPQGAMQAVPQPPGVPTTSAGWQGNPQAGGAYAPPGAAAPNHGTTGQAPNWNPGNSGYAPAPGAYPGQMYSSPMQYGA

SEQ ID NO: 134245 - protein, 592 aa, Oryza sativa
  Clone ID: PAT_MRT4530_36038C.1.pep
MAPPPATSRFLLLPPRLAAARGISGQPPPSPHAAAPTSTPQAFHAHLASLAAPSRAAHPATLRSILAALSRARAAGLPLLPATRVLAASALLRHGRLPDALAHFGLVPDSAALPAPLCNSLLAALASSGSLVSARKVFDRMIGRAVELDTVGFGVFVKNVGRRHGLAEVLRLVQAVRHQGDRVDRSVVAVMVADGLCREGRIEDAWQALEDMRFQGWKPDFVAYRVVSEAFREAGRTEEEGRILKQKRKLGVAPRKEDYREFMFALLSSRQIGEAKEIAEAIVLGDFPINDDVLNALICSVSEIDVDAAVMFCKFMIGKERFPSSDMLIHLCESLCTNGKGDDMWEFFRVLLDKGYCTDVRDYHLVVSFLGKAGKVREAYDVLKEVKRKRLEPDISSYNSLMESLCRKNLLRPAKKLWDEMFTSGCSPNLQTYNILITKFAEINESEQAQQLFDRMFQKGVSPDVTTYTSVINMLCQEKKYEQAVEIFTKCNFKGALSVLSCIPSNVESVNSHVILLKCLIDVGEVDLAIEHIKSIRSNFSSSFQNIINELMASLSTSASLQPVTRLISYLNSQGIVHDVGPWMGLMEHNYA

SEQ ID NO: 134246 - protein, 98 aa, Oryza sativa
  Clone ID: PAT_MRT4530_36039C.1.pep
ISFSKGLTTPPVTLKPPDWGASQKKLTPFGLCSGHQGDEPCQRARQICVKCLRPPPVSNGSPTRTKSLTRPWKTGVGNPATPKVTRRPCSKKAGDMGS

SEQ ID NO: 134247 - protein, 83 aa, Oryza sativa
  Clone ID: PAT_MRT4530_3603C.1.pep
MSWENDDGSLGGQLSRPDDSGLGRQWAPRRHPTAFSVIANDVRTLAGWVGEVGVRRPATGNEAAAATTREQEGLTPRHRYRRR

SEQ ID NO: 134248 - protein, 51 aa, Oryza sativa
  Clone ID: PAT_MRT4530_36040C.1.pep
SYSAKLAHLKAFTTNWIFIYSLNKYLVLYKINKYFVSKGDKCLASNCATLL

SEQ ID NO: 134249 - protein, 156 aa, Oryza sativa
  unsure (1)..(156): unsure at all Xaa locations
  Clone ID: PAT_MRT4530_36041C.1.pep
MYLIGVSLGYYLFFDNSSKGKSRSSQVVKVWVLAASFWIMAIILDSYVERVSRXRMCNFAYVMXLVFGQNFXVISMSHTSLGLFQYEKNLVLEDAFNQNMLGSFLLANILTGVVNLSVDTLSASSGTAFMILLVYSFTLCMIAALAQFCGIRMKFW

SEQ ID NO: 134250 - protein, 786 aa, Oryza sativa
  Clone ID: PAT_MRT4530_36042C.1.pep
MSSSVGGGGGQQFRYTQTPSKVLHLRNLPWECAEEELVELCNPFGRIVNTKCGVGANRNQAFVEFTSRKGFQKLYLPTNSIIVYTYVLFVINAAHYLCKAIPSLQTDINQAISMVSYFASSSEPAQIRGKTVYIQYSNRQEIVNNKSPGETAGNVLLVTIEGVQANDVTIDVIHLVFSAFGFVHKIATFEKAAGFQALIQYTDAATASAAREALDGRSIPRYLLPEHVTSCCLRISFSAHKDLNIKFQSHRSRDYTNPYLPVNSSAIDTLQPAVGADGRKVEAEGNVLLASIENMQYAVTVDVLHTVFSAFGTVQKIAIFEKNGGTQALIQYPDVTTASVAKEALEGHCIYDGGYCKLHLSYSRHTDLNVKAHSDKSRDYTIPQGAMQAVPQPPGVPTTSAGWQGNPQAGGAYAPPGAAAPNHGTTGQVPNWNPGNSGYAPAPGAYPGQMYSSPMQYGASGGFSAPAAPPQELHTSQQMPPPQYGNQPGPAGVDYQVHVGEYGVHWNFFFTLAAISILTSVIRIHPKYCGLAGLLVLTGFQTWLSFGLNEYLISNERNGGIISQNKEGVYSIFGYWGMYLIGVSLGYNLFFDNSSKGKSRSSQVVKVWVLAASFWIMAIILDSYVERVSRRMVGTDIKKVGRDDWSVVIGGEEKISEKNGCDWLRGEVDDDVASLHVKLKELVGDNFICNFAYVMLVFGQNFQVISILTLAGFISYEKNLVLEDAFNQNMLGSFLLANILTGVVNLSVDTLSASSGTAFMILLVYSFTLCMIAALAQFCGIRMKFW

SEQ ID NO: 134251 - protein, 126 aa, Oryza sativa
  Clone ID: PAT_MRT4530_36043C.1.pep
GISGQSPVWFSGIGCHLIPVFFVSAGSSLEVLLLWAPSPFVVETQFQFMGGRSATACVVVALLGGRHRLLSLLGCALKVLLFLWSFLWFGRFVASFLCLLCKCFAGCPGAKCAVVRFLGPVSCLFG

SEQ ID NO: 134252 - protein, 346 aa, Oryza sativa
  Clone ID: PAT_MRT4530_36044C.1.pep
MASTSSPPRHLFFLFALAFLAAGAADAWPAWGNGRMFFSKATRPEAVELDKVAVATPAAAAAPDATNSNRASDEFSRPSSGGSHNRGYGLYGRPEESYPEAYFRRGVHHDADKLTTTSAAAATAEQEKEEEATPAGDDDAWLGYPADGSGRGRPRPYPRGQQQQTTTTNAAVATAEQEDAAPARDGTGLGYSEDSSGRGRPMSYGRMRGGQQQQQQPQQQYGMSDTRLYQNGRYGYDVNTGKYGYGRESNPVRTRPEEFNGGRKFGGNAAGGQEYANGNYQEEFGVGHRAGEQVRRYGNGNVAGLEYANGNDHEEFGIGQRAGVQTGRRYDNAAAGYYDANGQYIP

SEQ ID NO: 134253 - protein, 1008 aa, Oryza sativa
  Clone ID: PAT_MRT4530_36045C.1.pep
MGQVMEVNVDERLALVPIVDNNTQIQQPAHEPQVENFLKALEVLARNGSPRHPYFYPMTGLNDRIEKLCKAKDFMALSCKLAGFQLLLRWQIPHYSGSTKEEGSQAHAEMEIVDVVPLDIQPPSSLVCVAPPVLKLPKAHVKKRDGKTSFFNPYRRQSSRLSNEQRRSEGGSQDGDRFENYWFDIVGSYEIVSMVWALDHGFDDPTKCISFKIKMLRKKLLNWSKNLSKLNSLLTNCNRVIDFLYLIEEARLLSVEEWNFRKIVKGQVIKLLEFRKIYWKKRCTNRWMFLGEENTSIATKRYRVNFISQILDHEGQVVSSHEQRAALFYKSFKDRMGVSNYPTMALGLRDLFPIQINLDSFVDPFSTEEIDSLIKIIPADKAPGPDGFNGPISLMRVSLKFITKLLVDRLQGWLQCVQMIFSSASTAVLLNGVPGNNFSCKRGSKPINESDGKGFPIIQNADDTLILLKASQREIFCLKALLNNLAQSTGLKVNFNKSSLYPLNLTTENVELLAGLLGCSIGTLPYTYLGLPMGTTRPKVVDFARLVDRVERKLTASSMFLSQGGRLTLINSVLCSIPTFYMCSLQLPVTVVKAIDTARKNCLWSGNKPTSTRKSLASWEMVPHMNLNKGSFWMRDILALTDIFREKQIDKIAKEYVVQVVTDNGSNYKAAGKFLMERIPHLFWTPCAAHCLDLLLEDIGKIKAFNSCINCAKKACRFIYKHGRVLDLMMKKIGEDLVRPAVTRFATLFLTLASMYEHKQGLRSLFVSEEQHANNLSSTHESQQIKSIVLSMAFWGRMENCLKASQPLLVALRIVDGDETPIALEIMAAMDHARRSINDALKDKLTLLKEILECYDKRWNNQMEQKLQGRGKPMIMTYQKVIAFQNRWQQEIEIKKFLFTNATFTGNKCTVDGGALYTKHAAFVDKCALSLRGHDLPRAAAAAAHDRAAVTYGRKRKRSNKTTVVVQDIVEDVAASQKKYGVDMELWTPHTSKLKGSKVLATYCTDQA

SEQ ID NO: 134254 - protein, 93 aa, Oryza sativa
  unsure (1)..(93): unsure at all Xaa locations
  Clone ID: PAT_MRT4530_36046C.1.pep
MAQPAENAYVLQDPEIRADLDRRARDDGQTVIKSGTCVKSLDAQERLVHRRXKAWLCRTTESGPERADHDTXPVLIEPNDTMLKEAKMNLGRT

SEQ ID NO: 134255 - protein, 396 aa, Oryza sativa
  Clone ID: PAT_MRT4530_36047C.1.pep
MAAAEERDAAAASSLAEFHASRAGVRGLVESGATAVPPLFLPPGCGRERSTPPTPPRATAFAIPTVDLSLPRSATVPLVRAAATSCGFFHVTSHGVPRGTVASAVAAVRAFHEQPAASRSPCYSLAPVGGVAYSTIPIQQPPPQDGSSSDHRAATAASPLLPWRDSLVVRFGPGPEAPDLGRLPASCRDALPEYQRSLTVFGKEMAGLLSEALGGGGGGGGVGAERLEREMQVEGWLMACHYYPPCPEPERVVGSLEHTDPSLFTVLAQDAVGGLQVRREEEEGGGGGGEWVDVAPVAGALVVNVGDVLKMVSNEEYKSVEHRVVIKSSQDARVSIAVFFNPAKRDASDLFGPLPELLTAERPARFRRFSVPEFMRSRRESGHGKSSIDSFRIAAD

SEQ ID NO: 134256 - protein, 143 aa, Oryza sativa
  Clone ID: PAT_MRT4530_36048C.1.pep
MEKNRNSRGKSWASSAAACTPRAIEEQPKDSPAGYGVLRTPSAPPIKPPPSQNPSTGSEIYTDSLVAVAVAGEKRRRRGGGGLSPKVEQIADVGAIPRVARPLASAFSMISSSRFKENTPPRLAGHPTPMSIFEDWVGKFWRD

SEQ ID NO: 134257 - protein, 534 aa, Oryza sativa
  Clone ID: PAT_MRT4530_36049C.1.pep
MPPSSRMAPPPLAGVVVVAAALLLLLPEAAEPRTLLSLDDFGAVGDGVANDTQALVDAWSAACATGDHTFLHVPRRQVLPSSGRSPLPELMAILRVSVMRLVVAAMAVAAGVLFFSGAGEARVLLTLDDFGAVGDGITNDTQAFLDAWNAACASTEPAVLAVPAGKTYQIWPVRLAGPCKKKLKLMISGTIAAPASPDEWAGRDPTKWLYVFRVDDLSVSGGGTIDGMGAEWWARSCKRKKTKPCSTVSAPKALQFEECRRVSVQGITMQNGPQFHLMFTRCTDVKASFLRVVAPESSPNTDGIHLNDTTHAQIMDNLISTGDDCVSMVGNCSDVRVKDISCGPGHGISIGSLGKNRTTDRIENVRVDTCLLTNTTNGVRIKSWQGGMGYAHNLRFEGIVMKNVSNPIIIDQYYCDQPTPCANQSTSSSSLKLGNFSSLWMQTQAVEVRKIEFAGIRGTSATEQAIKLACSDAVPCRDLELRNVNLTMVGGGAASAFCHRASGKAAGAVVPASCLAKAPHRMLGDATPAARVGS

SEQ ID NO: 134258 - protein, 136 aa, Oryza sativa
  Clone ID: PAT_MRT4530_3604C.1.pep
GPRSALRRARKGRAGLVLRREAGPAGPGPKVQPNELLNCNNLNIRYWSWELPRLLAPDLPSNGSSLRDLDCTHSNYQTLKRPVCIFIVTTSPCQDWVICAPAASLDVVAVSQVPLRNRTLNSPSPSHNGRPYLTSK

SEQ ID NO: 134259 - protein, 330 aa, Oryza sativa
  unsure (1)..(330): unsure at all Xaa locations
  Clone ID: PAT_MRT4530_36050C.1.pep
MPPSSRMAPPPLAGVVVVAAALLLLLPEAAEPRTLLSLDDFGAVGDGVANDTQALVDAWSAACATGDHTFLHVPAAKSYLVWPVTLAGPCREEIKLFISGNIVAAESPDEWPEGGGGGGEWLHFVGVSDLTLSGGGVIDGRGHRWWARSCKAKHNATENCTTQAAPKALHFEDCQGISVMGITLQNSQESHLTFTRCSHVKANYLRITSPEDSPDTTGVHVVSSRNVHIMDDSISTGHDCVSIVGNSTDVRLRAISCGPGHGISIGSLGKNRTTDRIENVRVDTCLLXNTTNGVRIKSWQXGGMGYAHNLRFEGIVMKNVSXPIIIDQYY

SEQ ID NO: 134260 - protein, 136 aa, Oryza sativa
  unsure (1)..(136): unsure at all Xaa locations
  Clone ID: PAT_MRT4530_36051C.1.pep
MRHAHTGWKEKRINTXMEKKGSGSAHRRAEETALILTALDIDRSMQIYIAAGEIYGGKRRMSALTSAYPNVVRKETLLEPXDLMFFQNHSSQMAALDYLVSLESDIFVPTYDGNMAKVVEGHRRYMVLKKTILLDR

SEQ ID NO: 134261 - protein, 77 aa, Oryza sativa
  Clone ID: PAT_MRT4530_36052C.1.pep
MAREARRTGGVLRGVLACGAGAPDEEESVLRVETVATIVVREQGSDGCCGEGATVLTVEAPAAAVVVLGGIRHGEKV

SEQ ID NO: 134262 - protein, 94 aa, Oryza sativa
  Clone ID: PAT_MRT4530_36053C.1.pep
QQVCFQSWRESCSVVSGWLISSELDDPGRGAYVDVYRYVHVSVALQVGEVFLCAPSSDYVVHRARCSVIYPTVVVSPQLDINTTPYVGKSGTKT

SEQ ID NO: 134263 - protein, 180 aa, Oryza sativa
  unsure (1)..(180): unsure at all Xaa locations
  Clone ID: PAT_MRT4530_36054C.1.pep
MSACHVNPPLPLFSSFLPSLSLTLLSQAGRRSRDAERRWRQAGTRAAAGGGGGPLAAGMVVVGALSRRRPYCAALAHAAPPRWGMVVRRATRRPIRRGPRSRSSQYCGVKFYRRTGRWESHIWTYDLAAIKFRGVEGWXADINFSLEDYXDDLKQVRTSLTRSLWMSNLTKEEFVHVLRR

SEQ ID NO: 134264 - protein, 46 aa, Oryza sativa
  Clone ID: PAT_MRT4530_36055C.1.pep
MYYRPYLSHKRAFREQMIGVFEGGDYVIDILSELNLLEQASQLHQL

SEQ ID NO: 134265 - protein, 55 aa, Oryza sativa
  Clone ID: PAT_MRT4530_36056C.1.pep
GFLSLFEATEREAWVISRKRRVRGDEEDEEEEEGGGGGAASLSSRRSTLRLISLS

SEQ ID NO: 134266 - protein, 422 aa, Oryza sativa
  Clone ID: PAT_MRT4530_36057C.1.pep
MADRFFPNNMPGYADEGAPPPPAAAAAAAIPSTYSSSLHHLLSLPYPDLADRFLHAALHLKQKVVHETWDKRRRAAAAAGEAVGDFTLYTGALGTALLLFRAYLVTGDRADLATCAEIVAACDAASMGAEIATFICGRAGVCALGAVVAKHAGDEAGVAHYLSAFKEIKIHSKSPDELLYGRAGYLWACTFLNKHLGDNTIPPTTTDTVMRDIIRDGRTLSTIGCPLMYEWYGEKYWGAAHGLSGIMHVLLDMDLTKDDTECVKGTLRYMIQNRFPSGNYPVTEEDKHDRFVHWCHGAPGISLTLAKASQVFPEERFLEAIAEAAEVVWNRGLLKRVGICHGVSGNAYTFLALFRLTKKKEHLYRAKAFACFLLDRAKQLIADGIMHSGDEPYSLFEGQVGMAYLFLDMINPLDSRFPGYEL

SEQ ID NO: 134267 - protein, 423 aa, Oryza sativa
  Clone ID: PAT_MRT4530_36058C.1.pep
GDVHQIARRMVDAGFGRECAEVYAAARRGFVDESVARLGVRPRTAEEVHASSWEELEFDIARWIPAFNMVFRILIPSERRLCDRVFDGLAPFGDLAFVAAVRTQALQLISFGDAISSSSRAPERLFRVVDMYEAVRDLLPDLDPVFADPYSAALRAEVTAVCNTLGSSIKGIFMELENLIRRDPARVAAQGGGIHPITRYVMNYLRAACGSRQTLEEVMEGDFGAVGGAAAAVDPDRPTSSLAVHIAWIMDVLHKNLDIKSKIYRDPSLACVFLMNNGKYIIQKVNDSELGVLLGDEWIKQMTNRVRRWSMDYQRVTWGKVTTVLQTGGPGVGGLPATAMKQKLRMFNTYFQEIYEVQSEWVIADEQLRVDVRAAVAEAVMPVYTALISRLKSSPEARHDLYIKYTPEDVEACIQHLFEGAAK

SEQ ID NO: 134268 - protein, 264 aa, Oryza sativa
  unsure (1)..(264): unsure at all Xaa locations
  Clone ID: PAT_MRT4530_36059C.1.pep
MGFVKLAIGLMRLMESFNFVFIMKMFFFXITNELSLMLQRKDQNIVQAMSXLIDVKKXVELVNVSNDGXEPLLEEIKTFCEXYKIPIPNMSKTRPRXGRSRLSGIIVTQDHHYHIDVFCAALDVINTEMNHRFNETYSLCLIXQDCSTYSEIYEKDFSNCDCAAIKDQIETFILHVRRIXDFIDCQEFASLAKKMVQTGRHIVYPLVXRIIELALLLLVATTIVEIVFSAMNIKTGLRNRLSNEWLNNLMLWYIEHDLFNAIKK

SEQ ID NO: 134269 - protein, 1427 aa, Oryza sativa
  Clone ID: PAT_MRT4530_3605C.1.pep
MALVPAGAAADPARGSSGSAFSYPQLTATNYTSWCIRVQAMMEDQGVWDAIEPAAGVAVDPRRDKKSKSHLLQSLPEDLLMQVAKKRSAKEVWDCLKTRFVGADRVREARLQTLKGEFGAMVMEPGETLDQYAGRITAMSVRHSVLGSTLSDSAIVKKLFDTVPEKFISLVAGIEQFYEIDNMPFEEAVGRLKAYEERVRKKKAAAGGVTADGQVLLTQAEWEARFRKDGSESSSPQKNKPPSDRGNRAQGGRGRGRGHGGGGGRGSAPRNSGAGGSGGGGRDKSHIKCYNCEEFGHYSTQCPHPKKKKVEAHLAQTDDANPALLLAVTEDEPASGLVVHEERVWPQLLLADSGAATGDIWFLDNGASNHMTGDRAKFRDLDVSITGSVKFGDASTVKIQGKGSILFSCKNGDQWLLQDVFYIPSLCCNMVSLGQLTETGHRVVMDEDVLEVFDKSPLRLVMRVRRTPNRLYRIELKLATPVCLLTRMDEPAWLWHARLGHVNFQAMKLLADKGMAGGIPAITHPNQLCQACLVAKQIRQPFPATANFRAEEPLELLHIDLCGPITPTTMAGNRYFMLIVDDFSRWMWMFVIKTKDQALEAFTKFKPLAENTAGRRIKTLRSDRGGEFLSGEFAQLCEQAGIQRHLTAPYSPQQNGVVERRNRSVMAMARSLMKGMSVPGRFWGEAVRHAVYLLNRLPTKAMGDRTPFEAWTGRKPQLGHLRVFGCIAHAKITTPNQKKLDDRSAPYVYLGVEKGSKAHRLFDPRCGRIHVSRDVIFEENVPWQWSVVAGEQNSTEFTVEEDGVDAPPAGAPAYPVPRYRAPSPAVPQSPPASPVGASSSLPTSPQSSPSSTPPSTPATGSAGPVASPGSGGDLRSDEGPVRFRSLEDIMREAPRVDLVEDEHDGDALLAEMEEPSSYREAAGQPAWENAMAQELQAIEKNSTWALTALPAGHKPIGLKWVYKLKKNTAGEVIKHKARLVAKGYVQRQGVDFEEVFAPVARLDTVRVILAIAADRRWEVHHLDVKSAFLNGDLEEEVYVAQPEGFVKRGEEHLVLRLSKALYGLRQAPRAWNTRLDKCLKELGFARCTQEQAVYTRGKGQAGVIVGVYVDDLIVTGENPHEIAMFKQQMMGEFEMSDLGLLSYYLGIEVIQGENGIAIKQAAYAKKILSQFGMQGCNPTSIPMEPRSLLHKDADGNPIDATEYRRVIGCLRYLLHTRPDLSYAVGVASRFMERPTTMHLKAVKMILRYLKGTLDSGLVFASGSGSLDITGFTDSDLAGDMDDRRSTGGMAFYVNSSLVSWCSQKQKTVALSSCEAEFMAATAAACHALWLRALLSEMMGTEAKRVKLFVDNKSAIALMKNPVFHGRSKHIDTRYHFIRECVESGQILIEFVRSEEQRADAMTKGLPAAKLATARHLLGVRDLRPRQD

SEQ ID NO: 134270 - protein, 328 aa, Oryza sativa
  Clone ID: PAT_MRT4530_36060C.1.pep
MSSPPPPPPTEMAEGEVESRDWAEMPSDALAAVFGKLDVTDLLVGAGVVCRAWRRLAAIDPTLWRRVDMSHQGDIMEVDEAVAMARAAVDRAAGTMEAFWADSFVTDGLLLYISERASSLKSLQLSMCLNVSNEGMAEAMKGFPRLEELDITFCSLYGDVCASVGKACPELKCFRLNERYTLQMDYAAPDIMDDDTEALGIASNMPKLRELQLIGNKLTNDGLMSILDHCQHLESLDIRQCYSIQMDDALKSKCSRISDLKLPHDSISDFKYRAYIFSSSAFSGSDLELDMYDDLLDVVTDDDDADFDDMDDYDDGGSDGGMYDEFDI

SEQ ID NO: 134271 - protein, 289 aa, Oryza sativa
  Clone ID: PAT_MRT4530_36061C.1.pep
MSAFAPSLPLHVAAAATAVASQGRRGRIKTTSTCWRRRAAVPVNMAAATSSSALSKLAPLEAILFDIDGTLCDSDPIHFCAFRELLQQVGFNNGVPISEEFYSANISGGHNDDLARALFPDLDHDKAMKFMDDKEALYRRLAPEQLVAVEGLHDLCRWIKDHKLKRAAVTNAPRSNAELMLSLLGLTEFFPVLVIGSECDRAKPFPDPYLKALELIGASPDHTFIFEDSASGIRAGVAANVPVVGLTTRNPEKVLQDAGASLLIKDFQDPKLLSILEEIEPTVAAVEQV

SEQ ID NO: 134272 - protein, 51 aa, Oryza sativa
  Clone ID: PAT_MRT4530_36062C.1.pep
PTRKVGPNRLTIIPPSLEGHKNISFETNRIPAVILKQFFFFFLPVSYNKLE

SEQ ID NO: 134273 - protein, 739 aa, Oryza sativa
  Clone ID: PAT_MRT4530_36063C.1.pep
MYLYDSSSDLEHMDTGAKEVELLHMDHRENQAFHGGAHDVHGKGHVIGVDQREQLNLRAADEQPVKVISLSVSLAQDELPQAWQEDGFAGPQGQLLRWLAKERDSVAHHGGAGEDLGREGGGTAHAAEVHDDKILDVVIAFQGTDPIPEAVVAVEAGDGGTQGREELGWELADAGSIRWGSGVGGGWRQRKPIEDPQSTQLDDFEFWEEINSVECVRSSIKKVVFHGFSWKNSEIAFINSIAEGGLVLGKICIFQSRHGTAPDDDELNAKLSMVASLNIGLGRTEIIFSGEDPTWCSRAAADLSRADPSNGNDLSYFHSEMIWHSVPLSLDHSQIRRAGENILDDLSNSAMVARVSSILSSHPGPFNSIHLTCSSMGSHNDALKSWFKAFADKHLKELAFLNLNYPNDIMVPTDLFCCKSLKRLYLGGVQLPANTGIIPCSHTFHELWEICLYRCILHEWDIENLLTCSPKVEKLSLVNSACGWPLRLHIRSHSLRCMLHWASSLEELAMVSTPCLERLILWRDDALHWSDCKKIKICSMPKLQVIGYLNPADHVLQIRDTVIKEWSSRSPNDMKASAATVVPSVEVLAMTIRFGVHEEERMTTNEVNLEFWKDVGSIQCVRSIIKRVIFDDFSGEECELAFLSFIAQNANQLEEIYIIPSKKDLSAGSSLGNVINHFMSSILWASAYCRDQYREPSKTSQQKCLILKYKDYAAGTAEQAREGKIKIQRLESCQALLSR

SEQ ID NO: 134274 - protein, 60 aa, Oryza sativa
  Clone ID: PAT_MRT4530_36064C.1.pep
AHYLSLHRCGHHWADRRPTSVQPLTDADERCTSFTNPNYYLTSLCTFQLCPGFTMSFHSF

SEQ ID NO: 134275 - protein, 105 aa, Oryza sativa
  unsure (1)..(105): unsure at all Xaa locations
  Clone ID: PAT_MRT4530_36065C.1.pep
SDLLLHLWAAGQQVLNVPLVQDASIQTDLPEFMECVGTRDDASVCRQLDTTKVEPLQGLATEEISRVRWILLKGPGWEDRMLETLATMALLXEIIEDVLPGTSDL

SEQ ID NO: 134276 - protein, 77 aa, Oryza sativa
  Clone ID: PAT_MRT4530_36066C.1.pep
MGGGHGQKSTMARERNMEKNKGAKGRQLAANKRGMNIQCRICMQTMICTTSETKCNEHAEAKHAKSDLTACLPQLKK

SEQ ID NO: 134277 - protein, 433 aa, Oryza sativa
  unsure (1)..(433): unsure at all Xaa locations
  Clone ID: PAT_MRT4530_36067C.1.pep
MEHNECMHEILAYLPLPPASTNTTPPSDRTGISQLPPELLXDLVSRLPAANGAVXIPRPGSRDLCPSVLDDALFCPIVGPVARXLPKTHSAVVKTVSRTTDSHPGPFHSVRLTITSFNRHDSLRYWIRALERNDNVXDLVIVHLSGMRCAATLPPKILTCTSMVCHTVALFGQPPXKLTLRASKAVFLPSLRELILCEGYTQANDFDRLLVSCPEIELLSLINPNDMPFSMDIMSPTMKSLVLSMVHMKELNFLKAPSLERAIIXRPIIVMSPYMSVNKIANMRXPLSRYLGTSIHVLQIGRTIIKVSNLINLSKTIPSVKTQAIKLTFGSKEQENKLQSFLKLFSNVKTLYVVYDPPCPLSSCVFPDKHVVDFWMKNLKSILCVCSQLTKFMFYNLHGVVLSDLAFIKAVMGTTRLLKEMCLFPSNEIFFYR

SEQ ID NO: 134278 - protein, 86 aa, Oryza sativa
  Clone ID: PAT_MRT4530_36068C.1.pep
SVRSSRDTDLIFSCSVQSKAQLGEHKLAHLMVPGSSYFHLWTYHHGSADDHIVNVGTPYSGINSNDKPYIPHASSESIFRPAPHKT

SEQ ID NO: 134279 - protein, 90 aa, Oryza sativa
  unsure (1)..(90): unsure at all Xaa locations
  Clone ID: PAT_MRT4530_36069C.1.pep
RHQWRLGSDGDLAGARRVGWGFGGHLHVEGNDTNPMVLTKTTNGDRRRPATRGAAAAAALRRSVTXGEGAAGLSLNHAHPTAVRGGSGEG

SEQ ID NO: 134280 - protein, 49 aa, Oryza sativa
  Clone ID: PAT_MRT4530_3606C.1.pep
MADGEEEEEAHDWRRSRAASPSARGSRRCCAYMYKMQTKCFTLCSFTEL

SEQ ID NO: 134281 - protein, 109 aa, Oryza sativa
  Clone ID: PAT_MRT4530_36070C.1.pep
MAAWCWGAALLRCGLRPSGFSAVLTLPPPRDRDTCMRLRSPTAARSPGLRGSGSTCLLCAARRLNPLGSEEGCSSRGVVAMPQLYAREPGLRGSTCLAASRVPPATSAH

SEQ ID NO: 134282 - protein, 77 aa, Oryza sativa
  Clone ID: PAT_MRT4530_36071C.1.pep
RPPTAGVAHAPRLLPPAAVARSTVSTTAASLRSPSPPSSASAARRSSPLPSPSPSPPPSPSPSPADSSPDQAGAARI

SEQ ID NO: 134283 - protein, 82 aa, Oryza sativa
  Clone ID: PAT_MRT4530_36072C.1.pep
MGDCRRGGTNPRFIEKDDRYEPESVSTSSIPRERQKPRSRCPPRGCEQESYSDSLAHVPRCPARQVVIGQYKYQGKSPANQL

SEQ ID NO: 134284 - protein, 67 aa, Oryza sativa
  Clone ID: PAT_MRT4530_36073C.1.pep
SGLTCIGYARPHPRRCLSTRLVGVVKLSVVVDYVLARCGSTLFMCNHAFMLSMGLLFAEKKDVCTAS

SEQ ID NO: 134285 - protein, 75 aa, Oryza sativa
  Clone ID: PAT_MRT4530_36074C.1.pep
SKAKHMHGRTHTSTRHSTRHQQRTVHHACLPLPLPLSKLSPIDLSQHVPLPLSLSLSPSISPLINLSLLAVPSSY

SEQ ID NO: 134286 - protein, 112 aa, Oryza sativa
  Clone ID: PAT_MRT4530_36075C.1.pep
VGVSGIGYVLMTWCIEKKGPVFTAGFMPLIQIMAALIDLFFLHEQNFLGNAIGAALVIGGLYLLLWGKSKEASATALLAKAVEQDGEKKENLEAIKWAIVVVSLCGVKDHPK

SEQ ID NO: 134287 - protein, 1318 aa, Oryza sativa
  unsure (1)..(1318): unsure at all Xaa locations
  Clone ID: PAT_MRT4530_36076C.1.pep
MLGAKKLLNCIQDPTIATSAGGVNNLPTSAEKNQALHFLRHHLNTTLKNEYMTEEDPKVLWDSLKDRYGHQVKALLPKAKREWLHLRFQDYKYMEQYNSVLHRIVTFLKLCGEKITDADMIDKTLSTFHANHVNIQRQYRQAKYEKYSELVSVLMEVQGEDETLVENHTSRPNESSATPEANASSFKKGENQNNQNKGKNFWKNGGKVNKMSFKKKGNHSKSKKGSTSGEYGKQDQVCFKCGTRGHWSRICRTPKHLIELYQEKHGKKKSEHESHFTVEIQHSEEKMAAMHIDKHTGQIATIAGSNAHIVGVGRATVVLPHGTKIIINNALLYPESSRTLLSFKDIRANGYHVETKDENKLEFLLITKLDGNRKTVVEKLPSLKSGLYYTHIKPENVALKTIFKNPESYRIWHDRLGHPGLGMMRRIISTSNGHNLRTNDFPNQEDFVCTDCATGKLIVRPSNLKVNAESPVFLQRIQGDICGPINPMSGSFRFPDNRIQSIRMDNAGEFTSKVFNEYCMALGIKVEHSVPHVHTQNGLAESLIKRIKLIARPLLLHSNLPTTCWGHAVLHAAALLQIRPTAYNAVSPMQLTRGYAPNISHLRKFGCAVYAPIPPPKRTSMGPHRKLGIYVGFESPSIIKFLEPLTGDLHMGRYADCIFKEDHFPALGGGKYLQKVECREIEWETKNLLHLDPRTKESDQEVQTIIDLQRIENNLPEAFTNPKGIMKSHIPVVNAPERVEIPHDAEEPVFKLISTSTPTSRKRGRPPVAHNQTKVSRRRPMKQQIGXNTTAPENSEGAHQVDEPPAVICPDGNEPSENARAITTSTGRPEIPDLNIAGNNEDQECERIEEISTSYVDTGETYNRETTIVDIYFAEKIAKIIDLDPEPKSMAECKKRSDWVKWKEAIKAELISLNKRKVFGPVDRTPVGISPVGYKWVFVRKRDENNQVVRYKARLVAQGFTQRPGIDFDETYSPLMDGITFRFLISMAVNLNLEMQLMDVVTAYLYGSLDSEIYMKVPDGIQVPEETKCNIYSVKLQTSLYGLKQSGRMWYNRLSEFLEGKGFIKNDDCPCKTKYCLGLQLEHTHEGVLLHQSAYIQKILEKFNMKDSYPTRTPMVVRSLAVESDPFRPQENNDELLGPECPYLSAIGALMYLANGTRPDIAFAVNLLARFSSVPTKRHWNGIKQIFRYLRGTQDIDLTMAGYANAGYLSDPHKALSQTGYVFLCGGTAISWKSTKQTMVATSTNHSEIIALFEASKECMWLRRVIQHVLNRCGLNITPTPTIIYEDNSACVAQIQTGYVKTSLTKHISPKFFYMHEL

SEQ ID NO: 134288 - protein, 713 aa, Oryza sativa
  unsure (1)..(713): unsure at all Xaa locations
  Clone ID: PAT_MRT4530_36077C.1.pep
MDNAGEFTSKVFNEYCMALGIKVEHSVPHVHTQNGLAESLIKRIKLIARPLLLHSNLPTTCWGHAVWHAAALLQIRPTAYNVVSPMQLTRGYAPNISHLHKFGCAVYVPIPPPKCTSMGPHRKLGIYVGFESPSIVKFLEPLIGDLHTGQYADCIFNEDHFPALGGGKYLQKVECREIEWETKNLLHLDPRTKESDQEVQTIIDLQRIANNLPEAFTNPKGIMKSHIPAVNAPERVEIPHDAKEPVFKLISTSTPTSRKRGRPPVAHNQTKVSRRRPTKQQIGQNTTAPENSEGAHQVDEPPAVICPDGNEPSENARAITTSTGRPEIPDLNIAGNNEDQECERIEEISTSYVDTGETYNRETTIVDIYFAEKIAKIIDLDPEPKSMAECKKRSDWVKWKEAIKAELISLNKRKVFGPVDRTPVGISPVGYKWVFVRKRDENNQVVRYKARLVAQGFKQRPGIDFDETYSPVMDGITFRFLISMAVNLNLEMQLMDVVTAYLYGSLDSEIYMKVPDGIQVPEETKRNIYSVKLQRSLYGLKQSSRMWYNRLSEFLEGKGFIKNDDSXSAPTKRHWNGVKKIFRYLRGTQDLDLTMTGYADAGYLSDPHKALSQIGYVFLCGGTAISWKSTKQTMVATSTNHSEIIELFEASKECMWLRRVIQHVQNTCGLNITPTPTIIYEDNSACVAQIQTGYVKTSLTKHISPKFFYMHEL

SEQ ID NO: 134289 - protein, 734 aa, Oryza sativa
  Clone ID: PAT_MRT4530_36078C.1.pep
MEFTSKVFNEYCMALGIKVEHSVPHVHTQNGLAESLIKRIKLIARPLLLHSNLPTTCWGHAVLHAAALLQIRPTAYNVVSPMQLTRGYAPNISHLRKFGCAVYVPIPPPKRTSMGPHRKLGIYVGFESPSIIKFLEPLTGDLHTGRYADCIFNEDHFPALGGGKYLQKVECREIEWETKNLLHLDPRTKESDQEVQTIIDLQRIANNLPEAFINPKGIMKSHIPAVNAPERVEIPHDAEEPECERIEEISTSYVDTGETYNRETTIVDIYFAEKIAKIIDLDPEPKSMAECKKRFRLVNLNLEMQLMDVVTAYLYGSLDSEIYMKVPDGIQVPEETKRNIYSVKLQRSLYGLKQSGRMWYNRLSEFLEGKGFIKNDDCPCLFMKRSEHGFCIISVYVDDLNIIGTTQVIKEASSYLKTEFEMKELGKTTYCLGLQLEHTPEGVLLHQYAYIQKILEKFNMKDSYPTRTPMVVRSLAVESDPFRPQENNEELLGPECPYLSAIGALMYLANGTRPDIAFAVNLLARFSSAPTKRHWNGVKQIFRYLRGTQDLGLFFRKNQDLTMAGYADAGYLSDPHKALSQTRYVFLCGGTAISWKSTKQTMVATSTNHSEIIALFEASKECMWLRRVIQHVQNTCGLNITPTPIIIYEDNSACVAQIQMVYVKMSLTKHISPKFFYMHELQKKEEIKVTLTKTSENLADLFTKSLPTSVFEKLVHGIGMRRMRDVHKSGGALP

SEQ ID NO: 134290 - protein, 285 aa, Oryza sativa
  unsure (1)..(285): unsure at all Xaa locations
  Clone ID: PAT_MRT4530_36079C.1.pep
GCRIGTRHRHLCSSPGPTPTAATASAPPFGAARRASPPRPVSAATTHGQIGPARVPSSRPAKPNARVPPSSAGATSNPVAEVVAVAVFTGTGTPPRXGAPPPRVATSTRAASATIQRLAPPPPPPXSAPPRSPPRRADHLPRPTGAARRPPSSPHRPFPIRRHLRPRHRDRSPARPRRQAPSAAVSPPAAPLVPRPSFLPRRRRAISRLPSHGPAPSHRAVADPRPGLPFPTGAAPFPGRASPTAAQHQAPVAGTPLLSGTREETEAEKESRERCEEKKARNRSG

SEQ ID NO: 134291 - protein, 499 aa, Oryza sativa
  Clone ID: PAT_MRT4530_3607C.1.pep
MAFFAKKWVTIQRRSHYLACGLRDYIAMTTKTFVLFPSLGVGHLNPMVELAKHLRRRGLGVVVAVIDPPNNDAVSADAMARLAAANPSVTFRLLPAPASPDLGAHPVKRSLDTLRLANPVLREFLRSLPAVDALLLDMFCVDALDVAAELAIPAYFFFPSPASALAVFLHLPYYYPNPPSFMEMGKAALLRFPGMPPIRTVDMLATVQDKESEATKVRLYQFKRMTEAKGVLVNSFDWLEPKALKALAAGVCVPDKPTPRVYCIGPLVDAGKKAGSGGERHACLAWLDAQPRRSVVFLCFGSQGAFPAAQLLELARGLESSGHRFLWTVRSPPEEQSTSPEPDLERLLPAGFLERTKGRGMVVKNWVPQAEVVQHEAVGAFVTHCGWNSTLEAIMSALPMICWPLYAEQAMNKVIMVEEMKIAVSLDGYEEGGLVKAEEVEAKVRLVMEAEEGRKLRERLVETRDMALDAITEAGSSEVAFDEFMRDLEESSLENGVRS

SEQ ID NO: 134292 - protein, 118 aa, Oryza sativa
  Clone ID: PAT_MRT4530_36080C.1.pep
MDNAGEFTSKLTRGYAPNISHLRKFGCAAYVPIPPPKRGGKYLQKVECREIEWETKNLLHLDPRTKESDQEVQTIIDLQRIANNLPEAFTNPKGIMKSHIPAVNAPERVEIPHDAEEP

SEQ ID NO: 134293 - protein, 39 aa, Oryza sativa
  Clone ID: PAT_MRT4530_36081C.1.pep
MYLICDLSMEAITVAGTKKNESIFSEIQSQVKNNNVSVD

SEQ ID NO: 134294 - protein, 616 aa, Oryza sativa
  unsure (1)..(616): unsure at all Xaa locations
  Clone ID: PAT_MRT4530_36082C.1.pep
AALFQIRPTAXNAVSPMQLTRGYAPNISHLRKFGCAAYVPIPPPKRTSMGPHRKLGIYVGFESPSIIKFLEPLTGDLHMGRYADCIFNEDHFPALGGGKYLQKVECREIEWETKNLLHLDPRTKESDQEVQTIIDLQRIANNLPEAFTNPKGIMKSHIPAVNAPERVEIPHDAEEPVFKLISTSTPTFRKRGRPPVAHNQTKVSRRRPSKQKIGQNTTALENSEGAHQVDEPPTVICPDGNEPNENARTIAGNNEDQECERIEEISTNYVDTSETYNRETTIVDIYFAGKIAKIIDLDPEPKSMAECKKRSDWVKWKEAIKAELISLNKRKVFGPVDRTPIGISPVGYKWVFVRKRDENNQVVRYKARIVAQGFTQRPGIDFDETYSPVMDGITFRFLISMAVNLNLEMQLMDVVTAYLYGSLDSEIYMKVPDGIQVPEETKRNIYSVKLQRSLYGLKQSGRMWYNRLSEFLEGKGFIKNDDCPCLQLEHTPEGVLLHQSAYIQKILEKFNMKDSYPTRTPMVNTCGLNITPTPTIIYEDNSACVAQIQTGYVKTSLTKHISPKFFYMHELQKKEEIKVTLTKTSENLADLFTKSLPTSVFEKLVHGIDQYIILEE

SEQ ID NO: 134295 - protein, 412 aa, Oryza sativa
  unsure (1)..(412): unsure at all Xaa locations
  Clone ID: PAT_MRT4530_36083C.1.pep
DHFPALGXGKYLQKVECHEIEWETKNLLHLDPRTKESDQEVQIIIDLQRIANNLPEAFTNPKGIMKSHILVVNAPERVEISHDAEEPVFKLISTSTPTSRKRGRPPVAHNQTKVYRRRPTKQQIGQNTTAPDNSEGAHQVDEPPAVICPDGNEPSENARAITTSTGRPEIPDLNIAGNNEDQECERIEEISTSYVDTGERYNRGTTIVDIYFAEKIAKIIDLDPEPKSMAECKKRSDWVKWKEAIKAELISLNKRKVFGPVDRTPVGISPVIKEASSYLKTEFEMKELGKTKYCLGLQLEHTPEGVLLHQSAYIQKILEKFNMKDSYPTRTPMVVRSLAVESDPFRPQKNNEELLGPECPYLSAIGALMYLANGTRPDIAFAVNLLASHLMEVDEADNGRDINKSLRDYSII

SEQ ID NO: 134296 - protein, 1356 aa, Oryza sativa
  unsure (1)..(1356): unsure at all Xaa locations
  Clone ID: PAT_MRT4530_36084C.1.pep
MTDIAKRDFAELAVSGKNYLTWALDAKIMLGAKKLLNCIQDPTIATSAGGVNNLPTSAEKNQALHFLRHHLNTTLKNEYMTEEDPKVLWDSLKDRYGHQVKALLLKTKREWLHLRFQDYKSVEQYNSVLHRNVTCLKLCGEKITDADMIDKTLSTFHANHVNIQRQYRQAKYEKYSELVSMLIEAQGEDETLVENHTSRPTGSSAAPEANASSFKKGKNQNNQNKGKNFWKNGGKVNKTSFKKKGNQNSKSKKGSTSGEYGKQDQVCFKCGTRGHWSRICRTPKHLIELYQEKHRKKKSEHESHFTVEIQHSEEKMAAMHIDKQTGQIATIAGSNAPIVGVGRATVVLPHGTKIIINDALLYLKSSRTLLIFKDIRAYGYHVETKDENKLEFLLITKLDGNHKTVVEKLPSLKSGLYYTHIKPENVALKTIFKNPESYRIWHDRLGHPGLGMMRRIISTSNGYNLRPNDFPNQEDFVCTDCATWKLIVRPSNLKVNAESPVFLQQIQGDICGPINPMSGSFRFPGNRIQSIRMDNAGEFTSKVFNEYCMALGIKVEHSVPHVHTQNGLAESLIKRIKLIARPLLLHSNLPTTCWGHTVLHAAALLQIRPTAYNVVSPMXLTRGYAPNISHLRKFGCAVYVPIPPPKRTSMGPHRKLGIYVRFESPSIIKFLEPLTGDLHMGRYADCIFNEDHFPALGGGKYLQKVECREIEWETKNLLHLDPRTKESDQEVXTIIDSQRITNNLPEAFTNLKGIMKSHIPAVNAPERVEIPPDAEELVFKLISTSTPTSRKKGRPPVAHNQTKVSRRRPTKQQIGQNTTAPENSEGAHQVDEPPAVTCPDGNEPSENARAITTSTRRPEIPDLNIAGNNEDQECERIEEISTSYVDTGETYNRETTIVDIYFAEKIAKIIDLDPEPKSMAECKKXRSDWVKWKEAIKAELISLNKRKLFGPIDRTPVGISSVGYKWVFVRKRDENNQVVRYKARLVAXGFTQRPGIDFDETNSPVMDGITFRFLISMAVNLNLEIQLMDVVTAYLYGSLDFEIYMKVPDGIQVPEETKRNIYSVKLQRSLYGLKQSGRMWYNRLSEFLEGKGFIKNDDCPCKTKYCLGLQLEHTHEGVLLHQSAYIQKIMEKFNMKDLYPTRTPMVVRSLAVESDPFRPXENNEELLGPECPYLSAIGALMYLANGTRPDIAFAVNLLARFSLAPTKRHLNGVKQIFRYLRGTQDLGLFFRKNQDLTMVGYADAGYLSDPHKALSQTGYVFLCGGTAISWKSTKQTMVATSTNHLEIIALFEASKECMWLRRVIQHVQNTCGLNITPTPTIIFEDNSACVAQIQTGYVKTSLTKHISPKFFYMHEL

SEQ ID NO: 134297 - protein, 96 aa, Oryza sativa
  unsure (1)..(96): unsure at all Xaa locations
  Clone ID: PAT_MRT4530_36085C.1.pep
IRSSPTDLNQSQRARLVEVVDGEEVKAPEAKAKLATHKIDSIALLNRKLGXTTTWRANCXNINSAIIKGXSARDLKVDGCRDKGFRQIQALSMRGN

SEQ ID NO: 134298 - protein, 226 aa, Oryza sativa
  unsure (1)..(226): unsure at all Xaa locations
  Clone ID: PAT_MRT4530_36086C.1.pep
FAGERCRRRPGRTATTCPRTRRRRTWRLRRRNTRAAECSSRTGPRRRGRAPTTSPSRTPRSTPATARRRRRAPSAAAAARRSRSAVATTRGRSRGGAAPPATRTPASPRRRRRRPMPRMPGGAGARRRRSRPPRRSRPWRPAWAPRRRVARPGSRRRRGGRRRRRGRGGRASPCPSTRRPSRGRGRRRPAATASSRRRRXSLRRRRGAARTPRPRRTAETGRPWRP

SEQ ID NO: 134299 - protein, 90 aa, Oryza sativa
  unsure (1)..(90): unsure at all Xaa locations
  Clone ID: PAT_MRT4530_36087C.1.pep
LHLHLKGSNPKSPPTSASPSPXPPPCAPPPPQPPPRGSSHRLHLVSSGRTPGPPSSPSRGDRLPRPPSSRPPPPRPPPRRRPTPSTTTRR

SEQ ID NO: 134300 - protein, 213 aa, Oryza sativa
  Clone ID: PAT_MRT4530_36088C.1.pep
MASSSSSSPSRPLLRRVLSFREPLLLIPYIVGFLAAASSGFFYSYSSFLHSFARSLVPAAAAGAVVKCAYLSAAADSDEPCSSCGGEDEDVVAAVEEEEAHLSKVEVEEIMERIGLGVGGHGEGLKARMGRDEVSRLFDADEPSFAEVRRAFAVFDGNADGFIDADDLRAALARLGFREDAAACRAMIAASCGSVDARMNLFQFVKFLETGLC

SEQ ID NO: 134301 - protein, 86 aa, Oryza sativa
  Clone ID: PAT_MRT4530_36089C.1.pep
SAAQRGWSTVDRVHGAGVVVYHVALTWHHVAGHAGHGMDGHDRPRAERQAGDGRRQGRPGHATRRRPVTGDRPTAAVDDGGDGADG

SEQ ID NO: 134302 - protein, 54 aa, Oryza sativa
  Clone ID: PAT_MRT4530_3608C.1.pep
ERRTPPRPPRPPPPAVVSSCLLHTSPTLRTTAAPIRAADGSRSSSSSRRCRHTT

SEQ ID NO: 134303 - protein, 44 aa, Oryza sativa
  Clone ID: PAT_MRT4530_36090C.1.pep
RFSCDSGTVSAVSVRSIQRARLGLDDTASISTHWTLDRRFCLCF

SEQ ID NO: 134304 - protein, 78 aa, Oryza sativa
  Clone ID: PAT_MRT4530_36091C.1.pep
QHQNGSNLHNTLQMFLKLHVCFLPNNTLQHSTLWSPYDPTDYTRFQILELRAEENRLINSSDRLNPRNILRNKRTNCY

SEQ ID NO: 134305 - protein, 80 aa, Oryza sativa
  Clone ID: PAT_MRT4530_36092C.1.pep
TRPFFLSALTAHCMGGSLHHGGVLPSDGPHGAMDLLRAFPRSADHHTQDRRKPYPRVTYQKPATLLSIDGYNRWNDTHCA

SEQ ID NO: 134306 - protein, 432 aa, Oryza sativa
  Clone ID: PAT_MRT4530_36093C.1.pep
MLQRNLPNLSLRISPPAVSSAAAPVSSGTPTTAARTTLPTGVITDAEGGGEVAAFFGNPSSGSEPPGLSLGLGPTTPAHADAGGGRHGDHHLQPQGCAPFKRAAARASQLPAGSKRSVRAPRMRWTTALHARFVHAAAPPGGRGGATPKSVLELMNVKDLTLAHVKSHLQMYRTVKSTDRSSHIASGEAQLQQQAGMEVAMEAAAGGGGNGGGGGGGVVLPMMPACDDMVGICSSPAPPAAATSSAAAYFLCATTTSTATAPLAVVPSPPAPTIPTRFHECIYGDVDVVIQSISMLINVLLHGIDKSCLALTFLEHRRTDQTPALEKGVAIVDSLHRCQKHNYSPVLQDALHQGAEEDHLITGNLPMGGASAQASIEAMATTNSSSPASSSPSLASLEQLLPEDSFAPNLEISLGRHNWNMDHPEELSLKYL

SEQ ID NO: 134307 - protein, 548 aa, Oryza sativa
  unsure (1)..(548): unsure at all Xaa locations
  Clone ID: PAT_MRT4530_36094C.1.pep
MASASASAGGGGGGGETPLVDRCIDAAAGGAATVEAWRRQRRSLERLPAQLADALLRRLAARRLLFPSLLEVFQHSVEEIDLSGHIAVDAEWLAYLGAFRYLRVLKLADCKNVNSSAVWALSGMRTLKELDLSRCSKISDAGIKHIASIESLEKLHVSQTGLTDNGVMAISSLINLRLLDLGGVRFTDKALRSLQVLTQLEHLDIWGSEITNEGASVLIAFTSLSFLNISWTRVTCLPILPTLRCLNMSNCTIHSICNGEFQVLIHLEKLIISAASFGNIDEVFSSILPSSLTYLDMSSCSSSNLYFLGNMRNLEHLDLSYSRIISDAIEYIANIGMNLKFLSLSNSEVTSQALCVLAGTVPSLTTLSLAHTKIDDSALLYILPSIPEAFSIWLRAENMDLNYXALGSVVLFDXLIILPPLYEVGTQLMDDVIPPLASLRALKYLFLKSDFLSDPALHALSSASNLIHLGFCGNILSTTGLRKFVPPATLRMLDLSGCWILTGDAISAFCTCHPVIEVRHELIQELQANYGGTSHLHKSSRQPQQMKE

SEQ ID NO: 134308 - protein, 99 aa, Oryza sativa
  Clone ID: PAT_MRT4530_36095C.1.pep
MSAAQGERGAPASGAPGSAAQGCRSTRPTAQIAPGADRTGGGDPARLGSRPTDRPRRWPRRARTRCRRWQPAAEAAAQRRRRTTGAAAQRRRRTTGAAA

SEQ ID NO: 134309 - protein, 228 aa, Oryza sativa
  Clone ID: PAT_MRT4530_36096C.1.pep
MEKLKLGDAAATSAAGNSGERPQPEREPTKPPPPEHEAAQPEDVDEIFRKMKETGLIPNAVAMLDGLCKSGLVQEAMKLFGLMREKGSIPEVVVYTAVVEAFCKARKLDDAVRIFKKMQGNGVIPNAFSYWLLIQGLCKGGRLDDAVAFCVEMFEAGHSPNAMTFVGLVDEVCKAKGVEEAEKLVRSFQDRNFAIDEKSIREHLDKKGPFSPVIWEVIFGKKKSGRPF

SEQ ID NO: 134310 - protein, 239 aa, Oryza sativa
  Clone ID: PAT_MRT4530_36097C.1.pep
MVAEEEVVVVWEGEKEGEIDYVFKVVVVGDSAVGKTQLLGRFTKDEFFLDSKSTIGVEFQTRTLSLHRKRVKAQIWDTAGQERYRAVTSAYYRGALGAMVVYDITRRRTFENVARWVEELRAHADGSTVVALIGNKADMPAGRREVAADEAARFAEEQGLFFSEASALSGDNVDRAFLTLLEEIFAVVSRRALELDEARRMRDGGAGGGEVLSLKGTTLDVGSIMETSAMKKSSQCSCS

SEQ ID NO: 134311 - protein, 82 aa, Oryza sativa
  Clone ID: PAT_MRT4530_36098C.1.pep
ILCIHHLRPSMFLDVGLLALTTNWRRSFKSLLLHNHVKPILLARQKGVFPNDQHFHDALFFLPIEVLDNMLQRTPLANFSQL

SEQ ID NO: 134312 - protein, 41 aa, Oryza sativa
  Clone ID: PAT_MRT4530_36099C.1.pep
MRERISIHIGQAGIQVGNACWELYCLELGLQADGQMPSDRT

SEQ ID NO: 134313 - protein, 448 aa, Oryza sativa
  Clone ID: PAT_MRT4530_3609C.1.pep
MAGACKGCRVAFTPFRHHAFEALKAACRRWLLPNGILSCKQTQHACIKSDYQKFYKNNSRFPWKFSKISAFPKEYYFGGFTSLGSSLVAPRSYHTNTKQSKAKRDASEDFDFDPPPTRFPLASLQRCPFPSPALHTRTAAPPSHCRPGPAPSGAHPSLAVASSAQYIIEQFRATTGCGKIEGAVKSMYAAGRVRLAMLQDPAGGGAGGGGGGGRGHEGSFVMWQLAPSMWIVEMAVAGQHVAAGSDGRVAWRRTPWVGAHAARGGSRPLRRALQGLDPVTIAAIFSTAEHAGEKLVDGEDCFVLRLDVGPSVLSSWSDGTAEVIRHGLTGFFSQRSGLLVRLEDSQLTRIQSPGAAAMYWETTISSSLADYRAVDGGGGVHVAHSGRSTAHLARFGVGVRAARVVTRMEESWTIDDVAFNVPGLGPDAFIPPEEVRRSRFYDAMAAGK

SEQ ID NO: 134314 - protein, 735 aa, Oryza sativa
  Clone ID: PAT_MRT4530_360C.1.pep
MTGGAAGLRRRSKHGNGSAFTMTTGFPGSSTTGKWRPVFFSSSRTQRRQRRPKATTTATARGCWSGAGEPRYDLAGDRAAGCGFGGHAHVEDDEANPTVLTTTTIDVRRRPATRGGGGGLDLTDDGELRRPAVKKDGRPGFSTPWRTSWRRRQAAATAEAARRRGCTRPVAATNLTRAATRLRGTRELGRGGKRKRRTRGSYLKPWKLGSGPKTTGKTRESLSSPEKGKDLIREIGKDFHKKFWGFLGEKEEENKRNISPQLIGREEAGLGAGSARQVGAAADSGSARAAGRRVRHYLLSNECTVICKADVVKYMLSAPILKGRVGKWIFSLTEFDLRYESPKAVKGQAIADFIVDHRDDSISSVEIGPSILFFDGSVCTHGCGIGLMITSPREACFELAYTIKPYATNNQAEYEAVLKGLQLLKEVEADAIEIIGDSLLVINQLVGEYECKNDTIIVYNEKCQELMKEFQLVTLKHVSREQNIEANDLAQGASGYKQMIKDVKIEVAALTADDWRYDVHQYLQNPSQSASRKLRYKALKYTLLDDELYYRTIDGVLLKCLSADQAKFAIGEVHEGICGTHQSAHKMKWLLRRAGYFWPTMLEDCFKYYKGCQDCQKFGANQRAPASAMNPIIKPWPFRGWGIDMIGMINPPSTEALWSYRMACHGSIQVPPYKLVYGHEAVLPWKVRIGSRRTELQDDLTADEYYNLMVDEREDLVQSRMRALAKVTKDKERVA

SEQ ID NO: 134315 - protein, 51 aa, Oryza sativa
  Clone ID: PAT_MRT4530_36100C.1.pep
LLNPYLKPIHNNTSSLPTYIHTVFHHTHHRSYKLTYIHTYTHIRIRTYIHT

SEQ ID NO: 134316 - protein, 199 aa, Oryza sativa
  unsure (1)..(199): unsure at all Xaa locations
  Clone ID: PAT_MRT4530_36101C.1.pep
GHARGGQGTXVGKCVPLERLDNMKWMENERYLAIVNHLVGAGNPDACFITGVTLVFAHQDMEQGLLFLNKAATAGHKAAAYVLGLLLYKFDDARATGKKYISQVEDDGNEAATGVGVKRTNRECQQYRKIVGDVIQEATWKVGGRRGRMLVLPEDSHHCTATGCGVESGWEGYGVFCSDDCRIKHEYSKFFTEVMNYLP

SEQ ID NO: 134317 - protein, 380 aa, Oryza sativa
  Clone ID: PAT_MRT4530_36102C.1.pep
AMPPPGESERELSRSSSPPPSPAMEEIIGRSSPRGHGGSGSLLRKRCRSEMEAVRGLLKKAEALVRKAAAGAAARRPLPRRVKDKEAMTMAQKEQLVGLLSSLPAGILPSHVADFMRRRCSWRAVPGVDGDDDELEIDLGSTEDAALFELRKMLDDEAAVRRTSPRGLEDGEVADEYMDICGGVSPLPAAARKPPPLALSSPPAAAEQEDDLIDIFGGDSPLPAHEDLLDASPLVKPEADEFVDIDGDTIDKSPGNPSSTTTGSSSGNASGSSSTSASSSGSDSDSDGGGVGDTASSNPNTANHLPVVVVEAVATKPLEPQPPQVAEQAYKMGEKLTRSRREAAPAPAPAGRMSELIARAQAERLRRDAERKRAREEQPR

SEQ ID NO: 134318 - protein, 279 aa, Oryza sativa
  Clone ID: PAT_MRT4530_36103C.1.pep
MVVQNGWAYATGRLAPFDFLSSSATEAGGGVAGRRHPPLLATDPLLTSGNNPHHGSTRNPHNPGRVSGGSSSGSAAAVCAGLCPVALGVDGGGSVRMPAALCGVVGFKPTAGRLSNAGVLPLKLDGRYSAIVDQSRSQPSRRHGVRKLTGKDGKRDGVKQPQVNACVEYERSARLEITKRDSENVRCIDVVYPHNLRFTVGKVASDDLVGREEECQPALSAVHEEGEGGGEARYLAGGVAPEMARLLVQYSSGLWVDFAGALLGQDDRGVAEVCITFKM

SEQ ID NO: 134319 - protein, 417 aa, Oryza sativa
  Clone ID: PAT_MRT4530_36104C.1.pep
MARSVDCAMLARWPRAVPSPCLGQAVPSGRAPPPFQPSSSLGKSTVGITKSSPSSSAASPSPKIAGAPSPPSTRSPPPFPPRRRCRPFLLRRSFGHRSATEAGGGVAGRRHPPLLATDPLLTSGNNPHHGSTRNPHNPGRVSGGSSSGSAAAVCAGLCPVALGVDGGGSVRMPAALCGVVGFKPTAGRLSNAGVLPLKLDDIQQLLISLGLSPHGGTDGSRETHGNFLRQKQPQVNACVEYERSARLEITKRDSENVRCIDVVYPHNLRFTVGKVASDDLDSMGVELHGDRLLIAAACWRVLAGAGDHRQVGREEECQPALSAVHEEGEGGGEARYLAGGVAPEMARLLVQYSSGLWVDFAGALLGQDDRGVAEVLDVVDGVVAQYAENERNRKPCGTHHIGADAVVDDAAVALRGK

SEQ ID NO: 134320 - protein, 301 aa, Oryza sativa
  Clone ID: PAT_MRT4530_36105C.1.pep
MLPYATAAEAEAALGRAMTAAESLWFRYSAGIPDYVLFWHNILFLFVVFTLAPLPVALLELRAPAAVGPFKLQPKVRLSREEFFRCYRDVMRLFFLVIGPLQLVSYPTVKMVGIHTGLPLPSLGEMAAQLLVYFLVEDYLNYWIHRLLHGEWGYEKIHRVHHEFTAPIGFAAPYAHWAEVLILGIPSFVGPALAPGHMITFWLWIVLRQMEAIETHSGFDFPFNLTKYIPFYGGAEYHDYHHYVGRQSQSNFASVFTYCDYLYGTDKGYRYHKAYQAKMKALGQTEGEKADSNGLSYAKLD

SEQ ID NO: 134321 - protein, 545 aa, Oryza sativa
  Clone ID: PAT_MRT4530_36106C.1.pep
LVQDFHLVILTRVLLGTLENFDKFYHLLVFNIRGCQLRSLPDHTSQKLLRVRHIIGPASLVSSIHHIGNLKNLQELQEFRVGKRPGHGIEELQDMNLRKSLSITNLENVISATKAGEVNLSLKTCLVSLRLEWHSAEETSQSMSTVVLEQLQPPNSLNELEINGYPGFVFPTWFTEDHLINVKKVTLRNCSFVSVIAPLAKFPSLEELILERFSMLERISESEESDRTSYFKYPFRFLGFPAETSCRFPRLVKLRIEDMTVLEEWTEQQPCFPCLEELTVRNCPKLAVLPPLHHARVNRMHIEGLPLISFNSSRMGSVVPFGAFLDVPNRCPNRVEARALQPSRVFILRHCPNLSTFTITADNSSSSHGFGPLLQLEITDCKKLKSIQGAFAFVEKLYIEKCHSSLKLHNGNAMKSLHTLHIDSVATHMDPFLLGLRALRILIIKDSEELNSLDVLLESDHLPDTLEQLQLINCNSIKSLPWNMDRVLVLESLQLINCPNMQFLPCLPNNLTELRISGCPILKEKYGEYGPEWDNISHVPYVSFD

SEQ ID NO: 134322 - protein, 45 aa, Oryza sativa
  Clone ID: PAT_MRT4530_36107C.1.pep
MHTLLLPSSKTFDAHSTHRHLVGATPLADCQGGARPSTRARSIHA

SEQ ID NO: 134323 - protein, 58 aa, Oryza sativa
  Clone ID: PAT_MRT4530_36108C.1.pep
NLITGLSVLPLNRQGVQLVHSNRPRFFEARWLKDATVQEVVQTAWAPAVSQGQGTPRA

SEQ ID NO: 134324 - protein, 240 aa, Oryza sativa
  Clone ID: PAT_MRT4530_36109C.1.pep
MVSPPVGELYKRRVRPLDFLHATLRVFVFLALAFSDAGIQTCLFPQESATWREALVNMPLGVGFVASFVFMIFPSTRKGVGYPREAQTGTEGGADADKDGKAEPPKTTTNGGSGGVDAEGSKQKNNDDCPKTTTTNDGSGGGDGAGSSVQKNSANQSTADGGGSGGSSATRRPSVGGGGAAAAAAKEHGSAARCGGPPLAADAEGCVRAALGDEAALRWRWLRRSDSSATRNTTGDKERR

SEQ ID NO: 134325 - protein, 91 aa, Oryza sativa
  Clone ID: PAT_MRT4530_3610C.1.pep
PPPPPPETQRRRTVTRRRRCRPVGPTGYPEAPLQVEPAAAFLLPPPPPPPSSPASSSSTTTVPAAAAALPPPAAVPAAAAAPSACARTPRG

SEQ ID NO: 134326 - protein, 144 aa, Oryza sativa
  Clone ID: PAT_MRT4530_36110C.1.pep
WSPSPSPPGSSRRRPPPPPPRAWMITSSRTTTTRRRRRCSSWRRASPTIRTSPTSSTAATAPPPSAPATARSAWSSARAPASPTSSARPPSSPASSSAPSSSSASPSLGTSPPSSAAASSRFRPPSFLAFTPSLHHLVLPGVPL

SEQ ID NO: 134327 - protein, 237 aa, Oryza sativa
  Clone ID: PAT_MRT4530_36111C.1.pep
MDGRGPGEHQPTRWPPGAGVEERDNASSSPASILLFALIGATDTTAAFGMHECMRRVLFLFSYFFWGLPSLNRSHWRTQHRGEAWGQYYQRMREKSEDQRERVERIRHMQDMFKKERSKCRDYRTRDGHNPSYYQNSRREEWYWDAESFYANQRTNFRSMPREAMGYTMSQHYSILGLDRSRLEPFSDAEIKNAFRRKAMEYHPDQNQHNKEFAEAKFKEVMDSYEAIKLERQNGSL

SEQ ID NO: 134328 - protein, 66 aa, Oryza sativa
  unsure (1)..(66): unsure at all Xaa locations
  Clone ID: PAT_MRT4530_36112C.1.pep
GGXPLFNPPPKLGFPXKXFXGTTYARXGIPXTGRLGSXTXKPPTFTMRSRSCREGDGEILYPNEGR

SEQ ID NO: 134329 - protein, 80 aa, Oryza sativa
  Clone ID: PAT_MRT4530_36113C.1.pep
VAAHLDEEQWSTWYTTMLRYGWTIGGSEVMRGDCHVALAARQHGHVVLPLDEQFNEGMQKDQTEMFLISFSLNFHTRFLF

SEQ ID NO: 134330 - protein, 70 aa, Oryza sativa
  Clone ID: PAT_MRT4530_36114C.1.pep
PRVRFIKKKIKKKIKKKKKRGGRKLKKKKKKKKKKKKIKKKKKKKNKKKNKKKKKGGGRLKGPRFLTRLL

SEQ ID NO: 134331 - protein, 190 aa, Oryza sativa
  Clone ID: PAT_MRT4530_36115C.1.pep
MAKKGGQAQYGMGPVRVLLAATSRILRHRHRLSHSPLPLPPTLTSSATTANSYILRCRLQRPHPLSLTPPAASSTANTALQGSLKQALWTGWNIGHLGCVAQPPLPVSSMPPWPLTPRRRSPLSPVTTKKLPALHSYTNSQGYVVSSSLFLVPATTARYHATRPSAPCQLVTTISCQHVVHGGGPSVDGR

SEQ ID NO: 134332 - protein, 186 aa, Oryza sativa
  unsure (1)..(186): unsure at all Xaa locations
  Clone ID: PAT_MRT4530_36116C.1.pep
RCNNRATCSHALPLCSPLPPCTAAATRASNAVTYLSACGTDGSGGRRAAETEAEWVAGSFAVVWASNHLLGDGHITVVLLRSWSEFARTGTFAGGLNLDRSVLSRPHSPPRYSAAVDGMFVPWDXARQLYYVEAADIAMLREEARTARDERLYSFLFLANFAFSFFGGGFWVGKTRSGSLLKFVFL

SEQ ID NO: 134333 - protein, 101 aa, Oryza sativa
  Clone ID: PAT_MRT4530_36117C.1.pep
STTGDPLQINSWGPKMDLFSYAGLSQEAKLWWCIPMLGKFWAVQYGWYTMVLGHAPRYTFLVRGSYTSFSSSSSSHQGARGLKLCVGSSQKPAMNSSQGVD

SEQ ID NO: 134334 - protein, 355 aa, Oryza sativa
  Clone ID: PAT_MRT4530_36118C.1.pep
MEQVVNAVLDLVVPPASMVMLAFAWPTLSFLRGVEWVVKTLTVENMHNKVVLITGASSAIGEQIAYEYARRNANLVLVARREHRLFAVRENARALGAGQVLVIAADVVKEDDCRRLVGDTISFFGQLNHLVNTVSLGHDFCFEEAGDTVAFPHLMDVNFWGNVYPTYAALPYLRRSHGRVVVNAAVEIWLPMPRMTLYSAAKAAVIDFYESLRYEVGDEVGISVATHGWIGGEASGGKFMLEEGAEMQWKGEEREVPLAGGQVEAYARMVVAGACRGDAHVKHPNWYDVFLVFRAFAPDVLAWTFRLLLSTPSPSPPASARRHQLAALPAPPLHPLLEYPSARSPGRAAQQHKLE

SEQ ID NO: 134335 - protein, 54 aa, Oryza sativa
  Clone ID: PAT_MRT4530_36119C.1.pep
IQKKSQTKENHQRRSDLMRNRKLIWLQRTRNMGGDISGWSARQKQFASYDERDQ

SEQ ID NO: 134336 - protein, 34 aa, Oryza sativa
  unsure (1)..(34): unsure at all Xaa locations
  Clone ID: PAT_MRT4530_3611C.1.pep
IIDRWVEQHDICYIMLEYCDLCACPSTHLCGRRX

SEQ ID NO: 134337 - protein, 79 aa, Oryza sativa
  Clone ID: PAT_MRT4530_36120C.1.pep
PLGLQTTPVTHDRKFGWKFQPGKLIYNLTLGLLFFPPKILPLLGEVLKVIKGLGGMPYGLRLGRGSIFFLSGNLCSRPN

SEQ ID NO: 134338 - protein, 65 aa, Oryza sativa
  Clone ID: PAT_MRT4530_36121C.1.pep
MALLQSRPSGGVPGTVQFSLPPQSPDLELAWAKTVLPLPLREHPANGWRMSGIEKVTGEVGDSML

SEQ ID NO: 134339 - protein, 212 aa, Oryza sativa
  unsure (1)..(212): unsure at all Xaa locations
  Clone ID: PAT_MRT4530_36122C.1.pep
VIAXLRTLYGDSPPAIILVGHSMGGSVAIHVAAKKVIRNLHGLVVIDVVEGTAMASLIHMQKILANRAQHFPSIEKAIEWSVKGGPLRNIDSARVSIPSTLKYDESRECYTYRTPLEETEKYWKGWYEGLSEKFLSCPVQKVLLLAGTDRLDRALTIGQMQGKFQMVVVRHTGHAIXDVPEEFASHILNFIARNKIGPNGVEIPGLIKKWQH

SEQ ID NO: 134340 - protein, 63 aa, Oryza sativa
  Clone ID: PAT_MRT4530_36123C.1.pep
RSPCFFFFFGTKHYPFLLLHMIFTCLTNVYTKKLSFRGKKLHVSAQNIGNWGLNHSEPPKIFA

SEQ ID NO: 134341 - protein, 125 aa, Oryza sativa
  unsure (1)..(125): unsure at all Xaa locations
  Clone ID: PAT_MRT4530_36124C.1.pep
VSMEDGEGSSRAMXEEAPEMAFFYGQTFMPWGXRPRRTLLENGSIVLXARMVEVGEPFVTLVRPSNLVVVTEALERKGITRGTTRHALPLWDVADTIHNVLHGEGRGYLSVRLLDMHSYLTVRNE

SEQ ID NO: 134342 - protein, 44 aa, Oryza sativa
  Clone ID: PAT_MRT4530_36125C.1.pep
SIPLTPESLPTLSLMKNMILSSSLAISRKRLNVRVCSHCFLYWK

SEQ ID NO: 134343 - protein, 47 aa, Oryza sativa
  Clone ID: PAT_MRT4530_36126C.1.pep
YLRNPLYLFFGYKDEIGFVDKFKGPQMNLLPHIMMGPFLDYKKKKKK

SEQ ID NO: 134344 - protein, 563 aa, Oryza sativa
  Clone ID: PAT_MRT4530_36127C.1.pep
MANPIIPSSSGSDGEEARTKLGRLNAAVERSWVGRRFKLAARGSTFTTELRAGTTTFLTMAYILAVNASILSDSGATCTADDCDAPSPACRFPPVDPGYAACVARARRDLIVATAASSVIGSFIMGTFANLPIALAPGMGTNAYFAYTVVGFHGSGTLPYRTALAAVFLEGLIFLFISLVGLRSKLAKFIPKPVRISSSAGIGLFLAFIGLQSSEGVGLVGFSSSTLVTLGACPASQRASVAPVVTFPNGTVALMPGGTVSGGILCLSGRMTSPTFWLAVVGFLIIAFCLIKNVKGAMIYGILFVTFISWPRNTAVTVFPDTPAGDESFGYFKKVFDVHRIQSTAGALDFRGARHGYFWEALFTFLYVDILDTTGGLYSMARFAGFVDDATGDFEGQYFAFMSDATAIVFGSLLGTSPVTAFIESSTGIREGGRTGLTALTAAAYFAAALFVTPLLASIPSWAVGPPLVLVGVMMMRAVAEVDWADMRQAVPAFLTLALMPLTYSIAYGLIGGIASYMLLNSWDWACHAVAVLRSRRRRGARAETRSAAAGDNGEQRKNLEMA

SEQ ID NO: 134345 - protein, 91 aa, Oryza sativa
  unsure (1)..(91): unsure at all Xaa locations
  Clone ID: PAT_MRT4530_36128C.1.pep
YTTNAIMWSYIVQTNMTNFQPAIPAHQRCTNTRVLSITQNRTTINSTWLHLHAXTLWAPNRASRIGTRGSHPGIPARYLQAVPAYPYSESY

SEQ ID NO: 134346 - protein, 87 aa, Oryza sativa
  Clone ID: PAT_MRT4530_36129C.1.pep
QKKRAPGESVRGSPPRNEPEGFPRLQQGGSLQFSLIGNGLPLFPNGRPPLNPPKENALPEWGQSYFARKTVFGGLKTLPAKLDLDNV

SEQ ID NO: 134347 - protein, 73 aa, Oryza sativa
  unsure (1)..(73): unsure at all Xaa locations
  Clone ID: PAT_MRT4530_3612C.1.pep
MVMWATRHGTAQARPCXGRGLSGRHGPTDAPGCTVPAHGRHTRPRHGPILLEPCQAGPKARWAIVLPHRKCLI

SEQ ID NO: 134348 - protein, 176 aa, Oryza sativa
  Clone ID: PAT_MRT4530_36130C.1.pep
TSARDQSGKYMIIITQGQKRIQDEGRVAASDRANHLISGWVVKPLSCTERIEKPLRAPSTSTCTCATPRHAAHPRGRRHRRPSRASSPNHSNHAADADAALKRHEAARAAEEEEEEPVVALPVAVHRPRRLARGGCCCLARARARTRDVAGMRRLADNRDGDRDKRARRRAREETI

SEQ ID NO: 134349 - protein, 364 aa, Oryza sativa
  Clone ID: PAT_MRT4530_36131C.1.pep
MARHGPQSHDQPLQEEDYIDMDLSSPAAAEAVTASARASLLCYSTAMAASPQNSREFEFHMSAPVDKWEPAASPADELFYKGKLLPLHLPPRIQMVEKLLESAAEKGLLSASTAPATPYQSCNASPANSCYVSGELNAEHYFHECTSAGIGAAEEAAACEKKPWSKKLKFIRHLNLGLKLKASKAYIKTIFATKAGNPDGKTGTPSANELSNAQFKSWRKNPFGQIRSNRYIASPISNSVTLGGRLKEDECGHRRSFSSVIIRYSSSNKTSSASSSSCSSSNSSSSILSSTDSGVGPVLRRSSSASSEMDNPIQGAIAYCKRSQQLASVRKSASDAGFRFMSSSASRIAAESEDPDDIIEICGR

SEQ ID NO: 134350 - protein, 748 aa, Oryza sativa
  Clone ID: PAT_MRT4530_36132C.1.pep
MGSCTTLCFKDPVDMMQANGTCDGIGCCTIETMREVQGFRLRIVRQDGIGQVVPQEQSSVKACLTQTVTAHPRTKQPMLAVETLNASMRTGVAITAIAPMVIPMGFLTLKKAVLRFSQSNKKYLEVPVPHGPRGYNPFPKGICNRFCGNTNVPFPFGLEEGCYALEKFRLNCRAGKLFLDRGDVDYLVRNISVDNGYMSVTNEQNNSTSNGTEIMVVARTMHGSSEDDPQLDLFDLTQENDMKMWWAVVSFTCQEATQDINNNSYACRSVHSECIDVNVTHGTQLGYRYVNECLLPNYCNGRCQNFIGGYNCTSCPRGKEFDPTRRECVTSAKLISMALGISCGLGFVMLALGATILITKWKRGIQRRIRRAYFKKNQGLLLEQLIIDENTKDKTRIFSLEELEKATYNFDATRVLGHGGHGTVYKGILSDQRVVAVKMSKIVEQAEIDQFVNEVAILSQIIHRNVVKLFGCCLETEVPLLVYEFISNGTLCELLHNDVSAKCLLSWDDRIRIAIETAGALAYLHSAAAIPIFHRDVKSSNILLDDNFTAKVSDFGASRSIPLDQTHVVTMVQGTFGYLDPEYYNTSQLTGKSDVYSFGVILVELLTRKKPILINDVGTKQNLSQCFLEGLQQGVLMEILDSQVLEEAGQEEIDDIASIAQACLKAKGGERPTMKEVEMRLQFLRTTRLKKCQPISVMDEEIEPFICPKTISSDAQSSFIHTAGFTSEYSTRSYRLEQELSSSVGLPR

SEQ ID NO: 134351 - protein, 72 aa, Oryza sativa
  Clone ID: PAT_MRT4530_36133C.1.pep
MATIRAAGQGGCWNSFQQGRGGGQRGIGGGTEEIDERRSVEVAMGDWRAAWSWATEIGLAGGDGVAAEEGRR

SEQ ID NO: 134352 - protein, 85 aa, Oryza sativa
  Clone ID: PAT_MRT4530_36134C.1.pep
GIAADVICHLTPPTSASSQPTSDAITATSSCCRSKLLPAPFQPPLSLPLPTVTLPGCASLGNMFFRQRRSLSTTGVSMPLLSLLS

SEQ ID NO: 134353 - protein, 217 aa, Oryza sativa
  Clone ID: PAT_MRT4530_36135C.1.pep
MGEVATTTLLLTSHEAKPAKAPSIHDAIEVYIGATGARQLLKAMLLAFAWAFDAQQVFMSVFTDAEPPWHCTGVVDAVEAAAGDSGSSCSSPATSASPCALPLGTWEWDRLAKTSVVSDWALNCSGGGPALVSLPASSFFTGNLVVVLPYSLICAPMCDRGCESRMCSCVGPVSAEEHQCALVLVHTQHSGWCKPKSQWTAGVRSVCAHMCVHKPRV

SEQ ID NO: 134354 - protein, 547 aa, Oryza sativa
  Clone ID: PAT_MRT4530_36136C.1.pep
MADAATTPLLTSHEAKPAKALSIDDAIETYIGATGARQLLTAMLLAFAWAFEAQQVFMSVFTDAEPTWHCTGVAAGDPGSFCSLAAASASASACALPPGTWEWDRPAETSVVSEWALKCGGGGPALVSLPASSFFAGNLAGGFLLTTLADTLLGRRKMLVLSLVTMSVAGVLTVFSPNVWVYAALRFVCGFCRSTAGTSAMVLSTELVGKWWRNTVSVAAFVFFSVGFMSLPALAYTLREASWRNMYVWTSLPSLCYAVLLYFLVQESPRWLLVRGRKQEAIAALRQIASLNGGEGITTSSFTKLETCAGEVGDGVAGGEGMFSTLRSICERRWALRRLAAITTATFGVGVVYYGMPLSVGSLSSDLYLSVAYNAAAELPSSVLSWLLMGRFNRRSSLVALTAASGLCSLACVVIPDPEAGAGGSHLRLAAELASFFASCAAYDVLLMYSIELFPTSVRNSAVGLVRQAGVLGGVVAPMLVALGRERSYWSFGVFGLTVGCLGLFVTFLPETKGRRLSDTMEDEEEAAAAILSCAGASDMNNNGELV

SEQ ID NO: 134355 - protein, 169 aa, Oryza sativa
  Clone ID: PAT_MRT4530_36137C.1.pep
MAVAGGRGSGGGGGGGHLWLCLRWGEMDLGWKLLGRRWRRHGLIVVRQRGVGEWLNASADMGFSCLVVSVRLIGGRARGYGQNGGSGFGSTRPPASMGFDDATGDILLAPSPLHHQRWMISAHIYSEICWALHWHIGCKLRYNSTGGAPVSFKQNLLISASLLLIVFCA

SEQ ID NO: 134356 - protein, 107 aa, Oryza sativa
  Clone ID: PAT_MRT4530_36138C.1.pep
MGGRGRRRSRPPAGWPATAPPRTASSAAPRQPSRQLGDGGEEKGGGEVAFFPSHSFLFLLIRCLLPFPSVSGVSARSCVGLARGKPSPEVEMGHHGEGPRGGGRGSP

SEQ ID NO: 134357 - protein, 878 aa, Oryza sativa
  Clone ID: PAT_MRT4530_36139C.1.pep
MAAAEQSAEQFRGQARLPGFAAPRRYDLRLVPDLDGCAFTGSVDVSVDVTAPTRFLVLNAAELEVSPGGVQFKPHGAEQELHPAEVTNVPEDEILIIRFNEVLPVGEGTLVIAFKGTLNDKMHGFYRSVYELNGEKKNMAVTQFEPADARRCFPCWDEPSFKAIFKITLEVPSETVALSNMPVVEEKVNGLIKAVYFQETPIMSTYLVAVIVGMFDYVEAFTTDGTRVRVYTQVGKSAQGKFALEVAVKTLVLFKEYFAVPYPLPKMDMIAIPDFASGAMENYGLVTYRETALLFDEKHSAAANKQRVAVVVAHELAHQWFGNLVTMEWWTHLWLNEGFATWVSYLAADNFFPEWNVWTQFLEESTTGFKLDALAGSHPIEVDVNHVDEIDEIFDAISYRKGAAVIRMLQSYLGAETFQKSLAAYIEKFAYSNAKTEDLWAALEEGSGEPVKTLMHSWTKQQGYPVVNVKLKDGKLEMEQTQFLSSGAEGVGQWVVPITLCCCSYSRQEKFLFNGKQEDFNLSGLVECQKKEDFWIKLNVNQTGFYRVSYDEELASRLRYAIEANKLSAADRYGVLDDTYALCMAGKQKLVSLLHLIAAYKDETEYTVLARVIDTSLSIVEMVAVAAPEGLGKLKKFLIDFLEPFAQRIGWDAKSGEGHLDALLRGTLLTALAELGHEATINEAVRRFNIFVEDRETPLLPPDVRKAAYVALMQTVNKSNRAGYESLLKIYKETDLSQEKVRILGSLASCPDPDVVRDTLDFMLSPEVRNQDSIFLLRGVGAAGHEVAWTWLKEKWDYISDTFSGTLLTYFVSTTVSPLRTDEMGDDAEEFFKSRTKANIARTVKQSIERVRINAKWVESTRAEANLGNVLKEISHDH

SEQ ID NO: 134358 - protein, 230 aa, Oryza sativa
  Clone ID: PAT_MRT4530_3613C.1.pep
TYLGKLPIACIVSTSTSYYLHNVDSWAKVLFTSSMAVSYRPKIRMKSTTIGAILERMLYILLALSHTFTAIIAFSSSVTATITFSSPLKASAPTKRHRARISRLSECFFRNSRIAAILPPCSWGGGGARSTASTATTASWRDGAGSASAFLQDGGAALRRGQNPMVVAIRPVPSPARWTRGRRGVGRAAAAAARPSTPATDLRTPERMPANAMDRAVGRRWTGNQKYGRS

SEQ ID NO: 134359 - protein, 498 aa, Oryza sativa
  Clone ID: PAT_MRT4530_36140C.1.pep
METFTADDQRDADAPRPPRVVLLASPGAGHLIPLAELARWLADHHGVAPTLVTFADLEHPDARSAVLSSLPATVATATLPAVPLDDLPADAGLERTLFEVVHRSLPNLRALLRSAASLAALVPDIFCAAALPVAAELGVPGYVFVPTSLAALSLMRRTVELHDGAAAGEQRALPDPLELPGGVSLRNAEVPRGFRDSTTPVYGQLLATGRLYRRAAGFLANSFYELEPAAVEEFKKAAERGTFPPAYPVGPFVRSSSDEAGESACLEWLDLQPAGSVVFVSFGSAGTLSVEQTRELAAGLEMSGHRFLWVVRMPSFNGESFAFGKGAGDEDDHRVHDDPLAWLPDGFLERTSGRGLAVAAWAPQVRVLSHPATAAFVSHCGWNSTLESVAAGVPMIAWPLHAEQTVNAVVLEESVGVAVRPRSWEEDDVIGGAVVTREEIAAAVKEVMEGEKGRGMRRRARELQQAGGRVWSPEGSSRRALEEVAGKWKAAATATAHK

SEQ ID NO: 134360 - protein, 255 aa, Oryza sativa
  Clone ID: PAT_MRT4530_36141C.1.pep
LNVNQTGFYRVSYDEELASRLRYAIEANKLSAADRYGVLDDTYALCMAGKQKLVSLLHLIAAYKDETEYTVLARVIDTSLSIVEMVAVAAPEGLGKLKKFLIDFLEPFAQRIGWDAKSGEGHLDALLRGTLLTALAELGHEATINEAVRRFNIFVEDRETPLLPPDVRKAAYVALMQTVNKSNRAGYESLLKIYKETDLSQEKVRILGSLASCPDPDVVRDTLDFMLSPEVRNQDSIFLLRGVGAAGHEVAWTWL

SEQ ID NO: 134361 - protein, 510 aa, Oryza sativa
  Clone ID: PAT_MRT4530_36142C.1.pep
MDGLVENFDADDLGEMPQNHYNEEQLIPYSDVSHPYNEEPDNMDNVEEGNPYIQQVSLYSEEPENQYNEEPSNPYQEESDNAYNGEVKQQDSLPVEADKKWPGWPGESVFRILIPAQKVGAIIGRKGEFIKKMCEESKARIKILDGPPGVPERTVMISAKDEPDAPISPAMDGLFRVYKRITDGSDGDSGQPERNISNVGPTRLLVPASQAGSLIGKQGATIKSIQDSSKSIVRIVETLPLVALNDDRVVEIQGEPVGVQKALESIASHLRKFLVDRSVLPLFEGQMKMHNAQREQAMAAPQPWGPPQPWGPPPSHLPPGGPGYGGHPQFMPPRPQDNYYPPPDVPSMEKQPHYGISAYGREAPTGVSASGNQPPSHVASQVTHNMQIPLSYADAVIGAAGASISYIRRHSGATVTIQESRGAPGEMTVEIIGSASQVQTAQQLVQNFMAEAPQGPPPPASNPPAPAVDLSYGSYPPPYGASYGSAASGAGPAPHNGGSYGGTTYPSYGY

SEQ ID NO: 134362 - protein, 76 aa, Oryza sativa
  Clone ID: PAT_MRT4530_36143C.1.pep
LLGHEHLPSLLRAHCSFWAERTVHSLIVAYFSTANCFQPFEHSSPSWALQMFSPLVSINLTVVVSSSVQASTTAIN

SEQ ID NO: 134363 - protein, 297 aa, Oryza sativa
  Clone ID: PAT_MRT4530_36144C.1.pep
MALTLLRGMRTPVVARRNAGLFFTTLQSPLLSRFTMRAESARAAAPKSIQLATKEAAEQKAQGFEAVIGIETHVQLSTVTKAFCSCPYSYGSQPNSTVCPTCMGHPGTLPVLNAQVVECARGLGLALNCEIATTSKFDRKQYFYPDLPKGYQISQFDIPIAKEGYLDLDLPVEFGGGHRRFGVTRVHMEEDAGKLLHSESGSYSQVDLNRAGVPLLEIVSEPDMRTGIEAAEYGAELQRLVRYLGVSNGNMQEGSLRCDVNVSVRPIGQSNFGTKVEIKNMNSFSAISRAIDYEISR

SEQ ID NO: 134364 - protein, 63 aa, Oryza sativa
  Clone ID: PAT_MRT4530_36145C.1.pep
MGIKGLTKLLAEHAPGAAVRRRVEDYRGRVVAIDTSLSIYQFLIVVGRKGTEVLTNEAGEVTR

SEQ ID NO: 134365 - protein, 992 aa, Oryza sativa
  Clone ID: PAT_MRT4530_36146C.1.pep
MERVRTILTHRYPYPHEHSRHLMIAVFAIWLFFVSSDNLQTLIMKLDKNFKWWSILSNRAIQILVVGKQPLESVRRYIAWIFLAALYHLPSFQSMGLDLRMNLSLFLTIYISSLIFLIVFHVIFLGLWYLGLVSRMAEKKPEMLTIIQNCAVISIACCVLYSHCGNKTITRDKSIDRRTASWVAFSLWKKHDDNSLISKLLRMHKFKEQICSSWFAPVGSASDYPLLSKWAIYEELASNGSGHSNDISPVYSLWATFIGLYIANYVVERSTGWALTHPLTMSEYEKLKKQLKPDFEDMVPWYSGTSTDLFKTVFDLMVSVTLFVGRFDMRMMQAAMNKTPDESKSSDLFYDHLDGKDELWFDFIADTGDGGNSTYAVARLLAQPSLAIKSDGSRQTFPRGQLLLIGGDLAYPNPSSFSYERRFFCPFEYALQPPAWYKPEHIALEKPELPLGVSELRKYRGPQCFMIPGNHDWFDGLHTFMRYICHKSWLGGWFLPQKRSYFALKLPNGWWVFGLDQALHGDIDVYQFKFFAELCQQKVGESDSVILITHEPNWLLDWYWGDKTGTNVEYLIREYLKGRCKLRMAGDLHHYMRHSFIESKEPVHVQHLLVNGCGGAFLHPTHVFENFREFYGNKYETKIAYPSYDDSSKIALGNILKFRRKNWQFDVIGGFVYFVLVFSMFPQCDSFRILREDSWADRVNSFFTAMWNVVFEILEHSYVSLAGVVTLLMVSFFFVPTKLSRRRRALLGFLHAVAHLTSAVILMLLMELAIEICIRNNLLATSGYHTLYEWYRKVESEHFPDPTGLRTRLEQWTLGLYPACIKYLMSAFDIPEVMAVTRSTICRKGIESLPRGGAIIYYVCVFLYFWVLSTPVVSLVFGSYLYICINWFHIHFDEAFSSLRIANYKAFTRFHIKKNGDLEVFTFAVDKVPKDWMLDPDWDMEPKEPFQMSYTRKFPSKWRAASGSDPTNAVRIVDHFVIPRTPPDSPTSGSAS

SEQ ID NO: 134366 - protein, 45 aa, Oryza sativa
  Clone ID: PAT_MRT4530_36147C.1.pep
ILTRSFLSNCAVLTYIGVFHVAPSGQSFLPPLCNFVISYCLKYIF

SEQ ID NO: 134367 - protein, 55 aa, Oryza sativa
  Clone ID: PAT_MRT4530_36148C.1.pep
LLIGIMAQAQALLAFNVPSRYGIIPLGTMVHPVPLHTPWTGCLCNDFYSIVVREV

SEQ ID NO: 134368 - protein, 76 aa, Oryza sativa
  Clone ID: PAT_MRT4530_36149C.1.pep
MGHQCQSVTTSTTQANYPAHSSGFSLSYGPYRRWILLWWPGCGFHHRLGYHDAYPCESLRRQQGRGCEGGGSADAC

SEQ ID NO: 134369 - protein, 995 aa, Oryza sativa
  unsure (1)..(995): unsure at all Xaa locations
  Clone ID: PAT_MRT4530_3614C.1.pep
MAPAVAGGGGRRNNEGVNGNAAAPACVCGFPVCACAGAAAVASAASSADMDIVAAGQIGAVNDESWVAVDLSDSDDAPAAGDVQGALDDRPVFRTEKIKGVLLHPYRVLIFVRLIAFTLFVIWRIEHKNPDAMWLWVTSIAGEFWFGFSWLLDQLPKLNPINRVPDLAVLRRRFDHADGTSSLPGLDIFVTTADPIKEPILSTANSILSILAADYPVDRNTCYLSDDSGMLLTYEAMAEAAKFATLWVPFCRKHAIEPRGPESYFELKSHPYMGRAQEEFVNDRRRVRKEYDDFKARINGLEHDIKQRSDSYNAAAGVKDGEPRATWMADGSQWEGTWIEQSENHRKGDHAGIVLVLLNHPSHARQLGPPASADNPLDFSGVDVRLPMLVYVAREKRPGCNHQKKAGAMNALTRASAVLSNSPFILNLDCDHYINNSQALRAGICFMLGRDSDTVAFVQFPQRFEGVDPTDLYANHNRIFFDGTLRALDGLQGPIYVGTGCLFRRITLYGFEPPRINVGGPCFPRLGGMFAKNRYQKPGFEMTKPGAKPVAPPPAATVAKGKHGFLPMPKKAYGKSDAFADTIPRASHPSPYAAEAAVAADEAAIAEAVMVTAAAYEKKTGWGSDIGWVYGTVTEDVVTGYRMHIKGWRSRYCSIYPHAFIGTAPINLTERLFQVLRWSTGSLEIFFSRNNPLFGSTFLHPLQRVAYINITTYPFTALFLIFYTTVPALSFVTGHFIVQRPTTMFYVYLAIVLGTLLILAVLEVKWAGVTVFEWFRNGQFWMTASCSAYLAAVLQVVTKVVFRRDISFKLTSKLPAGDEKKDPYADLYVVRWTWLMITPIIIILVNIIGSAVAFAKVLDGEWTHWLKVAGGVFFNFWVLFHLYPFAKGILGKHGKTPVVVLVWWXLHLRHHRRALHQHPPHPWPRPPRRRLTIPRPPQRPWHQEVRLHLRLAMRTPSPETKKKTQTRTRRHQQHQQQQTRDEYVLLHXCCNNTYY

SEQ ID NO: 134370 - protein, 331 aa, Oryza sativa
  unsure (1)..(331): unsure at all Xaa locations
  Clone ID: PAT_MRT4530_36150C.1.pep
LSLLMKLASKLLSGSPEPCFHWLRAQHLQNEIPILARPTDTPVWKMICGALEPTIASTKVSLGSGLSVQFWKGHWTDDGCFFITDPSLASFATNINCTVASQFTQNTWAINLHPVLSNQAQTELNLLMNTLATLQPHADAPDTRSRLQSLNGITTAAFYRLLTFRGISGKPADFIWLKAIPNTCRIFLWLAFKDRFNSNNNRTHKRWSSDPHCNICPAIESADHIVLRCKLAEALWTKLGLNSIAIQCTDILQFVDEVLGSSQGHLKLGWLICFAACAHNLWKARNDAVFNXANTSVSNLLQTTRNCLNLWENRVKTANRSQIQGRITKLN

SEQ ID NO: 134371 - protein, 548 aa, Oryza sativa
  Clone ID: PAT_MRT4530_36151C.1.pep
MATSTSAATAPLTCHHLGLRLRPRLPSLPLRPLSPSPSLSLSRPTPLTPSPPPRHRALHASASAAPAAPPSQPPKPVLQGAAIKPLVATIGTGVLIWLVPPPAGVARNAWQLLSIFLATIVGIITQPLPLGAVALLGLGAAVLTRTLTFAAAFSAFGDPIPWLIALAFFFARGFIKTGLGSRVAYAFVSAFGGSSLGLGYALVFAEALLAPAIPSVSARAGGIFLPLVKSLCEACGSRAGDGTERRLGSWLMLTCFQTSVISSAMFLTAMAANPLAANLTAGTIGQGIGWTLWAKAAIVPGLLSLVFVPLILYLIYPPEVKTSPDAPRLAKERLEKMGPMSKEEKIMAGTLFLTVGLWIFGGMLNVDAVSAAILGLSVLLISGVVTWKECLGEAVAWDTLTWFAALIAMAGYLNKYGLISWFSETVVKFVGGLGLSWQLSFGVLVLLYFYSHYFFASGAAHIGAMFTAFLSVSSALGTPPLIAAMVLSFLSNIMGGLTHYGIGSAPVFYGAGYVPLAQWWGYGFVISIVNIIIWLGAGGFWWKMLGLW

SEQ ID NO: 134372 - protein, 328 aa, Oryza sativa
  Clone ID: PAT_MRT4530_36152C.1.pep
MQYKNLGRSGLRVSQLSYGAWVTFGNQLDVKEAKALLQACRDAGVNFFDNAEVYANGRAEEIMGQAMRDLGWRRSDVVVSTKLFWGGQGPNDKGLSRKHIVEGLRGSLKRLDMDYVDVVYCHRPDATTPVEETVRAMNWVIDHGMAFYWGTSEWSAQQITEAWSVANRLDLVGPIVEQPEYNLFSRHKVESEFLPLYSTYGLGLTTWSPLASGVLTGKYAKGNIPADSRFALENYKNLANRSLVDDTLRKVNGLKPIASELGVSLAQLAIAWCASNPNVSSVITGATKENQIVENMKALDVIPLLTPEVVDKIEAVVQSKPKRTESYR

SEQ ID NO: 134373 - protein, 322 aa, Oryza sativa
  Clone ID: PAT_MRT4530_36153C.1.pep
MEDYAQTNLISRGHGHHHQPELMKEFPFLSLISSTSSCISSSGQQQQQQQDDDGHGGHDRHQLLRYGCCSCNKQQEEEEEEVTVALRIGLPAVSSASASPSPAMANHGASASSTGVAGDDGGGGAMAGVGVEVESVRRSGGGGGGGQYWIPTAAQILAGATQFSCPVCRKTFNRYNNLQMHMWGHGSQYRRGGTAALRGAQPTAMLRLPCYCCAAGCRNHIDHPRARPLKDFRTLQTHYRRRHGARDFACRRCAKRFAVRGDWRTHEKNCGRLWRCACGAHFRHKRSLNDHARAFGAAHAHAGAGAGAEDDGRAAAAAAVWV

SEQ ID NO: 134374 - protein, 160 aa, Oryza sativa
  Clone ID: PAT_MRT4530_36154C.1.pep
MAASGPGGLLPQRDSAEADEELAPATWIWRGRVGAVEEEGGSGGGGGDGNGEAAMEARRWAGGGGSETAMVRVGAAAAVLVLAAAAAAMAAEPPTDDGAVRVAAGLTKCVSGCGSKVTSCLLGCYGGGGGAAAAATAMPFCVIGCTSDVLSCATGCSTSL

SEQ ID NO: 134375 - protein, 66 aa, Oryza sativa
  Clone ID: PAT_MRT4530_36155C.1.pep
MPVVLRPARQSGESEPQPQPAACMAWATARRHPPTPTRARVRVSGTANGSGNTASAAAISEPTSSI

SEQ ID NO: 134376 - protein, 105 aa, Oryza sativa
  Clone ID: PAT_MRT4530_36156C.1.pep
SLVHNKYAPRHISPKRNPHSRALSTDKPLAPPATHYSGSRRTSTTITNQRTRPPHPRTIPATYTPRTPPHPPDAQDRDNTRVTSYTETKMTRTTSHPPAPPHNRN

SEQ ID NO: 134377 - protein, 59 aa, Oryza sativa
  Clone ID: PAT_MRT4530_36157C.1.pep
KQIGMLCLGNPTNFEPGIALVKLQRDLPKRKFVGFTLHSKETCFTLHNHQRVSRDQIRL

SEQ ID NO: 134378 - protein, 118 aa, Oryza sativa
  Clone ID: PAT_MRT4530_36158C.1.pep
HEHLQADQVMEKKARRRWEARRKSSKEEGATRKGPLPENGGRMWREEEGGGGCGGGSSRRGEESLTTPPSTTISLQLQEDSVIATKFSTNLMNRLGARRLPAGRGGGSQFPLGHDEEE

SEQ ID NO: 134379 - protein, 67 aa, Oryza sativa
  Clone ID: PAT_MRT4530_36159C.1.pep
ESNPFAARAVRLYLREVREHQARARGVSYEKKKRKKPQQQQLQGGDSSGLHGHQHHPPPPPPAGAAC

SEQ ID NO: 134380 - protein, 107 aa, Oryza sativa
  Clone ID: PAT_MRT4530_3615C.1.pep
GRPGEVSCVHPSAGEWGKTIRLNPSDCYALRNRMCWIAKFRIIAEQEPDSYTKPCLFHGDGERSRKMSKGERPAESSWCTYQRRKHAEVERAQPSDTGRTPGCQGLQ

SEQ ID NO: 134381 - protein, 46 aa, Oryza sativa
  Clone ID: PAT_MRT4530_36160C.1.pep
LTKELKEDRNKKRRDSKRRKNDESIDHGSQDSTTKMATPLSSSVSG

SEQ ID NO: 134382 - protein, 255 aa, Oryza sativa
  Clone ID: PAT_MRT4530_36161C.1.pep
MAARAPLPVPHAAATSPRPAAASSLLRARGPCASLLYPRRLRFSVAPVAAAKPEAVGRAGEAAAAPVEGLAKSLQGVEVFDLSGKAVPVVDLWKDRKAIVAFARHFGCVLCRKRADLLAAKQDAMEAAGVALVLIGPGTVEQAKAFYDQTKFKGEVYADPSHSSYNALEFAFGLFSTFTPSLYPQAGLKIIQLYMEGYRQDWELSFEKTTRTKGGWYQGGLLVAGPGIDNILYIHKDKEAGDDPDMDDVLKACCS

SEQ ID NO: 134383 - protein, 125 aa, Oryza sativa
  unsure (1)..(125): unsure at all Xaa locations
  Clone ID: PAT_MRT4530_36162C.1.pep
MATYDLVLRVAARRWRXYLKINSKVXPGLGMRLDSSDLNLLYSERYPXEIPDAYERXXLLDAIEGERRLFIRSDELDAAWAIFTPVLADLEANKVAPELYPYGSRGPVGAHYLAANHNVRWGDIS

SEQ ID NO: 134384 - protein, 123 aa, Oryza sativa
  Clone ID: PAT_MRT4530_36163C.1.pep
MATTDTTIAHIMEEQDDIKIKSSKCWNQIWQPATLRTSNGCQICIRPPFLAREYLMERSQSPLSNGSGIITKFHPGHLQMKKQGIRLICTGKINTPRRGVSIAKTQRNVLYGCNRIVNVSSKS

SEQ ID NO: 134385 - protein, 518 aa, Oryza sativa
  Clone ID: PAT_MRT4530_36164C.1.pep
MESSPPPPPPTITVQVLDTYRSLDVVAGKVLADAASLSSMQVVNGSKVMLMASQGLHQGDGPITKNSSVPAPSTRRASNVKEAQIQKSDTNVSKIRPERWKATGIIALSDSSLKQSVAVVSISFPPLQRLEPGQIQEEEGSTRVSSRLVSSSSAISKEEEGQIQEEEEGKRKEGSTRIPGSGRLEGNVATAGIIFLLFSSFSPALSSSLAPNSLLQDLRCSGSSGQGVRKQQIRSHKLRRQRQTGRKGEERRAAAVPEEVWGCGSSIRVLDVSNNCIEAIPQEIAALRSLQKLILTANDIADGNISWEGLTCVQTLTVLSLSQNRTRVMLGQQYQRCQGNLSTVADYGHAGKAQLVTLPSSLGSITHLRELRIANNRLENLPVEIGLLKHLEILIANNNRITSLPSSIGGCESLNEVDLSSNLLAELPEAFGNLQHLKALSVRNNGLTSLPSAFFIKCSQLITLDLHGTEITNDVLRQVDGWEEFDERRRKKHQKQLDFRVGSSVVFDEGADDDYRRL

SEQ ID NO: 134386 - protein, 119 aa, Oryza sativa
  Clone ID: PAT_MRT4530_36165C.1.pep
MRWGGRLEEGGDNLDDGCTHQRWSGSRVATAIGNVVLHCEPSSYHPLMGWRYRIEMIAKNIPEQEKVWANQPDSGDRYRQELAVGRNIKLGSNIERPKRPPVAEIWGSSRVDLQACKLE

SEQ ID NO: 134387 - protein, 834 aa, Oryza sativa
  unsure (1)..(834): unsure at all Xaa locations
  Clone ID: PAT_MRT4530_36166C.1.pep
MVARRFVVRQGGGGGGGGEAEEHEVEYDTEHGLDILRLQIFSLTSVPPELQKIVVEADGSVVDDGTDLEAISEGLRLVAITGEEEEAEAAAAAEAARAQEKSDEELARMIQIVVEADGSRVDGGTDMESICEGLRVVAISEGDGEDIAAAEAARVQEKSDEEFARMLQLLMVFRVASHDLYIKVPFGSSLVHQLRFEAGVKYLNSIKLADQIDFSSSARHVYYATYSVSESRTQAHCRSYSVFLMALLAEAEEEALLLQQYSIRNDGGEEFRERVEPYMHQVLMYEDPMRQEAARKTVPMDELQEKALVSLAKLFLEFKYAPTPSWWDCTMFIDLEQRWVNAPPCDSCGRETFNVGMGTALPSEIKFGANRVEIYXATIVLVPPVFQDIMIHIRXLDFTDHVWTECFSNLYGRWMHLDPCEGVYDNPLLYEKGWNKKLDYVIAISKDGVRDVTKRYTRKWHEVLSRRIITSEDTVSAILSSITGKYRSGLSIDGLTALENRDKKESEELSKAAYLEVDTSISLPGRQSGSVEWRKARLELSQVESLACSSCPARKCVDAHVSKIYDALSALLSHFCDGDIPKERVIEVFDSLKCLMQNLKDAKFKSRRATLDKKTQLVFEEIFPSVERLLCAMSLKAELGTDGKCSVTTVRNAVHTSLALPVAMDVVDEILSNYKSNAVCTKGHQFPRGNRLCSGSVLASGEQLPIGIATAAFDGIRSSKWEEPDGAKGCWIIYKMLDGQTCELDSYDLMSANDVPERDPMDWVLEGSTDGGSTWNTIDARSSVIFDSRFYRKTFTVDKRYKANAFRFRFLRVRESNGNPRFQIGSIDLYGKST

SEQ ID NO: 134388 - protein, 38 aa, Oryza sativa
  Clone ID: PAT_MRT4530_36167C.1.pep
DAWADAWADAWVRFLRVRESNGNPRFQIGSIDLYGKST

SEQ ID NO: 134389 - protein, 59 aa, Oryza sativa
  Clone ID: PAT_MRT4530_36168C.1.pep
MPLDSPHQFIGPQELAKLALACLGASLPQSSANREAERVKKWWHWAIVPLLSATRPGQA

SEQ ID NO: 134390 - protein, 166 aa, Oryza sativa
  unsure (1)..(166): unsure at all Xaa locations
  Clone ID: PAT_MRT4530_36169C.1.pep
HAFLLQLLFWFKQSFRWVNAPPCDSCGRETFNVGMGTALPSEIKFGANRVEIYXATIVLVPPVFQDIMIHIXLLETRKGRCGEWANCFTFYCRSFGYEARLILDFTDHVWTECFSNLYGRWMHLDPCEGVYDNPLLYEKGWNKKLDYVIAISKDGVRDVTKRYTRK

SEQ ID NO: 134391 - protein, 151 aa, Oryza sativa
  unsure (1)..(151): unsure at all Xaa locations
  Clone ID: PAT_MRT4530_3616C.1.pep
LDTYPPPRDPWXTPASAPASSDRRRVWTVSPPPPRRAPLLSSRASTSPATARVSRSFLSSSPPSRPPPTRVVGRRNAKSIEGSHRADGDHHRVLPPSQSRAAVLQEGGGGPGAVSPGCGGGGGCCAACPFTSPEHGGKMAAILEFLKKHSL

SEQ ID NO: 134392 - protein, 49 aa, Oryza sativa
  Clone ID: PAT_MRT4530_36170C.1.pep
VAGSSALSVSSMLTDRWPLPDDSGRHHDRSTGLFLDRQLASPRVRPRVR

SEQ ID NO: 134393 - protein, 129 aa, Oryza sativa
  Clone ID: PAT_MRT4530_36171C.1.pep
HLVRARGTVATSLALSRWTMTHRPSPGMSPPPTRTRHRGRISGPNLAVRPNSRPAADLVPLDPASVVHSLAADGISSPESLSLLPHQPPPCSASPQHRQQQSSLKFNICVFPFLLRSVNLSQNHSRRQD

SEQ ID NO: 134394 - protein, 525 aa, Oryza sativa
  unsure (1)..(525): unsure at all Xaa locations
  Clone ID: PAT_MRT4530_36172C.1.pep
MDLDKSTPTSASLKELQEDGALPGHGTAEREVGGTEPQPVLGRIVAIEDFILCGFLPPPSEFLLLVFNFYGLSLLHLNPNSIAFLSIFSHLCEAYIRVEPFLDLFRFYYELRWMEPKKVSGKWRGRWFYLQIEDSDPVFVVPEEQQDKIPSWTTKPALTPSLQSFIDIIDDLRERGLSGYEVAADFIGLDIATVERRVGQLIISGSTTASNVPVPLCEKGAAERDAAINVVASLKEKVAQEASDAAAAAATTSGGNVAKKGRXFSSASDASPPPPRRQRLVKLGENLAARAKAEQDGSGGTSSASPAVASTDVVVAPRSCEATPSGLASDLAAGRGPPAAVLTWEELQVEMGRLPKADLESALADQDRRIHYWRTKFEVAELERTMLEVKKDQAVETLRGREVWFNSYLKSCCTSMSRVCRELRVPRGDPEESAAGYISWLNGACTQLEGIGQRIDEALKQQCRRSSRYAGGHVLACIRDHRPQLHLEFLHERFSRSRRTPVEIDGLAKSMAPLAEKVLQSIPSW

SEQ ID NO: 134395 - protein, 578 aa, Oryza sativa
  Clone ID: PAT_MRT4530_36173C.1.pep
MDLDKSTSTSASLKKLQEDDALPGRGTMEREAGGTEPQPVLGRMVAIEDYILCGFLPPPSEFLLLVLNFYGLSLLHLNPNSIAFLSIFSHLCEAYIGVEPFLDLFRFYYELRWMESNRSFIDAIDDLRVRGLSGYEVAADFIGLNSETMERRVGQLMISGPTTASKVPVPLCEKGAAEREAAINALPLTDIIGPLVDHQAAASLKEDIAKEVSDVAAAAATTSGGNIPKRGRKFSSVIGNRRKTPTPSPVSIAAFHRAAWAKAAQDGSGGTSSVSPAVASTDVMVVPRSREATPSGPASDLAAGRGPAAAVLTWEELQVEMGCLLEAGAREVHEDLQKMRELVAGNERQRQGLERRMSELENNLSEIRGSLRVTYTGLHQLAGECGVRTTIPANPDEFSLTSSPAELSTAMEAIPSKHAARIGEETSNRIYTGACMSLRVDVDVEDVQQRGQPELPMIVPALAFEPYVPQGDVDQNSPVETGMATTSLDLESELPDQDRRIQYCRTKFEVAELERTMLEVKKDQAVETLRGRELQLEFLHKGFSRSRRTPTEIDGLAKSMAPLAEKVFQSMDWRWPSW

SEQ ID NO: 134396 - protein, 63 aa, Oryza sativa
  Clone ID: PAT_MRT4530_36174C.1.pep
MPRRDDDAMAGASTSGTARRDESSRVCSGNSVAIRNREGFPIGKQLRTQERRLRGFRDGEPVP

SEQ ID NO: 134397 - protein, 2070 aa, Oryza sativa
  unsure (1)..(2070): unsure at all Xaa locations
  Clone ID: PAT_MRT4530_36175C.1.pep
MSSSPTWRSTDPRYIRDPLGRTXGIESYCQHNHHSLRNPRINGPQYPLYPVCGYPPSTVARQVGELGAQGSTTMTSSLPDYNVNTGINQGASTSTTLVWTQVGEIVFPVYTTMPISTGPAIIGSENGVVTTPVDNPMSKDPPAEAENRTSTIPEPEKDPNAARSCPPHKKCELTRTASWATRAWCPVHRTSKHTLQACFVFLNVRAEIRACEECGIQRTSPTRDIYCPIHQAKTHDLSSCKVLLNAMKISPHKVQQFQISSRDADKEQGAATTSDXFVRVIDIDPHKPSILHLLKDQASSSTSTPRDVYAIDGTGTSGGGHTGTADQLVTPTLAQHIKTLNAILNKSPFDPVLYADLDHWAEXLRESVANLNNAFAEAAARAPLEQPRIDGANRDDPTQRSPPRQPTPPPRGTSDLREHLNGRREARLARDNENRCRHRASSRHCKNEEQGGRPSQNRDRDDREQRMPSDTSRGRRRDDSDNRDRHRDNNDGRRRGSREPEHRPXSRASEPSDPSSSSSSSSSDRHPRXARDRQQPTTPGGGCRAFTRTLRDVRWLEKFRPGAIEKYDGSTDPEEFLQVYSTVLXAAGADDNALANYLSAALKGSARSWLVHLPPYSISSXTDLWQQFIANFQGTYKRHVIEDDLHALTQKPGESLREYIRRFNECRNTIPEITDASVIRAFKSGVRDRYTTQELATRRITTTRKVFEIVDXCAHANDALRRKEGKSKIGEEWKPAKDAPESSKKKSRRSGKRKAQAEVLATEHVDPPKNPDPQGDDTNKIWCLIHKTDKHSLETCFIFEKALTKKLALERGKRVHVVEKAAEATTXVSDSAYPDSDLHVSHIFXVPRRRYPIVVEPTIRNINVARVLIDGGNSINLLFASTLDAMGIPRSELMPTDQPFHGITPESSSKPLGKITLLMTFGQANNFRTEQITFDVAEFDTAYNTIIRRTALAKFMAASHYAYQVLKMPGPKRTITIQGNAKLAVQCNKRSLDMVEHTPNPPAAAEPPRKVNKTNKTPKSDGAIKIVPLSSANPDKTELVLIIFLRDNADVFAWQPSDMPGVPREVIEHKLMVRPDAKPVNQKLQRFAPDRKQAIREELDELLKAGFIREVLHREWLANLVMVRKANGKXRMCVDFTDLNKACPKGHFPLPRIDQLVDSTAGCELLSFLDAYSGYHQISMAKEDEEKTSFIMPFGVFCYVKMPFGLITVGNTFQRTVQGALNDQLGQNVEAYVDDIVVKTKTSDSLIDDLRETFDNLRRYRLMLNPEKCTFGVPSGKLLGFLVSGRGIEAXNPEKIKAIENMKXPTRLKEVQKLTGCMAALSRFVAKMGERXQLFFALLKKQDKYVWTQEAKDAFIALKRYLSNPPILVAPQPNEELFLYIVATPYSVSTVIVVEREKVQRPVYYISKALHDAKTRYQQIXKLLYAVVMTSRKLRHYFQAHRVTVVSSFPLGEVVRNKDVVGRIAKWVVELSQFDVHFVPRIAINSQVLADFIADWTMSENRPNSQTDSETWTMAFDGAPNSQGARAWFILTSPSGDQFSKHAIHLNFRATNNTAEYEGLLASIRAAATLGVKRLIVKGDSELVTNQVHKDYKCSSPELSKYLAEVRKLEKRFDGIEVRHVYRKDNIEPDDLARRVSRREPLEPGTFLDVLTKPSVKKVHDEGSTVVPDISXGATEAVHVVADIETTDDWXTPLIKFLSSDELPEDDAEAEKITRQAKIYCMIDNDLYKKRAKXVLLKCISSDDGKHLLLDIHEGICRSHASGRTLVGKAFRQGFFWPNALKDACDMQTHKIASASAPDHPSYLAIHVLGARYTRTIPTRTGRLQVPXVAIDKFTKWIEATPTGEIKADKAIKFIKGIFCRYGLSHRIITDNGSQFISADFXDYSIGLGVKICFASVSHPQSNGQVERANGIVLQGIKTLLWAVCTTPITSNKETPFFLVYGSEAMLPTELRHQSTXVQKYSNEEQEERXSDDVNLLEEHRERVAVRAASYQQALCQYHEKRTRARTLSIGDYVLRRVQSQTGRNKLSPKWEGPYTITQVLRPGAFKIADGDGRKLANSWNIDQLRKFYV

SEQ ID NO: 134398 - protein, 62 aa, Oryza sativa
  unsure (1)..(62): unsure at all Xaa locations
  Clone ID: PAT_MRT4530_36176C.1.pep
LNNTIFIXKFLSGNLTLADRKNKLVNTSMLNTGTWKKNKLIANGQLSKTVRFVKQLSIFSAG

SEQ ID NO: 134399 - protein, 250 aa, Oryza sativa
  Clone ID: PAT_MRT4530_36177C.1.pep
MDLDKSTSTSASLKKLQEDGALPGHGTAEREVGGTEPQPVLGRMVANEDFILCGFLPPPSEFLLLVLNFYGLSLLHLNPDCIAFLSIFSHLCEAYIGCPSSRNKWRGRWFYLQIEDSDPVFIVPEEQPDKISSWTAKPALTPSLQSFNDIIDDLRVWGLSGYEVAADFIGRRIQPFQAQAHPAFDYSGLEDVTRVSPRGLNSATVEPRVGKLMINAPTTASNVPVPLCDKGVAEREAAINAQMDCYDFVF

SEQ ID NO: 134400 - protein, 34 aa, Oryza sativa
  Clone ID: PAT_MRT4530_36178C.1.pep
RSAQSHLNLTMTGGGASTHFELLSMHDHFNDGWM

SEQ ID NO: 134401 - protein, 384 aa, Oryza sativa
  Clone ID: PAT_MRT4530_36179C.1.pep
MDHDKSTSTSASLKKQQEDNALPGRGTAEKEVGAFRRAARAKAAQDGSGGTSNASPAVASTDVVVVPRSREATPSGPASDPVAGRGSSAVVLTWEELQVEMGRLLEAGAHGIGREIVEARAAAASLANKRADRLAHDLAEVREDLQKMRELVADNERQWQGVEHRMSELENNLSEIRGSLRVTYTGLHQLAGECGIKSTIPANPDEFSLTSSLAELAAAMEEIPSKHVARIEEETSNGIYTGACHVLACVRLAHPELDLQKILDQGAASDARKDVMEEVGDLGESVLPLFEEDVDVEDVQQRGQPELPMVVPLLASEPHVPEGNVDRSSPVETSMATTPLDLESALADQDRRVQYWRTKFEVAELERTMLEVRKDQAVETLWGS

SEQ ID NO: 134402 - protein, 221 aa, Oryza sativa
  Clone ID: PAT_MRT4530_3617C.1.pep
MMMETELCSSRVLSPPRYESGDEELSVLPRHTKVIVTGNNRTKSVLVGLQGVVKKAVGLGGWHWLVLKNGVEVKLQRNALSVLEPPTGNEDDDDIDGNNSFCSSSDMGDKDMDYSSIEYHKPTKPRVRHTRPWSSCIKSSNRGNFHPSTKLRTRVNLTKLGTPTLWRYWKHFNLVSMNPNPSKEQLFHGVQQHFQSQQLDELQVILGFIQAAKRLKTLYRS

SEQ ID NO: 134403 - protein, 368 aa, Oryza sativa
  Clone ID: PAT_MRT4530_36180C.1.pep
MDLDKSTSTSASLKKLQEDGALPGRGTMEREAGGLNSTTVEHRVGQLMVSGPTTASDVPVPRCERGAAEREAAINVAASLKEKIAKEASDTAAAAATTSGGNAPKKGRKFSSVIGHRRKTPTLSASDASPPPPRRQRLVTLGEKSREVTPSGPASDLAAGRGPPTAVLTWEELQVEMGHLLEAGARGVSREIVEARATTASSANERTDRLARDLAEVHEDLQKMRELVAGNERQRQGLEHRMSELENNLSEIRGSLRVTYTSLHQLTGECGIKSIIPVNPDEFSLTTSLAELAMAMEAIPSKHAAMIREETPNEIYTGACHVLACVRLVHPELDLRKILDQGAASDARKDVMKEVGDLGESVLPLFEE

SEQ ID NO: 134404 - protein, 80 aa, Oryza sativa
  Clone ID: PAT_MRT4530_36181C.1.pep
AQKGKEIGCMSFDMHVKERGSEDLFLDKLNRRPSNHPERCESRGGFSMSCQTANLDLNMNDTYDGPKQGKKFDLNGFSWA

SEQ ID NO: 134405 - protein, 730 aa, Oryza sativa
  unsure (1)..(730): unsure at all Xaa locations
  Clone ID: PAT_MRT4530_36182C.1.pep
MDVDWSAGNRPDPCMPPVKRIVTVIYVDGDIRRPDIEGIGVRCLQAFLVFSAPAMDLDKSTSTSASLKKLQEDGALPGRGTMEREAGGIEPQPVLGRMVAIEDYILCGFLPPPSEFLLLVLNFYGLSLLHLNPNSMAFXSIFSHLCETYIGXVSGCVGFRLRDGLKSCYIPFQCPSSRSKWRARWFYLQIENSDPVFVVPEEQPDKISSWTAKPALTPSLQPFIDAIDDLRIRGLSGYEVAADFIGLNSETMERRVGQLMISGATTASKVPVPLCEKGAAEREAAINAAASLKEDVAKEASDVAAAAATTSGGNVSKRGRKFSSVIRNRRKAPTPSVSFPGPLSRSRKTSTSHHTRYTPGLGCVSSASVTAVACDAWREEELQVEMGLLLEAGARGISREIAEARAAAASSVNERADRLTRDFAEVREDLQKMTELVAGNERQRQELEHRMSELENNLSETRGSLRVTYTGLHQLAGECGVKTTIPANPDEFSLTSSLAELATAMEAIPXSKHAARIGEETSNLIYTGACHVLAXDVDVEDVQQRGQPELPVIVPALAFKPYVPQGDVDQNMPVETGMATTSLDLKSALADQDRRIQYWRTKFEVAELERIMLEVKKDQAVETLRGREVWFSSYLKSCCTSMTRVCRELRVPRGDPEESAAGYISWLNGVCAQLEGIGQRIDEALKQECRRSSRYAGXHVLACIRYHCPQLHLEFLHEGFSRSRRTPTEI

SEQ ID NO: 134406 - protein, 365 aa, Oryza sativa
  Clone ID: PAT_MRT4530_36183C.1.pep
MDLDKSTSTSASLKKLQEDGALPGRGAAEREVGGLNSATVERRVGQLMISGPTTASNVPVPLCEKGATEHDAAINALPLTDIIGPLVDHQVAASLKEKVAKEASDAAVAAATTSGGDVPKKGRKFSSVVGHRRKTPTPSASDASLPPPRQQRLVTLSEKAVRAKAAQDGSGGTSSASPAVASTDVVVVPRSREATPSGPASDLVAGRGSPAAVLTWEELQVEMGRLLEAGVRGVSLEIAEARAAAALSANERANRLARDLAELAGECGIKSTIPANPDEFSLTSSLAELVMATEEVPSKHAARIGEETSNGIYTGACHVLACVRLAHPELDLRKILDQGAASDARKDVMEEVDDLGESVLPLFEE

SEQ ID NO: 134407 - protein, 568 aa, Oryza sativa
  Clone ID: PAT_MRT4530_36184C.1.pep
MISGPTTASNVPVPPCEKGAAERDATINVAASLREKVAKEASDAAAAAATTSGGNVPKKRRRFSSVVGHRRKTPTPSASDASPPPPRRQRLMTLGEKAARAKAAQDGSGGTSSASHAMASTDVVVAPRSREATPSGPAIDLAAGRGLLAAVLTWEELQVEMGRLLEAGAHGIGREIAEAKAASSANERADRLARDLAEVREDLQKMRELVAGNERQRQGLEHRMSELENHLSEICGSLWVTYTGLHQLAGECGVKATIPANPDEFSLTSSLAELATAMEAIPSKHAARVGEETFNGIYTGVCHVLACVRLAHPELDLRKILDQGAASDASKDVMEEVGDLGESVLPLFEADVDVEDVQQHGQPELPVVVPLLAFEPHAPEGDVAQNSPVETSMAATPLDQDRCIQYWRMKFEVAELERTMLEVKKDQAVETLRGREVWFNSYLKSCCTSMSRVCRDLRVPRGDPEESAAGYISWLNGACTQLEGIGQRIDEALKQECRRSSRYAGGHVLACIRDHRPQLHLEFLREGFSRSRRTPTEIDGLAKSMALLAEKVFQSITGVGLPGSLRVL

SEQ ID NO: 134408 - protein, 110 aa, Oryza sativa
  Clone ID: PAT_MRT4530_36185C.1.pep
LDYSNNRFSSMPMPLNFSTYLMNTVIFKVSRNSLSGYIPPTICDAIKSLQIIDLSYNNLTGSIPSCLMEDVGALQVLNLKGNKLDGELPDNIKEGCALSALDFSDTLIQG

SEQ ID NO: 134409 - protein, 717 aa, Oryza sativa
  Clone ID: PAT_MRT4530_36186C.1.pep
MDLDKSTSTSASLKKLQQDGALLGRGTAEREVGGTEPQPVLGRMVAIEDFILYGFLPPPSEFLLLVLNFYGLSLLHLNPNFIAFLSIFTHLYEAYIGVEPFLELFRFYYELRWMEPKKVSGCVGFRLRDGLKSRYIPFQCPSSRSKWRGRWFYLQIEDSDPVFVIPEEQPDKIPSWTTKPALTPSLQSFIDIIDDLREWGLSGYEVAADFIGLDSATVERRVGQPMISGPTMASNVPVPLCEKGAAERDAAINVAASLKEKVAKEASDAVAAAATTSGGNVPKKGRKFSYMVGHRRKMPTPSICHASGLGCVSPASVIAAASDAQRESVSIANFHRAARAKAAQDRSGGPSSASPAVASTDVVAVPRSREATPSRPASDLMAGRAPSAVVLTWEELQVEMGRLLEAGACGISREIAEARAAAASSANERADRLARDLAELAGECGVKATISVNPDEFSLTSSLAELATAMEAIPSKHAARIGEETSNGIYTGACHVLACVRLAHPELDLWKILDQGAASDARKDVMEEVDDLGESILPLFEEDVDVEDVQQRGQPELPVIVPALAFEPHVPGGDVDQSSPMETSVAMTPLDLESALADQDRRIQYWRMKFEVAELERTMLEVKKDQAVETLRGRELEGIGQRIDEALKQECHRSSRYAEGHVLACIRDHRPQLHLEFLREGFSCSQRTPTEIDGLAKSMAPLAEKVFQSMDWRWPSW

SEQ ID NO: 134410 - protein, 40 aa, Oryza sativa
  Clone ID: PAT_MRT4530_36187C.1.pep
MTRAPEKYDDGADPSESLQICTTIIEAAGGGDRVMANVFP

SEQ ID NO: 134411 - protein, 71 aa, Oryza sativa
  Clone ID: PAT_MRT4530_36188C.1.pep
MACPRRPPCAELRRYLGTIRSHRSEELPRDGGTAKIGCSGGAEKKVQHAPKVFDEMHFTKKAETDGVYMRA

SEQ ID NO: 134412 - protein, 302 aa, Oryza sativa
  unsure (1)..(302): unsure at all Xaa locations
  Clone ID: PAT_MRT4530_36189C.1.pep
MNPPPPQQTESRPPPELRDDVLAEIFSRIPPDDPAILVRVSAVCKPWRRLLSGRIFLSRYHALHLAPPILGFFCEEKALTGPFSSFVRTTSFRPIIPDRGGGGGDGWLIPCDSRHGRALFITQPPLQLLVLDPITGMERPLCAPQLXANIKWSAAVLCAVDGCGHHDCHGRAYRVALVGTDVAGGATHAAVYSSETYAWSDPTSIDHHPNARVQARRPSVLVGNARLYFLCDNNTSIVEFGGALLVTAEGGGLGFAAILKQSRTLHQWSKEEATNQWKHLKHVRDLEHLLPYTVGFLGSFMD

SEQ ID NO: 134413 - protein, 209 aa, Oryza sativa
  Clone ID: PAT_MRT4530_3618C.1.pep
MMMETELCSSRVLSLPRYDSGDEELSVLPRHTKVIVTGNNRTKSVLVGLQGVVKKAVGLGGWHWLVLKNGVEVKLQRNALSVLEPPTGNEDDDDIDGNNSFCSSSDMGDKDMDYLAIIEYHKPTKPRVRHTRPWSSCTKSSNRGNFHPSSILQTRVNLTRLGTPTLWRYWKHFNLVSSLDPTNLTFHFHGLMLKNYAQAAKRLKTLYHS

SEQ ID NO: 134414 - protein, 80 aa, Oryza sativa
  Clone ID: PAT_MRT4530_36190C.1.pep
MAFVDALLTFIDLKSRVMVLALAARGLPRGMLWTYVNFLGQLRMVDRARRGYAHGWGSGSARLFANVGNTNILCVAGSCI

SEQ ID NO: 134415 - protein, 115 aa, Oryza sativa
  Clone ID: PAT_MRT4530_36191C.1.pep
MLDFPLIMIARNKLGKPKGEEAMTVGRGRGWRQAREREWEGGTCACAGARDGGEEAMAGTMWERKRGRSAAGLLWRARWGRGSERVRPRGEWWEEAACDGGGPAAAAKGCLRSDG

SEQ ID NO: 134416 - protein, 74 aa, Oryza sativa
  Clone ID: PAT_MRT4530_36192C.1.pep
MKFSPDRATVGSSAVPGWSSGNGVGNMAKQHKMASLGGGVLMPAGTAPLPTCYACSTNLWGNQQRRGEEKYSGR

SEQ ID NO: 134417 - protein, 79 aa, Oryza sativa
  Clone ID: PAT_MRT4530_36193C.1.pep
PKFSVRPNAHPYLPLWSTSPMPALLQTWEEEEGKEKKGKEGSGGNRGEDGNEGFDYRCPWRLSPCFGFLLGFRSSVGSE

SEQ ID NO: 134418 - protein, 1032 aa, Oryza sativa
  unsure (1)..(1032): unsure at all Xaa locations
  Clone ID: PAT_MRT4530_36194C.1.pep
MVKCAYVKTLTQPHPGEDSSPSIAAVVASQDWPEVTKYAGLVSAQAHRQELIQDLFKVWQDPHRGTVTGGMIKELLISFKRATGQKPQRIIFYRDGVSEGQFYQVLFYELDAIRKACASLEADYQPPVTFVVVQKRHHTRLFANNHKDQRTVDRSGNILPGTVVDSKICHPTEFDFYLCSMMRKKKTEPRNAGESSGTQQATGAPGRGPSQRPERAQQHGGGGWQPANPQYAQQAGRGGGQHQGRGGRYQGRGGPTSHQPGGGPVEYQAHEYYGRGVQRQGGMPQHRSGSGGHGVPASPSRTVPELHQASQDQYQATVVAPSPSRTGPSSLPVEASSEEVQHQFQELAIQGQSPTSQAIQPAPPSSKSVRFPMRPGKGTFGDRCIVKANHFFAELPDKDLHQYDVSITPEVPSRGVNRAVIGEIVTQYRQSHLGGRLPVYDGRKSLYTAGPLPFTSRTFDVILQDEEESLAXWAESLPVIDFVAXLLXNRDISVRPLFSHVFSWKASALTGVKVEVTHRGNMRRKYRISGLTSQATRELSFPVDDRGTVKTVVQYFLETYGISIAHRTFSGLQVGNQQRPNYLPLEVRKIVACEQXTSQVDHYLMLIVXEVTCQRPQERELEHMRTVSHKAYXKISMPQAMGELSFSIDNHGTVKTLVQYLLEYYDSGREKDVLPRVGQWNMMNKKMVNGGRVNNWACINFSRNVQDSAARGFCHELAIMCQISGMDFALEPVLPPLTARPDHVERALKARSQDAMNILRPNSRQADVPLXNDSLTNGPRTLSETDLGLFSQWHHTKNVIIMSNKYLAIVVLKINVKVRERNTVLVDGVSGRIALVSDMPTIIFDANGTHPHPGXEDSSPFILAVVASRDCTKLTNYAGIVRAKVHRKELIQDRFEVWXNPRSATETGLMTRXATHAFIEGTSRHAHYHVLXDENKFTAEVLQTLTNNLCYTYARCTRSVSIVPPAYYAHLAAFRARFYMEPETSDSGSMASGAATSRGLPPGVRSARVAGNVAVRPLPALKENVKRVMFYC

SEQ ID NO: 134419 - protein, 769 aa, Oryza sativa
  Clone ID: PAT_MRT4530_36195C.1.pep
MRAPPARVGDCCPATEMDEVPGNQEDPRLGAYADKITDAMFADHVELGSHYAGDSSSEAGWAPMIARMQSQSQLGSNQLGVSFENGSLPDDPASLASAFKNMSLGFRDFTVGTPANPVSVAPLGGHYPASHVISSGETTMNSFHQQEFAQDGFRPSSLNPNVAEYMKPKYGVHNVQMCTGLHGSDYVSGDPYNLPSSASPLQKQYFIDGQFRANAPYQQTGSNFMRQDFDADSHYLLQSQYAYQQMPQVAGSDVHWVRSNQHGVHSSIPAASPYLRTPMVGQQAHSSADTYWNGAAISHGNNQLNSTFVNNCSCIIYPDCSREICEYCQMKQAEKLKHRYMFRRSSKGFLQPQIFDKVNIKCFPGKTMVKSDDINSARNIQSVFEPNGRIEMNQRINQHGHNQHLNIQGNDFLLFDRLNSQALSPVESEYGLAMKIPQMSYSSVDEVVGKIHLLAKDQNGCRFLQRIFTEGTSENVKKVFDGIIEHIGELVVDPFGNYLVQKLLEECNHDQKMHIVYEITKRPGQLIKFSCDMHGTRVVQKVIETINSPDEVSMVVCALSSGAITLMMDANGCHVALRCLQKFSHEHKAFLLNVAMEYYFELAQDRQGCCIIQKCILHANKEQKNQLLYNITSRALELSEHQYGNYVVQYILDLHISWATDEILDKLEDHFGSLSMQKSSSNVVEKCLKEASWPKRVKIIHELINDPKLLHILIDPYGNYVIQTALKECEDAAVRAVLIGAIRPHVAALRNNMFGKRILSKTYLKNRKH

SEQ ID NO: 134420 - protein, 221 aa, Oryza sativa
  unsure (1)..(221): unsure at all Xaa locations
  Clone ID: PAT_MRT4530_36196C.1.pep
MRDEEMAAGSVFFIEQDLHVGAKLKHDFQKRPTVPLLSSEIAESIPFSMDKYHEILNRFSIKPESAEATIIQETLSICLERPRVKIENRTCAQSMESLVNFVVQELGTNDIKVTMMNNLNKIHSGIKEYVVTKLKKMSTGLDGNSMVTCHRMNYPYVVYYCHHQRAISLFSVTLIDNKGVAVDTSAICHYDTYAWPPNXPALPDLNIQPGDFPVWHFSAAT

SEQ ID NO: 134421 - protein, 383 aa, Oryza sativa
  Clone ID: PAT_MRT4530_36197C.1.pep
MRRRLSHLLKGSGSRSNQSSDRASADVSMENTDAVPQLLTDNDLDIVDRREKQAYQMLKDRSFAHNRAYDPKLLRKTSMDGRTLGVSTSDFATVATVRGWIFAKKPSDPSNPSRLLSLSRAATKHCRLRLPLTPSPSPRAAASTPAAASPSRCHLRLPPSPSPAELPPSVSPPPSLPPLSPSPFPSPSAVSSPTLASAFPSRHCLRLRSRCRRVTVSKRLCFRIPLASSPSSSPSPCAAGAIASPSPTAVTECSRLRLRHPSTTRSERRRLHHRRREKLRAQSWRRDCREDTPAHHSSASPWSSASPSLSPSPTDCVKKPLHHQQQQGHPPYAAPMPSPSLPSVPSGSQVVASSAAALPSMYKANDQQRATHGTRDGGGDGDY

SEQ ID NO: 134422 - protein, 154 aa, Oryza sativa
  unsure (1)..(154): unsure at all Xaa locations
  Clone ID: PAT_MRT4530_36198C.1.pep
PLALPLSRRYQALPPPPPPXPSPSPXPPPPPPPPPPXALPPPPPAXPSPAELPPSVSPPPSLPPLSPSPXPLPPPSPPPPSPPPSPXPLPPPTQPLSSRHRLQAPLLPHPPRVVAIIVPVALRRWRHRVAVSASGLRQRRGRSADGCITGGAKS

SEQ ID NO: 134423 - protein, 138 aa, Oryza sativa
  unsure (1)..(138): unsure at all Xaa locations
  Clone ID: PAT_MRT4530_36199C.1.pep
MRHKPARQGDEGDRPLSDPNKSKRTPSAFFSFMEEIRKEFKENNPXKNKSVADAXKADGDMCESLTEADKDPYVAXDNKLKDEYNKGIAVYYKGESAAKNAPDKEEEEDDDERSDESKSEVIDEDDDECIEEDVHDDE

SEQ ID NO: 134424 - protein, 73 aa, Oryza sativa
  Clone ID: PAT_MRT4530_3619C.1.pep
TQAGSGETKKYRKREKKKKVGKKKGTRPAEEKILAAEKKKKKRTRKKKKKRGGGEKRKKKKKKGGRENPLFNR

SEQ ID NO: 134425 - protein, 283 aa, Oryza sativa
  Clone ID: PAT_MRT4530_361C.1.pep
MTKPRVANKVVSSTDHYKINKDNLWRNSEDIRDQVRGPRANKLNNSVRAGAKVQPIPPLVCRDQINRPEFTVQYEHAKFFMIKSYSEDDAPKGIKYNVWASTPNGNNKLDAAFHEAQILMKEQGKRCPIFLFFSVNTSGQFVGLAEMLGPVDFKKTMDFWQQDKWNGFFPVMWHIIKDIPNRFFKHITLENNEGKVVTFSRDTQEIGLPQGLEMLKIFKAYHQGTSILDDFYFYEEKENMRHAQKGRNLETTNQDLFSDDFRSISVENLEASMQSLSFYETWE

SEQ ID NO: 134426 - protein, 173 aa, Oryza sativa
  Clone ID: PAT_MRT4530_36200C.1.pep
WIPGLQALTLGQEFSGYTTQVKYGIDRINCALPRMYQLAQGGTAVGTGLNTKKGFDVKIAAAVAEETNLPFVTAENKFEALAAHDAFVESSGAVNTISASLMKIANDIRLLGSGPRCGLGELILPENEPGSSIMPGKVNPTQCEALTMVCAQVMGNHVGVTVGGANGHFELNV

SEQ ID NO: 134427 - protein, 501 aa, Oryza sativa
  Clone ID: PAT_MRT4530_36201C.1.pep
MVSCPVISMLGGKTSSAVRASSAAAPGATEPEVMVEVAHREVARALASLAEARLGARLLPSAVPPDVAEFRSGGGAGNAVGSLDVRRGAPGSTIDFMLQSSLHCKVPNGAIDITSLLIFLNASTDAPHFLMEFIQGSPTSIVVLLDLLPRKDLALHPEYIERYYENTQVDKQREKVEELPQARPYRSRSLFVRSTFSLTAILMSIDCGQGGEEMEEGERENMIKRDQIVRSKSIEVDLTSNLPRMFGPDVADRVIAEIQKAFGHLPPLHQRQRPVHDLQRQLFVVPEHHLRSPPATSPAHSTISYPPLRHRGAFRLPRAAPPQLRGAVRACAPASASSVPGATAPLEVEVAVAHREVARELASRAEARLGARLLPSAVPPDVAKFRSGGGGAGNAVGSLDVRRGAPGSTIDFMLQSSLHCKVPNGAIDITSLLIFLNASTDAPHFLMEFIQGSPTSIVVLLDLLPRKDLALHPEYIERYYENTQVDKQREKVEELPQARPY

SEQ ID NO: 134428 - protein, 493 aa, Oryza sativa
  Clone ID: PAT_MRT4530_36202C.1.pep
MAALRQGDDPAIKLFGRTIPLLLDPPAAAAAAADEENSVLENSVLSFLDFLATFGVMPNLGNGVKTNNDLPLVSDKLLIVKGIPFCPNNSKKNDLQGISRPDGRIEIDSMTEDVKTEPDGSVPEKILKKPDKILPCPRCNSMETKFCYFNNYNVHQPRHFCRNCQRYWTAGGAMRNVPVGAGRRRNKHVSKYCQAMMTCNNTVAPGDVSDVVHHQVITHGSSLLPATLKENETPTEFISEVPPCKSSASILDIGEPNDTDLVPLASGDNKEEKSCASSVVVSSCSENLMPDNAIMKEPNNRSGCCNGVALPFPTGPALVLPWSLGWNSVALMPATQCSMQPVLGLKDGIPCPPSWPPQLMVPAPGICTPVVPIPLVPPLWSCFPGWPNGMWNAQCPGGSSSLVLGKHSREESLQEEEKTRNYLWVPKTLRIDDPAEAAKSSIWATLGIKPDDKGIFKSFQPNVAKNGTAPESPQALQANPAAFSRSQSFQETT

SEQ ID NO: 134429 - protein, 78 aa, Oryza sativa
  Clone ID: PAT_MRT4530_36203C.1.pep
HFRLSLEQFSGLPSFPIHHINHLLGCLCTINWQMWPKLIAKAKNGGLDVIQTYVFWNVHEPIQGQVFTLSSLICLSDD

SEQ ID NO: 134430 - protein, 373 aa, Oryza sativa
  unsure (1)..(373): unsure at all Xaa locations
  Clone ID: PAT_MRT4530_36204C.1.pep
SNAPTPLAAAGDQLAVLRRLLPDPRSSPPPPPPPPPRRGFPARGQNVERRARVVGGGAGRDGAGGDGGGGAPGGGAGARVPGGGAAGRAAAPLRRAARRRRVPQRRRRRERRGLARRAPRRAGIDXDFMLQSSLHCKVPNGAIDITAAAAPGTPWXSLDVRRGAPGSTIDFMLQSSLHCKVPNGAIDITSLLIFLNASTDAPHFLMEFIQGSPTSIVVLLDLLPRKDLALHPEYIERYYENTQVDKQREKVEELPQARPYRSRSLFVRSTFSLTAILMSIDCGQGGEGTLEEIVRGQLATAARALLQIWLDSCADHTSEMEEGERENMIKRDQIVRSKSIEVDLTSNLPRMFGPDVADRVIAEIQKAFGVQEA

SEQ ID NO: 134431 - protein, 49 aa, Oryza sativa
  unsure (1)..(49): unsure at all Xaa locations
  Clone ID: PAT_MRT4530_36205C.1.pep
MGISHVGRTPSFHDKXFSKADTGLPYADERGPRPTTGLGPDHTVPGSPR

SEQ ID NO: 134432 - protein, 123 aa, Oryza sativa
  Clone ID: PAT_MRT4530_36206C.1.pep
SCSPFDNSVAVQNGDDRTSLDGSDANSDDEGDYSDEDDDEDDDNDEEDGFDYENDDEDDVPPTTSDGDLYNHTDFGSSDSENYVSLSGRGDPDVKSKGSALDSRNSYNHQEHQQSKRSNFLKP

SEQ ID NO: 134433 - protein, 116 aa, Oryza sativa
  Clone ID: PAT_MRT4530_36207C.1.pep
CDKRSLPFLSPFHSFRSKVHHRSINLYRCVIPVPKLANRPFRSLNLFDCVIPVPKLVDHSFRSSNLFSYVTPVSKLGFEYHLGQIGRDRCDTTEQVRGPKRVICKFRDQDDTVKQV

SEQ ID NO: 134434 - protein, 115 aa, Oryza sativa
  Clone ID: PAT_MRT4530_36208C.1.pep
FYFFLFINVIVEGCKVHHRSLNLYRCVIPVPKLANRPFRSSNLYRCVIPVPKLADHSFRSSNLFSCVTPVHKSKLVFEYHLGQIGRNRGDTTEQVRGPKRVIYEFRDQDDTVEQV

SEQ ID NO: 134435 - protein, 115 aa, Oryza sativa
  Clone ID: PAT_MRT4530_36209C.1.pep
CLLQTHEVESVFVFWCRVYHRSLNLYRCIIPVPKLANRPFRSSNLFDCVIPVPKLADHSFRSSNLFSCVTPVPKLGFEYHLGQIERDRGDTTEQVGGPKRVICMFRDRDDTVKQV

SEQ ID NO: 134436 - protein, 71 aa, Oryza sativa
  Clone ID: PAT_MRT4530_3620C.1.pep
CRCGFLHPIPQSYHPILTWLEPFDNTGRFLFSMARCKLRQFNEPPPRGFDGTTVSLLVTCFDCPFTFPRLK

SEQ ID NO: 134437 - protein, 100 aa, Oryza sativa
  Clone ID: PAT_MRT4530_36210C.1.pep
SKVHHRSLNLYRCVIPVPKLANRPFRSSNLFDCVIPVPKLVDHSYRSSNLFSCVTPVPKLGFEYHLGQIGRDRGDTTEQVGGPKRVICKFRDRDDTVEQV

SEQ ID NO: 134438 - protein, 65 aa, Oryza sativa
  Clone ID: PAT_MRT4530_36211C.1.pep
FFFFFFKYNQLAQHNALINEWPTAMPNKPSFHQHFTISILHQPTHTAGTHKSTQATPLSTLLKLT

SEQ ID NO: 134439 - protein, 802 aa, Oryza sativa
  unsure (1)..(802): unsure at all Xaa locations
  Clone ID: PAT_MRT4530_36212C.1.pep
MDLDKSTSTSASLKKLQEDGALPGHGTAEREVGGTEPQPVLGRMVAVEDFILCGFLPPPSEFLLLVLNFYGLSLLHLNPNSIAFLSIFTHICEAYIGVEPFLDLFRFYYELRWMESKRVSGCVGFXLRDGLKSRYIPFQYPSSRSKWRGRWFYLQIEDSDPVFVVPEEQPDKIPSWTTKPALTPSLQSFIDIVDDLRERGLSGYEVAADFIGRRIQPLQARAHPAFDYSGREDATQVSPRGLDSATVECCVGQLMISGPTMASNVPVPLCEKGAAERDAAINVAASLKEKVAKEAYDAAAAAATMSGGDVSKKRRKFSSIVGHRRKIPTPSASDASPPPPRWQRLVTLGEKAVRAKAAQDGSGGTSSASPAVASTDVVVVPTSREATPSGPASNLVAGRGSPAAVLTWEELQVEMGRLLGAGARGIGREIMKARAVAASSANEHADRLAHDLAEVREDLQKMRELVAGNERQRQGLEHRMSELENNLSEIRGSLRVTYTGLHXLAGECGIKSTIPANPDEFSLTSSLTELAAAMEEIPSKHAARIGEEMSNGNYTGACHVLACVRLAHPELDLRKILDQRAASDARKDVMEDVGDLGEDVDVEDIQQRGQPELLVVVPLLASEPHVLEGDVDRSSPVEMSMATTPSDLESALADQDLRIQYWRTKFEVAELERTMLEERKDXAVETLRGREXCRELRVPRGDPEESAAGYISWLNEACAQLEGIGQRIDEALKXECRRSSRYAGGHVLACIQDHRPQLHLEFLREGFSHSRRTPTEIDGLAKLMAPLAEKVFQSMDWRWPSW

SEQ ID NO: 134440 - protein, 110 aa, Oryza sativa
  unsure (1)..(110): unsure at all Xaa locations
  Clone ID: PAT_MRT4530_36213C.1.pep
CSNNLIYIWSKVYHRSLNLYRYVIPVPKLANRPFRSSNFFDCVIPVPKLADHSFRSSNLFSCITPVSKQDDLKTLYQKIIHNXFHVNSXVGGPKRVICKFRDRDDTVEPV

SEQ ID NO: 134441 - protein, 660 aa, Oryza sativa
  Clone ID: PAT_MRT4530_36214C.1.pep
MDLDKSTSTSTSLKKLQEDGALPSRGTMEREAGGIEPQPVLGRMVAIEDYILCGFLPLPSEFLLLVLNFYGLSLLHLNPNFIAFFSIFSHLYEAYIGVEPFLDLFRFYYELRWMESNRIEHSDPVFIVPEEQPDKISSWTAKPALTPSLQSFIDAIDDLRVRGLSGYEVATDFIGLNSETVECRVGQLMISGPTTASNVPVPLYEKGAAEREAAINALPLTDVIGPLVDHQAAASLKEDVAKEASDVAAAAATTSGGNVPKRGRKFSSVIGNRRKTPTPSPVPIAAFCRVARAKAAQDGSGGTSSASPAVASTDVVIVPRSREATPSGPASDLAVGRLARECGVKTTIPANPDEFSLMSSLAELVTAMEAILSKRAARIGEETSNGIYTRACHVLACVRLAHPELDLQKILDQGAASDARKDVMEEVGDLKESVLLLFEEDVDVEDVQQRGQPELPVIVSALALEPYVPQGDVDQNSPVETGMATTSLDLESALADQDHRIQYWRTKFEVAELERTMLEVKKDQAVETLRGRDVWFSSYLKSCCTSMTRVCRELRVPRGDPEESAAGYISWLNGACAQLEGIGKRIDEALKQECRRSSQYAGGHVLACIRDHRPQLHLEFLHEGFSRSRRNPMEIDHLAKSMAPLAEEVFQSMDWRWPSW

SEQ ID NO: 134442 - protein, 103 aa, Oryza sativa
  Clone ID: PAT_MRT4530_36215C.1.pep
IIVSKVHHRSLNLYRCVISVPKLANRQFRSLNLFDCVISIPKLADHLCRSSNLFSCVTPVPKLGFEYHLGQIGRDRGDTTEQVRGPKRVICKFMDRDDVVEQV

SEQ ID NO: 134443 - protein, 631 aa, Oryza sativa
  unsure (1)..(631): unsure at all Xaa locations
  Clone ID: PAT_MRT4530_36216C.1.pep
MDLDKTTSTSASLKKLQEDGALPGRGTAEREVGGTEPQPVLGRMVAVEDFILCGFLPPPSEFLLLVLNFYGLFLLHLNPNSIAFLSIFTHLCEAYIGVEPFLDLFRFYYELRWMESKKVSRRIQPLQARAHSAFDYSRLEDATQVSPRGLNSATVERRIGQLMISGPTTASNTPVPGAAERDAAINALPLTDIIGPVVDHQVAASLKEKVAKEASDAAVAAATTSGGDVPKKGRKFFSVVGHRRKTPTPSPFAGLRVGSLSVIITILARAKATQDGSGGTSSTSPAVASTDVVVVPRSRXELQAEMGRLLEAGARGVSREIVEARAAAASSANERADRLARDLAEGLEHCMSELENNLSEIHGSLRVTYTGLHQLAGKCGIKSTIPANPDEFLLTSSLAELVTAMEEIPSKHAARIGEETSNGIYTRACHVLACVRLVHPELDLRKILDQGAASDTRKDVMEEVGDLGESVLLLFEEDVDVEDVQQRGQPELPVVISLLASEPYVPEGDVDRNLESALVDLDRRIQYWRTKFEVAELERTILEVRKDQAVETLRGREFYLDKGTPMGINTSTPRRTGGHPPWDTHHETINTDGQSTDDHLNQQPPQYTEQQKPQHTSQHTSRQDVGYRLHG

SEQ ID NO: 134444 - protein, 100 aa, Oryza sativa
  unsure (1)..(100): unsure at all Xaa locations
  Clone ID: PAT_MRT4530_36217C.1.pep
SKVHRRSLNLYRCVIPVPKLANXLFRSSNLLDCIILVPKLVDHSFRSFNLFNXVTPVSKLGFEYHMGQIGWDRGDTSEQDGGPKRVICKFRDRDDTVEQV

SEQ ID NO: 134445 - protein, 80 aa, Oryza sativa
  Clone ID: PAT_MRT4530_36218C.1.pep
SHLVAPPPFFLSFLCVIAKSPHLAPPPVVATSGTATRRPLLSPCCCPIAWNLGARELWNTTTEVDAVELVTTSTRKWLLT

SEQ ID NO: 134446 - protein, 630 aa, Oryza sativa
  Clone ID: PAT_MRT4530_36219C.1.pep
MDLDKSTSTSASLKKLQEEGALPGRETAEREVGGTEPQPVLGHMVVIEDFILCGFLPPPSEFLLLVLNFYGLSLLHLNPNSIAFLSVFSHLCEAYIGVELFLDLFRFYYELHWMEPTKVSGCVGFRLRDGLKSRYIPFQCPSSGYFPFLVKLTPFCLDSAPVERRVGQLMISGPTTSSDVPVPLCEKGAAERDAAINALPLTDIIGPLVDHQVAASLKEKVAKEAPDAAAAAATTSGGNVPKKGRKFSSVVGHRRKTPTPSASDASPPPPRRQQLVTLGEKAARAMAAQDGSGGTSSASPAVASTDVVAVPRSREATPSGPTSDLVAGRCSPAAVLTWEELQVEMGRLLEASACGISHEIAEARAAVASSANERDDRLAGNLAEGLEHCMLELENNLSEIRGSLWATYTGLHQLAGECGIKSTIPAYPDEFSLTTSLAELAAAMEEIPSKHAARIGEETSNRIYTGACHVHACVRLAHPELDLRKILDQGAASDARKDVMEEVGDLGESVLPLFEEDVDVEDVQQREKPELPVIVPALAFEPLVPGGDVDQSSPVGTSLATTPLDLESALADQDCRIQYWRTKFEVAELERAMLEVKKDQAVETLRGREVWFNLYRKSCCTFMSRVCREL

SEQ ID NO: 134447 - protein, 70 aa, Oryza sativa
  Clone ID: PAT_MRT4530_3621C.1.pep
LNLNGILTDFISKGYLFVFETANQTRGCFESKRKKMVHAALPHRNVLCPVLGMVVMQRGSTRAATLRRQP

SEQ ID NO: 134448 - protein, 100 aa, Oryza sativa
  Clone ID: PAT_MRT4530_36220C.1.pep
SKVHYRSLNLYRCVIPVPKLANRPFRSSNLFDCVIPVPKLADHSFRSFNLFSCITPVPKLGFEYHMCQISRDRGDTTEQVGGPKRVICKFRDRDDTVKQV

SEQ ID NO: 134449 - protein, 802 aa, Oryza sativa
  unsure (1)..(802): unsure at all Xaa locations
  Clone ID: PAT_MRT4530_36221C.1.pep
MDLDKSTSTSASLKKLQEDGALPGRGTAEREVGGTEPQPVLGRMVAVEDFILCGFLPPPSEFLLLVLNFYGLSLLHLNPNSIAFLSIFTHLCEAYIGVEPFLDLFRFYYELRWMESKKVSGCVGFRLQDGLKSRYIPFQCLTSRSKXRGRWFYLQIEDSDPVFVVPKEQPDKISSWTTKPALTPSLQSFIDIIDDLRERGLSGYEVAADFIGRRIQPLQARAHPAFDYSGPEDATRVSPQGLNSATVERRVRQLIISGPTTASNVPVLLCEKGVAERDAAINVAASLKEKVAKEGSDAAVATTTTSGGDVPKKGRKFSSIVGHRRKIPTPSASDASPPPPRRQRLVTLSEKAARAKAAXDGSGGTSSASPAVASTDVVVVPRSHEATPSGPASDLVAGRGSPDAVLTWEELXVEMGRLLEAGGHGVSHEIAEARAAAASSANERANRLARDLAEVREDLQKMRELVAGNERQQQGLEHRISELENNLSEIRGSLWVTYTGLHQLAGECGIKSTIPANPDEFSLMSSLAELVTAMEEIPSKYPARIGEETSNGIYTGACHVLACVRLAHPELDLRKILDQGAVSDARKDVMEEVGDLGRDVDVEDVLRRGQPELLVVVPLLASEPYVPEGDVDRSSPVETSMAATPSDLESALVDQDRPIQYWRTKFEVAELERTMLEVRKDQAVETLRGREVCREHRVPRGDPEESAAGYISWLNGACAQLEGIGQRIDEALKQECRRSSRYAGGHVLACIRDHRPQLHLEFLREGFSRSRRTPTEIDGLAKSMAPLAEKVFQSMDWRWPSW

SEQ ID NO: 134450 - protein, 98 aa, Oryza sativa
  Clone ID: PAT_MRT4530_36222C.1.pep
SKVLHRSLNLYRCVIPVPKLANRPFRSSNLFDCIIPVPKLADHSFRSSNLFSCITPVPKLGFEYHLGQIGRDQGDIAEQVGGPKQVICKFRDRDDTVE

SEQ ID NO: 134451 - protein, 790 aa, Oryza sativa
  Clone ID: PAT_MRT4530_36223C.1.pep
MDLDKSTSTSASLKKLQEDGALPGRGTMEREAGGTEPQHVLGRMVEIEDYILCDFLPPPSEFLLLVLNFYGLSLLHLNPNSIAFLSIFSHLCEAYIGVEPFLDLFRFYYELRWMEPKKVSGCVGFRFRDGLKSRYIPFQCPLSHSKWRGRWFYLQIEDSDPVFIVPTEQPDKISPWTAKPALTPSLQFLSIPLMTSEYGGCRGLNSTTVEHRVGQLMVSGPTTASDVPVPRCERGAAEREAAINALPLTDIIRPLVDHQVAASLKEKIAKEASDTAAAAATTSGGNAPKKGRKFSSVIGHRRKTPTLSASDASPPPPRRQRLVTLGEKAARVKAAQDGSGGTSSASPTMASTDVVVVPRSREVTPSGPASDLAAGRGPPTAVLTWEELQVEMGHLLEAGARGVSREIVEARATTASSANERTDRLARDLAEVHEDLQKMRELVAGNERQRQGLEHRMSELENNLSEIRGSLRVTYTSLHQLTGECGIKSIIPVNPDEFSLTTSLAELAMAMEAIPSKHAAMIREETPNEIYTGACHVLACVRLVHPELDLRKILDQGAASDARKDVMKEVGDLGESVLPLFEDYHLGFLQHFDLEYFVVVCRDVDVEDVQQRGQPELPVIVPILAFEPHVLDGDRTKFEVAKLERTMLEVKKDQAVETLRGRAVWFNSYLKSCCTSMSRVCRELRVPRGDPEESAAGYISWLNGACAQLEGIDQRIDEALKQECRRSSRYAGGHVLACIRHHRPQLHLEFLYEGYSRSRRTPTEIDGLARSMAPLAEKVFQSMDWRWPSW

SEQ ID NO: 134452 - protein, 782 aa, Oryza sativa
  unsure (1)..(782): unsure at all Xaa locations
  Clone ID: PAT_MRT4530_36224C.1.pep
MDLDKSTSTSASLKKLQEDGALPGRGTAEREVGGTEPQPVLGRMVAIEDFILCGFLPPPSEFLLVVLNFYGLSLLHLNPNSIAFLSIFTHLCEAYIGVEPFLDLFRFYYELRWMEPKKVSGCVGFRLRDGLKSQNIPFQCPSSRSKWPGRWFYLQIEDSDPVFVVPEEQTDKIPSWTTKPALTPSLLSFIDIVDDLRERGLSGYEVAADFVGLDSATVERRVGQLMISGPTTASNVPVPLCEKGAAERDAAINALPQTDIIRPLVDHQVAASLKEKIAKEASDAVAAAATTSGGNVPKKGRKFSSVVGHRRKTPTPLICHAXASDVSPPPPRRQRLVTLGENLSQLQTFXRVAWAKVAQDGFGGTSSASPAVASTDVVVMPRSHEATPSGPASDLVAGRAPPVAVLTWEXLQVEMGRLLEAGTCGISREIAEARAAAAASANERXDRLARDLAEVREDLQKMRELVAGNERQWQGLEHRISELENHLSEIRGSLRVTYTGLHQLVGEFGVKATIPANPDEFSLTSSLAELVTTTEAIPSKHAARIGEETSNGIYTGACHVLADVDVEDVQQRGQPKLPVIVPALAFEPHVPGGDVDQSLPVETSVATTPLDLESALADQDRRIQYWRTKFEVAELERTMLEVKKDQAVETLRGREVWFNSYLKSCCTSMSRVCRELRVPRGDPEESAAGYISWLNGACAQLEGIGQRIDEALKQECRRSSRYAGGHVLACIRDHRPQLHHEFLREGFSRSRRTPTEIDGLAKSMAPLAEKVFQSMDWRWPSW

SEQ ID NO: 134453 - protein, 733 aa, Oryza sativa
  unsure (1)..(733): unsure at all Xaa locations
  Clone ID: PAT_MRT4530_36225C.1.pep
MDLDKSTSTSASLKKLQADGTLPGHGTMEREAGGIEPQPVLGRMVAIEDYILCGFLPPPSEFLLLVLNFYGLSLLHLSPNSIAFLSIFSHLCEAYIGVEPFLNLFHFYYELRWMEPNRASGCAGFRLRDGLKSRYIPFQCPSHSKWRARWFYLQIENLDPVFVVPEEQPDKISSWTAKPALTPSLQAFIDIIDDLRVRGLSSGPTTASHVLVPLSEKGAAEREAAINVAASLKEDIAKEASDVAAAAATTSGGYVPKRGRKFSSVIGNRWKTPTPSASDASPPPPRRQRLVTLGEXVSIATFRGAARAKATQDGSGGTSSASPAVASTNVELQVEMGRLLEAGARGISREIAEARAAAASSANERADRLTCDLVEVREDLQKMRELVAGNERQRQGLEHRMSELENNLSEIHGSLRVTYTGLHQLAGECGVKTTIPTNPDEFSLTSSLAELATAMETSNGIYTGAHHVHACVRLAHPELDLQKILDQGAASDARKDMIEEVGDLGESVLPLFEEDVDVEDVQQCGQPELPAIVPALAFESHVLQGNVDRSSPMETGVAATSLDLESALADQDRRIQYWKTKFEVAELERAMLEVKKDQAMETLRSRKVWFNSYMKSCCISMSRVCRELRVPRGDPEESAAGYISWLNGACTQLDGIGQRIDEALKQECHRSSRYAGGHVLACIRDHRPQLHLEFLHEGFSRSRRTPTEIDGLAKSMAPLAEKVFQSMDRHWPS

SEQ ID NO: 134454 - protein, 282 aa, Oryza sativa
  Clone ID: PAT_MRT4530_36226C.1.pep
MAAAAGATRDRLSVMATAVRADHRPDPPFPPLPLPHPLADASGRYPPLRHGCRAGGVHEEVDGRPHPRLSGGALEATAGDGVRVVRAVERVHGGGEGRLLPNGPRRGDVGVGGQRVRWWTLLAGDGARDGELDRWLRGGARAHYPLVISCIIPPVPGVRTPSGGYGKGLLRPLTALEKEGTAESHSPPPMKVKRHLTHPPIVRAAGQFQGDEVKSPEPSVHKLASQVKKLRKENIELRDRNAELGVELFELRNNVDTLSHGFCAKIKRAFVEMGKENKYYAN

SEQ ID NO: 134455 - protein, 692 aa, Oryza sativa
  Clone ID: PAT_MRT4530_36227C.1.pep
MDLDKSTSTSASMKKLQEDGALPGRGTAEREVGGTEPQPVLGRMVAVEDFILCGFLPPPSEFLLLVLNFYGLSLLHLNPNSIAFLSIFTHLCEAYIGVEPFLDLFRFYYELRWMESKKVSECVGFRLRDGLKSRYIPFQCPSSRSKWRGRWFYLQIEDLDPVFVVPEEQPDKIPSWTTKPALTPSLQSFIDIVDDLRERGLSGYEVAADFIGRRIQPLQARAHPAFDYSRPEDATRVAASLKEKVAKGVSDTAAAAATTSSGDVPKKGRKFSSVVGHHQKTPTTLASDASPPPPRRQRLMTLSEKAARAKAAQDRSGGTSSASSAVASTDVVAVPRSREARPSGLASDHVAGRGSPATVLTWEELQVEMGCLLEAGARGVSREIAEARVAAGSSANERADRLARDLAEGLEHRMSELENKLSEIRGSLRVTYTGLHQLAGECGTKSTIPANPDEFSLTSSLAELVTAMEEIPSKHAARIGEETSNGIYTGACQVLACVRLAHPELDLRKILDQGATSDARKDHFDLEYFVVLCRDVNVDDVQQRGQPELPVVVPLLASEQHVPESDVDRSLPVETSMAATPLDLESALADQDRRIQYWRTKFEVAELERTMLEVRKDQAIETLRGHEVWFNSYLKSCCTSMSRVCRKLRVPHGDPEESVAGYISWLNGACAQLEGIGQRVDEALKQECRRSS

SEQ ID NO: 134456 - protein, 99 aa, Oryza sativa
  Clone ID: PAT_MRT4530_36228C.1.pep
PSITLHRRWIHRHGSTAEHYLKRETHPRTIVHTASTPTISTNRGPAEPPTRLPTQAAGALPSLLMDAYRTVWGLDLGFGDWKGLATTLFYGALHWVPAL

SEQ ID NO: 134457 - protein, 720 aa, Oryza sativa
  Clone ID: PAT_MRT4530_36229C.1.pep
MDLDKSTSTSTSLKKLQEDGALPGRGTAEREVGGTEPQPVLGRMVAVEDFILCGFLPPPSEFLLLVLNFYGLSFFHLNPNSIAFLSIFTHLCEAYIGVEPFLDLFRFYYELRWMESKKVSGCVGFRLRDGLKSRYIPFQCPSSRSKWRGRWLYLQIEDLDPVFVVPEEQPDKIPSWTTKPALTPSLQSFIDIVEDLRERGLLGYEVAADFIGRRIQPLQARAHPAFDYSGPEDATRVFPRGLNSATVERRVGQLMISGPTTASNVLVPLCEKGATERDAAINVVASLKEKVAKEAYDGAAAATTSGGDVPKKGRKFSSVVGHRRKTPTPSEELQVEMGRLLEVGARGVSREIAEARAAAASSANERADQLARDLAEVREDLQKMRELVAGNERQRQGLEHRMSELENNLLEIRGSLRVTYTGLHQLAGECGIKSTIPANPDEFSLTSSLAELAAAMEEIPSKHEARVGEETSNGIYTGACHVLACVRLAHPELNLWKILDQGAASDARKDVMEEVGDLGEDVDVEDVQQREQPELPVVVPLLVSEPHVPEGDVDRSSPVETSMATIPLDLESALANHDRRIQYWRTKFEVAELERTMLEVRKDQAVETLRGHEVWFNSYLKSCCASMSRVCRELRVLCGDPKESAAGYISWLNGASCAQLEGIGQRIDEALKQECRRSSRYAGGHVLACIQDHRPKLHLEFLREGFSRSRRTPTEIDGLA

SEQ ID NO: 134458 - protein, 72 aa, Oryza sativa
  unsure (1)..(72): unsure at all Xaa locations
  Clone ID: PAT_MRT4530_3622C.1.pep
EVGDFLGCHAACIFSSPRPWSPPATTATLSSAGKELPLTMTGGGENTTTHCRPLSPCGGGSGLAXAPGGGRW

SEQ ID NO: 134459 - protein, 211 aa, Oryza sativa
  Clone ID: PAT_MRT4530_36230C.1.pep
MAEVANVGTKSSINNNEDTSRRRRRRSTVKAKMPTNGGIIGQPFDSIALFDSDEIIVAATIVAQDEYEQSNAPWRGNDASALGLSPLQKITATLRMITNGVVADTQDEYLQIANSTTIESLKRFVRAIVEIFGDEYLRYPTSADTSRLLALGEQRSFPGMLGSIDCMHWEWKNCPSAWKGMYKGKLSKRTIVLEVVASKDLWIPHAFFGLP

SEQ ID NO: 134460 - protein, 228 aa, Oryza sativa
  Clone ID: PAT_MRT4530_36231C.1.pep
MAEVANVGTKSSINNNEDTSRRRRRRSTVKAKMPTNGGIIGQPCKRKHQSTATKVSQRDEIIVAATIVAQDEYEQSNAPWRGDFVPDRQPKKGNDASALGLSPLQKITATLRMITNGVVADTQDEYLQIANSTTIESLKRFVRAIVEIFGDEYLRYPTSADTSRLLALGEQRSFPGMLGSIDCMHWEWKNCPSAWKGMYKGKLSKRTIVLEVVASKDLWIPHAFFGLP

SEQ ID NO: 134461 - protein, 68 aa, Oryza sativa
  Clone ID: PAT_MRT4530_36232C.1.pep
KPPLNFRGQIYILGPHPTPIHNNTLYLPTFIHTPSYTPTFYLTNFLYIHTFTQIPLLTFIHTYIKTSN

SEQ ID NO: 134462 - protein, 83 aa, Oryza sativa
  Clone ID: PAT_MRT4530_36233C.1.pep
MARSLSLLLLLVACFLVAGATAARPAPSTSGAAAISSFVRSWCAGTKYPALCDATLAPYSAAVGASPAKLAWAALTAWSRSQW

SEQ ID NO: 134463 - protein, 65 aa, Oryza sativa
  Clone ID: PAT_MRT4530_36234C.1.pep
QWPTHAIKFFCFSLLFEEPSPCKICRRGIQIPKITLPKIVLQGQYQDPLLHDFTLYSGIVTHMKC

SEQ ID NO: 134464 - protein, 52 aa, Oryza sativa
  Clone ID: PAT_MRT4530_36235C.1.pep
PLLVYLLHNIQMQKKCNIYLSSSISYSLRNQSLSGDEVVSVPLGSRSPCPTS

SEQ ID NO: 134465 - protein, 398 aa, Oryza sativa
  unsure (1)..(398): unsure at all Xaa locations
  Clone ID: PAT_MRT4530_36236C.1.pep
MGVQGQGIVPAAFGEGGDGAGVRAQGAPPRGGLRLHPRRMAAGSGREEAAAAAGALYQLHLVKAATARAFVPRELRLVEAFGYTLGGMFLARYDDSPAGKFDELVVIAGIVWNPPTSCAWAARVLVNSAEACRHGRKEVGLPSHVATFSQTEADALRNKPLVKSNSFLSLLGMRSTVSNQGNDREIEISETKGSCTRXLVRHEWTALCVGGLELTHLEGXLMRRSAPKVSKYLVEHADLLKYSCQVECRVRPVRPAKIWRPRITEPQECPDGKISSKGSEVLAEPDAQKHTVMVLLSKPILALEFNSLEMHVDAPKIVIPHSKKKEVRGLCDENRSQEALELLHMIMADDGGGCRVCPVRPAKIRRPGSAAKALKYKLNRMSKNRTVLLVYISLSWLS

SEQ ID NO: 134466 - protein, 711 aa, Oryza sativa
  Clone ID: PAT_MRT4530_36237C.1.pep
MVDVDRRMAGLSPAAHAAGLRRLSTRAAAGPSSASASPRHGLHSFHALAGAVLSHLRASGVAVLPGLSDAELARAEAEMGFAFPPDLRAVLAMGLPSGPGFPDWRTRAGLRSAFDLPIAAASLQIARGALWPRCWGPRPADPDRALRLARSSIRRAPLLVPLFDRCFLPCRPCLAGNPIFFVTDDRVLCCGLDILHFFTRDSSFQPLDLRPPSSSSSVAPSSGEATPYMRRSLDAACGGKAPRWIEFWSDAASDRRRRDSSSSEASTASSSSGCASPPARRSRTPHWVDTYLDRLGSVLKSGGWRDTEVNEMVEVTASGLFDGEEAPAVDADAVLDALLLKADRCSDSLRRAGWSSEDVSDALGLDLRRCKERPRPAVQLPPEIAVKVERLAKSPYVQPRRGAFPFSLAALLSRRNKQLWCRHLASHGSSMPRRALRAGGGDKLNVSTGDKLLYLILFLSNRFNTSSSSSQRHRLLFRHRGAAPPAPHLAPASPPRLLCKRQRWKGQRVAMAEPHGGGGGFGRELVGLLPSLLYERRRPLPTTVPDLAANFFPLPPLLAAAEGPSAAADPLPLPSSRASHQLASPLHPHVATVRGHWRCTGGPIRRGDARGSDSSNASSRAVASRLPGPGAALGAFPLQACCWPAKPLARVPARLSSDVEPCCRSSWHHGPHLGMKEKMAHDVNRCLELTKVTREWRPLEDKFLPPRGPDI

SEQ ID NO: 134467 - protein, 123 aa, Oryza sativa
  Clone ID: PAT_MRT4530_36238C.1.pep
MSTLSPDGDSDYGGGGGGGEAAGAVMADVLSKGREACYKARDAFYTCVEKHADKKPTEIATMGLLYPADCKKSRANFVNSCRPSWVKHFDRQYSAKKRVQRLLDGGDDRRGPISLPQPYTFKQ

SEQ ID NO: 134468 - protein, 377 aa, Oryza sativa
  Clone ID: PAT_MRT4530_36239C.1.pep
CNVRITTSRAGDGEGVGVGVTPPDFPRLDEPPQPRDRSGGGRPRPSPAPKSCPDLPRPRQWGPPPTTPSSSSPSSWTKNVHQGYPKETLLRFLKAREWNVSKAHKMLVDSLNWRIQNEIDTVLERPIVPVDLYRSIRDSQLVGLSGYTKEGLPVFAVGVGQSTYDKASVHYYVQSHIQINEYRDRVILPMLTEKFGRPVTTCVKVLDMTGLKLSALSQMKMLTSISTVDDLNYPEKTETYYVVNVPYIFSACWKVVKPLLQERTKKKVKVLHGCGRDELLKIMDYSSLPHFCRREGSGSSKHSSTDADDCYSLDHPFHKELYGHIEELASCKELIKMGSLHVSIPEPDPDDAKIVEVIQAEFQKIGEQNGSANGHKV

SEQ ID NO: 134469 - protein, 164 aa, Oryza sativa
  Clone ID: PAT_MRT4530_3623C.1.pep
SPPDLLLRRRRTASQLRDDHDSARRSHGARGGERRQSASGSDSDRTPQDAAGARGIRSRAHHAGRRKGRQPASTRGGRCSPGFSEGCGARTGGHRRREGSRYKAQRLLQEQSADREREAIEGEKDRGINCSVCYCSSRHTYHFLGQRHCSILQRAGKFFHTFNS

SEQ ID NO: 134470 - protein, 661 aa, Oryza sativa
  Clone ID: PAT_MRT4530_36240C.1.pep
MATTLTPTQRYAAGALLALALRQAQIHQSVLLGAHHHHDDDDEEQGRTSTSSGGGGGSSSSSSNSGAGADADLWTHDSHGLLRPVFRFLEIDPKAWSGLEETAASSEAKHHIGAFLRIIFEEDGESSSDRSVQELALAKGVDVMVMSLGNDSEVGNTIKGGDQDALPSSSGTDKSPGESSHDDQLGINKLTLDDIPANNHRKMALLFALLSACVADKPVSQEEEDRKSTRFRKGYDARHRVALRLLSTWLDVKWIKMEAIEVMVACSAMAAAKEQEQSQESASPKSKWEKWKRGGIIGAAALTGGALLAITGGLAAPAIAAGFGALAPTLGTLVPVIGASGFAAMATAAGSVAGSVAVAASFGAAGAGLTGSKMARRIGSVKEFEFKPIGENHNQGRLAVGILISGFAFDEDDFCRPWEGWQDNLERYILQWESKHIIAVSTAIQDWLTSRLAMELMKQGAMRTVLSGLLAAFAWPATLLAATDFIDSKWSVAIDRSDKAGKMLAEVLLKGLQGNRPVTLIGFSLGARVIFKCLQELALSSDNEGLVERVVLLGAPVSVKGERWEAARKMVAGRFVNVYSTDDWILGVTFRASLLTQGLAGIQAIDVPGVENVDVTELVDGHSSYLSAAQQILEHLELNTYYPVFVPLSAANEETDGTVAQ

SEQ ID NO: 134471 - protein, 327 aa, Oryza sativa
  Clone ID: PAT_MRT4530_36241C.1.pep
MGAASDDAVKQLALLMDQVEAPLRRTFQNVHQGYPKETLLRFLKAREWNVSKAHKMLVDSLNWRIQNEIDTVLERPIVPVDLYRSIRDSQLVGLSGYTKEGLPVFAVGVGQSTYDKASVHYYVQSHIQINEYRDRVILPMLTEKFGRPVTTCVKVLDMTGLKLSALSQMKMLTSISTVDDLNYPEKTETYYVVNVPYIFSACWKVVKPLLQERTKKKVKVLHGCGRDELLKIMDYSSLPHFCRREGSGSSKHSSTDADDCYSLDHPFHKELYGHIEELASCKELIKMGSLHVSIPEPDPDDAKIVEVIQAEFQKIGEQNGSANGHKV

SEQ ID NO: 134472 - protein, 265 aa, Oryza sativa
  Clone ID: PAT_MRT4530_36242C.1.pep
MRRMPNPIFSGGRIWCTYIDANPPGRKPISSISDRERGISGGQIPAPSMDSPATNQSVEDKAPAIDPSERHPLEEDKASVMDLSGKGKALVVDPSDLGVCRTEVKIPASAVNPSGEGKAPMEKKKKKKTKTKMARFTQAQINNCMAFKEEMPDFDNMPSIIEILGDDLAKCSQEYIDELKAIDDSREEDKKFWIEMNRQIREEREGILNQYYTKGYAEYEVDDDEDEDEGNKGHARVAATSGRRRFRHGVALKKNQSGGGSIRKI

SEQ ID NO: 134473 - protein, 137 aa, Oryza sativa
  Clone ID: PAT_MRT4530_36243C.1.pep
CSAPAQFDVLGPNIRQYQVQSPFLVQQQVLSLYNEFVRHQYSISASPFLQSGVFQLRNNQVFHQLRLVGPQFPSQDINVVQAIAQQVPLQQFGDFSIDRNLGQAQALLAFNLPSPNGISPRDYSAPGSIPPLGGVLY

SEQ ID NO: 134474 - protein, 88 aa, Oryza sativa
  unsure (1)..(88): unsure at all Xaa locations
  Clone ID: PAT_MRT4530_36244C.1.pep
MKGRHGGEGGGILHGGGEGEMDLDMWGQGQPSPEATSSSPPPMXRSCAVMPLLGGGGGRAREMLIVVGATMEREGAIRRKRLGERDKI

SEQ ID NO: 134475 - protein, 140 aa, Oryza sativa
  Clone ID: PAT_MRT4530_36245C.1.pep
MPKPNHHASATSASTASGNPMDSTVSYQGGLGHKSKTKIKKGKEKGSSTVPAVYDVNADIEEEYRLFLENVRVHENEDFVLEYDGKVIRYGGEEMDDDDSCIEVSMKEKEEVLKALVISSDDESPTSLRRVYENDSSRQK

SEQ ID NO: 134476 - protein, 148 aa, Oryza sativa
  Clone ID: PAT_MRT4530_36246C.1.pep
RNTRGDRPPVAARPLHEHRIARRIPQLTPPLSSPAARDRRALRYRTTAPHMRAAACAPGSGAGPGRPPTLRLATRRPDIARLPRGGAYGARREEGHPLLHRGSTHKRCDSPSPLEALGHYFAICRCVRLGRSSAYCSKYKIGKYDYQK

SEQ ID NO: 134477 - protein, 74 aa, Oryza sativa
  unsure (1)..(74): unsure at all Xaa locations
  Clone ID: PAT_MRT4530_36247C.1.pep
QQRAIISLMLNDRXSYITVQKTFRVCSXTSVKGQMISKVAYKVNKVIIVHKMEAXQCLXAMHQAFIEHNVLAEV

SEQ ID NO: 134478 - protein, 81 aa, Oryza sativa
  Clone ID: PAT_MRT4530_36248C.1.pep
MPSTGSKAVVRPQVGPSAILRLTRGTSLSFPLNSMETFVDSCMGGTLDCVPMGRGIPAPTPPDRGRDVGALPPIPCACDRS

SEQ ID NO: 134479 - protein, 73 aa, Oryza sativa
  Clone ID: PAT_MRT4530_36249C.1.pep
DPLVYKENWNTSCGMKPKHTAYTINMEHASCAEQVYIDSTSSHPWKVITNKYPRRQCYSSSLINDYKKRMPVF

SEQ ID NO: 134480 - protein, 136 aa, Oryza sativa
  unsure (1)..(136): unsure at all Xaa locations
  Clone ID: PAT_MRT4530_3624C.1.pep
ELPSGIISLVLEGGSHRNWPLCNATRRKCREGKRRLCSKAHGCWSHLRSLLKVMKGRSCQSYKCCMAEIASSDTSTKLITSYQSNLAVTNKLXYRKYXRTKVKHLXTITPTXRSYXNXFSNYKQLQXLXXNXXEXR

SEQ ID NO: 134481 - protein, 351 aa, Oryza sativa
  unsure (1)..(351): unsure at all Xaa locations
  Clone ID: PAT_MRT4530_36250C.1.pep
MMREGDACVALLRSKLHGLVERNRSLEEENKQLRHQVSRLKGQVSSLEGQDTDRKMLWKKLDNSSTGNSYLKEKQFVPNNDAKEAMDLNSTSCYSRQQFSRAPLVRSRAPRVPNPPPSPTYTQPIVNARKEGGMAPPPPAPPLPSRLLKSTKAVQRVPDVVELYRLLVRREGKNDAKSGIHGNXAATNSREMIGEIENKSAYVLAIKSDVENQSEFINFLAVEVKNAXYKEIADVEEFVKWLDGELSYLVDERAVLKHFPNWAEKKADTMREAAFTYRDLKNLESEASSFHDDRRVATPMALKRMQALQDKIEQGIHNTERARDSASGRYKDLKIPWEWMLDSGIISQLKM

SEQ ID NO: 134482 - protein, 694 aa, Oryza sativa
  Clone ID: PAT_MRT4530_36251C.1.pep
MDLDKSTSTSASLKKLQEDGALPGHGTMEREAGGTEPQPVLGRMVAIEDYILYGFLPPPSEFLLLVLNFYGLSLLHLNPNSIAFLSIFLHLCEAYIGIENSDPVFVVPGEQPDKISSWTAKPVLTPSLQYFINAIDDLRVRGLSGETVERHVGQLMISGPTTASKVPVPLCEKGAAEREAAINALPLTDIIGPLVDHQAVASLKEDVAKEASDVAAVAATTSGGNIPKRGRKFSSVIGNRRKTPTPSASDASPPPPRRQRLVTLGENLAARAKATQDGSGGTSSASPAVASTDVVVVPRSREATPSGPASDLAAGRGPPAAVLTWEELQVKMGRLLEAGARGISREIAEARAVAASSANERADRLTRDLAERGLERRMSELENNLSEIRGSLRVTYTCLYQLAGECGVKTTILANPDEFSLTSSLAELATAMEAIPSKHAARIGEETSNGIYTEACHVLACVRLAHPELDLRKILDQGAASDARKDVMEEVGDLGESVLPLFEEDVDVEDVQQRGQPELRVIVPALAFEPYVPQGDYWRTKFEFAELERTMLEVKNDQAVETLRGREVCFSSYLKSCGTSMTRVCRELRVPRGDPEESAAGYISWLNGACAQLKGIGQRIDEALKQECRQSSRYAGGHVLACIRDHRPQLHLEFLHEGFSRSRKTPTEIDGLAKSMAPLAEKVIQSMDWRWPSW

SEQ ID NO: 134483 - protein, 81 aa, Oryza sativa
  Clone ID: PAT_MRT4530_36252C.1.pep
NRACVSLAVFSNKAFRPPLDRGIHKKIRSLQVQNGGRNPRQGLIKGYPGRSPPWKASLRWRLSLFPDPCPLTPDTLSRLFS

SEQ ID NO: 134484 - protein, 434 aa, Oryza sativa
  Clone ID: PAT_MRT4530_36253C.1.pep
MGCFFYSREKNKNKNKKQSRSSPTLTVDKDDFRDEMSKKANRSCSLVVASSPRSILELYEERAHELRDFRLAELRSATGNFSRELKIGEGGFGSVYKGFLKTSCGHLGLRNDSGNVVVAVKKLNPNGMQGHKQWLAEVQFLAVVDHPNLVKLIGYCGTDDGEQAYPTLPWKTRLSIALGVAKGLQYLHEGLEIQVIYRDLKSSNVLLDEEFRPKLSDFGLAREGPVDGQTHVSTAVMGTYGYAAPDYVETGRLTARSDVWSFGVVLLELLTGHRAFDRSRPRPDQKLVDWARRHPAGTRWFSRLPDPRLAGRYSHRAAQDVAALAWRCLADRAGERPSMAEAARALERAARHGELDGPPEPPEEGSPPPPRCHAGSGSSSPEAKKAATAKRRRMAHLAKLAAGASAAPAARRLVHMKMTKAAATCNAGTQHGET

SEQ ID NO: 134485 - protein, 508 aa, Oryza sativa
  Clone ID: PAT_MRT4530_36254C.1.pep
MEPKKVFGCVGFRLRDGLKSRYIPFQCPSSRSKWQGRWFYLQIEDLDLVFIVPKEQPDKISSWTTKPALTPFLQSFIDIIDDLRVRWLSGYEIVADFIGRRIQPLQARAHPAFDYSGPEDATQVSPRGLDSATVERRVGQLMISGPTMVSNVPVPLCKKGAAEREAAINVAASLKEKVAKEASDGAATTSGGNVLKKGRKFSSVIGHRRKTPTPSSVSIVAFRRAARAKAVQDGSGGTSSVSPAVASMDVVVVPRSREATPSGPASDLVADRARRECGIKSTIPANPDEFSLTTSLAELATAMEEIPSKHAARIGEETSNGIYTGACHVLACVRLAHPELDLRKILDQGAASDARKDVMEEVGDLGESVLPLFEEDVDVEDVQQRGQPELPVIVPALVFGPHVPEGDDRRTQYWRTKFEVAELERTMLEVKKDQAVETLRGREVWFNSYLKSCCTSMSRVCRELRVPRGDPEESAAGYISWLNGACAQLEGIDQCIDKALKQECRRSS

SEQ ID NO: 134486 - protein, 55 aa, Oryza sativa
  unsure (1)..(55): unsure at all Xaa locations
  Clone ID: PAT_MRT4530_36255C.1.pep
HFVEXDPWVVSEVLKPNLECTGFLDVSHIHMIRVENFLANAEKSSGMTLLGNMGL

SEQ ID NO: 134487 - protein, 457 aa, Oryza sativa
  Clone ID: PAT_MRT4530_36256C.1.pep
MGCFFYSREKNKNKNKKQSRSSPTLTVDKDDFRDEMSKKANRSCSLVVASSPRSILELYEERAHELRDFRLAELRSATGNFSRELKIGEGGFGSVYKGFLKTSCGHLGLRNDSGNVVVAVKKLNPNGMQGHKQWLAEVQFLAVVDHPNLVKLIGYCGTDDGEQGPQRLLVYEFMPNKTLEYHLFNKAYPTLPWKTRLSIALGVAKGLQYLHEGLEIQVIYRDLKSSNVLLDEEFRPKLSDFGLAREGPVDGQTHVSTAVMGTYGYAAPDYVETGRLTARSDVWSFGVVLLELLTGHRAFDRSRPRPDQKLVDWARRHPAGTRWFSRLPDPRLAGRYSHRAAQDVAALAWRCLADRAGERPSMAEAARALERAARHGELDGPPEPPEEGSPPPPRCHAGSGSSSPEAKKAATAKRRRMAHLAKLAAGASAAPAARRLVHMKMTKAAATCNAGTQHGET

SEQ ID NO: 134488 - protein, 209 aa, Oryza sativa
  unsure (1)..(209): unsure at all Xaa locations
  Clone ID: PAT_MRT4530_36257C.1.pep
MDLDKSTSTSASLKKLQKDGALPGRGTMEREVGGTEPQPVLGHMVAIEDYILCGFLXPPSEFLLLVLNFYGLSLLHLNPNSIAFLSIFSHRCDDYIGVQPFLXGFRLRDGLKSRYIPFQRPSSRSKWRVRWFYLQIENSDPVFIVPEEQPDKIXSWTAKPPLTPSLQSFIDAIDDLRVXGLSRYEVAADFIGRRIQPLQARAHPAFDYS

SEQ ID NO: 134489 - protein, 565 aa, Oryza sativa
  Clone ID: PAT_MRT4530_36258C.1.pep
MDLDKSTSTNASLKKLQEDGALPGRGTAEREVGGLDSATVERRVSQLMISGPTTASNVPVPLCEKEAAERDAAINVAVSLKEKVAKEASDTAAAAATTSGGNAPKKGRKFSSVVGHRRKTPTPSASDASPPPPRRQRLVTLGEKAAWAKAAQDGSRGTSTDFVVAPRSREATPSGPTSDLAAGRGLPAAILTWEELQVEMGRLLEASARDIGREIAEARTAAALSANERADRLAHDLAEVREDLQKMGELVAGNERQRQGLEHRMSELENNLSEIRGSLRVTYTGLHQLAGECGIKFTIPANPDEFSLTSSLAELAAAMEEIPSKHAARIGEETSNGIYTGECHVLACVRLAHPKLDLRKILDQGAASDACKDVMEEVGDLGESILPLVEEDVDVEDVQQRGQPELPVVVPLLASEPHMPEGDVAQNSPVGMSMATTPLDLESALADQDRRIQYWRTKFEVAELERTMLEMRKDQAVETLCGREVWFNSYLKSCCTSMLRVCKELRVPRGDPEESAAGYISWLNGACAQLEGISQRIDEALKQECRRSSRYAGGHVLACIRDHRP

SEQ ID NO: 134490 - protein, 662 aa, Oryza sativa
  Clone ID: PAT_MRT4530_36259C.1.pep
MEREAGGIEPQPVLGRMVAIEDYILCGFLLLVLNFYGLSLLHLNPNSIAFLSIFSHLCEAYIGVEPFLDLFRFYYELRWMESNKVSGCVGFRLRDGLKSRYILFQCPSSRSKWRARWFYLQIENSDSVFVVPEEQPDKISSRTAKPALTPSLQSFINAIDDLRVRGLSGETVERRVGQLMISGPTTASKVPVPLCEKGAAEHEAAINALPLTDIIGPLVDHQAAASLKEDVTKEAPDVAVAAATTSGGNVPKRGRKFSSVIRNCRKTPTPSGSDASPPPPRRQRLVTLGENISREIAEARAASASSTNECADRLTRDLAEVREDLQKMRELVAGNERQRQGLEHRMSELENNLSENCGSLRVTYTGLHQLAGECGVKTTIPANPNEFSLTSSLAELATAMEAIPSKHAARIGEETSNGTYTGACHVLACVRLAHPELDLQKILDQGAASDARKDVMEEVGDLGEDVDVENVQQRGQPELPVLFLLATTSLDLESALADQDRRIQYWRTKFEVAELERTMLEVKKDQAVQTLRGRKVWFSSYLKSCCTSMTRVCRELRVPRGDPEESAAGYISWLNGAYAQLKGIGQRIDEALKQECRRSSRYAGGHVLACIRDLRPQLHLEFLHEGFSRSRRTPTEIDGLAKSMAPLAEKVFQSMNWRWPSW

SEQ ID NO: 134491 - protein, 53 aa, Oryza sativa
  Clone ID: PAT_MRT4530_3625C.1.pep
MKARIPVGGDESKPTVKIADVRADEAEVLVMMLVTIIHQIVVIAVADASLGGK

SEQ ID NO: 134492 - protein, 45 aa, Oryza sativa
  Clone ID: PAT_MRT4530_36260C.1.pep
RYFLVLTLRHQKRKPIKGIPPFKTFLQRLKKPWTSYFGVSYQGIP

SEQ ID NO: 134493 - protein, 527 aa, Oryza sativa
  unsure (1)..(527): unsure at all Xaa locations
  Clone ID: PAT_MRT4530_36261C.1.pep
MDLDKSTSTSASLKKLQEDGALPGRGTMEREAGGLNSETVERRVGQLMISGPTTASNVPVPLCEKGAAEREAAINALPLTDIIGPLVDHQAAASLKENVAKEASDVAAAVATTSSGNVPKRGRKFSSVIGNHRKTPTPXGLGCFSPISTTAAACDAWREXARAKAAQDGSGGTSSASPAVASTDVVVMPRSREVTPSGLASDIAAGRGPSAAVLTWEELQVEMGRLLEASAHGVSREIAEARAAAASSANERADRLTCDLAEVSKDLQKMRELVAGNERQRQGLEHRMSELENNLSEIRGSLWVTYTDVDVEDVQQRGQSELPVIVPALAFEPHVPQGDVDQNSPVETGMAMTSLDLESALADQDRRIQYWSTKFEVAELERTMLEVKKDQAVETLRGREVWFSSYLKSCCTSMTRVCRELRVPRGDPEESAAGYISWLNGACAQLEDIGKRIDEALKQECRRSSRYAGGHVLACIRDHHPQLHLEFLHEGFSHSRRNPTEIDHLAKSMAPLAKKVFQSMDWRWPSW

SEQ ID NO: 134494 - protein, 186 aa, Oryza sativa
  Clone ID: PAT_MRT4530_36262C.1.pep
MHLKTHLIRSNPGWEDSTYCHVYLEFSVLGQSEMLLLQYMMKYEVECQLYIYWVLTTWLELGHLDCEGTVICNYSSLEVLADTNASPFSGAFSCHLLACGLLVHAFSDFTKDICNFTVVALYGTYDTLHPETIEQCRASTGEKHGSESSLLVVNQAFSAVVHAVGRATNGYVQTLRQYKTGGHPDN

SEQ ID NO: 134495 - protein, 798 aa, Oryza sativa
  unsure (1)..(798): unsure at all Xaa locations
  Clone ID: PAT_MRT4530_36263C.1.pep
MDLDKSTSTSASLKKLQEDGTLPGRRTAEREVGGTEPQPVLGRMVAIEDFILCGFLPPPSEFLLLVLNFYGLSFLHLNPNSIAFLSMFSHLCEAYIGVEPFLDLFRFYYELRWMESNRVSGCVGFRLRDGLKSRYIPFRCPSSHSKWWGRWFYLQIEDSDPVFIVPEEQLDKIPSXTTKPALIPSLQSFIDIIDDLRVRGLSGCEVAADFIGRRIQPLQARAHPAFNYSGLEDATXVSPRGLDSATVKRRVGQLMISGPTTASNVPVPLSEKGAAERDAAINVSVLSGPFAFFFRDRIMTLLTTKFGYKGRTFSSVIGHRRNPPTPSASDASPPPPRRQRLVTLDEKXASRREVSEXSGGTSSASPAVASTDVVVVPRSREVTPSGPAGDPSAGRGPSTAVLTWEELQVEMGCLLEAGARGVSHEIAEARAAAASSANERTDRLARDLAEVREDLQKMRELVAGNERQWQGFEHRMSELENNLSEIRGSFRVTNTGLHQLTGECDIKSTIPVNPDXFSLTSSLAKLVTAMEEIPSKHAARIGEETSNGIYTGACHVLACVRLALPKLDLRKILDQGAASDARKDVMEEVGDLGEDVDVEDVQQRGQPELPVIIPLLASEPHVLEGDVDRSSPVETSMATTPSDLESALADQDRRIQYWRTKFEVAELERTMLEVRKDQAVETLPGREXCRELRVPRGDPEESAAGYILWLNGACPXLEGIGHCFDEALKQECRRSSQYAGGHVLACIRDHRPQLHLEFLREGFXHSRRTPTEIDGQAKLIAPLAEKVFQSMDWRWPSW

SEQ ID NO: 134496 - protein, 325 aa, Oryza sativa
  unsure (1)..(325): unsure at all Xaa locations
  Clone ID: PAT_MRT4530_36264C.1.pep
MDLDKSTSTSASLKKLQEDGALPGRGAAEREVGGLNSATVERRVGQLMISGPTTASNVPVPLCEKGATEHDAAINALPLTDIIGPLVDHQVAASLKEKVAKEASDAAVAAATTSGGDVPKKGRKFSSVVGHRRKTPTPSASDASLPPPRQQRLVTLSENLXRAVRAKAAQDGSGGTSSASPAVASTDVVVVPRSPSXIXEAKAAAALSANERANRLARDLAELAGECGIKSTIPANPDEFSLTSSLAELVMATEEVPSKHAARIGEETSNGIYTGACHVLACVRLAHPELDLRKILDQGAASDARKDVMEEVDDLGESVLPLFEE

SEQ ID NO: 134497 - protein, 65 aa, Oryza sativa
  Clone ID: PAT_MRT4530_36265C.1.pep
MAMAVGEVEGVVTRDHRGGVGMRVARSHRIRVAGRFCGGAIAVAGNNSNSAPRHLGPPRPRGSGG

SEQ ID NO: 134498 - protein, 55 aa, Oryza sativa
  Clone ID: PAT_MRT4530_36266C.1.pep
CPKGMRTLSTGLALSTLVLRGLANEEVGEDVHKLTGEHHPWLDPDLNQVQVAILY

SEQ ID NO: 134499 - protein, 740 aa, Oryza sativa
  unsure (1)..(740): unsure at all Xaa locations
  Clone ID: PAT_MRT4530_36267C.1.pep
MDLDKSTSTSASLKKLQEDGALPGRGTAEREVGGTEPQPVLGRMVTVEDFILCGFLPPPSEFLLLVLNFYGPSLLHLNPNSIAFLSIFTYLCEVYIGVEPFLDLFRFYYELRWMESKKVSDSDPVFVVPEEQPDKVPSWTTKPALTQSLQSFIDIVDDLREQGLSGYEVAADFIGRRIQPLQARAHPAFDYSGPEGVTRVSPRGLDSATVERRVSQLMINGPTTASNVPVPLCEKGAAERNAAINVSVLSGPFAFFFRDRIMTSXKRRLSLXTDIIGPLVDHQVVASLKEKVAKEASDSAAAAATTSGGDVPKKGRKFSSVVGHRRKTPTPPVSSPVIXSPFRRAARAKVAQGGSGGTSSASPAVASTDVVVVPRSREATPSGPASNLVAGHGSPAAVLTWEXLQVEMGRLLEAGARGVSHEIAEARAAATSSANERADRLAHDLAEVCKDLQKMRELVAGNERQRQGLEHRMSEVENNLLEIRGSLRVTYTGLHHLAGECGIKSTIPTNPDEFSLTSSLAKLVTAMEEIPSKHAARIGEETSNGIYTGVCHVLACVRLAHPELDLQKILDQGVASDARKDVMEEHFDLEYFVVLCRDVDVEDVQQRXDLESALADQDRRIQYWRTKFEVTELGRTMLEVRKDQAVETLRGREVWFNSYLKSXIDEALKQECRRSSRYAGGHVLACIRDHRPQLHLEFLREGFXHSRRTPVGGRSRRSKVCVLGCASRGNGEGPAGSRLL

SEQ ID NO: 134500 - protein, 211 aa, Oryza sativa
  Clone ID: PAT_MRT4530_36268C.1.pep
MAAAATTTKTHRRATSAFAADEAAPGQTRGRATAAAADAQQSSLPTEPLLGRRATAAAADARTRYRRRRRQSRRLVSDYDLVQTCNETHSLILPHILSGLQQLHHRLQAVRADGLTPPSSSPHDGALAGSGRGLAGSGCGGSSTPPSCSTHDGTYKLADGVASLAAAGSPDPLAGSSDDGEAAAADLAAAGSSDDDHGSCGRSSEATTTTA

SEQ ID NO: 134501 - protein, 198 aa, Oryza sativa
  Clone ID: PAT_MRT4530_36269C.1.pep
MVSQAISELAEEPAQALRLDSGATKPQAEASCWRSRRPARCLIPSSYAVVVVASLDLPQLPWSSSLLPAAARSAAAASPSSLLPASGSGEPAAAKLATPSASLYVPSWVEQDGGVEEPPQPDPASPRPDPASAPSWGEEDGGVKPSALTAAPHRRQIRRRRHRCSPPSLDPPPPELKRRRSAAEGRGKRESGEGRGEE

SEQ ID NO: 134502 - protein, 169 aa, Oryza sativa
  Clone ID: PAT_MRT4530_3626C.1.pep
MAATKLTSSRHLQLRRTSALEEEVALACGPHAVEAQGEEEGGLARLGFKLAGRLWRERWRARVAGDDNRRLEAAAGDDGGRRRQVMDGGARGMDETGLDLARPTTTTKWLDARGESDAAAAHGKRAAAGIAPVTAKLARRMHGVAAALAATSCGRSSVASGGTSSEWRH

SEQ ID NO: 134503 - protein, 66 aa, Oryza sativa
  Clone ID: PAT_MRT4530_36270C.1.pep
NRGQQSAILRSPTEHWMATRQVSPEVSTGIMSWCVMLSTVELLSAQGFLFMGVIHLHPQQVSKHPT

SEQ ID NO: 134504 - protein, 597 aa, Oryza sativa
  unsure (1)..(597): unsure at all Xaa locations
  Clone ID: PAT_MRT4530_36271C.1.pep
MAVYSKQGRCGGDRRPRHKITKGIAELDDTDEIVIDQALPLTDIIGPLVDHQAATSLKENVAKEASDVAAAAATTSGGNVPKRGRKFSSMIGNRRKRPTPSASDASPPPPRRQRLVTLGENLATRAKAAQDGSGGTSSASPAVASTDVVVVPRSREAMPSGPASDLAAGRGPSAAVITWEELQVEMGRLLEAGARGISREIAEARAAAASAANEHADQLMRDLAEVREDLQKMRELVAGNERQRQGLEHHMSELENNLSEIRGSLRVTYTGVHQLAGDCGIKTTILANPDEFSLTSSLVELATAMEAIPSKHAARIGEETSNGIYTGACHVLAFVRLAHPELDLQKILDQGAASDARKDVMEEVGDLGESVLPLFQEDVDVEDVQQRGQPELPVIVPALAFEPYVPQGDVDQNSPVETGMVTTSLDLESALADQDRRIQYWRTNVEVAELERTMLEVKKDQAVETLRGREVWFNSYLKSCCTSMTRVCRELRVPHGDLEESAAGYISWLNSACAKLEGIGKRIDEALKQECRQSSRYAGGHVLACIRDHRLQLHLEFLHEGFSRSRRNPTEIDHLAKSMVPLAEKVFQSMXGVGLPG

SEQ ID NO: 134505 - protein, 55 aa, Oryza sativa
  Clone ID: PAT_MRT4530_36272C.1.pep
MDAAHWHQGLGLAKPMEEMLMAANAAAGAKPNPAATAPSSGTGGALRGGRLLWRP

SEQ ID NO: 134506 - protein, 70 aa, Oryza sativa
  Clone ID: PAT_MRT4530_36273C.1.pep
LRHIIADGHDKRAKHLKGHNSPDSTSHRIKLPLVERTRRREEQKGGDAPKLYWILSSFFLQLVIVHVQCT

SEQ ID NO: 134507 - protein, 66 aa, Oryza sativa
  unsure (1)..(66): unsure at all Xaa locations
  Clone ID: PAT_MRT4530_36274C.1.pep
VLVDVDQVVVAAHLVRGCGVVMPSMTKVVGQEVQQRKENSLLKQERATVLFXLRRGLGLNLLPDAW

SEQ ID NO: 134508 - protein, 465 aa, Oryza sativa
  Clone ID: PAT_MRT4530_36275C.1.pep
MASARARGGRAFFLLVLVLVVLAAPAAALRTSAISAAPEYPRLPTGPGHGGGRHAAPAPAAVLPPAPALSPDIMPLLPSPGPDSDGSAEAPSDVMPTIPSSPSPPNPDALLPDSALAPFGSAPAVAAQSRAPPPSTTTAAAAAWALPVAVGLVAMWLIASPLDPFLLHQLTARFHHAPADAHHLLDETPRRASSIVRALGACRGASREEADGVAALHCAALKSGAVLDPPVRTSVITAYSRVRDVCSALQVFDEAAAPDLILWNAAISALTLNCRYGDAVVLFRWMVDVLGVIDSTSMVIMLSGASRARSLEHGIAFHGMALKRCLDTDLSLWNTLMDMYAKCGDFYSSEVVFQRMPYRDTTSWNSMADEVSLSCVLSACSHLKDLFSFGESVHSSVIKLGYEDTTSSVANSLITFYYELGFPEAAEEVFLSTSNKNLVTWNAMIKGLLVVIMAYFLKGKKSMDT

SEQ ID NO: 134509 - protein, 916 aa, Oryza sativa
  Clone ID: PAT_MRT4530_36276C.1.pep
MLRRTPRLLAAVNPATAVRSTAALVQIASPLDPFLLHQLTARFHHAPADAHHLLDETPRRASSIVRALGACRGASREEADGVAALHCAALKSGAVLDPPVRTSVITAYSRVRDVCSALQVFDEAAAPDLILWNAAISALTLNCRYGDAVVLFRWMVDVLGVIDSTSMVIMLSGASRARSLEHGIAFHGMALKRCLDTDLSLWNTLMDMYAKCGDFYSSEVVFQRMPYRDTTSWNSMVSGSLFNGLAEISAYYFKEMVRSSFQADEVSLSCVLSACSHLKDLFSFGESVHSSVIKLGYEDTTSSVANSLITFYYELGFPEAAEEVFLSTSNKNLVTWNAMIKGLVENDRVNEAMCMFQEMRSKNQPDVATLVTIISACGDHGLLPEGKEVHGYIIKKGHIYEECSVGNSLLDLYMKCNDPSTARILFRTMPMRDLISWNTMISGYSRNDSLGEEAKAMFKGLLSEGLSCTLSTVVAVIPSCFCPQDLNFGKSVHSFILKYGFLTGVSAANSLIHMYICCGDSLAAFSLLESITPISDIISWNTAIVGCVQNGLYGDALEAFQFMHSTLTLNPDSITLVSVLSVCGNLKLQSLGKSIHCMALKRLIEFNLRVKNALLTMYFRFGDTESAELIFSSLVGRNLCSWNCMISGFAQNNEGLRAFQFYKKMEDFEPNEISIVGIICACTQLGDLRQGKNIHGHVVRFGLQTNVFISASLVDMYSKCGRLDISIRVFESSAEKSIACWNSMISAFGFHGLGLKSIEIFWKMNNSGVKATRSTFIALLSACSHSGLTDEGLKYYHLMIEHFGIIPTPEHHVCVVDMLGRAGRLQEAHKFVESLPSKQAHGVWGALLSACSKKSELKMCESVAKHLLCLEPENSGYYVTMSNLYAYQDMWSGAVQVRDILQDKGLMKPRGRSIIG

SEQ ID NO: 134510 - protein, 172 aa, Oryza sativa
  Clone ID: PAT_MRT4530_36277C.1.pep
MQDPEEEDDDQQQQHPAARRCAACRYLRRRCADDCVLAPFFPASRPHRYACVHRVFGASNVARLLQSLPMAERGNAANTMAMEAYWRVQDPVYGCTGIINRLQEEIRAVQCELARTQAHLAIAVASSQQPPPPPPPPPLPSPPPPPPPQQQEEQSPPPLLDPADEFLNLDGL

SEQ ID NO: 134511 - protein, 92 aa, Oryza sativa
  Clone ID: PAT_MRT4530_36278C.1.pep
MWKVAADAAEGWGGWICASILLPKTASVVANLVRHLRGPKSATPPTLAAPRMLNLVVDAVTAQLASRSADGVPHSHREASFPSSSAVVEDVA

SEQ ID NO: 134512 - protein, 142 aa, Oryza sativa
  Clone ID: PAT_MRT4530_36279C.1.pep
HRGTSFLLPPPPPAVRDNKIRRSGLSADCNNKIRASGVCDRLTTWPTSSLSSWLGARATIEPDITSAMSWLRSLVKQSVCRASAIRRRSHRRRRFNFRRSGPHPPPLQPVLLRWPGQLKGRERERRGRGEEEERERMTRGAH

SEQ ID NO: 134513 - protein, 73 aa, Oryza sativa
  Clone ID: PAT_MRT4530_3627C.1.pep
MCCLMPISTCACVCVERQQTQNADWLATPPAPAFAAAAFALYYYYWLASCSDQNQCVAHARWRAVWASIIIIN

SEQ ID NO: 134514 - protein, 121 aa, Oryza sativa
  Clone ID: PAT_MRT4530_36280C.1.pep
MVTSRFGLSLKPVTVARVKMGLPPHVVRSRDGCGSLFVCPGQYHPAKKHTTDDSNLGDEKDTFTTKKHTTDKSKLGDGKDTTTKILDIGEGDNDGGGGGGSCRLRQAVIDVMGTGIYHSKI

SEQ ID NO: 134515 - protein, 615 aa, Oryza sativa
  Clone ID: PAT_MRT4530_36281C.1.pep
MAGRRPLFDLNVAHEDWDWEKGEEAEAEEEEPEEVVEEGKKEVVVLEEEEEEEEPHEVIMEEEVVEEVVEEEAAVAEEVDGEVRRKRKDCEVLVGGLPRDAAEEDVARALADAGDVEEVRLVRDPADPRSNKGFAFVRFAAAWQARWAADDVRTAMVLFILVISFCCWLARFKLVDVVSGLLISVEEVDVWCHLPTKVLCTTLLSRQVPYPNIILMVKGEACMICKNDANETLHLRNICFDWTKDDLAEELKTYKLENLEDINLVEDPERKGKNRGYAFLDFRTNVDGVDAFFKLQNRDIYLGTDVRAQVSFSKTLSLDDKIMEKVKSVFLDGLPPHWDEDKVREVFGKFGEIDSIHLARNMFKAKRKDFGFIGFTSRQSALDCISTVSKGGIVEGSGKVRIKASLQRPRPTLKKHSWQGITPMLGIRRGFIGKSYGDREHYGDRERYDDRERYHNRERYGDRGFGFSGHIHRYERARPREAYLDSRYTNEYPRHRHSRHEESIQRDAYRSKYGHSYLERSHRDSCPDCNPSDHSSSAFYKTGRKLMASSSPGMCNCGECYVEQDAAPASSQVVPLRHQLAKPFHERSSEPDDHSASAYEAAEYKERKSSLVRFV

SEQ ID NO: 134516 - protein, 1573 aa, Oryza sativa
  unsure (1)..(1573): unsure at all Xaa locations
  Clone ID: PAT_MRT4530_36282C.1.pep
LHRNDTYKRQYKKRKPVIIEEDKDSPTLDGVTQEETIHVQDAKVHTPDDTYVEFDSGLLEPPLIDFVHEGEFETAEIYDIADNVDEHFSSTYDGYKSYRVDVKGVNGIEANDVHDHVYNKLPKTHHILKKVPDCEFCNAIRFQYESPGFCCRQGKINVHVPEILAELIRLFTSQVHNDAKYFRKHIRYFNSHFSFTSLGVTLDQRVSTAARTSVYTFRVHGALYHCLDNLVPGSQGPRNMQFYFYDTEDADALAHRVRRSPDVDLNHVRVNLRILEQNPYAQTFSRFGSMPNIDDYMIELNTNVTPDQGRYNAPTASQVAAIRLXGDDPMRTFDRHVLVHTKGDKPCYIKAYHGCYGPLAYPLFNPNGETRWXPENVEMDESCEASTLGDVRTNEESTFLDLPENEVIDNYLDNDNDNDDSSKSGKGKKDKFVTVREYYCFRLQVRRGLLNIILFRGRLFXQWAVDMYIKXKSMRLDWYSKPENKKKIRTELYQVNDITYFHKYXHCLPSMIQHISYLIMVLFNDCXGVVDVLSFGETSGSAVGKRVVLPRSFLGGDRDMQRRFLNAMALIQRFGRLDYFITMTCNPYWDDITENLEPGQLPQDXPDVVTRVFRDKLRDMLDLFVKKIYFGEVQADAHVTEFQKRGLPHEQILLIMKSGSKLTTPDEYDKVICAEILDKAKYPELHRLVIKHMLHEPCGALNKNCACMVDGECRFDFPQQFNQATQRGKDSYPLYRRRDDGWRVKISGAVLDNRWVVPYNPELLMRYNCHINVEACASIKSVKYLYKYVYKGHDCASFSVDSSGEINEIQQYKNARYVTPPEAIYRMLHFPLFGIYPAVLQLQLHLPNMQYVTYDEDGNLENVVNNRSSSRTTLTEYFKMNQVDPEARKLLYKEFPKHYRWITGQNVWQKRKTKRGQVGRVVYAHPREGERYYLGVLLNHVRGATSFEDLRTLSGTTYSTFREACEKRGLVETDKSQDDCLNEASTFQMPSTLRRLFATILVFYEVTDIRALWDNHKAAMSKDYSRGSTNPAAVEQMVLRDIRDLLHSMGKDITKYGLLEIIDIGIFXNDVMTKIIEELNVSVDQDHLDICTSLNDEQRAGFDEIIDHVTNKKSHVFFIDGSGGTGKTFLYKALLARVRSXIAIATTTSGIAASILPGGRIAHSRFKIPIKIAHNSMCNFKKQNGTAKLLRMASLIIWDEAAMTKRQAVETLDRSLQDIMGCSLPFGGNVIVFGGDFRQVLPVVTRGTRAQIIYATLQRSYLWKNIRKIRLSHNMRALYDPWFSDYLLRIGNGTENTIGDDYVCLPDEIVIGYVDIEDSVNTLIEYVFPSLNDERNTTSVEYMSTRAILLTKNDFVDKLNTKMIDRFHDKEKIXHSFDXVDDDSQNNYPLNFLNTITPNGHSPHELKVKVNCPVILLRNLDPXNGLCNGTRLMISTFQDNXIDAEIAGGHHARKRVFIPRIPLSPSNDISLPFKFKRKQFPIRLSFAMTINKSHGQTIPNVGIYLLKPVFSHGQFYVALSKGVSRKTTRILAKHKKEVDPTGRSTRNIMYKDVLDCINDLLLSLLLTFLSIFS

SEQ ID NO: 134517 - protein, 287 aa, Oryza sativa
  Clone ID: PAT_MRT4530_36283C.1.pep
MPDANVFSSFWIVSLIVEPFPCGNSMKDIGLQILRLVDPFVAATSTADHVNFCGLTAGAVYTSLVIIYTTSAEYMSTRAILSTENDFVDKLNRKMIDRFPGEEKIYHSFDYVDDDSQNNYPLDFLNTITPNGLPPHELKVKVNCHAILLRNLDPNNGLCNGTRLMIRAFQDNAIDAEIVGGHHARKRVFIPRIPLSPSDDISLSFKFKRKQFPIRLSFAMTINKSQGQTIPNIGIYLPEPVFSHGQLYVALSRGVSRKTTKILAKPKKEVHPTGRSTSHYDVISFSI

SEQ ID NO: 134518 - protein, 81 aa, Oryza sativa
  Clone ID: PAT_MRT4530_36284C.1.pep
TDYRVKKYYLVGQYEIPVPFPFSLYISKPGEQRHPDSAWHGCRSDLTQHGMAVDLCSLYTVAAGLGGNLPFMSQGRTLAVC

SEQ ID NO: 134519 - protein, 156 aa, Oryza sativa
  Clone ID: PAT_MRT4530_36285C.1.pep
MRLAWWAGVLRRPSLGGSVTYGAWGWPAMMTPEVEACNRDNVWAMLACGVKRKMASGRLRYSSVDVLTESLLLKLHSDSLGEALAWWRVVLTTEKDLSSLSPFVPPTILRQRLGAYAQLFLVGVGGAPIALSLVQWQPVMLSSVWISASPFLDCVG

SEQ ID NO: 134520 - protein, 118 aa, Oryza sativa
  unsure (1)..(118): unsure at all Xaa locations
  Clone ID: PAT_MRT4530_36286C.1.pep
EKPITSSSVSGRPQPLTPYLIGTMAKGAXVAKTLRPQPLTPYLIGTMAKGVGVAKPIHPQPLTTYLIGTMAKGXGVWREGSHFALSVWVXPHGRRQLLSNGQLCHIERRGSLNNIWNV

SEQ ID NO: 134521 - protein, 154 aa, Oryza sativa
  unsure (1)..(154): unsure at all Xaa locations
  Clone ID: PAT_MRT4530_36287C.1.pep
NHKLTVLEPDGNYVDPFAVDDIDXIYSGDSYSVLLTTDQXTSPNYWVSVGVRARXPRTAPALXVLNYRPNRASRLPAAXPPATPAWDDFARSKAFTYRILAAPASRRRRRQTSDRRIELLNTQNRMXGGHVKWSINNMSMVLPATPYLGSLKMG

SEQ ID NO: 134522 - protein, 677 aa, Oryza sativa
  Clone ID: PAT_MRT4530_36288C.1.pep
MVAIEDYILCGFLPPPSEFLLLVLNFYGLSLVHLNPNSIAFLSIFSHLCEAYIGVELFLDLFRFYYELRLMESNRVSGCVGFRPWDGLKSRYIPFQCPSSRSKWRARWFYLQIENSDPVFVVPEEQPDKISSWTAKPALTPSLQSFIDAIDDLRVRGLSGYEIAADFIGLNSETVERRVGQLMISGPTTASNVPVPLCEKGAAEREAAINALPLTDIIGPLVDHQAAASLKEDVAKEASDVAAAAATTSGGNFPKRGRKFSSVIGNRRKTPTPSASDASPLPPRRQQLVTLGENLAARAKAAQDESGGTSSASLAVASTDVELQVEMGRLLEAGGHSISREIAEVRAAVASSVNERADRLTRDLAEVREDLQKMRELVAGNERQRQGLEHRMSELENLSEIRGSLRVTYTGLHQLAGECGIRTTIPANPDEFSLTSSLAKLATAMEAIPSKHAAMIGEETSNGIYTGACHVLACVWLAHPELDLQKILDQGAASDARKDVMEEVGDLGESILPLFEETKFEVAELERTMLEVKKDQAVETLRGREVWFSSYLKSCCTSMTRVCRELRVPRGDPEESAAGYISWLNGACAQLDDISKRIDEALKQECRRSSRYAGGHVLACIRDHRPQLHLEFLHEGFSRCRRNPTEIDHLAKSMAPLGRRSSSPWTGVGLPGSLRIL

SEQ ID NO: 134523 - protein, 776 aa, Oryza sativa
  unsure (1)..(776): unsure at all Xaa locations
  Clone ID: PAT_MRT4530_36289C.1.pep
MDLDKSTSTSTSLKKLQEDGALPGRGTAEREVGGTEPQPVLGRMVVIEDFILCGFLPPPSEFLLLVLNFYSLSLLHLNPNSIAFMSIFSHLCEAYIGVEPFLDLFRFYYELSWMEPKKVSGCVGFRLRDGLKSRYILFQCPSSRSKWRGRWFYLQIEDSDPVFIVPEEQLDKISSWTAKLALTPSLQSFIDIIDDLRVRGLSGYEVAADFIGLDSATVERRVGQLMITGPTTASNVQVPLCEKGAAERDVAINALPLTDIIGPLVDHQVAASLKKKVAKEVSDAVAAAATTSGGNVLKKGRKFSSVVGHRRKTPTPSPVSVAAFRRAAWAKAAQDGSGGTSSASPIVASTDVVVVPRSREATPSGPASNLATGRGLPAAILTWEELQVEMGCLLEAGARGISREIAEARAAAAASANERADRLAHDLAEVREDLQKMRELVAGNKRQRQGLEHRMSERENNLSEIRGSLRVTYTGLHQLAGECGIKSTIPANPDEFSPTTSLAELATAMEEIPSKHAARIGEETSNGIYTGACHVLACVRLAHPKLDLRKILDQGAASDARKDVMEEVGDLGESVLPLFEEDVDVEDVQQRGQPELPVIVPALAFEPHVPEGDVAQNSPVETSMATTPLDLESALADQDRRIQYWRTKFEVAELERTMLEVKKDQAVETLRGREVWFNSYLKSFCTSMSRVCRELRVPRGDPEKSATGYIPWLNGACAQLEGISQRIDEALKQECRRSSQYAGXHVLACIXDHRPQLHLEFLHEGFSRSRRTPTEI

SEQ ID NO: 134524 - protein, 83 aa, Oryza sativa
  unsure (1)..(83): unsure at all Xaa locations
  Clone ID: PAT_MRT4530_3628C.1.pep
MAAATPANSGKGGGLMRFTEARGVLXVATAEARRSGAXGAPCSRRRPNRAVTAGGGPGDVLGTDWMGKERGKGVLGMKNPFLP

SEQ ID NO: 134525 - protein, 104 aa, Oryza sativa
  unsure (1)..(104): unsure at all Xaa locations
  Clone ID: PAT_MRT4530_36290C.1.pep
MNTSQTFLKIKXTNKSTWQTLNISLIXTDINILINRYNCFKXALSLCGNDDYLNRGPNXTQAKLYWLLAISARSVQSVLSRSNFLXFHFDIQLQIQIYLAKFHY

SEQ ID NO: 134526 - protein, 152 aa, Oryza sativa
  Clone ID: PAT_MRT4530_36291C.1.pep
MSPTAAAASSANERADRLTRDLAEVREDIQKMRELVAGNERQRQGLEHHMSELENHLSEIRGSLRVTYTGLHQLTGECGVKATIPANPDEFSLTSSIAELATAMEAIPSKHAARIGKETSNGIYTRACHVLACVRLAHPELDLRKILDQGGG

SEQ ID NO: 134527 - protein, 225 aa, Oryza sativa
  Clone ID: PAT_MRT4530_36292C.1.pep
MKAQEEFSCSMLLKNKTHHYVAYKINAQKLNIYRIEPCSGLISPQFTCNISVRMQAQQGVSPNMQLMDRILVQSVVVSDDLIDIAKDLSCKQKGKLVLKGPDKIMSKIYVNIRKTGALDENKPICGTTEGIGNSHHDNKLSGLSIMKNSSRDDYVIDGMHIYVKIPSIAKTIKLIVKNSNSVADVKVEIERKERILQDNQMLMYAGRQLDDRQILSHFGLSDDQI

SEQ ID NO: 134528 - protein, 197 aa, Oryza sativa
  Clone ID: PAT_MRT4530_36293C.1.pep
MASRGGGARRTRPNVLVTGTPGTGKTTTCSLLADAVDLRHINIGDLVREKSLHDGWDEELECHIINEDLESIGLPQPSNPVCTVPQVCDELEDVMEEGGILVDYHGCDFFPERWFDLVVVLQTDNSILHDRLTSRGYMGAKLTNNIECEIFQMLLEEARESYKEEIVMPLRSDNVEDISRNVGTLTEWINNWRPSRS

SEQ ID NO: 134529 - protein, 1351 aa, Oryza sativa
  Clone ID: PAT_MRT4530_36294C.1.pep
MAVSSMQAGEKAVFTIPPELAGTKSRCPADIPANLPPNQALQFDVELISLITITDILDNEGILKKTMKRGVGNDKPCDLDEVLVNYNACLEDGMSVSMSEGVEFNLAEGFFCPAFARAVETMTEGEEVVLIVKLEYGFGERGRPSIGDEAAVPPDATLYVYLQLMSWKTVRHIGQNGTILKKTLRRGNLEGQHTENQAVVGVRLIGKLHDGAVFDQRGHQGDEPFEFVVDEEQVSDGLEEAVLTMWEGEVSLFTIPPQCLQDQHVVVPPGSSVTYEIELVSVVNDKHPWLMSQAESVEAAVEKEKEGDKLFGSSKYLRAYRRYYKVLEYDPGNVKAQEMSGQAFPEASLVIDTAAMHRGLEPFRPKEQHSIGWTTTTGAISSMRLKQGHKYRGGMIFVPPIARPGANVPTSRSPATQATRVVNTNRVTTNIENQINSGTTRKSLEDNATLPSSSSSSSPSARSAAGAPLQPDLRHRPGSAAVAPLSLSEGATAAAAEVVAPETKEVRAKASVDEAVTLATVVSKNVSFREESNFLDNLKDGERKALAELRAKVEEAIVEGKLFDDGKVEARKKATTIPTTTTARHSRRSSLTCATSTARTGRATRIEVSNGNAGPGRDSASLVGWKHGEVGLRSSEHDDEGGDDDGDGRSRAGKIVAAEPRHVPVAPRPAVARHVLVQPRERLRVVVHRVDVAQAVEEPRRLLVVVQQVLHHAAPPEQLDIARRHDELAHQRHVAAQEPGHLAALALLERDQMEKVVDVPVAGRPLDWLLVADIHDGEKVEEGLPGALHAGDGFVEPLDDEEGDCRGLDSATVERRVGQLIISGPTTASNVPVPLCEKGVAEREAAINALPLTDIIGPLVDHQVAASLKEKVAKEASDVVAAAAKTSGGNVPKKGRKFSSVVGHHRKTPTPSPVSVAAFRRAARAKAVQDGSGGTSSVSPVVASTDVVVMPRSREATPSGPASDLAAGRGPSAAILTWEELQVEMGRLLEAGACGISREIVKARAAAASSANERTDRLARDLVEVREDLQKMRELVAGNERQRQGLEYCMSEFENHLSEIRGSRRVTYTGLHQLAGECGVKATISANPDEFSLTSSLAELATAMEAIPSKHAARIGEETSNGIYTGACHVLACVRLAHPELDLRKILDQGAASDARKDVMEEVGDLGESVLPLFEEYVGVEDVQQRGQPELPVIVPALAFEPHVPGGHVDQSSPVETSMATTPLDIESALANQDRRIQYWRTKFEVAELERTMLEVKKDQAVETLRGRELEGIGQRIDEALKQECRRSSRYAGGHVLACIQDHRPLLHLEFLREGFCRSRRTPTEIDGLAKSMAPLAEKVFQSMDWRWPSW

SEQ ID NO: 134530 - protein, 411 aa, Oryza sativa
  unsure (1)..(411): unsure at all Xaa locations
  Clone ID: PAT_MRT4530_36295C.1.pep
MVKIMDMGNQSSIEELDEPLGRVPILSYGFGHMLNDLTSSCWSTFLLIIXQTIGFVQXGASFFILYGRFGVSSASIFVGERIDSFEHLNLWHSGRSFFGAISCSTVFVRXILTAYMXTISSAFKAVGYSKFAAIINVSRTDTHLAILNLXNCFVVIKSTLVSXVIVLNSXIAYYYMSLGSSIVFVFLIKTVEKVAYQHCQNKRLSRISWTHWFKKVLYYQVALVYMFTRLVTNVSQALLAFYVINDLEMPQSSKALVPAIIYVCSLIVSVILQETRWSSWRLKNYFSAGAMLWILSGVGIVVLPSGMHNFMYALSITIGVANALMTVTSISMEGILVGEDLNGCAFVYGSLSFVDKVSCGLALYILESYQDDTVKGTQQRVEYVPKVAWEYNPVKSVCTGILGMYILYATG

SEQ ID NO: 134531 - protein, 122 aa, Oryza sativa
  unsure (1)..(122): unsure at all Xaa locations
  Clone ID: PAT_MRT4530_36296C.1.pep
ADLESELPDQDRRIQYCRTKFEVAELERTMLEVKKDQAVETLRGREVXFSSYLNSCCTSMTRVYRELXVPRGDPEESAAGYISWLNGACAQLEGIGRRIDEALKQECRQSSRYVGGHVLACI

SEQ ID NO: 134532 - protein, 96 aa, Oryza sativa
  unsure (1)..(96): unsure at all Xaa locations
  Clone ID: PAT_MRT4530_36297C.1.pep
SMEGILVGEDLXGCAFVYGSLSFVDKVSCGLALYILESYQGSTNTRQNLELAFGYSVTRLGLGLVPAACSLLSAIIAYTMDLPDTRRRPLVEPLLA

SEQ ID NO: 134533 - protein, 349 aa, Oryza sativa
  Clone ID: PAT_MRT4530_36298C.1.pep
MDLDKSTSTNASLKKLQEDGSLPGRGTAEREVGGTEPQPVLGRMVTVEDFILCGFLHPPSEFLLFVLNFYGLSLLHLNPNSIAFLSIFTHLCEAYIGDGLKSRYIPFQCPSSRSKWRGRSFYLQIEDSDPVFVVPEEQPDKVPSWTTKPALTPSLQSFIDIVDDLRERGLSGYEVAADFIGRRIQPLQARAHAAFDYSGPEDATRVSPRGLNSATVERRVSQLMISGPTTASNVPVPLCEKGAAERDAAINALHLTDIIELLVDHQVATSLKEKVAKEASNAAATAATTSGGDVPKKGRKFSSVVGHRRKTPTPLITKGIAELDDTVEIVVELIRLDLPATWLRQAPAS

SEQ ID NO: 134534 - protein, 99 aa, Oryza sativa
  Clone ID: PAT_MRT4530_36299C.1.pep
MRATETLAMVDEAAARWSATTADERDGNNGEHKRSERAGDFHGDIVLLVDVVRRAGFKADTCGIMVDTHKFQTWDQLCHLSHYWYCGLLLAPRACSSAS

SEQ ID NO: 134535 - protein, 108 aa, Oryza sativa
  Clone ID: PAT_MRT4530_3629C.1.pep
LLTRPESLPAARNRSRNTNQQHLPFIVTNQISNPPEPPGGKEVITFNGSRNIFIHKIMEVSTSSESSSGSNSLSSSPKNNIFPLYGPMLKSSPLIPTDMMRITEIKSI

SEQ ID NO: 134536 - protein, 142 aa, Oryza sativa
  Clone ID: PAT_MRT4530_362C.1.pep
MPDVPLLADGANEQWPARTPEPLHRAGERVAAVVCGADTIARRHRGRHARGPRQRTARSPHFTPRAADVLNWSDKPVCQEKAAYILMVLAHRSYASWSPLPRRGSQDAEHGGNLPALGLEGRREGARGGRHARGSLPAPGSD

SEQ ID NO: 134537 - protein, 857 aa, Oryza sativa
  unsure (1)..(857): unsure at all Xaa locations
  Clone ID: PAT_MRT4530_36300C.1.pep
SFTSTSLKKLQEDGALPGRGTVEREVGGTEPQPVLGRMVAIEDFILCGFLPPPSEFLLLVLNFYGLSLLHLNPNSIAFLSIFSHLCEAYIGVEPFLGLFRFYYKLRWMEPKKIENSDPVFIDPEEQPDKISSWTTKPALTPSLQSFIDIIDDLRVRGLSGYEVAADFISRQIQPLQARAHPAFDYSGPEDATRVSPRGLDSATVERRVGQLMISGPTTASNVPVPLCEKGLAERDAAINVAASLKEKVTKEASDGVAAAVTTSGGIVSKKGRKFSSVVGHHRKTPTPSPVSVVAFRRAARVKAAQDGSRGTSSVSPAVASTDVVVVPRSREATPSGPASDLAAGRGLPATVLTWKELQLEMGRLVEAGARGISREIAEARAAATSSANERADRLARDLAEVHEDLQKMRELVAGNERQRQGLEHRMSELENHLSEIRGSLRVTYTGLHQLAGECGVKATIPANPDEFLLTSSLAELATAMEAIPSKHVARIGEETSNGIYTGVCHVLACVRLAHPELDLRKILDQGAASDARKDVMEEVGDLGDIDVEDVQQRGQSELPVIVPXLAFEPHVPGGDXLEGALTDQDRRIQYWRTKFEVAELERTMLEVKKDQAIETLRGREVWFNSYLKSCCTSMSRVCRELRVPRGDPEESAAGYISWLNGACAQLEDIGQRIDEALKRECRRSSRYAGGHMLAFLRDHRPQLHLEFLREGFSRSRRTPTEIDGLAKSMAPLAEKVFQSMDWRWTSCSVGSMASEPYMRKKGVSLLDVVGVFYAVCPLDLSIALRVRNRGEADLDSQPDAVILEIGTDELGAVVRYDTVGQSESAECPFDEFDGVVGLDFPRGCRFNPLSEFVDRHE

SEQ ID NO: 134538 - protein, 102 aa, Oryza sativa
  Clone ID: PAT_MRT4530_36301C.1.pep
MAMHGERERLPVMARVQPWGCGGRRASRTMWPVAGDQFKRFVCDIHCGGVFIQEQMLVTGHAWHFKNYDKRPQFAKFLRLLRAKKQTGAATHHLLRQARCRH

SEQ ID NO: 134539 - protein, 131 aa, Oryza sativa
  unsure (1)..(131): unsure at all Xaa locations
  Clone ID: PAT_MRT4530_36302C.1.pep
LEHRMSKLENNLSEIRGSLQVTYTGLHXLAGECGIKSTIPANPDEFSLTSSLAELAATMEEIPSKHAARIGKETSNGIYTXACHVLACVRLAHPELDLRKILDQGAASDARKDVMEEVGDLGESVLPLFEE

SEQ ID NO: 134540 - protein, 112 aa, Oryza sativa
  unsure (1)..(112): unsure at all Xaa locations
  Clone ID: PAT_MRT4530_36303C.1.pep
LKELQEDGALPGHGTAEREVGGTEPQPVLGRIVAIEDFILCGFLPPPSEFLLLVFNFYGLSLLHLNPNSIAFLSIFSHLCEAXRDGLKSRYIPFQCPSSRSKWRGRWFRLDP

SEQ ID NO: 134541 - protein, 33 aa, Oryza sativa
  Clone ID: PAT_MRT4530_36304C.1.pep
MELRLCLRLHAPFVFDLTTHPSMSVTPCSNLAL

SEQ ID NO: 134542 - protein, 1093 aa, Oryza sativa
  Clone ID: PAT_MRT4530_36305C.1.pep
MVSRSLQLVGALLLPLLAVVSSFDPFHRDANPMGGGAGQGPFIPHEYVRFADVKRQCKSVLSSAAELTFDANRANGLMPELSFVKGDWKHDGDGDGGGGAPLLPFDGTDVAEDAAAGAARDPLPLASFSLTHVDAARRGRTALNVSGVLGVAISRNGTGPEMGPYVSPEFKVWPGNTELKVLLEGVYTENDDGESVLCMVGDAVLPARGGDAANPWGWAKHSDRDRFQPPITKDGNILLVLRYPKTLTLTTRAVHGELTSTNGKTHAAYFDAVHLLSQLGAYSNYQFGSEELVGTACKPHPYRDDVLAGGGGDRGLYKGTSFCGILDRFTSEDVLAVVPNWRCNTTDDALCRRLGPFETDKAVDATDGGFAGVRIVMQEVRCEPRTDGGEISARVSAVFRAVPPWEHAYTAAKRSGLGGATMSAEGVWRASSGQLCMVACLGVGAKACHSRVCLYLQTTFSATRRSITVGQITSIGGGAAHFPPLTFQRTVHPMELWSRFGVTGGEPLSLAYSYTKTKQAGEFLRRSEPFDFGTVIAKSLLSYPRKSGDAADETTSLSNLAEELTLHVAAVPDPFPRGRFERPFLQLEVLSLGSLVGRASPATFPGTPAAVGQSMASSSSSTTTKLDATAILNVSAELTISGDAYVNVSTLSLEGVYNPVDGRMYLIGCRRIQAPWRAFSAMGGVEEGMDCSIEVRVEYPPTTARWLINPTAKVHIASTRGGGDDPLRFNATALQTLPILYREQRQDILSRRSVEGILRVVTLAAAIAAEFSQLMYIKSHTDVMPYVSVVMLGVQAVGYSVPLITGAEALFARIAASSGDGGATPPPSYEVDKSQLYWTIDCVVKILILAAFLLTLRLVQKVWRSRIRLLTRSPLEPGRVPSDKKVLVYTSGAHLVGFAVVLAAHYVSVLARPVRSEASYMDARGEAHALREWAVTLEEYIGLAQDMFLLPQVIGNVVWRINCRPLKTGYYAGLTAVRLLPHVYDYVRAPAINPYFAEEYEFVNTSLDFYSRSGDVAIPLAAVALAAAVYVQQRWNYKIISKTVKTQQKKLQHLGSRVYERLPSMSSANFEAELVAGVNEGVGHGLRRDASLS

SEQ ID NO: 134543 - protein, 375 aa, Oryza sativa
  Clone ID: PAT_MRT4530_36306C.1.pep
MEREAGGLNSETVERRVGQLMISGPTTASNVPVPLCEKGAAEREAAINALPLTDIIGPLVDHQAAASLKEDVAKEASDVAAAAATTSGGNFPKRGRKFSSVIGNRRKTPTPSPVSIAAFHRAARAKAAQDESGGTSSASLAVASTDVVVVPRSREATPSGPASDLAAGWGPPAAVLTWEELQVEMGRLLEAGGHSISREIAEVRAAVASSVNERADRLTRDLAEVREDLQKMRELVAGNERQRQGLEHRMSELENLSEIRGSLRVTYTGLHQLAGECGIRTTIPANPDEFSLTSSLAKLATAMEAIPSKHAAMIGEETSNGIYTGACHVLACVWLAHPELDLQKILDQGAASDARKDVMEEVGDLGESILPLFEE

SEQ ID NO: 134544 - protein, 85 aa, Oryza sativa
  Clone ID: PAT_MRT4530_36307C.1.pep
TFSICWVNKQYISNATTKLIPSTGQTFDPIPALFSTSSPGVWPIHIQFQLAKYTKVNAGLFTRASNMAIVYHPNTSFRLPRRKAG

SEQ ID NO: 134545 - protein, 121 aa, Oryza sativa
  Clone ID: PAT_MRT4530_36308C.1.pep
MSATAATPDSSASAAAAAVGGEVGKEAEDVVVQYVVLRRDLADAWPLGSVVAQGCHAAVAAVTLEVKGETQLKNLAEKLETAGVRHKVWIEQPENIPTCIATAPCPKSQVSSFFKKLKLCK

SEQ ID NO: 134546 - protein, 293 aa, Oryza sativa
  unsure (1)..(293): unsure at all Xaa locations
  Clone ID: PAT_MRT4530_36309C.1.pep
VNGVFTVKSAYNYERRNCRTALASTTSSNEGGQKEWKKLWNLKCPNKMKHFLWLLAHNSLALRMRLSRKGMEIDXCVICQRFDEDXGHLFFFKCNXVKKPWREVNMEGTRLKLSEQKSAWEVLKSIMELEYDSQLTAVLLMYTWWHEXNRIKEENTRSTQKWRNPDVEMLKINVDGAYTPQTGNGGWGYVIRDDAGSLIESGAGRITHLMDAFHYEVLALRAGIEAAARKRHDEXQLETDTFSFHHCPRSCNKVAHPLAAYGCNCSQLTEISWDGIPPKLEDFVASDSVVPVV

SEQ ID NO: 134547 - protein, 82 aa, Oryza sativa
  Clone ID: PAT_MRT4530_3630C.1.pep
EKRLMVQDISICELIFRESVKEYKKTSNILEFHHVNILGAYSRCHERVLCIQQKHRTHFFLSRSHYLPVDVQIFTLSNKRIK

SEQ ID NO: 134548 - protein, 190 aa, Oryza sativa
  unsure (1)..(190): unsure at all Xaa locations
  Clone ID: PAT_MRT4530_36310C.1.pep
MLSLLPLRLPFSAAATHPNSTFLLQRAVRLPILPISPRASMSATAATPDSSASAAAAAVGGEVGKEAEDVVVQYVVLRRDLADAWPLGSVVAXGCHAAVAAVWAHRDHPDTAAYCGPDNLDRMHKVTLEGEGETXLENLAEKLETRCCPHKVWIEQPENIPTCIATAAVPKVQVSSIFKKAQALVNEALF

SEQ ID NO: 134549 - protein, 242 aa, Oryza sativa
  Clone ID: PAT_MRT4530_36311C.1.pep
GRCERRRLELKQPGLSTNNIVDMQYQHDGVGSAVVGHDVDGALKVDRGHRRRLRRATHPDAAVSRERRAGRTPAPAPTPPPDLTSPPGKGEKGVEGSGRRLRCRREGKEKRGGVHATSRARAADNEGEDGAAPVGLRRSVASAYGGHPPPSRRLLQSPDPTAALDLAAGVATAPDREGRAAAATSLPPPDRAAARPPSKPPPPSTSAGFGRREGSRRWIHPSRSHSLEPLPPQAFGRIRAER

SEQ ID NO: 134550 - protein, 109 aa, Oryza sativa
  Clone ID: PAT_MRT4530_36312C.1.pep
EAPAPLPQAAQLGYEPNVFSFATCLQLRLIDYCKNEHMTYSTSHTANMQVHKDTKGWHNIGSFAKAAFNKTFKRRKRSPPERRKLKRKNKNQQNKLGDPLESTCRHASL

SEQ ID NO: 134551 - protein, 624 aa, Oryza sativa
  unsure (1)..(624): unsure at all Xaa locations
  Clone ID: PAT_MRT4530_36313C.1.pep
MATATASRLAVPAPRTSPHAPGRRRPAAPLPSAPPRPRALSAAPRGRVVCPAAPASSPASTTDAGQDRLQKVPVSNIRNFSIIAHIDHGKSTLADKLLELTGTVQKREMKQQFLDNMDLERERGITIKLQAARMRYIMNDEPYCLNLIDTPGHVDFSYEVSRSLAACEGALLVVDASQGVEAQTLANVYLALENDLEIIPVLNKIDLPGAEPDRVAQEIEEIIGMDCSNAIRCSAKEGIGITEILDAIVTKIPPPQNTAISPLRALIFDSYYDPYRGVIVYFRVVDGSIKKGDKICFMASGXDEIGVLSPNQMQVSELYAGEVXELREALEKLQLNDAALKAVTRFSMQFEPESSSAMGFGFRCGFLGLLHMEIVQERLEREYNLNLIITAPSVVYHVNLADGETVECSNPSLLPEPGKRRSIEEPYVKIDMLTPKEYIGPIMELGQERRGEFKEMNFITENRASVVYELPLAEMVGDFFDQLKSRSKGYASMEYSLIGYRESNLVKLDIQINGDPVEALSTIVHRDKAYSVGRALTQKLKELIPRQMFRVPIQACIGAKVIASEALSAIRKDVLSKCYGGDISRKKKLLKKQAEGKKRMKAIGRVDVPQEAFMAVLKLEKEVL

SEQ ID NO: 134552 - protein, 54 aa, Oryza sativa
  unsure (1)..(54): unsure at all Xaa locations
  Clone ID: PAT_MRT4530_36314C.1.pep
RIWLDKGXHDXSPVTNQTLANCDTIPNIXLRSAIQEYLKQNNMNKSFALYEQQH

SEQ ID NO: 134553 - protein, 164 aa, Oryza sativa
  Clone ID: PAT_MRT4530_36315C.1.pep
LCDLLKSTFESPNFFQKVDEIQKSLYQNDAVEQDPSWDIVKAVDLWEDDDLGDGYVLVKNDDATEGMAFFIATYISSLKTANECSPDQIRKVLKLLIILLPALKKTFSSRKRKGKLRKAWNGTKVIYNVDSWSATAIGIYHNQAILKVATTAFRTSCSVISKFL

SEQ ID NO: 134554 - protein, 87 aa, Oryza sativa
  Clone ID: PAT_MRT4530_36316C.1.pep
AKELTVVNRPPAHRPGHCNLRYGLVIRRIFFGKGYMAVACFWWDESFVFLAPGFWLRIVPHKLFGLLIIVSPPLQMWDEKASVSPTV

SEQ ID NO: 134555 - protein, 200 aa, Oryza sativa
  Clone ID: PAT_MRT4530_36317C.1.pep
MGEIRALHNMDDDEVFAYANRIAAPYDLVMQTKQLGRLPVVQFATGNVATPADAALMMQPGCDGVFVSSGIFKSGDPARRAHAIVQAVTHCRSSRPSTPPPRRPRWHTFAVELCPVVLFVALCNLWVIRNDVHHIDVPESPNVVMERIAFWLEEWANLNSGKSPAVHYPAKWWQTPSSGWFKVNIDGAFMASELKGSGSC

SEQ ID NO: 134556 - protein, 267 aa, Oryza sativa
  Clone ID: PAT_MRT4530_36318C.1.pep
MGEIHALRNMDDDEVFAYAKRIAAPYNLVMQTKQLGRLPVVQFAAGGVATPADAALMMQLGCDGVFVASGIFKSGDPARRARAIVQSVTHCRSSRPSTLPPRRPCWHTFAVELCPNRYMVMEAFIDTAGKDQSDPLILTQLNSTKAIRDSIQINFGECGLAACLGSLQGIYELYSSIVKYVNPITKLCVIRVSREDHQKVWAAITMVRSIGKIPVSFNLRDVSGSIRACKKAALECEEAKFEYYKLAAGDRITPKFVETMESCFNKD

SEQ ID NO: 134557 - protein, 54 aa, Oryza sativa
  unsure (1)..(54): unsure at all Xaa locations
  Clone ID: PAT_MRT4530_36319C.1.pep
TWIPFSAPLLFLWAFKTHELTKAVXLPSNRTVLLCVHTKIQHILNGTNQEDYMY

SEQ ID NO: 134558 - protein, 131 aa, Oryza sativa
  unsure (1)..(131): unsure at all Xaa locations
  Clone ID: PAT_MRT4530_3631C.1.pep
NHFFFKCSTDTVGKNHPRRPPREPRGGGAQKSPGGGPKPGAPKKPTQPSAXTQFQQTPKGPKGGGGPPDHRAEKKPRAGARGPPAKPRPRTSGETKIPKTGGRNNRGPLPEKGEHPGKGGPPAKFPQHTGG

SEQ ID NO: 134559 - protein, 216 aa, Oryza sativa
  Clone ID: PAT_MRT4530_36320C.1.pep
MGEIRTLRDMDDDEVFAYAKRIAAPYDLVMQTKQLGRLPVVLFAAGGVATPADAALMMQLGCDGIFVGSSIFKSGDHARHARTIVQAITHCRSLRPSTLPPRRPRWHTFAVELCPASENNQGNEEEEKKDEEQKDLSIAPCMLEECLIDQALTISEDEKKGSDNGATTAQEVLAWVKEKKSSVRNTWTIKEVDWGPNQDLFQVYFYLTTSLLVHRR

SEQ ID NO: 134560 - protein, 66 aa, Oryza sativa
  Clone ID: PAT_MRT4530_36321C.1.pep
GGEPRRRLRNAAVLALMLSSLIALSIIRARFSFAASDGGEALKLVADESKLVVTTNHVVVNTESGD

SEQ ID NO: 134561 - protein, 93 aa, Oryza sativa
  Clone ID: PAT_MRT4530_36322C.1.pep
MCQHRPAQTQRWRCMEELMDQTRGLSGGTATGAVSTGRAALPAARIVTADIMCKAIAPSSPQMSACPLSSRFPPTLGDARNVFLDSKESILTR

SEQ ID NO: 134562 - protein, 404 aa, Oryza sativa
  Clone ID: PAT_MRT4530_36323C.1.pep
MLCANQLLSVESSTRHRHHGAQGPPRALTCASAAQPHAPALLPDALRCSLATRNFHELFHALLLFLNLSCQLRHGLAMRRVPFPRRGEDGVHLLSQTPSSPAAWALSAATTGTAASRRSLSCTGKRWGKRRERGRGAEAVVDGCGGDGDERASGVAVTVAFAGHPPPRRSRARTERGGGEGGSAQVVVGDIAAAGHHPSLPASAAANGRHLSLPVSVAVAPHPCCQSPRRGLQVRGREVERVVQIVTDRYMVMEVFIDTPVKGQPDPLILTQINITKAIKDSIQLNFGECGLAACLGSLQGVYELCSSAVKYVNPITKLCVIRVSREDHQKVWAAITMVRNIGKIPVSFNLRDMSGSIRACKKAALECEEAKFEYYKLAAGDRITPKFVETMESCFAKIKGLES

SEQ ID NO: 134563 - protein, 55 aa, Oryza sativa
  Clone ID: PAT_MRT4530_36324C.1.pep
MPSPLLHAVIGLGGLHLAGSSPLPGRPTDTAITISQRGFGFGKGIVDAKCPSLEV

SEQ ID NO: 134564 - protein, 320 aa, Oryza sativa
  unsure (1)..(320): unsure at all Xaa locations
  Clone ID: PAT_MRT4530_36325C.1.pep
MVQEHGGSNHLQQQHQHQLAKYGGGVAGTGVARASRKNKPKKVPQRGLGVAQLEKLRIEEQKKMEGGAALSSHGALGGGDGVLGHLPPPPPPSLALSALQSRSAADGGFPAALWSPVDPIKHPYKRSLCPQPPSPMVSTGLSLTASARHPTEPPSNQMYSSSGSRSSAAAAEEERETGGVDRSWPFMFKGMAAFRTTTSRAPPLVAPFSARTTTTGELAGLADVGPDLSRYEFRATNYFSANANYSDWTSDFAHCKSSKENGRARDPAFLTLSSQPPHLLKQPHVXKQHFIIVVAAILQLPSSRSGSLRKDLERVQDRCV

SEQ ID NO: 134565 - protein, 98 aa, Oryza sativa
  unsure (1)..(98): unsure at all Xaa locations
  Clone ID: PAT_MRT4530_36326C.1.pep
SVICSANANYSDWTSDFAHCKSSKENGRARDPAFLTLSSQPPHLLKQPHVVPSYNDFSAMASQXKQHFIIVVAAILQLPSSRSGSLRKDLERVQDRCV

SEQ ID NO: 134566 - protein, 675 aa, Oryza sativa
  unsure (1)..(675): unsure at all Xaa locations
  Clone ID: PAT_MRT4530_36327C.1.pep
MEMESKYAALRRAAEEAAAVDAHAHNLVADGSAFPFLRCFSEADAADALALAPHTLSFKRSLRDIAALYNCEASLEKVEEFRRAEGLSSISSKCFKAANLSAILIDDGIDFDKMLELEAHKAFAPTVGRILRIEKLAETIINDESFSASSWTLDSFTEIFVTKLKSYPPHIAAYRSGLEIDPNISKTDAEDGLRKELSGQRPLRITNKNLIDYLFTCSLEIAVSYHLPMQIHTGFGDKDLDLRKCNPLHLRAVLEDTRFSKCQIVLLHASYPFSKEASYLASVYSQVYLDFGLAIPKLSVQGMTSSIKELLELAPIKKVMFSTDGYAFPETYYLGARRARDVVYRVLSAACEDGDLSIQEAIEAVEDIFRRNALYLYKLNVANGSVGQITAIAQSKELSGQRPLRITNKNLIDNSIYLQSXNCCIISPYEIARKKGIGLTFASMGMTSFTDGPADGTNLTGVGEIRLMPDMSTLLRLPWSRREEIVPGXLDFGLAIPKLSVQGMTSSIKELLELAPIKKXMMAGCEIEFFLRKKAVSGEKELWVPFDNTPYCSTTAIYGASSVLQEVYTSLKAAEIVVEQLHAESGKGQFEIALKYVLCTLAADKLIYAREIIKSVARKHGLLATFLPKPDLNDIGSGSHVHLSLWEFDHNVLMGPSEAKVAAGIDGLGREPYVA

SEQ ID NO: 134567 - protein, 434 aa, Oryza sativa
  unsure (1)..(434): unsure at all Xaa locations
  Clone ID: PAT_MRT4530_36328C.1.pep
RPLPLRQHPRRRHRPTQTQHHLLLPLQQRHISLDPXSLGLLLRRWRGLRRHRPGVMRDLAGVLGRRYRTCAVVGNSGVLLGSGRGPQIDAHDLVIRLNNARVAGFAADVGVKTSLSFVNSNILHICAARNAITRAACGCHPYGGEVPMAMYVCQPAHLLDALICNATATPSSPFPLLVTDARLDALCARIAKYYSLRRFVSATGEPAANWTRRHDERYFHYSSGMQAVVMALGVCDEVSLFGFGKSPGAKHHYHTNQKKELDLHDYEAEYDFYGDLQARPAAVPFLDDAHGFTVPPVWLRSDKFTHAVPLSQVDLARARKKEMQNHQLPAGSLDHNSQKWGARIYRRHEISLYENATPDASFSWLCHDDDLCAAHCNARRTHTSSHTDGVQCCYKVNMSDQTKNPNLESKIILPVVGPAASIPCPSIRSEIQMK

SEQ ID NO: 134568 - protein, 181 aa, Oryza sativa
  unsure (1)..(181): unsure at all Xaa locations
  Clone ID: PAT_MRT4530_36329C.1.pep
EVDLGAFTNCSSNLGTXLKPSRTVLRLFIDSDMSLTDDETLILMKALHKLFFGPSRIDDDASFDGKLMMMVNSDELLMTKTSSDVKLMDKEDVLLLSLLEPNWRTTGGLTRGHHELDDGCKPAITGSDAAEQAQASAHAGRAGAVRRRTCVEDGFDQQRESDMATAIFHGWCGCGFGEKGK

SEQ ID NO: 134569 - protein, 83 aa, Oryza sativa
  Clone ID: PAT_MRT4530_3632C.1.pep
MAPMTRSQRGKDTQPEGQSLGKQQQQQMKDGGDDQRASVAKTDSISATERLQRASSTRGGELVAAAAKSRRQMVLQQLGAAES

SEQ ID NO: 134570 - protein, 627 aa, Oryza sativa
  Clone ID: PAT_MRT4530_36330C.1.pep
MDLDKSTSTSASLKKLQEDGALPGRGTAEREVGGTEPQPVLGRMVAIEDFILCGFLPPPSEFLLLVLNFYGVFLLHLNPNSIAFLSIFSHLCEAYIGVEPFLDLFRFYYELRWMEPKKVSGCVGFRLWDGLKSRYIPFQCPSSRSKWRGRWFYLQIEDSDPVFVVPEEQPNKIPSWATKPALTPSLQSFIDIVDDLREQGLSGYEVAADFIGRRIQPLQARDHPAFDYSGPEDATRALPLTDIIEPLVDHLVAASLKEKVAKEASDAAAAAAITSGGNVPKKGRTFSSVVRHRRKTSTPSPVSVAALRRAARPKAAQDGSRGTSNASPVVVAPRSREATPNGLASDLAAGRGLPAAVLTWEELQVEMGCLLEAGARGIGHEITEVKAAAASSANERADRLARDLAEVREDLHKMRELVAGNERQRQGLKHRMSELENHLSEIRGSLQCGVKATIPTNPNEFSLSSSLAELATAMEVIPSKHAAMVGEETSNGIYTGACHVLACVRLAHPELDLRKILDQGAASDARKDVMEEYFDLEYFVVICRDVDVEDVQQRGQPELPVVVPLLASEPHVPEGDVAQNSPVEMSMATAPLDLESALADQDRRIQYWRTKFEVAELERTMLEVRKD

SEQ ID NO: 134571 - protein, 102 aa, Oryza sativa
  unsure (1)..(102): unsure at all Xaa locations
  Clone ID: PAT_MRT4530_36331C.1.pep
QIWVGRKRPNRKTETKTXKSRPRNLVINSALGSEKPNFVRSIRLVSSDNKDRKTEDRDRNFRLDRMPTPSSPFYSVRLSSIAHIHININESKHTHMSRFINI

SEQ ID NO: 134572 - protein, 753 aa, Oryza sativa
  Clone ID: PAT_MRT4530_36332C.1.pep
MDLDKSTSTSVSLKKLQEDGALPSRGTAEREVGGTEPQPVLGRMVAVEDFILCGFLPPPSEFLLLVLNFYGLSLLHLNPNSIAFLSIFHLCEAYIGVEPFLDLFRFYYELRWMESKKVSGCVGFRLRDGLKSRYIPFQCPSSRSKWRGRWFYLQVEDSDPAFVVPEEQPDKVPSWTTKPALTPSLQSFIDIVDDLRERGLSGYEVAADFIGRRIQPLQARALPAFDYYGPEDATRVSPRGLNSATVERRVSQLMISGPTTASNVPVPLCEKGAAERDAAINALPLTDIIGPLVDHQVAASLKEKVAKEASDTAAAAATTSGSDVPKKGRKFSSVVGHCRKTPTPSASDASPPPPRWQRLVTLSENLSQGGAGEGSARWVWGTSNASPAVASTDVVVVPRSHEATDVWGILWLIVLQVEMGRLLEAGARGVSHEIAEARAAAASSANKHADRLARDLAEVREDLQKMRELVAGNERQRQGLEHRMSELENNLSEIHGSLRVTYTGLHQLAGECGIKSTIPANPDEFSLTSSLAELVTVMEEIPSKHAARIGEETSNGIYTGVCHVLACVRLAHPELDLWKILDQGAVSDARKDVMEEDRRIQYWRTKFEVAELERTMLEVRKDQAVETLRGREVWFNSYLKSCCTSMSRVCRELRIPRGDPEESAAGYISWLNGAYAQLEGIGQHIDEALKQECRRSSRYAGGHVLACIRDHRSQLHLEFLREGFSRSQRTPTEIDGLAKSMAPLAEKVFQSMD

SEQ ID NO: 134573 - protein, 33 aa, Oryza sativa
  Clone ID: PAT_MRT4530_36333C.1.pep
MVSLSLPAVLLTFATAQESRGVPAKRPAPDYFL

SEQ ID NO: 134574 - protein, 134 aa, Oryza sativa
  unsure (1)..(134): unsure at all Xaa locations
  Clone ID: PAT_MRT4530_36334C.1.pep
MSKVHHRSLNLYRCVIPVPKLANRSFRYLNLFDCVISVPKLADHSLRSSNLFSCVTPVPKXGWSKNFXQNFRDRGDTTEQVGXPKRVIYKFRDRDDTVEQVKFVFKIHTNLNVGPSLEQNKYTTIPFAFSSLSP

SEQ ID NO: 134575 - protein, 59 aa, Oryza sativa
  Clone ID: PAT_MRT4530_36335C.1.pep
LKSFIFKKKGVHRNQDNPDSTFLRVTYIRAIEMIIRFYITIYRLETTAIFKGDTISVHI

SEQ ID NO: 134576 - protein, 103 aa, Oryza sativa
  unsure (1)..(103): unsure at all Xaa locations
  Clone ID: PAT_MRT4530_36336C.1.pep
XVKIMFDTKYLVSYVHGSVNCNIVWFSILXSCQQLGPHHPCNKPQANMCHHPFFHAITPCXIWRHRFPSKXRQTQHNKQQQAQAGARQFSPTPAPXPTKVLQN

SEQ ID NO: 134577 - protein, 117 aa, Oryza sativa
  Clone ID: PAT_MRT4530_36337C.1.pep
MGYFDPGSWAPPPLGSAPNGSSSNSVKLLVALAEKASAALVKAAAVVPSPAGGRRRRGAVAPLVFPLLDEGEMVVAAEAAPKPAVVWKRQVACRGGRASKRPARRSRRRHGLPDRPL

SEQ ID NO: 134578 - protein, 126 aa, Oryza sativa
  Clone ID: PAT_MRT4530_36338C.1.pep
IPRAEAALLSVSRSRWRRGAAALGGARAAEGRSVTWRPHARRPPLPSSPSSSSSTLLSPGFKEDETATSSSHPTQVPNRGRHRRLPTSSSSPPHARACGADRGRRRDFRVRVEIGHTRSLSPSLGL

SEQ ID NO: 134579 - protein, 112 aa, Oryza sativa
  unsure (1)..(112): unsure at all Xaa locations
  Clone ID: PAT_MRT4530_36339C.1.pep
SVDRSRVERRGADASAVRSSDPMLSSFTSAALRCARAALGEGTREGYARRLVGDSGARGGGRRSGYERRRSSRRARRCRGXRPRDGTTGLNFARPTXPRRHSPSTXGXGPRV

SEQ ID NO: 134580 - protein, 327 aa, Oryza sativa
  unsure (1)..(327): unsure at all Xaa locations
  Clone ID: PAT_MRT4530_3633C.1.pep
MGSKSSKDTDDDHEPKQQEKKLPEHLEVQRTRVVCKADAPVNTEGFQYAGAYSAMGIDNSVSAEKFCKNFKVEISRLTENDMEFDMIGNDTSIVNAFRGILIKEFPTIXSEKVLMVDNTRVLADKVLLHRSIWIQIERRTRPFKYRXKNDLRNESYTNMXKLHVSCRKGPRRLTALAXIVFCGMWKSVCYRINFSHSFLCTVKSGDLEWLPEGSRLPLASPAQSRYKQKTYTSFSQSQKDILEKPLGVKFKDITIARLGPGQVVFRKEIKGDNAEKLVKKCPVNVFDIEDLGNVTIESTGGLPPEALFTEAVRILEEKCERVISGLS

SEQ ID NO: 134581 - protein, 272 aa, Oryza sativa
  unsure (1)..(272): unsure at all Xaa locations
  Clone ID: PAT_MRT4530_36340C.1.pep
MGSLPLDALQPLDPDTFAADSSAVVDFLAGYYRDVDKYPVRAADLEPGRLRRLLPEAAPEFGEPAERTSLTPSFFAYFPMNASAAGFAGEMLSVGLNVVPFMWVASPAAVELEAVVVDWMARLGSTCEAVVCTLAAARDRALGRIGHEGIVKLGVYASDQTHATFQKGARLVGITPANFRVVPTAAASGYALTGAAVRAAVEGDMARGLVPLYLCATVGTTGIGAVDPVRELGEVARRHGMWLHVDATYAGSAAICPEXQGYLDGAELADSV

SEQ ID NO: 134582 - protein, 121 aa, Oryza sativa
  unsure (1)..(121): unsure at all Xaa locations
  Clone ID: PAT_MRT4530_36341C.1.pep
MAPASAPAHPQHTIDPAQQQPIQQTPPRQQVVQPIQQTPPIQQVVQPIQQTPPIQXVVQPVQQTPPRRQVLQPIQQTPLRQQVVQPIQQQSPMNALAGFATPGGQPPKLPGGNLNYQYQPP

SEQ ID NO: 134583 - protein, 515 aa, Oryza sativa
  Clone ID: PAT_MRT4530_36342C.1.pep
MGSLPLDALQPLDPDTFAADSSAVVDFLAGYYRDVDKYPVRAADLEPGRLRRLLPEAAPEFGEPAERILADVRRDVLPGLTHWQSPSFFAYFPMNASAAGFAGEMLSVGLNVVPFMWVASPAAVELEAVVVDWMARLVGLPDRFLFSGSGGGGGGGGGGVLQGSTCEAVVCTLAAARDRALGRIGHEGIVKLVVYASDQTHATFQKGARLVGITPANFRVVPTAAASGYALTGAAVRAAVEGDVARGLVPLYLCATVGTTGIGAVDPVRELGEVARRHGMWLHVDAAYAGSAAICPEYQGYLDGAELADSVSMNPHKWFLTNMDCCCLWVASPAALTAALSTDPEYLKNAGGGKPQAAAGAGAIDYKDWQISLSRRFRAMKLWFVLRRYGAAGMRAHIRRHVAMAEWFERAVSADERFEVVAKRRFSLVCFRLRGGGGGGDAMNRELLAAVNASGRAFMTHFVVEGKFVIRLAVGGAMTEMRHVGDAWELVQRTAEQLLQRRGTRKNEDENPLPW

SEQ ID NO: 134584 - protein, 489 aa, Oryza sativa
  Clone ID: PAT_MRT4530_36343C.1.pep
MALTSQSLFFSPLAAGPSRRVRGRGRSTSVSAAASASSHNSQPHGHPQQPLAVASSSSKSESKGSKTFALASAITAAASGAFLLASSGGGFGGGAGGPLGGGGGGWGAGGGGGGGGGGGGGGFWSRIFSGGAAHADEKSSGDWDPHGLPANINVPMTKLSGLKRYKISELKFFDRAAGGGGAFTGPEDSFFEMVTLQPGGVYTKSQLLKELETLVSCGMFERVDLEGKAKPDGTLGLTVSFVESVWSAAKQFKCINVGLMSQSGQVDFDQDMTEREKMDYLRKQERDYQQRVRGAKPCILPDNVRGEVLGMMKKQEKVSARLLQRIRDHVQKWYHNEGFVCAQVVNFGNLNTSEVVCEVVEGDITKVEYQFQDKLGNFVEGNTQIPIIDRELPQQLRPGHIFNIGAGKQALKNINSLALFSNIEVNPRPDETKEGGIVVEIKLKELEPKSAEASIQPGGTVSFEHRNIYGLNRSIVGSVTSSNLLNPQV

SEQ ID NO: 134585 - protein, 180 aa, Oryza sativa
  unsure (1)..(180): unsure at all Xaa locations
  Clone ID: PAT_MRT4530_36344C.1.pep
CRPPLCLLREPAAPAAASPPTRSGGWEGSSPPASPLSPPXHRARRFPSSSNSARCRSRIQPPRPPPTLDLDTPPATDPVGPSYRRLCLPLMPPXPVAAASPPAESGGGEGAXPLPPPPASRRPPLPEGREKRARQRRGEEAGRRERESETLSPRRGGARRLGSSLAWLGSIWLDFWGVSF

SEQ ID NO: 134586 - protein, 299 aa, Oryza sativa
  unsure (1)..(299): unsure at all Xaa locations
  Clone ID: PAT_MRT4530_36345C.1.pep
MPSDCGDDDHGGGSAPAGFELQEDPSFWKDTNVQVVIRVRPLSSGEISVQGQKRCVRQDSCQSITWTGHPESRFKFDLVADEYVTQENLFKVAGVPMVDNCMAGYNSCMFAYGQEKEIRKEEKLRFTCKCSFLEIYNEQILDLLNPNSVNLQIREDAKKGVHVENLTEHEVSNAREAMQQLVEGAANRKVAATNMNRASSRSHSVFTCLIESKWESQGINHHRFSRLNLVDLAGSERQKSSGAEGERLKEATNINKSLSTLGFVDXNLIAVSNKKSHHVPYRDSKLTFLLQDSLGGNSK

SEQ ID NO: 134587 - protein, 97 aa, Oryza sativa
  unsure (1)..(97): unsure at all Xaa locations
  Clone ID: PAT_MRT4530_36346C.1.pep
SNQLDYDLVGTNVPQYPLYPVYGYHPSTVARQVGGLDTQGXTTPISTGPPMTGNENTVATNQGDSMSKNPPVKTENGSSTTSKLGKDSDTAKPCPSD

SEQ ID NO: 134588 - protein, 56 aa, Oryza sativa
  Clone ID: PAT_MRT4530_36347C.1.pep
MSDLVEKNGENGNQDGASSKGTSPPKAAIIPFDYKNLSIPSPNIVSVLTGRDPQFD

SEQ ID NO: 134589 - protein, 87 aa, Oryza sativa
  Clone ID: PAT_MRT4530_36348C.1.pep
GRAGVPFNRTPATMPVGKTTLSHLRMRIHSYASTRSYATAKLDYDVNERIPGDEGHLAEPDDCPRVRGYLYFTSALWGRMTYLMCAG

SEQ ID NO: 134590 - protein, 61 aa, Oryza sativa
  Clone ID: PAT_MRT4530_36349C.1.pep
LISVMLTCPSSILWDIKLCSHACYGVPLGSTEASPSTQCADHPGACRFSHAHRPLKAVQLR

SEQ ID NO: 134591 - protein, 136 aa, Oryza sativa
  Clone ID: PAT_MRT4530_3634C.1.pep
YCQEHYKIAFYKIVLDKPTHLPSFNKGVKWAEEVFILGRDGSSHLRISHGRVQYLNAHVNERHHYMYIHGVDAASEYYNGGPVIDFRGDVVGMYNLSTRGSFIPSNILLKCLQLWEEVSLHPSTTSSVEALGHQIS

SEQ ID NO: 134592 - protein, 49 aa, Oryza sativa
  Clone ID: PAT_MRT4530_36350C.1.pep
FFFFLVEWLCLIRIYKYMQTCRVIIKMLYVCFKPSAPQPVSLPNSSPTD

SEQ ID NO: 134593 - protein, 83 aa, Oryza sativa
  Clone ID: PAT_MRT4530_36351C.1.pep
PLQDLYSTASFLISDNPPSARDHGGATSALKEEESGDLFQRRSRGRQAMSMAVRGTEAKEDKGGDGMEVSGRGISDTGKAKGE

SEQ ID NO: 134594 - protein, 44 aa, Oryza sativa
  Clone ID: PAT_MRT4530_36352C.1.pep
SIHSEHLHEESLTKKEKLTQGVSLEHKRHQISSYSLLPFYSMRV

SEQ ID NO: 134595 - protein, 413 aa, Oryza sativa
  Clone ID: PAT_MRT4530_36353C.1.pep
MASDDLFEGLPPPAAAAAPAAGGERAPSPSPPPPPRLPALKSALKRDKLSSSDAAASSPAAAAATDAAAEGRAPEKRLRFRTTVDASETQVIDAMHKITSHIRNPSKFSKASKLALQLIEAGSVKPGTISHFFAILEAAMSSPGACNEPSVRADYQALFNAAQGVTECFNQQQKNQFDIWVLHAVVANDLFTDDSFVFSKAVGKIKDAISALPITTVDDDNDEAAALAAVESNNTDDNPQAAASNSLPDDSTHAAASNSSEESSDPFGLDGLLEHKSKKSEKAREKTVAALNRKADEDESKRFLKSQREALLKCLEIAARRYRIPWTQTAIDIFAKHAYDNMNRFTTQQRDAITKLWNSIKEQQIRRKQGKSVSGKLDVNAFEYLQEKYSHEKISIRHAVGGGGERRATQWLG

SEQ ID NO: 134596 - protein, 275 aa, Oryza sativa
  Clone ID: PAT_MRT4530_36354C.1.pep
MGSGEDTGAGVAGGGGGGGAGGVVRGAVLKALVVVGGVLLLRRLRRSTTRWDHARAVVDALSGEKFSREQARKDPDNYFNLRMLTCPATEMVDGSRVLYFEQAFWRSPEKPFRQRFYMVKPCPKDMKCDVELSSYAIRDVEEYKNFCDRPKDQRPQPEEVIADIAEHLTTIHLSRCERGKRCLYKGSTPPEGFPNSWSGATYCTSDLSIHKNGEVHIWDKGFDDDGNQVWGTKAGPYEFKPAPKSNYDDMFSPLNFSAPLTLEKKIESSFAIDDQ

SEQ ID NO: 134597 - protein, 76 aa, Oryza sativa
  Clone ID: PAT_MRT4530_36355C.1.pep
QLKKSNKILIYCIIYFRIKGNLISQLPCKAEICCSWSTWLFIHIPNLLHHDVVATEMKEPARLLNLLIRKYSIVYR

SEQ ID NO: 134598 - protein, 231 aa, Oryza sativa
  Clone ID: PAT_MRT4530_36356C.1.pep
MGGTHINHPPPLSLSLPFGEPRACDDGGGGQEPAATGESRRRRRLWARAAAADRRWTEGDRGGLGPFHPGDEVPTISLPIRLAVAVAAGPAPARRRRWPPHLPLSPALGRPPADGCRPVPTARRWPPHLPPSPSPPSLQLPPGARPMVPSSAPSVIHGAAERTEPILTSTGTAPSLGDKLPHGAAAIPDRRPPPPLLTTTGRRRRYSRPPDAAAATPDRRTPPPSPLPLRW

SEQ ID NO: 134599 - protein, 69 aa, Oryza sativa
  Clone ID: PAT_MRT4530_36357C.1.pep
MQALHLWDRLEAIQLQPDSRDSFVWKLSADGNYYSSSAYSMFFMGKTKVVWAQLRLRLRLQPQTPNIPR

SEQ ID NO: 134600 - protein, 141 aa, Oryza sativa
  unsure (1)..(141): unsure at all Xaa locations
  Clone ID: PAT_MRT4530_36358C.1.pep
LLCAVRDKIPGPGSCCAGSGASVGEGKAAKAKGFPVYNAEGARRALAGCGAARKGDTDXSSWHHVEDMLRRAVYNAYTLLLGSPAFLSVLESLFLLRSPDRSPRRVLLLRTCMSETDIIYRSCASAAVAFKQIMSMPVPFF

SEQ ID NO: 134601 - protein, 36 aa, Oryza sativa
  Clone ID: PAT_MRT4530_36359C.1.pep
FCFPELIYDFSVMFLLRRALFKEVHVPLLFQKKFFP

SEQ ID NO: 134602 - protein, 317 aa, Oryza sativa
  Clone ID: PAT_MRT4530_3635C.1.pep
MGDVAKDLTAGTVGGAAQLVVGHPFDTIKVKLQSQPTPPPGQPPKFAGAMDAVKQTLAAEGPRGLYKGMGAPLATVAAFNALLFTVRGQMEAVLRSEPGAPLTVSQQVVAGAGAGVAVSFLACPTELIKCRLQAQSALASAAPAAAAAAASPVGGGAATATATSVAAVKYGGPVDVAKQVLRSEGGVGGLFKGLGPTLAREVPGNALMFGVYEAIKQYLAGGQDTSSLGRGSLVVAGGLAGASFWGSVYPTDVVKSVIQVDDYKNPKYSGSMDAFRKILAADGVKGLYKGFGPAMARSVPANAACFLAYEVTRSALG

SEQ ID NO: 134603 - protein, 85 aa, Oryza sativa
  Clone ID: PAT_MRT4530_36360C.1.pep
RTLLCHVCYTVRVSEFACSCVRRYPYGALCISVIVALYVSVLSGVCVHTISLLMSDACTCIVFCSLSTIYVYDPEDYSVSQCRLS

SEQ ID NO: 134604 - protein, 50 aa, Oryza sativa
  Clone ID: PAT_MRT4530_36361C.1.pep
HASAHASAHASAILSLKKKKKKKKKKKKKKKKKKKKKKKKKKKKKKGGPF

SEQ ID NO: 134605 - protein, 333 aa, Oryza sativa
  Clone ID: PAT_MRT4530_36362C.1.pep
MADASSRTDTSTVLDTDDKNQMVDGQSGAIVPSNSSDRSDRSDKPMDQKVLRRLAQNREAARKSRLRKKAYVQQLESSKLKLASLEQEINKARQQGIYISSSGDQTHAMSGNGAMTFDLEYARWLEEQNKQINELRTAVNAHASDSDLRLIVDGIMAHYDEIFRLKGVAAKADVFHILSGMWKTPAERCFLWLGGFRSSELLKLLVNQLEPLTEQQLLGLSNLQQSSQQAEDALSQGMEALQQSLAGTLAGSLGPSGSSGNVANYMGQMAMAMGKLGTLENFLRQADNLRQQTLHQMQRILTIRQAARALLAIHDYFSRLRALSSLWLARPRE

SEQ ID NO: 134606 - protein, 154 aa, Oryza sativa
  Clone ID: PAT_MRT4530_36363C.1.pep
MAHTSYTKLGEAKTQVGLYDPLQLPEWFEVGPLAAYYKLPLNRVLVAFDGTDLPCGILRLQPKGGFGRHNGSVDFVTMCFNEVICHSKGIGCPPGQMDPKAFVLQKFNKTSLERIHMTNSLKPWLYPAYVKTLKIDSAIEEGVEILKLVVTKGL

SEQ ID NO: 134607 - protein, 300 aa, Oryza sativa
  Clone ID: PAT_MRT4530_36364C.1.pep
MADASSRTDTSTVLDTDDKNQMAHHFDINFVKNLIVKVDGQSGAIVPSNSSDRSDRSDKPMDQKVLRRLAQNREAARKSRLRKKAYVQQLESSKLKLASLEQEINKARQQGIYISSSGDQTHAMSGNGAMTFDLEYARWLEEQNKQINELRTAVNAHASDSDLRLIVDGIMAHYDEIFRLKGVAAKADVFHILSGMWKTPAERCFLWLGGFRSSELLKLLVNQLEPLTEQQLLGLSNLQQSSQQAEDALSQGMEALQQSLADTLAGSLGPSGSSGNVANYMGQMAMAMGKLGTLENFLRQ

SEQ ID NO: 134608 - protein, 57 aa, Oryza sativa
  Clone ID: PAT_MRT4530_36365C.1.pep
TNTSAIRGRRRRRRRRRRGDREMESAMCGLETPMMTALHHLLDIPDGEGRANGMQGA

SEQ ID NO: 134609 - protein, 151 aa, Oryza sativa
  Clone ID: PAT_MRT4530_36366C.1.pep
AFPRREEIDDDGEQGVLVAPGRPDLVPLAQGRGRRRLLRGRAVAAAAAHLGARRRRRRRHRLAAAGGEAGHHRGGRSLQHDDARSRYRLSGRPVCCCCFFFFFFSVVVIVSSGGHGLPFRRRRRTWPWRSVADKVNFESRGVAWVCVAGRG

SEQ ID NO: 134610 - protein, 77 aa, Oryza sativa
  unsure (1)..(77): unsure at all Xaa locations
  Clone ID: PAT_MRT4530_36367C.1.pep
MRIQHCSTRRALYDIWICXCRLKVGREHRRGFDTIVTLGAWSIWKERDNRVFNNCSRPWSEVIVGMAQEAALWYLAH

SEQ ID NO: 134611 - protein, 118 aa, Oryza sativa
  unsure (1)..(118): unsure at all Xaa locations
  Clone ID: PAT_MRT4530_36368C.1.pep
VARCSCSLPPGQCVALLLLSAAARVGVAAPLALRQQRPVVLPGGQLRTGSGAGAASAWAARPLRPELAAVSRPADPARGRAPLTRPRAWMASNXNASSASTWGTIAELPFYTNMVDAP

SEQ ID NO: 134612 - protein, 165 aa, Oryza sativa
  Clone ID: PAT_MRT4530_36369C.1.pep
KDELFHPHRAPPRASSPVAVAPASLHDLLAGFLSLHNHCSHRCRPPPRWEASRPAVFAVVDLICAGELGSHRFRRCPRHGLRRAAPPPPGSGELVTVLAGSGYARVPPQPPHRLPLSPPPLQPSLLTTSTRLRPRPPPRPSSATAAPPPRPPHERERERERRMTT

SEQ ID NO: 134613 - protein, 968 aa, Oryza sativa
  Clone ID: PAT_MRT4530_3636C.1.pep
MPCSPPSYLFIIVTGVLLVLVHSQTSLGNPLKMAGKNQITIICPQKITGAKSCYDQYFGKFLVVTDFVTRKQIKVDQRNNLGKQRLFSNGTYFHISVDEDFISIDCGLPSGFSYVDEKTNITYISDDQYIDTGENHNISSQLQGAEQFRSGLNLRSFPTGGRNCYTLYPAIKGQKYLIRGMFMHGNYDNKGQDLVSSPVTFDIRIGLNFWNRLNIINATMTYTSEAIVVAIVNSVSVCLVDNGEGTPFISSLEMRPMKSSNYPAATPNHPLLLQDRRSMGASRIIRYPDDPYDRVWWLPQITSGLIKISTRSLISRYTDDVYEVPVAVLKTAATTSSTSTALNFLWAAPTGWDATPGYLIGLHFTDFQQGQLREFDIYYNNDLWNYDNKKTKPPYLLANYINGTTPYTSDNYLYNISLVATNASVLPPMLNAIEIYYQVQQDEKMTYSEDVEAMMTVKIDYQVKKNWMGDPCLPEKYTWSGLKCRSQGVTSRIISLNLSNNDLTGSLPESLTNLPNIHVLDLSGNQLNGTFPEALCKNRALTLRYDTANGDPCSPRSSKKKHKAVLAVAVVVPVVIVVILISAMLMLLFWKKQAIVKSRGQEQYGDHIHIPENREFTYEELVKITNNFSVFIGEGGFGPVFHGQLKDGTQLAVKMRSPTSMSGKGMPEFLAEVESLTTVHHRYLVLLVGYCTDQDHLGLVYEYMPNGSLYDHLRGKNAIIQRLSWQHRAKIAHEAAQGLDYLHTGCVLPIVHRDVKSHNILLGCDLTAKISDFGLSKSYLNVAQSHITATAAGTLGYIDPEYCLSGRLTISSDVFSFGVVLLEIVTGEPPIIPTNGHIVQRIKEKVNMGNIEAIADPRLHGEFDISSIWKVVDIALLCTKEASSERPTMSMVVAQLKDALALEEARLSYSTSDISQGGANAELSINSMPTASLSNLEEYAKKSLLPAVALFALCLHGVSDKSGDIAST

SEQ ID NO: 134614 - protein, 91 aa, Oryza sativa
  Clone ID: PAT_MRT4530_36370C.1.pep
MGAGMSSGRRPSFYGGGGGGGVGRPRGMLPLLALQVLLNGGRAGASRPPVTAALLAANALLYLRPGSLDALLPSLNRGGLNAGLVVDCWDL

SEQ ID NO: 134615 - protein, 150 aa, Oryza sativa
  unsure (1)..(150): unsure at all Xaa locations
  Clone ID: PAT_MRT4530_36371C.1.pep
LMSVGNPTKVSDLGSVAGLGTDTFKVLQIKXIPNSMHRLESKLYITFNPKTQEQPSTQEYQTLKKSNTKNTHNIKNGLKSGRALLLSQPPPLLPLLVAGTASPPTGSVGGEVPLLPPPPLLSDLTEGRASSLLQVPLPLPTAVAAASPPA

SEQ ID NO: 134616 - protein, 153 aa, Oryza sativa
  Clone ID: PAT_MRT4530_36372C.1.pep
MATCTLATSCVSLSNARTQASKVAAVKSPASLSFFSQGMQFPSLKASSKKLDVSAMATYKVKLITPEGQEHEFEAPDDTYILDAAETAGVELPYSCRAGACSTCAGKIEAGSVDQSDGSFLDDAQQEEGYVLTCVSYPKSDCVIHTHKEGDLY

SEQ ID NO: 134617 - protein, 31 aa, Oryza sativa
  unsure (1)..(31): unsure at all Xaa locations
  Clone ID: PAT_MRT4530_36373C.1.pep
VSSILISKFNENEITXXIYQKRKRNILRYQY

SEQ ID NO: 134618 - protein, 68 aa, Oryza sativa
  Clone ID: PAT_MRT4530_36374C.1.pep
ITYTTHIYVACGTHVSHRGEHARVWGLQPPRDNISRDTRGIPVQGAYPTSFPPIYSEKVCVYSKHAWG

SEQ ID NO: 134619 - protein, 200 aa, Oryza sativa
  Clone ID: PAT_MRT4530_36375C.1.pep
RAWRCCATSKPRAPSPAASSWRAPAPSPAPRSAPRAATGAARAASSPAPSPTRRPAPPPRSPPPPPPRRSRPAPGSPATPPPPPSSRASSEATRDQPLGGPPPSAPQPPPQPQPPRTRRRRPPWRPRRWSSIGGGEGDTRSRRRRHSYGGCATAATAARGSRVRERQPPRPSRGAHRRWRATPPPTTRPRRAAPRFSPSP

SEQ ID NO: 134620 - protein, 100 aa, Oryza sativa
  unsure (1)..(100): unsure at all Xaa locations
  Clone ID: PAT_MRT4530_36376C.1.pep
HEAPSPSLPPPPPSAASVLPSRRRHRRPRRRAPPSPPPPPPXPLPPPSPSSRETXPPPPPPPPPNPXPPTPSPRRCLRAPPHRVVVLSPRVPTPPRWWWR

SEQ ID NO: 134621 - protein, 100 aa, Oryza sativa
  Clone ID: PAT_MRT4530_36377C.1.pep
FFFLEEPTIASDNYNTTHTRIGARWMHACKQAHTTSCSSVQNLQNSVTHKQCTLTQSHCSSHIHMLAGTNGYCLLLFQTQSRSSYQATHAHASEHPHPEC

SEQ ID NO: 134622 - protein, 551 aa, Oryza sativa
  Clone ID: PAT_MRT4530_36378C.1.pep
MALLCSASARPPLAAGARGRRPARGAARVIGGGGGAEARASLVLALAAQALAASQRRAAGLAAEAVKYAFPPRRFEPRTLEEALMSVPDLETVPFRVLKREAEYEIREVESYYVAETTMPGRSGFDFNGSSQSFNVLASYLFGKGEPDGEKMDMTTPVITKKSANENKWKMSFVMPSKYGPDLPLPKDPSVTIKEVPAKIVAVAAFSGLVTDDDISQRESRLRETLQKDSQFRVKDDSVVEIAQYNPPFTLPFTRRNEIALEVIYSLYAIAEINFEKLCYLMELALDKTEELMHSSCRRKLAHVVFGYSGSTGPEHWGSLSPNFTTCSKGTYQSPINILKDDAVYNPKLEPLEMDYTAANTTIVDNVFNIALRYNDTAGTVKVDGKKYKLRQLHWHSPSEHTINGQRFAVELHMVHHSDDGNITVIAVLYRHGKPDPFLFQIKDKLAALYLEGCKAEKGEPLPVGLVDMRELKKGADRYFRYVGSLTTPPCTENVIWNIFGEIREMTKEQAAALRAPLHGSYRHNRRPTQPLNGRTVQLNYIMYPSSGMSM

SEQ ID NO: 134623 - protein, 210 aa, Oryza sativa
  Clone ID: PAT_MRT4530_36379C.1.pep
RTLEEALMSVPDLETVPFRVLKREAEYEIREVESYYVAETTMPGRSGFDFNGSSQSFNVLASYLFGKNTTSEQMEMTTPVFTRKGEPDGEKMDMTTPVITKKSANENKWKMSFVMPSKYGPDLPLPKDPSVTIKEVPAKIVAVAAFSGLVTDDDISQRESRLRETLQKDSQFRVKDDSVVEIAQYNPPFTLPFTRRNEIALEVKRLDANF

SEQ ID NO: 134624 - protein, 137 aa, Oryza sativa
  unsure (1)..(137): unsure at all Xaa locations
  Clone ID: PAT_MRT4530_3637C.1.pep
NDVAAWTSTPSPPGLQRCRCLDRQRGPATLAHFFSRSYPCRIQQFDDFGTGRYQYRAVAISRKXPRCPFSSFYPSPKTTTRSGSGPVSPSPPTAASRPTPLRXRPPRAQFLSDDSGSCVPPVVMAPGPAPLRQWWRP

SEQ ID NO: 134625 - protein, 94 aa, Oryza sativa
  Clone ID: PAT_MRT4530_36380C.1.pep
SVLGQIGATAVAVTYMIHCLPVHRLRRRRPTQVSYSSLKRRQPSPQNLISSSPPLTRRRGCPCRSVVSPSVARAGWSGRGASLRQNHRTRLHIV

SEQ ID NO: 134626 - protein, 59 aa, Oryza sativa
  Clone ID: PAT_MRT4530_36381C.1.pep
MALLPILHCREDCGTPPFSLVVALDERKRSNRQREGAAEAHGERETFVARNRCKAGKGD

SEQ ID NO: 134627 - protein, 66 aa, Oryza sativa
  unsure (1)..(66): unsure at all Xaa locations
  Clone ID: PAT_MRT4530_36382C.1.pep
RATIFVLVYXTGGVSGGHIKPASGPWAFSFGRKLSFVRTVXYVVAQCLGAIAGAGIVKGIMKRPYD

SEQ ID NO: 134628 - protein, 52 aa, Oryza sativa
  Clone ID: PAT_MRT4530_36383C.1.pep
ICKVGKLVFFSSQSFISQFEGNILKKWLEFLSGKKPQIRVSYGKAIKLECLR

SEQ ID NO: 134629 - protein, 462 aa, Oryza sativa
  unsure (1)..(462): unsure at all Xaa locations
  Clone ID: PAT_MRT4530_36384C.1.pep
FSPSLLSGSAQIPPPPPLGLSLPRPSSPLGPLLSEVYFASPAGLPLLFGRQVGPAAPPVSSSSFLWLAGCNHHGRPSRPTTPQFPPTSSTXTRARSSVGPRRPRPRSPPPLSPSITGAEPPHSPTSPAPLPPSNPPLPATFSPSGTYINDSHTSPPCSRAPPLSGELRPADSAAPPTAAPIRHHCRLRGAVPQPGLYPISPLRLWNTAASCTTSLPHRRRLQPAAAAALVVAAPRRLRRRQRCAKLYLGLCSVSPFHRRNHLSAVDPSSATAVVVSNHRSSPLRSPISLPNRSNIFLRSCRPSAAAPPWSGVVGTPFPSPPVPVAAIFSAAGHLPVVVSPSPSSVRIPTAPSPFXDALPSPVVVWPRARSRRAMAGRVSLGRARAPAAPPRGRPIGXGPIWAVHVVDAHPRPRVDLVHHAPPLCTADVRGPRVGAGLPFDDVSTAFSPPCIPLHVRIVGVAC

SEQ ID NO: 134630 - protein, 246 aa, Oryza sativa
  unsure (1)..(246): unsure at all Xaa locations
  Clone ID: PAT_MRT4530_36385C.1.pep
GSPPSPAGNGQPPFRAAVNPAADQPDTPADPTPSRPPSPGADVSKGWGGADMPDPRVSDSRRERGGWQAGPTERRLKRESGRGAAGGSAWLQSRQAKHGERRRHARSPATATGGADGDGRRREKRRRRPKTTGTKWKGLEGEGWSTASGFAGRRRRPWWXLTGARGEAGPDGGIGWGCGGRGGEREWGVGAGSAGARGSGRRGPGRQGARGGREEGGRPSGWRLGKVLTGGPHLSAPEGVRGRRPG

SEQ ID NO: 134631 - protein, 120 aa, Oryza sativa
  Clone ID: PAT_MRT4530_36386C.1.pep
MAGGGGWGYATASAGWNVVRITRTQMRFCRCRLHTREILQRHNADVAGRGGMDSWPADVLVILETQQRASASASSQQSALRKIREGGAFASRRHREFTALRSAIAFHARAFAACRFASPQ

SEQ ID NO: 134632 - protein, 1761 aa, Oryza sativa
  Clone ID: PAT_MRT4530_36387C.1.pep
MGSVSGIDDLVFPPGQTFRFGSLDFVTNNFGKISLLDSVSDQSGENRISVPFGLPNAAESYFKTISIESDSNHSGEIASSPTTPNRDDGAYPLVLMKLPDDLAAISITTASPSRRPRRKSASTPISPSFREVGVILQPLGTVSTDQLDDHYSSPTVDSRPTDIMEYDEFSSRYHDPDLDDFDGSLDDNYTPLYFGVFMADNETEEQRQARETEARREFERRRLEEEHQAQEQERLRREQQERERTAKEAEDRRQRALEAGRRARDLIGQQDVEETPVFRTPQQNAVAAITLLDTLLKENELNQSDHVVNILNQTKTMIAASVPVNSESVHTPTGSRVPHFRSHDYRHPSLSITGAGSNRRSRGHDERSIHSPPDQYRERRVERPRSPPRRRPVDLRGTIIQRRAARGHHHSPNRHDDDLDGVAAFTDDLRRVDWPAGFKPTGIEKYDGTTNPESWLTVYGLAIRAAGGDNKAMANYLPVALADSARSWLHGLPRGTIGSWAELRDHFIANFQGTFERPGTQYDLYNVIQKSGESLRDYIRRFSEQRNKISDITDDVIIAAFTKGIRHEELVGKFGRKPPRTVKLMFEKANEYAKAEDAVTASKQSGLSWKPKKDTPASGGGGSNNHKDRKRKPAELVATASHSSRQRSRVNTFDKIMNSQCPHHPNSNHVAKDCFIYKQFADQYAKSTRKNPDEEQSTSRKKDDGDTPAGFQDHRKELNHIFGGPLAYESKRKHKLTEREINAVQPDTPQYLRWSEIAIKFDRSDHPDRVVHPGRYPLVLDPVVRNVKLRRTLIDGGSALNILFAKTLDDMQIPRSELKPSNAPFHGVIPGLSATPLGQITLPVTFGTRENFRTENISFEVADFETAYHAILGRPALAKFMAVPHYTYTIRTRQEGRDQGGINQAVSSRLHQRSPSSRLAGKPGSSSEENRAMAHIRLKESDCLKTSFITPFGAYCYVTMPFGLKNAGATYQRMIQRCFSTQIGRNVEAYVDDVVVKTKQKDDLILDLEETFASIRAFRMKLNPEKCTFGVPSGKLLGFMVSHRGIQANPEKVTAILNMKPPSTQKDVQKLTGCMAALSRFVSRLGERGMPFFKLLKKTDDFQWGPEAQKAFEDFKKLLTEPPVLASPHPQEPLLLYVSATSQVVSTVLVVEREEEGHVQKVQRPIYFVSEVLSDSKTRYPQVQKLLYGILITTRKLSHYFQGVVLISPTGERLSYVLWIHFSASHNVAEYEALLHGLRIAISLGIKRLIVRGDSQLVVNQVMKEWSCLDDNMMAYRQEVRKLEDKFDGLELSHVLRHNNEAADRLANFGSKREAAPSDVFVEHLYTPTVPHKDTTQVTSTHDAAMVEVDWREPLIRFLTSQELPQDKDEAERISRRSKLYVLHEAELYKKSPSGILQRCVSLEEGRQLLQDIHSGICGNHAAARTIVGKAYRQGFFWPTAVSDADKIVRTCEGCQFFARQIHLPAQELQTIPLSWPFAVWGLDMVGPFKKAVGGYTHLFVAIDKFSKWIEAKPVVTITADNARDFFINIVHRFGVPNRIITDNGTQFTGGVFKDFCEDFGIKICYASVAHPMSNGQVERANGMILQGIKARVFDRLKPYAGKWVQQLPSVLWSLRTTPSRATGQSPFFLVYGAEAMLPSEVEFESLRFRNFREERYEEDRVDDLHRLEEVREAALIRSARYLQGLRRYHNRNVRSRAFLVGDLVLRKIQTTRDRHKLSPLWEGPFIISEVTRPGSYRLKRKDGTLVDNSWNIEHLRRFYA

SEQ ID NO: 134633 - protein, 1861 aa, Oryza sativa
  Clone ID: PAT_MRT4530_36388C.1.pep
MGSVSGIDDLVFPPGQTFRFGSLDFITNNFGKISLLDSESNQSGENRISVPFGFPNAAESYFKTISTESASNHSTEIASSPTTPDQDDGAYPPVLMKLPDDLAAVSTTTASSSRRPRRKSALTPISPSFREVGVILQPLGTVSTDQLDDYNSSPTVDSRPTDIVEYDEFSSRYNDFNDFDDFDGSLDDNYTPLYFGVFMANNETEEQRQARETEERRRLEEEHQAQEQERLRREQQDRERTAKEAEDRRQRALEAGRRARDLIGQQDAFTDDLRRVDWPAGFKPTGIEKYDGTTNPESWLTVYGLAIRAAGGDNKAMANYLPVALADSARSWLHGLPRGTIGSWAELRDHFIANFQGTFERPGTQYDLYNVIQKSGESLRDYIRRFSEQRNKISDITDDVIIAAFTKGIRHEELVGKFGRKPPRTVKLMFEKANEYAKAEDAVTASKQSGPSWKQNKGTPATGGGGCNNHKDRKRKPAELVATASHSSRQRSRVNTFDKIMNSQCPHHPNSNHVAKDCFIYKQFADQYTKTARKNSDEEQSTSRKKDDGDTPAGFQDHRKELNHIFGGPLAYESKRKQKLTEREINAVQPDTPQYLRWSEIAIKFDRSDHPDRVVHPGRYPLVLDPVVRNVKLHRTLIDGGSALNILFAKTLDDMQIPRSELKPSNAPFHGVIPGLSATPLGQITLPVTFGTRENFRTENISFEVADFETAYHAILGRPALAKFMAVPHYTYMMMKMPGPRGVLSLRSDIKQAVTCDKESCDMAQTREMASAREDIRLAAATASEGEIPATKTSKSGESEAKTKKIPLDPSDPTKTANNKDIFAWKPSDMPGIPREVIEHSLHVKEDAKPIKQRLRRFAQDRKDAIKEELTKLLAAGFIKEVLHPDWLANPVLVRKKTGQWRMCVDYTDLNKSCPKDPFGLPRIDQVVDSTAGCELLSFLDCYSGYHQIRLKESDCLKTSFITPFGAYCYVTMPFGLKNAGATYQRMIQRCFSTQIGRNVEAYVDDVVVKTKQKDDLISDLEETFASIRAFRMKLNPEKCTFGVPSGKLLGFMVSHRGIQANPEKVTAILNMKPPSTQKDVQKLTGCMAALSRFVSRLGERGMPFFKLLKKTDNFQWGPEAQKAFEDFKKLLTEPPVLASPHPQEPLLLYVSATSQVVSTVLVVEREEEGHVQKVQRPIYFVSEVLADSKTRYPQVQKLLYGILITTRKLSHYFQGHSVTVVTSFPLGDILHNREANGRIAKWALELMSLDISFKPRISIKSQALADFVAEWTECQEDTPAENMEHWTMHFDGSKRLSGTGAGVVLISPTGERLSYVLWIHFSASHNVAEYEALLHGLRIAISLGIKRLIVRGDSQLVVNQVMKEWSCLDDNMMAYRQEVRKLEDKFDGLELSHVLRHNNEAADRLANFGSKREAAPSDVFVEHLYTPTVPHKDTTQDADTHDVAMVEADWREPLIRFLTSQELPQDKDEAERISRRSKLYVLHEAELYKKSPSGILQRCVSLEEGRQLLKDIHSGICGNHAAARTIVGKAYRQGFFWPTAVSDADKIVRTCEGCQFFARQIHLPAQELQTIPLSWPFAVWGLDMVGPFKKAVGGYTHLFVAIDKFSKWIEAKPVVTITADNARDFFISIVHRFGVPNRIITDNGTQFTGGVFKDFCEDFVIKICYASVAHPMSNGQVERANGMILQGIKARVFDRLKPYAGKWVQQLPSVLWSLRTTPSRATGQSPFFLVYGAEAMLPSEVEFESLRFRNFREERYEEDRVDDLHRLEEAREAALIRSARYLQGLRRYHNRNVRSRAFLVGDLVLRKIQTTRDRHKLSPLWEGPFIISEVTRPGSYRLKREDGTLVDNSWNIEHLRRFYA

SEQ ID NO: 134634 - protein, 209 aa, Oryza sativa
  unsure (1)..(209): unsure at all Xaa locations
  Clone ID: PAT_MRT4530_36389C.1.pep
LAAAQGERRGRRRHVGPTGSGSRGREWAASCSARLKPAGHGEATTAHDRRRVTGGAGRRRRPARRRRRAAEDDGARAEGGGAHGGEERKEERGFLTEVGAAATLAAAARSRRRRQAAELGCAARGRVDGTGERGXVRKMREEDAGXIYRRRGRRTWPGTHPIAPATWEXVGERERGGIQIRIPPICEAREGGRRGGEAATWGGTRERRG

SEQ ID NO: 134635 - protein, 194 aa, Oryza sativa
  Clone ID: PAT_MRT4530_3638C.1.pep
PTRSNDLWNYDNKKTKPPYLLANYINGTTPYTSDNYLYNISLVATNASVLPPMLNAIEIYYQVQQDEKMTYSEDVEAMMTVKIDYQVKKNWMGDPCLPEKYTWSGLKCRSQGVTSRIISLDLSSSDLQGAISEQFSMLRSLEYLNLSNNDLTGSLPESLTNLPNIHVLDLSGNQLNGTFPEALCKNRALTLRYD

SEQ ID NO: 134636 - protein, 106 aa, Oryza sativa
  unsure (1)..(106): unsure at all Xaa locations
  Clone ID: PAT_MRT4530_36390C.1.pep
SPDPWRGEGGRPPDSCGEGRCXARPPDPSPARSRPLGREGDGRGGQPVPTPDPWRGXGSQPPDPCGDGLCPPDPAPPPPRHRRWRRTATVAAIDAAASASLTEGAS

SEQ ID NO: 134637 - protein, 405 aa, Oryza sativa
  Clone ID: PAT_MRT4530_36391C.1.pep
MDLQDPAADAVAAEPLTVAETDDQPPPPAPPLEAEGVVVAEEDPLPHPPLEVVEEDVAPVVAEAGAAAVPMEPSEAGAGGVVLTDELCDRIVKQVEYYFSDENLPTDEFLIKFVKKNKQGFVPIGVIASFRRMKKLSQDLSIIEAALRTSSKLVVSPDGKRVRRLHPLPNNELNDVKKRIVVVENLPSDFSMESIHAKFETVGKIAKITIHDQHSVGESATIKNHDIMLSNKVHALVEYETAEAAEKAAITLNDGSNWRTGMKVRLAKRTVGSGKHNQSSKENQAIQGQPSKVEQQMVSEKNGGTDSVESAFDNENVNSNISHEDMHQHQKVNAKGGRKGRYKSQGRGQIQQNTSGQGHVSSPATSGSDHVNKPIPGPRMPDGTRGFTMGRGKSPTFQKGDNAEE

SEQ ID NO: 134638 - protein, 1010 aa, Oryza sativa
  Clone ID: PAT_MRT4530_36392C.1.pep
MGWKLCHVFRPYTVVLKYGMVGLGWLGTSWNPGSGCQFGPNHRRPWVKAVREALEKMSLVESWLIPQLSACEDGAVVDSTAGCELLSFLDCYSGYHQIRLKESDCLKTSFITPFGAYCYVTMPFGLKNAGATYQRIIQRCFSTQIGRNVEAYVDDVVVKTKQKDDLISDLEETFASIRAFRMKLNPEKCTFGVPSGKLLGFMVSHRGIQANPEKVTAILNMKPPSTQKDVQKLTGCMAALSRFVSRLGERGMPFFKLLKKTDNFQWGPEAQKAFEDFKKLLTEPPVLASPRPQEPLLLYVSATSQVVSTVLVVEREEEGHVQKVQRPIYFVSEVLADSKTRYPQVQKLLYGILITARKLSHYFQGHSVTVVTSFPLGDILHNREANGRIAKWALELMSLDISFKPRISIKSQALADFVAEWTECQEDTPAEKMEHWTMHFDGSKRLSGTGAGVVLISPTGERLSYVLWIHFSASHNVAEYEALLHGLRIAISLGIKRLIVRGDSQLVVNQVMKEWSCLDDNMMAYRQEVRKLEDKFDGLELSHVLRHNNEAADRLANFGSKREVAPSDVFVEHLYSPTVPHKDATQVARTHDVAMVEADWREPLIRFLTSQELPQDKDEAERISRRSKLYVMHEAELYKKSPSGILQRCVSLEEGRQLLKDIHSGICGNHAAARTIVGKAYRQGFFWPTAVSDADKIVRTCEGCQFFARQIHLPAQELQTIPLSWPFAVWGLDMVGPFKKAVGGYTHLFVAIDKFSKWIEAKPVVTITADNARDFFINIVHRFGVPNRIITDNGTQFTGGVFKDFCEDFGIKICYASVAHPMSNGQVERANGMILQGIKARVFDRLKPYAGKWVQQLPSVLWSLRTTPSRATGQSPFFLVYGAEAMLPSEVEFESLRFRNFREERYEEDRVDDLHRLEEVREAALIRSARYLQGLRRYHNRNVRSRAFLVGDLVLRKIQTTRDRHKLSPLWEGPFIISEVTRPGSYRLKREDGTLVDNSWNIEHLRRFYA

SEQ ID NO: 134639 - protein, 1510 aa, Oryza sativa
  Clone ID: PAT_MRT4530_36393C.1.pep
MGSVSGIDDLVFPPGQAFRFGSLEFITNDFGKISLLDSELDQSGESRISVPFGVPNAAEIYSKSISIESASNHSDEIASSPTSSDRDDGAYPPILMKLPDDLAAVFTTMTSPSRRPRRRSASTPISHSSREVGVIFQPLGSVSTDQLDGYWSSPAVDSRPTEIVDYNEFGFHNNDPDLDDFDESLEDNYTPLYFGVFMADNETEEQRQARETEARREAERRRLEEEREAQEQERLRREQQERERAAKEAEDRRLRALEAGHRARDLIGQQDVEGTPRRAARGHHHSLDRHDDDLDGVAAFTNDLRRVDWPAGFKPTGIEKYDGSTNPESWLTVYGLAIRAAGGDSKALANYLPVALADSARSWLHGLPRGTIGSWAELRDHFIANFQGTFERPGTQFDLYNVIQKSGESLRDYIRRFSEQCNKISDITDDVIIAAFTKGIRHEELVGKFGRKPPKTVKLMFEKANEYAKAEDAVIASKQSGSSWKPKKDTPATGGGGRSSKRSRVNTFDKIMNSQCPHHPKSNHAAKDCFVYKQFAEQYTKTTRKNSDEKQSTSKKKDDGDPPAETAIKFDRSDHPDRVVHPGRYPLVLDPVVRNVKLRRTLIDGGSALNILFAKTLDDMQIPRSELRPSNAPFHGVIPGLSATPLGQITLPVTFGTRENFRTENICFEVADFETAYHAILGRLALAKFMAVPHYTYMMMKMPGPRGVLSLRSDIKQAVTCDKESCEMAQTREMASAREDIRLAATTAGEGEVPATKESALVTFLQNNKDIFAWKPSDMPDIPREVIEHSLHVKEDAKPIKQRLRRFAQDKKDAIKEIRLKESDCLKTSFITPFGAYCYITMPFGLKNAGATYQRMIQRCFSTQIGRNVEAYVDDVVVKTKQKDDLISDLEETFASIRAFRMKLNPEKCTFGVPSGKLLGFMVSHRGIQANPEKVNAILNMKPPSSQKDVQKLTGCMAALSRFVSRLGERGMPFFKILKKTDNFQWGPEAQKAFEDFKKLLTEPPVLASPHLQEPLLLYVSATSQVVSTVLVVEREEEAHVQKVQRPIYFVSEVLADSKTRYPQVQKLLYGILITTRKLSHYFHGHSVTVVTSFPLGDILHNREANGRIAKWDLELMSLDISFKPRTSIKSQALADFVAEWTECQEDIPAEKMEHWTMHFDGSKRLSGTRAGVVLISPTEERLSYVLWIHFSTSHNVAEYEVLLHGLRIVISLGIKRLIVRGDSQLVVNQVMKEWSCIDDNMTAYRQEVRKLEDKFDGLELSHVLRHNNEAADRLANFGSKREVAPSDVFVEHLYEPTVPQKETTQVADTQDIAMIEADWREPLIRFLTSQELPQDKDEAERISRRSRLYVIHETELYKKRPSGILQRCVSLEEGRQLLKDIHSGICGNHAAARTIVGKAYRQGFFWPTAVSDTDKIVHTCEGCQFFARQIHLPSQEFQTIPLSWPFAVWGLDMVGPFKKAVGGYTHLFVAIDKFSKWIEAKRVVTITADKARDFFINIALNWGISQDST

SEQ ID NO: 134640 - protein, 75 aa, Oryza sativa
  unsure (1)..(75): unsure at all Xaa locations
  Clone ID: PAT_MRT4530_36394C.1.pep
LLFKEDGQEYAHVAHMLFNRRREAQCIDGTKRLCHIXGKMHNNVWIARADIVLSXLRDYHDDMADVILIYMNDEA

SEQ ID NO: 134641 - protein, 129 aa, Oryza sativa
  unsure (1)..(129): unsure at all Xaa locations
  Clone ID: PAT_MRT4530_36395C.1.pep
GFGRDQHYDRVRGWVGFSIXLAHXMTXXADILLMPXXXXPCGLNQLYSXXYGTVXIIHAVXGLPNTXEHYNPXQXSRLGWTFEKAEXNXLIDALRHCXNTXXNYTTXXXGLPXKRMXPHLXXDNAAKXY

SEQ ID NO: 134642 - protein, 81 aa, Oryza sativa
  Clone ID: PAT_MRT4530_36396C.1.pep
AVLEYLAAEVLELAGNAARDNKKNRIVPRHIQLAVRNDEELSRLLGTVTIAAGGVLPNIQQVLLPKKGGGKGDIGSASQEF

SEQ ID NO: 134643 - protein, 125 aa, Oryza sativa
  unsure (1)..(125): unsure at all Xaa locations
  Clone ID: PAT_MRT4530_36397C.1.pep
MGQRLKGERKGAPACGPHGQWLKVAXFKTGRPAMATGGDAHGRRRRQSAARETTADGVQDGGVDQRQRRARGERRRKRERGEEGXGGSSPASMAAGAEDEGGGDDLAMRRGGRAAAAPTEGVEKD

SEQ ID NO: 134644 - protein, 667 aa, Oryza sativa
  Clone ID: PAT_MRT4530_36398C.1.pep
MRINEYGHCIREIRHRRSYGLSVTLIIVTWILVLLKTCYVLPCWQLRGGSGQPHRGYGQSSDSDGSVKSHDKWLRLLEDDDGWPTIPPPRTAAATCHPRPPSTSALGTGVPCPIARTLVADWATSTARMRSSSTSRSTVAAAAAMRRRPSSPAPTNREKEMQNMYNGRGDDEPRWVSERETRSAGHQGHRASSKRRRGGSPENQSTSSPMLTVFSIVFPLLTPDRRASVRLWRPMRSWDRRNCSYGGDAPSRFLAIDNGDRGGRKIVWTVGPEAPPVSSSSFLWLAGCNHHGRLSCPTSPLPQPTSSTLRRSRPTVGPRRPRPRSPPPLSPSKTGAEPPHSPTSPAPLPPSNPPLPATFSPSGTYINDSHTSPPCSRAPPLSGELRPADSAAPPTAAPIRHHCRLRGAVPQPGLYSISPLRLWNTAASCTTSLPRRRRLQQAAAAALIVAAPRRLRRRQRCAKLYLGLCSVSPFHRRNHLSAVDPSSATAVVVSNHRSSPLRSPISLPNRSNIFPRSCRPSAAAPPWSGVVGTPFPSPPVPVAAIFSAAGHLPVVVSPSPSSVRIPTAPSPFSPSAAPHARHRDALPSPVVVWPRARSRRAMAGRVGLGRARALAAPPRGRPIGFGPIWAVHVVDAHPRPRVDLVHHAPPLCAADVRGPPVGAGSPC

SEQ ID NO: 134645 - protein, 38 aa, Oryza sativa
  Clone ID: PAT_MRT4530_36399C.1.pep
MASAARRTTPGCNPTAHLVSVAAPCLGVAWINLPLVIN

SEQ ID NO: 134646 - protein, 996 aa, Oryza sativa
  unsure (1)..(996): unsure at all Xaa locations
  Clone ID: PAT_MRT4530_3639C.1.pep
MATPLADEGSIAAAVMPRSPSPPAAAAGSAAEAPMLIFVYFHKAIRAELERLHAAAVRLATERSGDVGELERRCRFLFSVYRHHCDAEDAVIFPALDIRVKNVAGTYSLEHKGENDLFAHLFSLLKLDVRNDDGLRRELASCTGAIQTFITQHMSKEEEQVFPLLIKKFSHEEQADLVWQFLCSIPVNMMAEFLPWLATSVSSDEHQDILNCLHKIVPDEKLLQQVVFAWIGGEAVKTISHDFCSPCSKSNVRCKDAIDQTDKYGCSHEHFKTGKRKRAESSYSQLVMHPIDEILCWHNAIRKELSDIVEETRRIQQSGDFSDISDFNVKLQFIADVCIFHSIAEDQVIFPAVNDQVSFEQEHAEEERRFNKFRCLIEQIQITGARSTAVDFYSELCSQADQIMEKIERHFKNEETKVLPQARIHFSSEKQRELLYKSLCVIPLKLLERVLPWFVSKLNDQDAEAFLQNMFLAESFRSLSLNYSAPSLYSSLFSWETDAAFSGPDNISRPIDTIFKFHKAIRKDLEFLDVESRKLIDGDESSLRQFIGRFRLLWGLYRAHSNAEDEIVFPALESKETLHNVSHSYTLDHKQEEELFKDISTILFELSQLHADLKHPLGGADAVGANHIHPYNRIDWSKKNNELLTKLQGMCKSIRVTLSNHVHREELELWPLFDKHFSVEEQDKIVGRIIGSTGAEVLQSMLPWVTSALSLDEQNNMLDTWRQVTKNTMFDEWLNEWWKRSPTSSGPSSDASHPEEDHFQEKFDQSEQMFKPGWKDIFRMNQSELEAEIRKVSRDSTLDPRRKAYLIQNLMTSRWIAAQQKSPQPQSEDRNGCTVLPGCCPSYRDPENQIFGCXCHDKVSDHTMERXHKCREKMLEMNCPICCDFLFTSSAAVKGLPCGHFMHSACFQAYTCSHYTCPICSKSLGDMTVYFGMLDGLLAAEELPEEYRDRCQSFQLPGPNSLENQEKPNQMGTKGVSSQGIGGMWGNKIVGTQIWK

SEQ ID NO: 134647 - protein, 741 aa, Oryza sativa
  Clone ID: PAT_MRT4530_363C.1.pep
MASSPRPAATAAAHRRGLIQRPPSAQAYLSAAAALLVLAAVAFSRAGHRFPHPPATRRCRPDAEGSWSAGVFLGDSPFSLEPIEHWGISKADGAAWPVANPVVTCAEVEDAGFPSSFVAKPFLFLQGDAIYMFFETKNPITSQGDIAAAVSEDAGVTWQQLGVVLDEEWHLSYPYVFTYKNKVYMMPESSKNGDIRLYRALDFPLKWELEKVLLEKPLVDSVIINFQGSYWLLGTDLSSYGAKRNREISIWYSNSPLSPWIPHKQNLIHNTGKMLSTRNGGRPFIYNGNLYRVGKGQGGGSGHGIQVFKVEILKSNEYKEVEVPFVINKQLKGRNAWNGARSHHLDVQQLPSGKPWIGVMDGDRVPSGDSVHRLTIGYMIYGVVLILVLVTGGLIGTINCSLPLRWSLPHTEKRSGLFNVEQRFFLYHKLSSLISNLNKLGSLICGRINYRTCKGRVYVVVVMLILVVLTCVGTHYIYGGNGAEEPYPIKGKYSQFTLLTMTYDARLWNLKMFVEHYSNCASVRDIVVVWNKGQPPAQGELKSVVPVRIRVEDRNSLNNRFNIDSEIKTKAVMELDDDIMMTCDDLERGFKVWREHPDRIIGYYPRLSEGSPLEYRNERYARQQGGYNMVLTGAAFMDHGLAFKKYWSKEAEVGRQIVDSFFNCEDILLNFLFANASLTSTVEYVKPAWAIDMSKFSGVAISRNTQAHYHVRSKCLAKFSEIYGNLTAKRFFNSRGDGWDV

SEQ ID NO: 134648 - protein, 128 aa, Oryza sativa
  unsure (1)..(128): unsure at all Xaa locations
  Clone ID: PAT_MRT4530_36400C.1.pep
TDPRRKTLAKPPEHFGPPPPPPGKNPPRGPPPLFTGWVPPQTAPKPNPNRPRFGGGPPPXGPKGKPSPGFRDPPPASPGGGGGQRGPWGPPRGARPRFGFPPGGLSPGPGARPPGFSPGPXPPGGGPP

SEQ ID NO: 134649 - protein, 161 aa, Oryza sativa
  unsure (1)..(161): unsure at all Xaa locations
  Clone ID: PAT_MRT4530_36401C.1.pep
MALYIHIESLLLSFSILHHGHHHRRGLLSPPPPRVCRRHHRRGLPSPLRCKLGARSGRHVDGGGRSRRRHDGGGWIRCRDDGGGRIRRLDDRGGRICRRXDEASAAARGRGRRRRQQWLSVSTARGRRRWGADLAPPPSPPAAVRWRRREISGGTNLTSSA

SEQ ID NO: 134650 - protein, 280 aa, Oryza sativa
  Clone ID: PAT_MRT4530_36402C.1.pep
MAMLGSSSAVVLELMTMGYQSAAYLGELLRAASPAQAGDEQQELAAEILRCCDRVIAKLNRGGATGATTGKKRKAAESAAAAAVTSPSLPVTPTKRRARGAEAVREVRSGTTTDGFIWRKYGQKEINGCKHPRLYYRCAFRGQGCLATRRVQQSQSQDDPAAAFVIAYYGEHTCGGDAAAAAACRDGELMPPAVINSGASSFAAAWNMASREPASSLAVERRSCDGDAPSETSQGWSPSFSSEVELDVVGFDLAGADSSASPVWEFLNGSFDWEFVINSL

SEQ ID NO: 134651 - protein, 99 aa, Oryza sativa
  unsure (1)..(99): unsure at all Xaa locations
  Clone ID: PAT_MRT4530_36403C.1.pep
EVXAPGREEEKMVATTTIEDLHXDXXARXXXXWXGRSLAAASCXTAGSGRSPDPETWRALCLAXWPSMAGHXGXLSVVPPRRXFADXFPFPRPDXXSSA

SEQ ID NO: 134652 - protein, 103 aa, Oryza sativa
  Clone ID: PAT_MRT4530_36404C.1.pep
SYGEPYSYGGGSSTAQHEIGPSQLDESPPVTQRPKTTATLISAVLRWSVGLSASDIHLKDYLCQDADLQPVLEERERKRTLTRHEISMMRLMSRTLLYFAHSN

SEQ ID NO: 134653 - protein, 86 aa, Oryza sativa
  Clone ID: PAT_MRT4530_36405C.1.pep
MDFFRQRIFFVAEIARAGPNGSHGHALTYGHEPYFRWVNAFMGAKCDGKRLELYRKGPAGLMRLEIVKSGEMVRCSRMYAAAFVPA

SEQ ID NO: 134654 - protein, 179 aa, Oryza sativa
  Clone ID: PAT_MRT4530_36406C.1.pep
SPQINTKCYRCNGNPNHRIPVPTDSANYPLRPLRGRISSQCARKARSETTAATAHAPGATAPAALAGAGAGARPPSSTASSSSTLTAAVAATSATSTAKRRAKALVDAAMEMTKRGCVARDTIKRGKSSELQEAEAAVTWLKLLAGRRWTLSVVFVCACKCGAGTRAAATAWSSKAVER

SEQ ID NO: 134655 - protein, 248 aa, Oryza sativa
  Clone ID: PAT_MRT4530_36407C.1.pep
MEMMEVVATEIMDAALHVAVAGRTLAVAERDGTHDPATGRALTGSWLWDSSLVLASHLASCVHHHHLRGATVLELGAGTGLPGIAAVACLGAARCVLTDVRPLLPGLRANADANGLTAEQADVRELRWGGHLEPEVQVDVVLMSDVFYDPDDMPAMADTLHGLWRDGDSDSDGGGTVGWAASEARDGVQDCIDVLREQGFEVVEVDRVTRPLLRDPEQAADFAVYRLFRRTTSPSIVSNPTPITTAGC

SEQ ID NO: 134656 - protein, 397 aa, Oryza sativa
  Clone ID: PAT_MRT4530_36408C.1.pep
MAAQRPCNGGSWPDLPSELLGLVLLRLPSHGDRVRLRAVCRPWRSSARLERKLLPPPLPWLFLPDGAFLTLPDGAAHRRLAIPGDVAHLVPTGSGLLLAHNDGMFSLMNPSSSATTPLPDLAAVFHGEIKCKYPDTAFQLGQRRITPIIKAVVSEHFIAFYFNSSKVIITSGQPHTVVKWSPPDSSYILDIALFQGKLYCLTFDIENCQEELYILEVRDEEPMVSDVKCIHSTPRDVGDEDEAWFNPHSTDRYTFHRYLVADGDRLLMVARWINLNLPPMLPRDSSIKRTRRFDVFEAVDLSSEHGRWIKVDTLMGHSLFVSESCSESLTAGAEEDCIYFMNDGIMNRIPKDPLSDSGVYNMRDGMVAPLMPETAVTEHLAAHDGPWFSTWLFPTET

SEQ ID NO: 134657 - protein, 181 aa, Oryza sativa
  unsure (1)..(181): unsure at all Xaa locations
  Clone ID: PAT_MRT4530_36409C.1.pep
MAASDSSSLSRAQPHRTSRRSPPARRKDPFSPPKVHRSHKLLLEIEALMEVELEGGNALGGRHRWRKQIMTGGASPEPHQHGSSGREERTEAAALTGANHDGRSLSPVSAAADGEWTNLADNNFQGPIPANISSCTALNKFNVYGNELNGSIPAGFQKLESXLTYLNISSNNSKFLLRLET

SEQ ID NO: 134658 - protein, 66 aa, Oryza sativa
  Clone ID: PAT_MRT4530_3640C.1.pep
EDHHDAAPSLLGSFGRRLFFCFFFFFFFFFFFGSREKKITLHDSVWKTKGFTISWKIPMGHLPGPG

SEQ ID NO: 134659 - protein, 24 aa, Oryza sativa
  Clone ID: PAT_MRT4530_36410C.1.pep
GDLSLKFFGLFVFCDLLVANLLIG

SEQ ID NO: 134660 - protein, 136 aa, Oryza sativa
  Clone ID: PAT_MRT4530_36411C.1.pep
MEELEEWANLREQKNLTIPSPAQGWTKPPNGDRDDRETAIERRLNNAATFEMPKPCERRRCGRRPTGRAPALRRRGEPATRGSARRHGCAGQRRGGPAARQAGNTAAAGGKAGGRQHRSSQQEEGKQSGRSRQAAN

SEQ ID NO: 134661 - protein, 79 aa, Oryza sativa
  Clone ID: PAT_MRT4530_36412C.1.pep
MSTVASVFHHVAASSSLLFAAQYATVDEGSSAISDFVGRELEEKGYLVVDYESDLQTAMKILFDIVEDSMSLWFYTKID

SEQ ID NO: 134662 - protein, 81 aa, Oryza sativa
  Clone ID: PAT_MRT4530_36413C.1.pep
KCDIVRELWVMHGDAGYMMHGITDDWPHRVTKDCAPYPKASYTRLQHRELGTDVAVNVFQQQNDLFISKASWKHLHKIVFH

SEQ ID NO: 134663 - protein, 293 aa, Oryza sativa
  Clone ID: PAT_MRT4530_36414C.1.pep
RVKQPRQGRTNHTDRQRHGPNGRNTTRNARKGRKRKGRGKRTQRDTGEKHGQRASTRNKDGADPAHTPPQTRPNRGTQKHDLQAGQRRNGGQHGEKQTPETNALGTQPKPQASGHGGGRYRPQYTHWTAPPPNQTNGGAAGDEAAHTRNKSRTRNQRPNDQPPASARPTTQTERRDSPAPAPHPAARSDDTNQLKKHGAQFRQGSWPPGHPTPAAQPPGPGRHISNKQTSIGWHVEQPKFDRVSATVCYSVFPLFKNYFITCRTAGTLSNCGCSIGTLSNHGYSIGCQTCDFV

SEQ ID NO: 134664 - protein, 69 aa, Oryza sativa
  Clone ID: PAT_MRT4530_36415C.1.pep
RSQQRRRELHLCLYLLLTIVLETEMAKCQVLLNRYLMVGQDKYEADQVHKMKTHATDELEACVNRSIDD

SEQ ID NO: 134665 - protein, 131 aa, Oryza sativa
  unsure (1)..(131): unsure at all Xaa locations
  Clone ID: PAT_MRT4530_36416C.1.pep
HKRILQGNCKLCVIDGDLTITIGMSSGVLMQHTHHRNAPANNTFGQWATHICVIXTMASQSQHYDKRXLPLVHGKEIIRSVKGNXCLLPLSTLTSRVHTXRLAVIRMPQQMTEKIRNGLSSIFFRNDSVAL

SEQ ID NO: 134666 - protein, 163 aa, Oryza sativa
  Clone ID: PAT_MRT4530_36417C.1.pep
MDISDPARPCFLDIDTGSTLTWLQSDYPCINCNKVPHGLYKPELKYVVKCTEQRCADLYADLRKPMKCGPKNQCHYGIQYVGGSSIGVLIVDSFSLPASNGTNPTSIAFGCGYNQGKNNHNVPTPVNGILGLGRGKVTLLSQLKSQGVITKHVLGHCISLKGK

SEQ ID NO: 134667 - protein, 86 aa, Oryza sativa
  Clone ID: PAT_MRT4530_36418C.1.pep
MEETTRGFEAAYATSAAHLCRRCILSTGAPLADLRPPLPQPASATAAPLAARLALPVGRSEPFATRMPKRGAVVSAHSALLLCFVA

SEQ ID NO: 134668 - protein, 55 aa, Oryza sativa
  Clone ID: PAT_MRT4530_36419C.1.pep
INTIRHLHSYNSKRDVVQCLSRELSEHTLQLTNVNTLNYPNTIYSLGRLRDRAHY

SEQ ID NO: 134669 - protein, 134 aa, Oryza sativa
  unsure (1)..(134): unsure at all Xaa locations
  Clone ID: PAT_MRT4530_3641C.1.pep
DAWADAWADAWADAWADAWADAWAQRKASSYSPLSAPPRFSSSSPLSPFSAAVAASTQSAAVRECIXVXIGQAGIQVGNACWELYCPPHGIQADGQMPSDRTVGGXEDACDTLFSETGTGEDDPRGLHWVGNGP

SEQ ID NO: 134670 - protein, 258 aa, Oryza sativa
  Clone ID: PAT_MRT4530_36420C.1.pep
MDASYRRDGRGGGGGGGGGGSAPRSVEDIFKDFRARRTAILRALTHDVEDFYAQCDPEKENLCLYGYANEAWQVALPAEEVPTELPEPALGINFARDGMNRRDWLALVAVHSDSWLVSVAFYYAARLNRNDRKRLFGMMNDLPTVYEVVSGSRQSKERDRSGMDNSSRNKISSKHTSDVARVENNIKEEDEGYDEDDGDHSETLCGTCGGIYSADEFWIGCDVCERWYHGKCVKITPAKAESIKQYKCPSCSSKRPRQ

SEQ ID NO: 134671 - protein, 589 aa, Oryza sativa
  Clone ID: PAT_MRT4530_36421C.1.pep
MKYVLVTGGVVSGLGKGVTASSIGVVLKDCGLRVTSIKIDPYLNTDAGTMSPFEHGEVFVLDDGGEVDLDLGNYERFLDIKLTRDNNITTGKIYQAVIDKERRGDYLGKTVQVVPHITDEIQEWIERVAMNPVDGTDEPADVCVIELGGTIGAGNFCLVHVSLVPVLNVVGEQKTKPTQHSVRGLRGLGLIPDILACRSTQPLEENVKVKLAQFCHVPISNIVNLHDVTNIWHIPLLLRDQKAHESILKVLDLQCVGKVPRAPKLTEWTERASKFDKLKTPVRIAMVGKYTGLSDSYLSVLKALLHASVALDRKLVVDWVPSCDLEDSAATETPDAYEKAWDLLKGAHGVLVPGGFGDRGVQGKILAAKYARENNVPYLGICLGMQIAVIEFARSVMKLRGANSTEFDPATTTPCVIFMPEGSKTHMGATMRLGSRRTFFQANTCKSAKLYGNASYVDERHRHRYEVNPEMVPEFEKAGLSFVGRDESGTRMEIIELPTHRFFVGAQFHPEFKSRPGKPSPLFMGLIAASSGQLDHLLQQSCGVVSSPVRRGNYCNGATKQQKLYQNGHVKNGLVNGCYYANGNSILHT

SEQ ID NO: 134672 - protein, 169 aa, Oryza sativa
  Clone ID: PAT_MRT4530_36422C.1.pep
RVIPEIPPSIRPRPIPDHAPLPSRTNNQPQEMVYPARKPHPINTNPWIITRGEFGGSESEGNGGNTSSWAADPVDGSSSPPPPPLPPPPEEEETRVWSSLSSSSREHATAAMVSWSDAVCFLLEEKNKKERGEKRRERSRGIYRGRRGINSRRGPTGQWAWAHRSVGVG

SEQ ID NO: 134673 - protein, 126 aa, Oryza sativa
  unsure (1)..(126): unsure at all Xaa locations
  Clone ID: PAT_MRT4530_36423C.1.pep
RPRLQRTVPAPCXCHVVLSGGQSEEEATVNLNAMNKLSTKKPWALSXSLRRALQQRHSLKGLGPAKEREKPLVERAPESLSNPPGAKAQTFLKAYPLGTITRGGILLASARVPSLRTLSRQRTYKY

SEQ ID NO: 134674 - protein, 245 aa, Oryza sativa
  Clone ID: PAT_MRT4530_36424C.1.pep
TRRDHPIECSLTFAMEHRLWSSGASDKNKAMVEQLQRYGIIKSSKVAQVMETIDRGLFVPPGASPYFDSPMPIGYNATISAPHMHASCLELLEKHLQPGMRALDVGSGTGYLTACFAIMVGPEGRAVGVEHIPELVTSSIENIKKSAAAPQLTDGSLSIHITDGREGWPELAPYDAIHVGAAAPQIPQALIEQLKPGGRMVIPVGTMFQELKVVDKNQDGKVSIRDETAVRYVPLTSKDAQLQAN

SEQ ID NO: 134675 - protein, 85 aa, Oryza sativa
  unsure (1)..(85): unsure at all Xaa locations
  Clone ID: PAT_MRT4530_36425C.1.pep
LTDTTLLPPLAGANGDAASFHHPASXQPAIPGAAAAAVAVAPHGRFYVGSLRPRPPPLXPTSSRFSRVLWRFSLGSSATLXSVEI

SEQ ID NO: 134676 - protein, 155 aa, Oryza sativa
  unsure (1)..(155): unsure at all Xaa locations
  Clone ID: PAT_MRT4530_36426C.1.pep
MEVLRYIFSCFSSSSSKSSSASAGSHRLWSSGASDKNKAMVEQLQRYGIIKSSKVAQVMETIDRGLFVPPGASPYFDSPMPIGYNATISAPHMHASCLELLEKHLQPGMRALDXGSGTGYLTACFAIMXGPEGRAVXGGEHIPELGYFVYWKHQE

SEQ ID NO: 134677 - protein, 87 aa, Oryza sativa
  unsure (1)..(87): unsure at all Xaa locations
  Clone ID: PAT_MRT4530_36427C.1.pep
MAAMATTASSLLKTSFAGARLPAVVRNPTVCVAPRTGGAICNSISSSXPTSPYDLNALRVRLIRXAIVSREMTRRSMTRMITYADTD

SEQ ID NO: 134678 - protein, 58 aa, Oryza sativa
  Clone ID: PAT_MRT4530_36428C.1.pep
CARYYNVAELPLWYLLLLKTSGLALFVSVLGFVMHEVLVRYVGGFFQPLNPSFGCPHL

SEQ ID NO: 134679 - protein, 91 aa, Oryza sativa
  unsure (1)..(91): unsure at all Xaa locations
  Clone ID: PAT_MRT4530_36429C.1.pep
GSTSACTXPAATGAPATAAGGASSCQFRHCVSVSSVTVITVAGVASVSCTFWRGPNYSRRTVSCFVSIDSPPQPPDRARTKTRGRHEYMMT

SEQ ID NO: 134680 - protein, 49 aa, Oryza sativa
  unsure (1)..(49): unsure at all Xaa locations
  Clone ID: PAT_MRT4530_3642C.1.pep
FFFFFFFFLYVSEHKDIFISLNYSMCLSPYNIIXGTPNLGLVPRKSTRD

SEQ ID NO: 134681 - protein, 529 aa, Oryza sativa
  Clone ID: PAT_MRT4530_36430C.1.pep
MSLPVGSPPPPPTSPPYTGILAALHRSIAGGHAAAAVALLPELSRAGLRPPFPLLSSLARLLLLRRATAPCFPSLAGRLLLYVRLAGLKRLVPCSTQLANHLLSLNFLLRRPRDARRLFARMPLPDVCSYNAMLAGYARLALAAPAAEVFAAMPHRDLLSYNATLLALAGGGEMQKAVALYSELRGTSTSLGYSDQTFLALLVGCEKLAGREVARRGPGDLILHGFLSDIRIASSLVDVYTKCVCIADAEDLFNEMPVKSERMWTTLVCGYAEDGQLSTARRLFDQMPKKNILSWNSLMEGYVRHGQEAEALSIFQHLIKEGVHPDQITFSSCFRACAAVCALKCGQQIHGRLLRTGFYPNVMILSSLIDMYSRCGYLADARQVFSLAVQEKKDTLLWNALLGALCHHGHGQEVIGSFVQMIRERWKPDANTFLTVLKACCHCNLVEEGIGFFELMTERYRIVPGEDHYVCLVDLFSRSSSHDKMVELIKSSPLLFRKQIWEILAGNCIIHGNSELLKQIEEHMAELAS

SEQ ID NO: 134682 - protein, 284 aa, Oryza sativa
  Clone ID: PAT_MRT4530_36431C.1.pep
MLPYATAAEAEAAVGRGLTWAEAAWFRYSAAIPDYCLYCHNVPILLLVYTLAPLPLALLELRRHLPLPHKLQPGVRHPPAAFLRCYAATARVLLLAVGPVQLASFPAVRAVGIRTGLPLPSAGETAAQVAVYLLVEDYLGYWIHRLLHTPWAYHHIHRVHHEFTAPMGYAAPYAHWAEILILGFPAFAGPAIVPCHMTTFWLWFVLRHLEAIHIHSGFKLPFDPTKYIPLYGGVEYHDYHHFVGGHSQSNFSSVFTFCDYIYGTDRGYRYHKASLSKMRIFVRA

SEQ ID NO: 134683 - protein, 151 aa, Oryza sativa
  Clone ID: PAT_MRT4530_36432C.1.pep
MVNPPPPPFFPFPPPPPFFPPLPFPGFQPPPNLFFSAPFPPNPVFPPQPPPQAPFPAPPGGFFHPFGGPFGGLGPMAMGVFPKPGPSRLVWICPIPVGYGPRPFLHRWGYFVPFSLGLGRGFWATWFFLGLLWDFDAGFALSLFCHIPLFL

SEQ ID NO: 134684 - protein, 67 aa, Oryza sativa
  Clone ID: PAT_MRT4530_36433C.1.pep
SSLKAAILNQYIFLCRRLSTNASTSGQFYGTSRMSGFKFLYVTAPVQPVSPLKMGVYIGGALSHNEL

SEQ ID NO: 134685 - protein, 263 aa, Oryza sativa
  Clone ID: PAT_MRT4530_36434C.1.pep
MVYPIHQHTIANVRKLNRLWEDAKRAACKITMAGIMDEENASSTNSIKLELRIYMHCKACERSVRRAIEKIDAQSILPEISTNYTYAGVEKVEVERGENKVTVTGGGDFEPEKAVRRIKKKTGKKVEILALEEEDDDHGEGGGGGADAQAHHEFQRHGYYVPYYHHRHHHHLVPVPCAYVPSCYDHLVPVPPPDNGGGGTADVAHEFQRRGGVGHYGYYAPCYYHGGGGGGGGDVAHEIQRPVRSAWDLHGFDDENTQACRVT

SEQ ID NO: 134686 - protein, 71 aa, Oryza sativa
  Clone ID: PAT_MRT4530_36435C.1.pep
ASRPRVRGRYQVPAGRPAGRTSLEDDALNFLPPPTSTAADLLANFTAKNLTAEDMVVLSGAQTIGVSHCDS

SEQ ID NO: 134687 - protein, 217 aa, Oryza sativa
  Clone ID: PAT_MRT4530_36436C.1.pep
MENGGGGGGGGGIAGKKRKAVGGGGGGGGGGGSGYGERAAAAAVMRREPRRGLGVAELERIRVQLEAAQSLFMIPPSLLPSSSSSSSAAAVGTQLRPPPPPPLLPSHVAGVRYGHQQQQQQQQYAITCIKQQQQQQPSLFPTSDQSGCFRQELYRMQLQDYRRRRAQPQMELHGETTAAASRSQSIIPFVNLVDDDDDEEAAAGDGAGKELDLELRL

SEQ ID NO: 134688 - protein, 118 aa, Oryza sativa
  Clone ID: PAT_MRT4530_36437C.1.pep
MEVAVASSELDASRGRLDELTVVRPLLFLQRLLDLDDDNDNDDVVGAIIGSFGFLYLAQSPDPAKAAAHGYLPGIGVRNSLFTLAGCSLLGFLLTFLVPEPKGKSLEEMSRENEVGQP

SEQ ID NO: 134689 - protein, 437 aa, Oryza sativa
  Clone ID: PAT_MRT4530_36438C.1.pep
MASGSLLLPPACLQHPLPAAAAASGGVGGSSREQCPRCASHDTKFCYYNNYNTSQPRHFCRACRRYWTLGGSLRNVPIGGSTRKRPRPPVRRPPVHFTAAAAAAAAAAPPHHHHHHHGPLTPPPATSSSSQQAGLLGSLFALGAAPLLEGRVGVGFDLGLGLPGPGHHHAVAGGGGPAAAVATSSSSSAAAPLLWPTGLLDSSSNNAETWRMAGGMWPEFTAAAAQNIRLVIDIGDTTIQVPLNGPTVVQNIGRQAAAAVAGDSSAGGVSEKTGGAGGGGGEEWMQEQDGLLCMRGRRCGRRGGCLPRPRDWFAALLAADPAAAAVTRDQAGKAMLYLIVNTCTFATSLAVLPDAVRRRRRLRVEEGHRVADHQHDDGRRAVRRGDVRALRRRRLPAHGPFVGTVVAAVTVVVVRCNLALPFRGGDAGHGCSWVSRL

SEQ ID NO: 134690 - protein, 123 aa, Oryza sativa
  Clone ID: PAT_MRT4530_36439C.1.pep
RMELSKYFKAIVTAEDDMESIAHRFLSAAMKLDRKPSKCVVFEDDPRGVTAAHNCTMMAVALIGAHPAYELVQADLAIAKYSELSVINLRRLFAHKGLSFMDLQKQIIERSPPKRKLTVDTIF

SEQ ID NO: 134691 - protein, 132 aa, Oryza sativa
  Clone ID: PAT_MRT4530_3643C.1.pep
MDLSSGVKWWEEWQLRILVLGSLGVQYFLVIFGGMRKFSRIPHCYRFFIWLSYLASDALAIYALATLFNRRNKLQPDNNDNSSRDLEVVWAPILLMHLGGQVFITAYNIEDNELWRRHILTALSQGTLDLID

SEQ ID NO: 134692 - protein, 131 aa, Oryza sativa
  Clone ID: PAT_MRT4530_36440C.1.pep
MVGVLRRASGFEAFPPLPGKVFVEEAIGAEYGEGFETFRMDGPLKVDVDYLNEKLQECFLQRIRHAMKPDEACGLIFSWDNVIADTDSLKLDAWRQLALEEGKDIPNAGHVQKSILHGAADHVLRKVLCWA

SEQ ID NO: 134693 - protein, 1442 aa, Oryza sativa
  Clone ID: PAT_MRT4530_36441C.1.pep
MPPVASGSGRKRQLVLESSDSEADEFFVSTRRKEDDDDDAGNAGGGSGGGGDQGGEKVVTVSPEKVSGAKSTDEGGGSDKSKGSEVGKSVLQPDVKRIRTEAAHGGGSGSGGSVSKDGTGGKMLRPGFPKWRFEKPEVRAGRVLDEKGGVETKVSSSQKVKDHASSSVYERRRPEPLKPEKSTPSKTNQEVIRVQGKSGVLKIRPKNNKVASETGDGKNLPKNAKVDGDTGDGKVLPKKTTVEENGDGKILTKSGVLKLLPKNNKVAKETSDGNPRSKNTKVVGETSDAKILMKNKANRESGDDKAPKNCTVNLETSAGKILSRNTKEDLKTSDVCRQDKEKSDAIDVSQKQGADGEKRITEKLVSPILLRKSDPSVVGISLGQKMKQQNSKAQLKISSLGQRQPSLNLKDEKNKKKRLLDHKMSPENLSKKAKPNAIDQDTSRPSLEKHGIKKERKGPRYTMKQKLRGQIKDILLNNGWKIDLRRRKNKDYEDSVYVSPQGNGYWSITKAYAVFQEQSKSGKHTGKSSKHKAGVADAACNAISENDLAMLQRNVVKRRTKKELGASKKKYEDSSSRNSKDNNAGRSSGNKHQSSGVRGCALLVRGSTHSMEGNVDGYFPYRWKRTVLSWMIDMGVVSEDAKVKYMNKKGTRARLEGRITRDGIHCGCCSKILTVAKFELHAGSKEQQPYENIFLEDGGATLSQCLVDAWKKQSQSEKKGFYKVDPGDDPDDDTCGICGDGGDLLCCDNCPSTFHLACLGIKMPSGDWHCSSCICRFCGSTQEITTSSAELLSCLQCSRKYHQVCAPGTMKDSVKAESNSSTDCFCSPGCRKIYKHLRKLLGVKNAIEAGFSWSLVRCFPDKLAAPPKGKAHLIHCNSKTAVAFSVMDECFLPRIDERSGINIIHNVIYNCGSDFNRLNFSKFYTFILERGDEVISAAAVRIHGTDLAEMPFIGTRGIYRRQGMCHRLLNAIESALSSLNVRRLVIPAIPELQNTWTTVFGFKPVEPSKRQKIKSLNILIIHGTGLLEKRLLATGTINQENTTVNDMMDAQTHVEATGSRTPVHFSCELPVGGDPDIKHHDDSHPLVGNSKGLTLNLPCVPEEKTAELTSPVLDVVQCMPESENTQEMKNGETDATLTSEDIIAEQKYEDKSNSSLTDSSAIPMTVDPGSCSSNETVKGEHHTSSEPSVEAILVRDKPEPSISCNVTNQEDKNSSMVPVDTTVHLATIVGNHDIQNSVEVKGMEHNTAKDQTFVSAVANNVATTEDPSDSVADCEVPIVRSIQQKDEVIADKNACATIDQTAVDDVANNFVATTENDTDSTAELGVSMERCIQQKVEVIKDKSDSPLRTSISKVMLEKSDQMKSTESDSVKMKDMAIEVKVTVENFSEAGKPASALVMSNDINGEVMAKPNLTCGDDQLHGGDGTYKNSMEDDLASREPVNA

SEQ ID NO: 134694 - protein, 848 aa, Oryza sativa
  Clone ID: PAT_MRT4530_36442C.1.pep
MIPIRIEGRSTVLFACKNGDYCVLTGVYYIPKFHNNMASLGQLDEVGCKMVIEDGILTLHDQRRRPLCRVRRGTWRLYVLQVDLAQPVSLAARSSKDAWIWHARFGHLNFDALRMLSTRGMARGLPELEHVRQVCDECLIGKQRRAPFPVMAMFRATSRLDLVHGDICGPISSSTHGGKKYFLLLIGDMSRYMWLFPLTCKSEASATIKRFKAGVEMETGCKLRVLRTDRGGEFTSIEFSLYCANEGVTRQLTAPYSPQQNGVVERHNQTVMAMARCMMKAKQMPGKFWGEAVTTAVFILNRSPTKAVPDKTPYEAWHGRTPDMHYFRTFGCVVHVKEVKPHLKKLDDRNKVMVFLGYEPGTKGYRVFDPEANRVAVTRDAVFDEAASWPWGEPVEQGEASSDDSFTGAPRRYRSMANILDTTALVELDSDELYLAVAKEPANLTEAEQDEHWRQAMQDEIKSIEENSTWILTELPAGKCPIDLKWVFKLNKNETGAVIWHEARLMAKGYVQCHGINFDEVFAPVAQMESMRLLLAVAAHLEWTVHHMDVKSAFLNRELEEENAKLDTCLHELGFKRSTTEHAVYTRGEGTKRLIVGVYVDDLIITGAHAEEIRHFKGEMHSLFCISDLGLLSYYLGIEVHQSDDDITINQSAYAQKLLKIGGLADCNSTCIPMEPRLKLTKNSDRMAVDSTLYRSLVGSLRYLVHARPNIAFAVSYVSRFMETPHDNHMAAVKHILQYVAGAACLGMWLARLLAEVLGTEPEMAILKVDNKSAISVCKNPVFHDRSKHIDTRYHFIRQCIEEKKVEVEFISTDEQVADILTKPLARIKFQEFRNKAGVVQIVTRRQD

SEQ ID NO: 134695 - protein, 647 aa, Oryza sativa
  unsure (1)..(647): unsure at all Xaa locations
  Clone ID: PAT_MRT4530_36443C.1.pep
MVGVRRRASGFEAFPPLPGKVFVEEAIGAEYGEGFETFRMDGPLKVDVDYLNEKLQECFLQRIRHAMKPDEACGLIFSWDNVIADTDSLKLDAWRQLALEEDSQWYIVCKVCVYLTARDATLILLINLFHAGKDIPNAGHVQKSILHGAADHVLRKVLCWAKDESQMERLKARLIELYYENLFKLDTPVNGLREWLDAVQTAGIPCAVASSLDRRCMIEALDRMELSKYFKAIVTDEDDMESIAHRFLSAAMKACFCSASKYLAVFXDILLTCLSNVSLRGVTAAHNXTMMAVALIGAHPAYELVQADLAIAKVQGALGHHIAKYSELSVINLRRLFAHKGLSFMDLQKQIIERYRQELELAEQLEQIFQRSPPSRLVFLQWEICSGPAKSISRRRIRRDVEIESVADDSANSVQNIRLVIDIGDRTIQVPLNGHTVAQNIGRQAAAAVAGDSSAGGVSEKAGGGGEEWLQEQDGLLSMRGWLMAVATLFAAMAFQAALQPPGWMPRPRDWFAALLAADPAAAAVTRDQAGKAMLYLIVNTCTFATSLAVLLMLLAVGDAGGGGGGCASRRVTARLIANMMTAVALFAAATFALCAADDYRLMAFVGTVVAVYAAVTVVFVRCNLALPFRRGGGGGGHGCCSWVSRL

SEQ ID NO: 134696 - protein, 1314 aa, Oryza sativa
  unsure (1)..(1314): unsure at all Xaa locations
  Clone ID: PAT_MRT4530_36444C.1.pep
RVNLQAQGLWEAVDTGDVPFHEDRQALSAILRAVPAEMLRPLAEKDNAKDAWDALKSMRVGTDRVRESCAQKLRQAFESMQFKPDESVEDFSLHLQWVVSDLRLLGDDITEEKIMCKFLRVVPRRYRQMALSIETLIDLTTLSIEDLTGRLLTVDDHPDSDSEDAGQALFGKKEEQARANKGLGQSSSRGSGTGTGSSERRQRGRGGCGRDGAGGKHKPGANQGGGRDVSKDKCRYCGELGHWAKDCRKAKRDRDKLAHAHLLGDDEPTLLMAQVCELVPTTEPELINGEVNLNKERALVSLREEGEPVDPDWILDMAASNHMTGLDTTMRGTVKFGDXLRIEGRGTMLFACKNGDYCGLIGVYFIPKLRSNMVSLGQLNKVGCKTVIEDGALTLRDPRWRLLCRVRRGRERLYVLQVELAQLVSLAARSSEDAWLXHARFGHLNFDSLRTLYAHGLAHGLPKLERVRQVCDGCLISKQRRVPFPTAATFRATSRLDLVHGNICVPISPPTHGGKKYFLLLIDDMSRYMWLFLLTSKSEAPATIKRFKAGVEVETACKLRVLRTNRGGEFTSIEFGLYCANEGVARQLTAPYSPQQNGVIKRRNQTVVSMARCMMKAKHMPRKFWGEAVRTAVFILNRSPTKAVPNKTPYKAWHGRTPAVXHYFKTFGCVVHIKEVKPHLKKLEDRSKMMVFLGYEPGTKGYRVYDPDANRVVITRDAVFDEVTSWPWGEPVEHGEASTDDSFTVYYEVASSIVAASRPPSVEAMSPTPSAQLATPPDTPSVEFVSPPSSTPDVDDDQGAPRRYRSMANILDTTAPVELDSDELYLAAAEEPANLSEAEQDEHWRQAMLDEIKSIEENSPWILTELPAGQRPIGLKRVFKLNNNETGPVIRHEARLVAKGYVQRHGIDFDEVFAPVARMESVRLLLAVAAYLGWTVHHMDIKSAFLNRELEEEVYVSQPPGFIDDKHPSQVLHLNRALYGLRQARRTWNAXLDTRLHELGFKRSATEHAVYTRGEGSKRLIIGVDLGLLSYYLRIEVRQGSDDITINXSAYAQKLLKIGGLVDCNSTCVPMEPRLKLMKNSDRPAIDATLYRSLVGSLRYLVHTWPDFAFAVGSVSRFMESPRDDHLLVVKHILRYVAGTQNFGCCLARSGETGICLLGFSDSDLGGDIDDRKSTSGALFFLGSSPIAWQSQKQKVVALSSCEAEYIAATGAACLGIWLARLLAEVLGTEPEMAILKVDNKSVISLCKNPVFHDRSKHIDTRYHXIRQCIEEKKDDVEFIPTDEQVADILTKPLVCIKFQEFRNKAGVVQIVTW

SEQ ID NO: 134697 - protein, 442 aa, Oryza sativa
  Clone ID: PAT_MRT4530_36445C.1.pep
MALGLDVQRRSMDRRRIRPDVEIESVADDSANYVQNIRLVIDIGDRTIQVPLNGHTVVQNIGRQAAASVAGDSSSAGGVSEKAGGGGEEWLQEQDGLLCMRGWLMAAATLFAAMAFQAALQPPAWMPRPRDWFAALLAADPAAAAVTRDQAGKAMLYLIVSTCTFATSLAVLLMLLAVGGGGGCASRRVTARLISNMMTAVALFAAATFALCVADDYRLMAFVGTVVAVYAAVTVVFVSGVKMMRIRIAEQFIRLVIDIGDRTIQVPLNGHTVVQNIGRQAAAAVAGGVSEKAGSAGGSGEEWLQQQGGFGLLCMRGWLDGGGGHAVRRHGVPGGATAAGWMPRPRDWLAVLLAVGDGGSGCASRRVTARLITNMMTAVAQFAADTFALCAADDYRLPAHGVRRHRRGRVRRHHRRVRSGAILLCRLGEATPAMVVAGIPRL

SEQ ID NO: 134698 - protein, 204 aa, Oryza sativa
  Clone ID: PAT_MRT4530_36446C.1.pep
MATYSSSALFILFLLPTFLSMAASTYYDICPVECGCPDQNEVTMHLYLHQFVAGANHPNRNEEFVIASSYPNGFGTTLVDDWYLTATTNPNDNIVARVQGMHVQAGQSNANMWYTSHNIVFQDDRFKGSTLQVMGIIAASSGEWSVIGGTGEFSMAHGSIKFTTDPSSTSEDAVRELNIRAIYTADNPQAARGTASVANATRLP

SEQ ID NO: 134699 - protein, 60 aa, Oryza sativa
  Clone ID: PAT_MRT4530_36447C.1.pep
MARDQSATRHPRVHASVAQPIGKPEATTRSIGSLKSYGNGIKWRHNSIAYSSGNGKFPSN

SEQ ID NO: 134700 - protein, 161 aa, Oryza sativa
  Clone ID: PAT_MRT4530_36448C.1.pep
RCRRAAPSSGRSYGPRVRASAPRPGSPPPGPFGLFLGQAQAIVPNVCNLPSNPCDDVAAKSSEPRSATPAALAPAAAPDTPAMTPSAAPAEPEASEAPPVPADDSPAAPVTAPGDAGSSAGSQVASKLPELLHSAGVRNSRNMAAAAVITLFLVYVSAMYV

SEQ ID NO: 134701 - protein, 68 aa, Oryza sativa
  unsure (1)..(68): unsure at all Xaa locations
  Clone ID: PAT_MRT4530_36449C.1.pep
PGFPXHPRPLTRPRTRGRRLTRGRCWTTTRWWTAAAASARTRCLSLTSGHSTPPSSFSCILILYLLLP

SEQ ID NO: 134702 - protein, 97 aa, Oryza sativa
  Clone ID: PAT_MRT4530_3644C.1.pep
SSSSHPAPLLASPPPPPAARRRAAPAPRPRTSSPAAPRPPRGAPGAPPPPPPCRRSTEAPLLLDLLARSVPYSTAPYECVCVGGWVAYLQVRWWRSM

SEQ ID NO: 134703 - protein, 84 aa, Oryza sativa
  Clone ID: PAT_MRT4530_36450C.1.pep
MVSAVNSVTLRSLWSHLATSGIVFGSRADIASLIVSETGSGGLELVDGKEVVDDDIGVEGGGGGGRISREAERWPLVTLGPRAA

SEQ ID NO: 134704 - protein, 127 aa, Oryza sativa
  unsure (1)..(127): unsure at all Xaa locations
  Clone ID: PAT_MRT4530_36451C.1.pep
LKIIVGSKLNVKKVNPSCLFVGAIPSYEPSNMFKDSLXRGNLYEVDAKDMNYEKFWNXKSHCQVPQPSRRQXRGATKDKSGEEKIPSARGDRAKQSRVEKFSXQVCYXKTERKKSDKKRRPPNLSSC

SEQ ID NO: 134705 - protein, 127 aa, Oryza sativa
  unsure (1)..(127): unsure at all Xaa locations
  Clone ID: PAT_MRT4530_36452C.1.pep
MKRIVGSKLNVKKVNPSCLFVGAIPSYEPSDMFEDSLEVGNLYEVDAKDMNYEKFWNXKSHLQVPQSNRSQXRGATREKSGEEKIPSATGDXAKQSRVEKFCXGKFVIKXRRKKSDKKRRPPNLSSC

SEQ ID NO: 134706 - protein, 315 aa, Oryza sativa
  unsure (1)..(315): unsure at all Xaa locations
  Clone ID: PAT_MRT4530_36453C.1.pep
MEPSSFFQLSAPWGKSYEPPPSSQPIFTTGYEIRPELIIMVKENPFSGLDHENPYHHQREFEQLCLCLKIRGMKQXLRWKLFPFSLXERVKQWYTSTVKCANGEWEKLRDRFCLAFFPVTRITILRVEILSFQQMEKESIGVAWSRFTNLVQSGPTLSIPDHVLLHHFHSGLDKESAFYLDVTVRGSFLHKTPPKAKVILDRILENTSFMGQLDEPPPPPXEASVSRIEEPLVSESEPEVSASPDSSRELLPEPSPVVTEEIRTPGCTPLFRNGFNEDYGNTLIYFSKRKPSAPLPPPDPIKYQLLKETVREMTL

SEQ ID NO: 134707 - protein, 69 aa, Oryza sativa
  unsure (1)..(69): unsure at all Xaa locations
  Clone ID: PAT_MRT4530_36454C.1.pep
FLLKKDGLKVLAWAKEKRPSIRNAWMIKEVDWGPNQDLLXVYFYLTTSLSVYRKQXIKFYTFWIQIQVS

SEQ ID NO: 134708 - protein, 126 aa, Oryza sativa
  unsure (1)..(126): unsure at all Xaa locations
  Clone ID: PAT_MRT4530_36455C.1.pep
LKIIMGSKLNVKKVNPSCLFVRAIPSYRTSDMFEDSLXRSDLSEVDSEDMNHEKFWNGSITELPQPSLSQPKGATRDKSGEEKIPSAIGDRAKQSRVEKFCXQVCYXKTRRKKSDKKRRPPNPSSN

SEQ ID NO: 134709 - protein, 47 aa, Oryza sativa
  Clone ID: PAT_MRT4530_36456C.1.pep
MADDHLIAVGWSPPTDVRRRWKSSDAGNQRDITGRLQQDSDDGSYLI

SEQ ID NO: 134710 - protein, 127 aa, Oryza sativa
  unsure (1)..(127): unsure at all Xaa locations
  Clone ID: PAT_MRT4530_36457C.1.pep
MKRIAESKLNIKKVNLSCLFVGAIPSYEPSDMFEDSLQTGNLYEVDSKDMNYAKFWNXKPHLQVPQPSRSQLKVQPWFESGEKKIPPATGDRAKQSRVEKLCXQVCYXKAERKKSDKKRRPPNLSSC

SEQ ID NO: 134711 - protein, 127 aa, Oryza sativa
  unsure (1)..(127): unsure at all Xaa locations
  Clone ID: PAT_MRT4530_36458C.1.pep
MKRIAESKLNIKKVNLSCLFVGAIPSYEPSDMFEDSLQRGNLYEVDAKDMNYEKFWNXKSHLQVPQPSRSQXKGSTRDKSGAKKIPSAIGDRAKQSRVEKLCXQVCYXKTERKKSGKKRRPPNLSSC

SEQ ID NO: 134712 - protein, 74 aa, Oryza sativa
  Clone ID: PAT_MRT4530_36459C.1.pep
TWSTKFSNEMAMGSIRFSWTVVVQPQRCIPPSINCLLSLCLREKQSCRCSAAAVTVSYSERTHDLMGTIHFQLN

SEQ ID NO: 134713 - protein, 168 aa, Oryza sativa
  Clone ID: PAT_MRT4530_3645C.1.pep
MAAVMVARQGRELQRYSDNTGGRMVVGCIPYRVRGDGGGVEVLVISSQKKGAAAGDVVMFPKGGWELDESVDEAARREALEEAGVLGEIGASLGRWCYRSRRYDATYEGFVFPLRVTDELDRWPEMAARRRSWVSPQQAMDRCPHWWMREALQRFADLFPQPTPLSLL

SEQ ID NO: 134714 - protein, 134 aa, Oryza sativa
  Clone ID: PAT_MRT4530_36460C.1.pep
TPSTRHGRHGARSTRATRRGRSQAGRSKRDTPLRRPQPPPSSSSSPAAAPRRPPPPTTLRRRWRPSPRSPGRRRRRTPLPGRTAPGPAAARLWPPAPRRPSPSSARRPRRRSRRRRSARSPPPRWRAPPPQCWG

SEQ ID NO: 134715 - protein, 75 aa, Oryza sativa
  Clone ID: PAT_MRT4530_36461C.1.pep
HCKSIANRSHMSTSPNRLPSCFFIPPMAILHLPSPSSTTSPSPLAHLPRYGDGAYYLGAATATTTCVPIGGDGKT

SEQ ID NO: 134716 - protein, 59 aa, Oryza sativa
  Clone ID: PAT_MRT4530_36462C.1.pep
PNIRDNRFEHTKTWVHTTTKGERIEEYQLPDLCPQLGETTKEVSMNMKLTKSWINVKLS

SEQ ID NO: 134717 - protein, 47 aa, Oryza sativa
  Clone ID: PAT_MRT4530_36463C.1.pep
RNWNYGIIFWLVFKTMFTDQLIIIQFVIAKPKKKKKKKKKGGARYRG

SEQ ID NO: 134718 - protein, 56 aa, Oryza sativa
  Clone ID: PAT_MRT4530_36464C.1.pep
RTVDHSGPCHLQLTSDPNHAPPRPGGLSRLPPSLVPTPISVGEGAIKPVHQDFKII

SEQ ID NO: 134719 - protein, 78 aa, Oryza sativa
  unsure (1)..(78): unsure at all Xaa locations
  Clone ID: PAT_MRT4530_36465C.1.pep
MASRVVFFAAALMAAMVAICGAQLSESEMRFRDRQCQREVQDSPLDACRQVLDRQLTVRERSSRCPRPGRXAGMHVQH

SEQ ID NO: 134720 - protein, 113 aa, Oryza sativa
  Clone ID: PAT_MRT4530_36466C.1.pep
LWSILEAQALRVGEARTRGFGRTLIVQVRFRSKLEIRRRFQKWILQVLENVLAKKLSSSSLTTVPHIESRGKSSNKVYNYMEYKIYLLIHKSLLADCGRLPLPISRYCSSGAR

SEQ ID NO: 134721 - protein, 64 aa, Oryza sativa
  Clone ID: PAT_MRT4530_36467C.1.pep
GKWAIPGPDFEQFFFKKNKLCLQVHSMFALHCNSTDTNTFTQSLLFNFGGSPLNDENLTAKVTH

SEQ ID NO: 134722 - protein, 122 aa, Oryza sativa
  Clone ID: PAT_MRT4530_36468C.1.pep
MAKPGEEHAICSNYGKNHHTLMFHVCMHATMHTVTSKPTKWLIAKLYSFGHEDVYRYTLISQVQLHWHAMERRTRNRVIRFCKVQWSNHAEEEATWEREDELKAAHPDLFASSSESRGRDSV

SEQ ID NO: 134723 - protein, 51 aa, Oryza sativa
  Clone ID: PAT_MRT4530_36469C.1.pep
TMHTLNFYIHYYKSHTFCFKEPTGSETTLVQNFTSPKSGVSLGVHTALIQR

SEQ ID NO: 134724 - protein, 44 aa, Oryza sativa
  Clone ID: PAT_MRT4530_3646C.1.pep
AFINIIHAGNLFLYQAKSLNTLTLIQSTLGSTERTNSINEIRSF

SEQ ID NO: 134725 - protein, 541 aa, Oryza sativa
  Clone ID: PAT_MRT4530_36470C.1.pep
MGSRFPSHQLSNGLYVSGRPEQPKEKAPTICSTAMPYTGGDIKKSGELGKMFELHAVKSRKSGPLSNAPSRNASFGGAASNSGPVPNAGDRSNYSGSLSSSVPGASGSARAKSSSGPLNKHGEPVKRSSGPQSGGVTPMARQNSGPLPPMLPTTGLITSGPITSGPLNSSGAQRKVSGPLDSAASKKTRATSFSHNQAVTKITTEDSYSITGSLSKLILGAVGVLFVLGLIAGILILSAVHNAILLIVVLVLFGFVAALFIWNACWARRGVIGFVDRYSDADLRTAKDGQYIKVTGVVTCGNFPLESSYQRVPRCVYTSTTLHEYRGWDSKAANTQHHRFTWGLRSMEQHAVDFYISDFQSGLRALVKAGYGARVTPFVDESVIIDIDPDNKDMSPEFRRWLRERNLSSDDRIMRLKEGYIKEGSTVSVMGVVQKNDNVLMIVPPPEPISTGCQWAKIEKNVQMLGMIKYFRRRKSFNDVVIAIEEKQTYGDLGAEGISYRALAAAQQIQNFRTDYELGIAEAMNNCRRSPRRPGPKIPIY

SEQ ID NO: 134726 - protein, 668 aa, Oryza sativa
  Clone ID: PAT_MRT4530_36471C.1.pep
MAKALAVVSAFCLLVAPAAAARSLVDVIGGAFGGRKDYYTPGPTGQHHSSSPSRSYITQSLPYLILLLLGYVNWSNGGGGGYNPPSPSIGTSPTTPGGGGGYTPTPSDTPPSPSSDTSPSTPGGGCSSSPTPCDAPPSPSSDTSPTTPGGGGGYSPTPSDTPPSPSSDTSPTTPGGGGGYTPTPSDAPPSPSSDTSPTTPGGGGGYTPTPSDAPPSPSSDTSPTTPGGGGGYTPTPSDTPPSPSSGSSPTTPGGGGGYTPTPSDTPPSPSSGSSRTTPGGCSTPTPCGTPPAPSSGTSPTTPGGSYYPPTPSIGDVPPSPSSDTSPTTPGGGSPSTPCDTPPSPSSGTSPTTPGGGYYPPTPSVGDVPPSPASGTSPSTPGSGGYSPSTPCSAPPSPSSGTSPTTPGGGYSPSTPCNAPPSPSSDTSPTTPGGGNYPPAPTIGNVPPSPSSGTSPSTPGGGCSSSPTPCDAPPSPSSDTSPTTPGGGYYPPTPSIGTSPSTPGTGGGYYPPSPSTGGYTPTPDVPISTPSSPYSPLVPTPPSSTTPMPFDPNTAPFPCSYWLSHPGVIWGLFGFWCPMARLFGPTAAAPFGHDLTVPEALANTRADGVGELYREGTASLLNSMVNSRFPFTTQQVKDAFSAALSSGGDHAAAAQAQLFKKANEGHVMR

SEQ ID NO: 134727 - protein, 200 aa, Oryza sativa
  unsure (1)..(200): unsure at all Xaa locations
  Clone ID: PAT_MRT4530_36472C.1.pep
MVPMAKALAVVSAFCLLVAPAAAARSLVDVIGGAFGGRKDYYTPGPTGQHHSSSPSHSHKAPPCAPTPPQGGGGGYNPPSPSIGTSPTTPGGGGGYTPTPSDTPPSPSSDTSPSTPGGGCSSSPTPCDAPPSPSSDTSPTTPGGGGGYSPTPSDTPPSPSSDTCSTTPGGGGGYTPTPSDAPSXPSSDTFTTTLSGGGGY

SEQ ID NO: 134728 - protein, 126 aa, Oryza sativa
  Clone ID: PAT_MRT4530_36473C.1.pep
MAMLTEEGAGAVPMAVSASAAMLWRVFIMGGEDKEMVHMTRRRWLSLRSWEGSDEPTTVSSSLATFSRPCPPPQPPLPLASSPEAGSHRMSRPQPLPLLLVLPDLSGHGVAPPCLVGHGRQGRPPG

SEQ ID NO: 134729 - protein, 160 aa, Oryza sativa
  Clone ID: PAT_MRT4530_36474C.1.pep
RPGKQEKRKKTAYTLLLFVGLLSKATATISPLLSPQAKQDAVHSNQKIIGSKLDLGSSSSSPSPGSTNHGVLLLHGVQRRRRRQRRRRRRSGPERVLAGPDDRAGALHDLPPAAAAPEQLRRLPVLLIDRRRWIVAGRRTAGRRAMFDRGPSCVEWMMQT

SEQ ID NO: 134730 - protein, 201 aa, Oryza sativa
  Clone ID: PAT_MRT4530_36475C.1.pep
MWISGSAVSAPIAGLWYHLDAISQCPNFKMIAPAFVLIVRPWPHMAATFHTYKKPLTSLTTVLQYGYSSTQGRLSLFHDGSRNGVQRNASVQEALMDERMDVACGCHFLPLARHESAPTLSLGSSHCQKPVPCNRTQFSSDPLRAISNANGLADLIISMVFLAARKREPNQEQHGSSNGVPWMALQIDLHNGSSNLLTSPE

SEQ ID NO: 134731 - protein, 83 aa, Oryza sativa
  Clone ID: PAT_MRT4530_36476C.1.pep
SSKASLYRQKRGRLKVTGAIQLISSTYRMTVLETLVSGQDACAHETPHILESKAEPRLIRIASADALFILTSYPVNTSTHNTR

SEQ ID NO: 134732 - protein, 132 aa, Oryza sativa
  Clone ID: PAT_MRT4530_36477C.1.pep
RGPNSSPKLQGIRAKIRTLAQSGVLTGAPMAGSPPASHHLVLTSFWLFFIKQSLLNVSGKQLSSQMQQVSKSKQQQATITKSKSNKAAREVAAAGSNLPHPQLVVVHPRLCCRSTRRHHLRAGCCQIRARRR

SEQ ID NO: 134733 - protein, 62 aa, Oryza sativa
  unsure (1)..(62): unsure at all Xaa locations
  Clone ID: PAT_MRT4530_36478C.1.pep
GIKGMILPFFNHXXTNQGFSWELXLLFGXFMGHYGHNHIYMRXAYVSSQVARFIISLKSIYL

SEQ ID NO: 134734 - protein, 239 aa, Oryza sativa
  Clone ID: PAT_MRT4530_36479C.1.pep
MVTGRLPAIGRILDPTSQISARPTPPSLPQSPRLLRIRATARLSRAPPDPIRSRPDRFPSPWQITAPSTRIPRFRVAGLHSRRPRSARIAGPHHRRCRPRSARIAGPHHRRRRPRSPSICTAPDEFNPCAALLECECKNSAAAENTLLRAGYGGWLLYSAASAGDMAFVQELMDRDPLLVFGEGEHGVMDMFYAAARGGNAEVFKLLLDHAMSPRCSTNCPNGEGAGAVVAAPRCSGWK

SEQ ID NO: 134735 - protein, 52 aa, Oryza sativa
  Clone ID: PAT_MRT4530_3647C.1.pep
MELGVPKPWRTMPAMTRMEQGWKAGRGARDVVFHVVPADAATVAMTMDEGVG

SEQ ID NO: 134736 - protein, 307 aa, Oryza sativa
  unsure (1)..(307): unsure at all Xaa locations
  Clone ID: PAT_MRT4530_36480C.1.pep
MGRDKVQALHLKVIIIFCILTGTAVGAALPSLGGMFPAIQPESDVFIYVKTFATGVILAAGPCAHLAHGLRGSQLLGCHHLPPTSDKSVGYTINKGTSFSIRSPSTRALSINTNPEQGVPTAPVLTVINYDLRTVNTYTFTIRVILTAYNFNDYYICFIIYPNYGTVTILDPLDYHHMTYKQFLTILXYAYNYYKKKGGEXIQTREKLLVYTYWPCHKQSRGTVLCGYYACKFLRVNGRYMVNAEDLPRIELRTSFDDTCIINVQCDLYHFIHHECYHVKGRFFDAESILATSEAYKNLQEWNNRTT

SEQ ID NO: 134737 - protein, 129 aa, Oryza sativa
  Clone ID: PAT_MRT4530_36481C.1.pep
MAKGMACGETSSPAAPDAVPYWHYGEGRGLAKPVRPQPLTPCLIGTMSKGVGGRNLFACKAMRHTLLVLWRRAWVGDTRSPAALDAVPYWRYGEGRGWTKPLYPQPLTLYLIGLMVKGVGGRNLLARNP

SEQ ID NO: 134738 - protein, 71 aa, Oryza sativa
  unsure (1)..(71): unsure at all Xaa locations
  Clone ID: PAT_MRT4530_36482C.1.pep
PQDPRRMVLRVWRSATVFFTXGCRRHCRFRLLRQRKLWIFLVRVRIALARALFMNPTILLLDEPTNHLDMA

SEQ ID NO: 134739 - protein, 80 aa, Oryza sativa
  Clone ID: PAT_MRT4530_36483C.1.pep
RLRFKKNRMKLGRVSTGHGRIGKYRQDPRGRGNPGGMHHHHVLFDKYHQRYLGKVGMCYLHRLSNRFHCRRVNVERLWSM

SEQ ID NO: 134740 - protein, 159 aa, Oryza sativa
  Clone ID: PAT_MRT4530_36484C.1.pep
FDLNVANMDNFFAPVFTMGKYYTQGDKVLMPLAIQKFDDKLSNMRIGRRPGRPQGVRVGRFINAAGTTGFPTGKRARLDATSSCASKRRNVSHQIEEHARKARRRSYGGECDKIQIDPELPGKELRNFRPARPGTSGEEILHKLTRDIHNIQRILAGDT

SEQ ID NO: 134741 - protein, 122 aa, Oryza sativa
  unsure (1)..(122): unsure at all Xaa locations
  Clone ID: PAT_MRT4530_36485C.1.pep
MVVQGIPCRIGLRMYKPIRERRHRGPEPGSGAAGEEIGATEEATTGPSPSGSASRRWLLADRWGLDAGALGFSRWGALPPAPAPEPPHRRCPSLXRGVIACDGREEEVVRVSVPNLASMAPP

SEQ ID NO: 134742 - protein, 195 aa, Oryza sativa
  Clone ID: PAT_MRT4530_36486C.1.pep
PTRPDQRPGSSLDGRRLACKRKNIEGVNGQCSAGASTSFSHRNDSIFHNIASSSHNPSPSTNLPSPNCLLVPSTLDEQLPRYGATTAGLSSSSYDPSGGNNNSGGSQRSFRPRTSLAQHIGPYGVWPSSSTIRHSNSWNHQPPPFQSSFDEPPEVIPVVSSLNFQYQHPMNVVPGIPQMSHRFTGPGASSSKTGN

SEQ ID NO: 134743 - protein, 179 aa, Oryza sativa
  unsure (1)..(179): unsure at all Xaa locations
  Clone ID: PAT_MRT4530_36487C.1.pep
TPRPRPPRPPRPPRPPRPRRPARPPRPPSPPQPPSPPWPPPRPPYPPFPPRPGIPPGPASPAGPPCPPYPPGPARPPSPPFPARGTRGGRSSPTSPPAPPSPPXPHAPPSAPSPPLPPSPPXADXPTKPTSPPQPPSPPYPPSPPXPPAPPGPPRPRPPRPPRPPRPRPPGWPGSPGWP

SEQ ID NO: 134744 - protein, 59 aa, Oryza sativa
  Clone ID: PAT_MRT4530_36488C.1.pep
SYTLGGAGSQSHVNHPRRGRHGHLTGSDDPPGAPGSYATGSPERHFDRLSPSGACVVKV

SEQ ID NO: 134745 - protein, 79 aa, Oryza sativa
  Clone ID: PAT_MRT4530_36489C.1.pep
CVFFFLGLSFFNTLSSYHAVIASNYKTTTYCSMDRFDKHQPILIYKTRKNLPQNGTGCRLTGDTLPQAIPYHLCGYCEL

SEQ ID NO: 134746 - protein, 808 aa, Oryza sativa
  unsure (1)..(808): unsure at all Xaa locations
  Clone ID: PAT_MRT4530_3648C.1.pep
SHDQINWHDSIPEGEFWTCTGVKQISQASCFXTSTRFWHARWDRSEVRITTAIFLMAEKPPASPSSAGKDGSAKSKFPRLGLSEINDDNIVPVTPDKLTPEQQMDLEAMMEQARNQFLNSFMETRKGTLVQKYKVKMTLXGVQGDGSQGVQGVGSXGFKVMVLRDFKSIVDGTIAEYQATGPVYLPGGVFPNYRPLITDNQPAVKSVPLNAPSAQPTAPVSAPAPAVPSSAPGQLVNPQLLVREQPQHSGQNVNRLTQDQVAVMFLPPQPTADPXNNSRFNRHHQASRLCSQRNRRHQGSWLCNRSXQTPLRQQVVQLIQQQAKLSKLPGGNLNYQYQSPSPQVQYQQGGPAQSQFVSQYNQFEPMPQQAQGVPQQRPWADMIADVMRDSLDSSRRMLGICIGTHTLNGLKGWADLEKQFHSYFYSGVQEMKLSDLTAIKQRHDEPVKHYIQRFREMRNKCYSLSLTDAQLADLAFQGMIAPIREKFSSQDFDSLSHLAQKVTLHEQRFAEARKNFKKVNHVCHYIYGSDDDDEDDTKIAVAEWVRSKKVIPCQWVKSSGKEERYDFDITKTDKIFDLLLREKQIQLPAGHTIPSAEELGKRRYCKWHNSGSHSTNDCKVFRQQIQSAIEGGKIKFDDSKRPMKVDGNHFPVNMVHTSGRTTDGGRARGFQVNSAKIINKYQKNYFKQHERRYKEDNGGFDPHWEKKFFRFCWNEGMRLPSIEDCPGCGDIAESSRRSYNRSNRLRQTRVPVHQRLGPVNQDHDKGDDEDRKTQWCSFGIFTKNQKRRVQKLRNRERFQELSKRSTIG

SEQ ID NO: 134747 - protein, 107 aa, Oryza sativa
  Clone ID: PAT_MRT4530_36490C.1.pep
MEWGPCFHGVPMSNLGTQSLVKRVGRRLQSSSLAPARNRWLRCRRGSHGQPRIVSEKPPHPTVLPDAIAALPAAVAAAWITPPPLQPRLHSVPSKPMGKRALDLVGN

SEQ ID NO: 134748 - protein, 133 aa, Oryza sativa
  Clone ID: PAT_MRT4530_36491C.1.pep
MAPCPAATTTRIGAPPFAATTARRPARGATTTTKARASGLRQVEGPVSERAYSSSSPAPTHKVTVHDRQRGVVHEFVVPQDQYILHTAEAQDITLPFACRHGQIRQPEALGISAELKDKERDDYALELAMGDE

SEQ ID NO: 134749 - protein, 67 aa, Oryza sativa
  unsure (1)..(67): unsure at all Xaa locations
  Clone ID: PAT_MRT4530_36492C.1.pep
LDHRTADLPNYITTKDCKENMXLLNIIPYLLAAMAEIDLYRETNHDAGVYSRSVTCCQSSSSKVACL

SEQ ID NO: 134750 - protein, 151 aa, Oryza sativa
  unsure (1)..(151): unsure at all Xaa locations
  Clone ID: PAT_MRT4530_36493C.1.pep
YFNFDIHLLINFLLAPPVPLPRRPRRHQSTTVAQNPVALLQLWVDRRCLIFPFLHADYIPGSLRRFLAGAADCFVGVSVDKDAERLSDDHSLPAGNTADLRTLAAQRLGCPELIQAGXSRWDAFCLSNEXDLVHCIDAYVSFEVGRRLLRA

SEQ ID NO: 134751 - protein, 95 aa, Oryza sativa
  unsure (1)..(95): unsure at all Xaa locations
  Clone ID: PAT_MRT4530_36494C.1.pep
VCCPIFIPRARRSYVVCMHVLEIATTLLSWRHADREIDLPQRACSGGAVEVPQAAPGGAVVLAGAVVLAGRGAAAARRXXSXDGRRRRPPWRMRW

SEQ ID NO: 134752 - protein, 172 aa, Oryza sativa
  unsure (1)..(172): unsure at all Xaa locations
  Clone ID: PAT_MRT4530_36495C.1.pep
YFNFDIHLLINFLLAPPVPLPRRPRRHQSTTVAQNPVALLQLWVDRRCLIFPFLHADYIPGSLRRFLAGXAADCFVGVGVDKDAERLSDDHGLTVANTADLRPLAAQRLGRPELSQAGLQAVVRAVMGADLVKPQRVTMSRWDASCLSNEQIRYACIDAYVSFEVGRRLLRA

SEQ ID NO: 134753 - protein, 79 aa, Oryza sativa
  Clone ID: PAT_MRT4530_36496C.1.pep
RSTCPSDKVNLQFQDWICSSFFQRFSIYCREETERCSITFCDCAMNLKKIGYSLGRPSAITSNLHWLQLVTCMAVSSIL

SEQ ID NO: 134754 - protein, 71 aa, Oryza sativa
  Clone ID: PAT_MRT4530_36497C.1.pep
HIHVTYMASVRVFLMHIWDLKHQELLRFRFYLLELMYMFGDLYLSCNLNLIILYALLTSNTRRMLPITLSP

SEQ ID NO: 134755 - protein, 110 aa, Oryza sativa
  Clone ID: PAT_MRT4530_36498C.1.pep
ETSFFGKSEAQLVFILITIHQVHFVSLIESSWPCYHLSTQSKRFFTSGLEQLICSYCLQPFCLLKHILEVCKCSELASCSYISWQGLCGEAHRYCFTTKQTMFTLVLHIF

SEQ ID NO: 134756 - protein, 105 aa, Oryza sativa
  Clone ID: PAT_MRT4530_36499C.1.pep
HHHSCARASSSPSPKHSLLSESSVVSMRVGSRGGGIRVGEGQPAGSTVAELTAESTVASSTPLDPPPSSLPSTDLPTTRSSADLRMVPPPLAEALHLEANPVSAL

SEQ ID NO: 134757 - protein, 116 aa, Oryza sativa
  Clone ID: PAT_MRT4530_3649C.1.pep
SRRHQYQLLHLPIQQQPIQQTPPSQQALQSTQQTPPRQLVVQPIQQTPLRQQVVQLIQQQGVINASAGGNLNYQYQSPSPQVQYQQGGPAQSQFVSQYNQFEPMPQQAQGVPQQRP

SEQ ID NO: 134758 - protein, 38 aa, Oryza sativa
  unsure (1)..(38): unsure at all Xaa locations
  Clone ID: PAT_MRT4530_364C.1.pep
KRRFPSYGSVIFLKKNFFSXPIFRGVLGLWILHVRKDA

SEQ ID NO: 134759 - protein, 272 aa, Oryza sativa
  Clone ID: PAT_MRT4530_36500C.1.pep
MAVSNNITACVNFLALVCAVPVVATGVWFASKQGDDCARVARWPLAILGAALLLVALAGFAGAYWNRRGLLAAYLFAMAALITLLLALLVFAFAVTRPSGAYPAFARAYDDYRLDGYSTWLRDRVAGDPRRWEGIRACLAASDTCRKLAQESVFFITPEQFYQSHLTPLQSGCCKPPTVCGYAYVSPTVWVNPANPAADADCAAWGNDPSQLCYECSSCKAGMLGTLREQWRRANVALVIATVALIFFYVIGCSAFKNAQTEDLFRRYKWRN

SEQ ID NO: 134760 - protein, 37 aa, Oryza sativa
  Clone ID: PAT_MRT4530_36501C.1.pep
TDRAYGTIQKETYPLFSIVTTIPHFILEILGMSNTII

SEQ ID NO: 134761 - protein, 659 aa, Oryza sativa
  unsure (1)..(659): unsure at all Xaa locations
  Clone ID: PAT_MRT4530_36502C.1.pep
MATFARHRVLLCRLAAALLLAPVAAAQPWQFCGQGGNYSANGTYQSNLAGLSATLPKNASASRTLFAKDSLGAVPDIVYALALCRGDVANATACESCVATAFQDAQQLCPYDKDAFIVYDLCYLAFSNRNILAAAADDDGSPRFLMNTQNASAPAEVFDAAVATLLNATSSYAAENSSRRFATGEEAFDAAAATPTIYGLSQCTPDMSPDDCRSCLGRIIALIPRYLSRRKGGRAIGMRCNFRYEVGPFFAGGSMLRLPAPANSTPTAPTGGRKKNKSGTALAIALPLVVILLATVVICLSVQRWRKRSRSKQQSSYSIQMAEDIESTDSLFIDLSTLRAATGNFSESNRIGEGGFGSVYKGVLPSGEEIAVKRLSMSSGQGIEELKNELVLVAKLQQKNLVRLVGVCLQEHEKLLVYEYMPNRSIDTILFDLEKRKELDWGKRFRIINGIARALQYLHEDSQLRIIHRDLKASNVLLDSDYNPKISDFGLARLFEGDQTREVTSRVVGTYGYMAPEYAMRGHYSVKSDVFSFGILMIEIVTGRRSSGSYSFDQSYDLLSRVWEHWTMGTILEMMDPSLTSHAPRDQMLKCIHIGLLCVQXNPADRXXVSTVNIMLSSNTSVSFNPHPSHLFSFPRVVQTQIYTRNHTHKLPNRPIGLG

SEQ ID NO: 134762 - protein, 106 aa, Oryza sativa
  unsure (1)..(106): unsure at all Xaa locations
  Clone ID: PAT_MRT4530_36503C.1.pep
MQMVLTTITTDCSQAVVPTYHPYPYAHLYPHAHPDSDHPMAHARWVLLAXPAAAPAMVVGPATPAAYHGQYFAVGAAPVPAAGRLTPPGPAPVESRGDRCDVNKNI

SEQ ID NO: 134763 - protein, 55 aa, Oryza sativa
  Clone ID: PAT_MRT4530_36504C.1.pep
TSLYTNTGSILLTIFPIAPNQQIPEITMILHNSEHAEIDQQSKASSKYYLIHATE

SEQ ID NO: 134764 - protein, 102 aa, Oryza sativa
  Clone ID: PAT_MRT4530_36505C.1.pep
MVARGGGAKIWCPDGASVWVEQGSGAARVWRHHNLAPPLWRRNEEDVEVGCKVADVHPWMCCCWRGNAECCCDLNRYRPDARGWTFTPKMEACNDVSAMVWH

SEQ ID NO: 134765 - protein, 182 aa, Oryza sativa
  unsure (1)..(182): unsure at all Xaa locations
  Clone ID: PAT_MRT4530_36506C.1.pep
HNHALYMLETLHLMVSLRKISDLQAFQIEMADHXQVGVSLNLSYTLRDHKNYLRTKWQQEMAYGQASSMLKYFQDKIADCPSFQYALQMDGEELIANILWVDAKMIADYARFGDVVSFDTTFGTSNESGEKNEENNEDTSILSDFNACMYEYEDMVEFEQKFDIMRCTLAKNSWLDSLSHQA

SEQ ID NO: 134766 - protein, 89 aa, Oryza sativa
  Clone ID: PAT_MRT4530_36507C.1.pep
MDLESTEPSLDWIDPCMPKVQSHDYHVLLQFEGCEGRWKAIVAAAFLCQWPAAQPAVTVGVGWERPRGNPPSPSASAWAGKAHAPGRGV

SEQ ID NO: 134767 - protein, 210 aa, Oryza sativa
  Clone ID: PAT_MRT4530_36508C.1.pep
MESGGCPYIHFRLYEDCQRMTSSYVQMVSDIKRHVSHLAAAENQGVVPIISAGQIFPGPAAGEAYCKYKTLVLPSVPNHNMHFVVVLHTPPNWAGGTREPQPKATKRSMLRTVVSISEAVRFRELLTRIVMGFAAGLYGPTLQPWVMLWPSLVPNTPTPRIFTTAFDDDHFKNWDVYCKLARAGAQGFAPGTRGFATYESLIAFLGACLH

SEQ ID NO: 134768 - protein, 196 aa, Oryza sativa
  unsure (1)..(196): unsure at all Xaa locations
  Clone ID: PAT_MRT4530_36509C.1.pep
MILENNIFSMSGLAPSLRKLRRGGGVVMPAAGETVREAAALCRLACPIALTALMLYSRSALSMLFLGSLGDLPLAAGSLAVAFANITGYSGLSGLSLGMDPFCFQAFGARQPRLLGLTLYRSVLLLLWCSLPLFALWLNMAKILLFLGQDRDISXMAQEYLSFFSSPYSFFFFLVHPFLGVLTCTPFAHPVCFFPV

SEQ ID NO: 134769 - protein, 506 aa, Oryza sativa
  Clone ID: PAT_MRT4530_3650C.1.pep
MNAESKLLSLRQKIEDSGCQAVWSLDPGFDDLAKCISFKLKVLRKKLLAWSKNLSKLMGLLKNCNKVVDFLDLVEENRMLSVYEWNFRETVKHMGFPPKWIEWVQMVFSTASSAVLLNGVPGNSFKCRRGVRQGDPLSPLLFVLGAELLQRIINKAFHQGLLSKPIDESSGDGFPIIQYADDTLILLKASQKEVFYFKAILNMFAQSTGLKVNYNKSTLYPLNMPQDKVVLLSSILGCKIGSLPFTYLGLPLGTTRPRVVDFAPLVDRVERRLTSSSICLPQGGRLTLINSVLSSIPTYYMSSVQLPVTVIKAIDTARKNCLWRGNNHSSTRKSLAFWDRVCMPKEKGGLGVINLRVQNTALLLKHMVKFYNGADLPWVKLISQSYYDSKVPHLMMNKGSFWWRDITSLADIFRGIAKCEIRTGRTSLFWNDLWNDDFKCTSYPNLFAVTMYKSDSVKAMCSRPLEDSFALPLSDEAYSEFLHLQEGQFDFTIRDGGCLEFYLGLR

SEQ ID NO: 134770 - protein, 533 aa, Oryza sativa
  Clone ID: PAT_MRT4530_36510C.1.pep
MSSNMFGKKGWDSNGMDTSGSVCRSSSDINYINQRARLKSASLNCVGSPPRKNNNATQYRMFVATWNVGGRTPNKRLNLQDFLQVEESPDIYVLGFQEIVPLTAGNVLVLEDNEPAARWLALIHQALNMPQEPADGDEPSPLTPPPSSSTTTSESSNGARTRRRDAVSRSASGNLFFHTPSLKMLSNSYRVDSALVKTCNCSPEHSSVRRRAAEVRESVYLADAPAPAGETAAPAADEDDAPTTEAQCEAGCGGGGGMSYCLIASKQMVGLFLSVWVRKELVEHVGHLRVDCVGRGIMGWLGNKGCIAISMTLHHTSLCFVCSHLASGEKEGDELRRNADVAEILKSAHFPRACRPAPAAARRVPERILDHDRMIWLGDLNYRMSLSYDETRTLLEDNDWDALLEKDQLLIEREAGRVFRGWNEGKICFAPTYKYTHNSDAYAGETAKSKKKRRTPAWCDRILWQGDGIEQLQYLRGESRFSDHRPVCGVFAVEVDGGDGDGGGAAGKIMKGYYSLNARIGGDRSQCHQGDVS

SEQ ID NO: 134771 - protein, 118 aa, Oryza sativa
  unsure (1)..(118): unsure at all Xaa locations
  Clone ID: PAT_MRT4530_36511C.1.pep
MLTGTRICCFFGSGSKFPRYSLYRHRYWFYRPNFIYPLLFHNXIYVFAHDYGLXDKRFSSPLVKHIMIQRCQQNFWIXLVNHHSQYRKXDYSNCFYSELYPQILFGGFAIVVEIPLSL

SEQ ID NO: 134772 - protein, 146 aa, Oryza sativa
  unsure (1)..(146): unsure at all Xaa locations
  Clone ID: PAT_MRT4530_36512C.1.pep
VWLPALCRKMEVPXCILKGXSLFGPIVRFXPAWVVCLVTVKGEHKPEFSKMPKAFMXNFRGKFNEVRGSCLVGFKGFKPPPYFKARDIGLFKFSAHRMTFRGGPVVSFFSRILSRIFIQHCGAVLSFVFSWKQIIYVPPPVLEKPP

SEQ ID NO: 134773 - protein, 111 aa, Oryza sativa
  Clone ID: PAT_MRT4530_36513C.1.pep
DNRYEDNGNTLNYFNKKKPHPKYEPFEQAIPRPSCPLHTPKTLGGPPHLPLAVIWYPGAPTSPSGRPPPCLPYCRPGKKKKGRRRKGEKEADGIEVKKEMRGLIAASQGGL

SEQ ID NO: 134774 - protein, 534 aa, Oryza sativa
  Clone ID: PAT_MRT4530_36514C.1.pep
MARALRWPDLVGLGLGGMVGAGVFVTTGRATRLYAGPAVVVSYAIAGLCALLSAFCYTEFAVDMPVAGGAFSYLRVTFGELAAFLTGANLIMEYVFSNAAVARSFTAYLGTAVGVDAPSKWRIAVPGLPKGFNEVDLVAVGVILLITVCICYSTKESSSVNMVLTAVHVLFIMFVIVMGFWRGDTRNLTRPADPEHNPGGFFPHGAAGVFNGAAMVYLSYIGYDAVSTMAEEVERPSRDIPIGVSGSVVLVTLLYCLMAASMSMLLPYDAIDTEAPFSGAFKGSSGWGWVSNVIGAGASLGILTSLMVAMLGQARYLCVIGRSGVMPAWLARVNPRTATPVNASAFLGVFTAALALFTELDILLNLVCIGTLFVFYMVANAVVYRRYVAAAEDDEEGRRRGAVPTLAFLLAFSLVALCFTLDGAAGGVRRGGRPAVAAFRALVPQARRPELWGVPAMPWVPAASVFLNVFLLGSLDRPSYVRFGFFTAAAALVYVLYSVHASYDADEAAAALDGAKVLDEGCKEWMGEGEERTQ

SEQ ID NO: 134775 - protein, 51 aa, Oryza sativa
  Clone ID: PAT_MRT4530_36515C.1.pep
IYEVYSQIELGVAVSTTRSYQAGTMESIPSRWVPSLIALSRGRRWLGGILS

SEQ ID NO: 134776 - protein, 541 aa, Oryza sativa
  Clone ID: PAT_MRT4530_36516C.1.pep
MARRLRWHDLVGLGLGGMVGAGVFVTTGRATRLYAGPGVVVSYAIAGLCALLSAFCYTEFAVDMPVAGGAFSYLRVTFGELAAFLTGANLIMEYVFSNAAVARSFTAYLGTAVGVDAPSKWRIAVPGLPKGFNEVDLIAVGVILLISVCICYSTKESSVVNMVLTAVHVAFILFIIVMGFWRGDTRNLTRPVDLAHNPGGFFPHGAAGVFNGAAMVYLSYIGYDAVSTMAEEVERPSRDIPVGVSGSVVLVTLLYCLMAASMSMLLPYDAIDTEAPFSGAFKGSSGWGWVSNVIGAGASLGILTSLMVAMLGQARYLCVIGRSGVMPAWLAKVHPCTATPVNASAFLGVFTAALALFTELDVLLNLVSIGTLFVFYMVANAVVYRRYVAADDDDADHRRAWPTLVFLAAFSLVALCFTLLWQFAPAGRARTGLLAACGAAAVATVGAFRALVAEARRPELWGVPAMPWVPAASVFLNVFLLGSLDRPSYVRFGFFTAAAVLVYVLYSVHASYDAEEGGGAGAGAAALDGAKVQDEAADFKV

SEQ ID NO: 134777 - protein, 540 aa, Oryza sativa
  Clone ID: PAT_MRT4530_36517C.1.pep
MARALRWPDLVGLGLGGMVGAGVFVTTGRATRLYAGPAVVVSYAIAGLCALLSAFCYTEFAVDMPVAGGAFSYLRVTFGELAAFLTGANLIMEYVFSNAAVARSFTAYLGTAVGVDAPSKWRIAVPGLPKGFNEVDLVAVGVILLITVCICYSTKESSSVNMVLTAVHVLFIMFVIVMGFWRGDTRNLTRPADPEHNPGGFFPHGAAGVFNGAAMVYLSYIGYDAVSTMAEEVERPSRDIPIGVSGSVVLVTLLYCLMAASMSMLLPYDAIDTEAPFSGAFKGSSGWGWVSNVIGAGASLGILTSLMVAMLGQARYLCVIGRSGVMPAWLARVNPRTATPVNASAFLGVFTAALALFTELDILLNLVCIGTLFVFYMVANAVVYRRYVAAAEDDEEGRRRGAVPTLAFLLAFSLVALCFTLVWKLAPRGGARTGLLVACGAAAAAAVAAFRALVPQARRPELWGVPAMPWVPAASVFLNVFLLGSLDRPSYVRFGFFTAAAALVYVLYSVHASYDADEAAAALDGAKVLDEGCKLFFRLK

SEQ ID NO: 134778 - protein, 49 aa, Oryza sativa
  Clone ID: PAT_MRT4530_36518C.1.pep
MALTRWVRVARDGACDYRGSGGDAGAWRSRSTNLYFSTWDSENRLLNTE

SEQ ID NO: 134779 - protein, 85 aa, Oryza sativa
  Clone ID: PAT_MRT4530_36519C.1.pep
MEGRTLPSREVGSCGGKEGLGELCMDERRRGEELEEVRFDGDVVEGREVDGVVTRRRQLGFGGTKEIKRGAGAPAREGGETKRRE

SEQ ID NO: 134780 - protein, 509 aa, Oryza sativa
  Clone ID: PAT_MRT4530_3651C.1.pep
MGSSDSQAPLLLPRGSHRKEEEEEEYAAAGKVRGCCGGDGEGGWWREATAEAGRLASLAAPMIAVALLQLMMQLISTVMVGHLGEVALAGAAIANSLTNVSGFSVLVSALFPSIIFFYPSVRETTPSRDRMGFTSCPVAVAVWWLASRAAASEVLVEMPRTTIRHVVLHRWSIIVLLVVSVPIAIIWVFIPEVLPLIGQQPEIASEVGKYALWLIPGLFAFTVAQCLSKFLQTQSLIFPMVLSSSITLALFIPLCWFMVYKVGMGNAGAALSVSICDWVEVTVLGLYIVLSPSCEKTRAPLTWEAFSGIGSFLRLAVPSALMICISTVVLVYNLPHGIGTAASVRVSNELGAGNPEGARLVVGVALSVILCSAVLVSVTLLALRHFIGIAFSNEEEVINYVTRMVPVLSISVITDSLQGVLSGVSRGCGWQHLGAYVNLGAFYLVGVPVALFFGFAMHLGGMGFWMGMVAGGATQVTLLSIITAMTNWRKMAEKARDRVFEERIPTQSV

SEQ ID NO: 134781 - protein, 52 aa, Oryza sativa
  Clone ID: PAT_MRT4530_36520C.1.pep
LSSCSKFYIIFKTQWSHQQPMSLFHYCLYLNKLCHHSFSDYEAHLVLLKCQL

SEQ ID NO: 134782 - protein, 95 aa, Oryza sativa
  Clone ID: PAT_MRT4530_36521C.1.pep
PPPPRMVGASDESIPMPLDQAWFLSSSEYSPGKGSSSDQGYSAKGSSKKGFFGEHHHHPGFPRVRLPRASQYRAPLPSFCRVEPPQCSFFPPAQY

SEQ ID NO: 134783 - protein, 85 aa, Oryza sativa
  Clone ID: PAT_MRT4530_36522C.1.pep
MAIVGHDIAVCTYCGTGLAMPLLAARGEVADEVHHAGGSLMFQSSGHGKQKLELSGDVVDGLDEAICPVATSSRTAGSSTTRSTS

SEQ ID NO: 134784 - protein, 94 aa, Oryza sativa
  Clone ID: PAT_MRT4530_36523C.1.pep
VPSSSLRPLNQKPPNLTGMVNRIDRRSSHDSHRPPTGFSIASSVALERKPGMAQKKMQVLRHQAGITSGGKIERGGTRSASLSWGRGRNARTRG

SEQ ID NO: 134785 - protein, 141 aa, Oryza sativa
  Clone ID: PAT_MRT4530_36524C.1.pep
MAAGLGPRLAMQQQSTVFVPPPPSQQGSASTGPGMKRRWRHGRWGWWRGRVSRAVAANSRADAGTAVAAAKSGVATVSPSPRGMTMVVAPSKASRGQARGAQEGMAARDPELRIGHDGRLEDELRQQGGNGSLMWSQQQRR

SEQ ID NO: 134786 - protein, 84 aa, Oryza sativa
  unsure (1)..(84): unsure at all Xaa locations
  Clone ID: PAT_MRT4530_36525C.1.pep
LQLLWSKSPWESGSCXRPHXMLYQCHFQNNRERRVDQTMGFTGLHFCPIFLPKVKHPEKNPEPNILYLMVITVSNFDIRXQTGE

SEQ ID NO: 134787 - protein, 111 aa, Oryza sativa
  Clone ID: PAT_MRT4530_36526C.1.pep
MACVLRLASRSRSRSGLRPTLAAPRPSPVPPPPPRVGPTPVAPSPAPLRGLLLPLSPLRLASPDAFSSSSPSPAWLLDGLNWRRAGVGRRWFATEASAASTAAELVDVPLA

SEQ ID NO: 134788 - protein, 35 aa, Oryza sativa
  Clone ID: PAT_MRT4530_36527C.1.pep
MAIITAREALLDACGAVAYWSWGNQVCEDDHKALV

SEQ ID NO: 134789 - protein, 491 aa, Oryza sativa
  unsure (1)..(491): unsure at all Xaa locations
  Clone ID: PAT_MRT4530_36528C.1.pep
HEVARPTLAAPRPSPVPPPPPRVGPTPAXPSPAPLRGLLLPLSPLRLASPDAFSSSSMADLDFFHTVQWRRAGIGRRWFATEASAASTAAELVDVPLAQTGEGIAECELLRWFVTEGDQVDEFQRLCEVQSDKATIEITSRFKGKVHQIHFGPGDIVKVAVAFFYNLHGVDAANPSGEGSVPSGTLSTPAVRHLAKQYGLNISDIQGTGKDGRVLKEDVLSYAASKGLCKEPTSALEENIDQVELLEGRGSLPDANSYEDRRISLRGYQRSMVKSMTLAAKVPHFHYLEEINCDALVELKASFQNANKDHTIKHTFLPFLIKSLSKALSKYPLLNSCFVEETNEVIFKGSHNIGVAMATEHGLVVPNIKNVQSLSILEITKELSRLHEMASHNRLSTEDIAGGTITLSNIGAIGGKFGSPLLNLPEVAIIALGRIQKLPRFDDDENVYPSSIINVTVGADHRVVDGATVARFCNEWKSLVEKPERLLLHMR

SEQ ID NO: 134790 - protein, 102 aa, Oryza sativa
  Clone ID: PAT_MRT4530_36529C.1.pep
GLPHPRRGGGGPPPHRDARPPPAPAASPPGARRVPPAPGSGRGPPAHAQPRRPRPRALRRPRAGTPRRRGRGGPGAARGVERRRGRLGRPPRRAPRERQGAC

SEQ ID NO: 134791 - protein, 162 aa, Oryza sativa
  Clone ID: PAT_MRT4530_3652C.1.pep
SVCILAANGTISNVVLNQPGSSGSTFSYEGCFEILQLTGSFTIAEEGVRRRTGGLSVSLAGPDGRVVGGVVAGMLRAASPIQVIVGSFLPNNLKQHQRRMGLHPQPSAAPAFPAPMAPLHPPPVLTAAMPISQAAPGNNGCRSPQVSISSMPPQAHARCGAE

SEQ ID NO: 134792 - protein, 115 aa, Oryza sativa
  unsure (1)..(115): unsure at all Xaa locations
  Clone ID: PAT_MRT4530_36530C.1.pep
MDWTPLGSPRPSDTHTSTDSLYSIEHATALTLAHLDTLPPEPHPWLGAHQPSPXPPXNRLSAMSPGGLPPAGPLNGNAPPNPPFKAQGPNDKQPMTWDISGGPWTPKEPHSTLQP

SEQ ID NO: 134793 - protein, 66 aa, Oryza sativa
  Clone ID: PAT_MRT4530_36531C.1.pep
IFPCQVYGFVLVYYEFNNVIETFFFWFSEELMLDVYELFSIQVLLVRRSKLRNCCCYACAHPSLIC

SEQ ID NO: 134794 - protein, 62 aa, Oryza sativa
  Clone ID: PAT_MRT4530_36532C.1.pep
LSITLSQTHTNSKSKVPKYYYITCKRSYEIETPDTYYFYFLSNLSISLTLGKLTIPLCPQTP

SEQ ID NO: 134795 - protein, 36 aa, Oryza sativa
  Clone ID: PAT_MRT4530_36533C.1.pep
MVAALGQVSVRVPVPQESGTLGVRNPSPLPGRRKVQ

SEQ ID NO: 134796 - protein, 298 aa, Oryza sativa
  unsure (1)..(298): unsure at all Xaa locations
  Clone ID: PAT_MRT4530_36534C.1.pep
MDLGKSTIDTTGMKKLQVEGSIPGRQNLERSEGGTEPQPALGQVVVLEDFVRCGFLPPPSEFLLLILNFYGLSLLHLNPSSIAFLSIFAYLCEAYIGVVPFLDLFRYYYELXWMEPHRISGCCGFRVRDGMKAEYIPFNCPSSQSSXRSKWFYLHVDELDPVLVVLEDQPERSSDXTSKPSLIPSLQAFLDIVSDLXKQGLAGYEVAVDFIRRRIQPLXARAHPVYEYMGDEDVTRVSQWGLNDDIVKARVGQVLISPPSGSTQLPTPVCDLPVADKDAAINVSIFCMSKVISVATFC

SEQ ID NO: 134797 - protein, 110 aa, Oryza sativa
  unsure (1)..(110): unsure at all Xaa locations
  Clone ID: PAT_MRT4530_36535C.1.pep
MVTDKVYLLSYDLWNIWIRVHSHRVLLGDXVIHVIKDTPLKGSRSSNHSTNTTTIAYNPEDVKPTRXKISSKPSRQGSRXSSYQHXPIPYSSSVLVSPVDTETRNILVQR

SEQ ID NO: 134798 - protein, 136 aa, Oryza sativa
  Clone ID: PAT_MRT4530_36536C.1.pep
MARTKQTARKSTGGKAPRKQLATKAARKSAPTTGGVKKPHRYRPGTVALREIRKYQKSTELLIRKLPFQRLVREIAQDFKTDLRFQSHAVLALQEALEAYLVGLFEDTYLCAIHAKRVTIMPQDIQLARRIRGERA

SEQ ID NO: 134799 - protein, 238 aa, Oryza sativa
  Clone ID: PAT_MRT4530_36537C.1.pep
MANTRVFVLLLLAVAVAVVYSADAATITVVNRCRYTVWPGALPGGGVRLDPGKSWTLNVAAGTKAARIWPRTGCDFDGAGRGRCLTGDCRNALSCAVSGAPPTTLAEYTLGTPGAAGGDATDYFDLSLIDGFNVPMSFQPTSNAARCGARRRGPSCGVDITAQCLPELKVAGGCDSACGKFGGDAYCCRGKYEHECPPTKYSKFFKDKCPDAYSYAKDDRSSTFTCPAGTNYQIVMCP

SEQ ID NO: 134800 - protein, 54 aa, Oryza sativa
  Clone ID: PAT_MRT4530_36538C.1.pep
GGALKSPGLLQEQRVISRGFDHPLLGDNGWKAFINQLAMMMGSPGLWFPLFQKN

SEQ ID NO: 134801 - protein, 115 aa, Oryza sativa
  Clone ID: PAT_MRT4530_36539C.1.pep
ANMQSCNPSNSSIHKTASKPMQFPTLLLSAISCTCAQSMAHIIALKLLTLHSITPHCKHSFHSIIPQHHTLCSPNTLETPPCKGHLQQTCDTQKRSAAPPIGGPSSYGDSPMARC

SEQ ID NO: 134802 - protein, 58 aa, Oryza sativa
  Clone ID: PAT_MRT4530_3653C.1.pep
MVAAILWRKKLVLHRSLVEIFIGLKFEEMERGLLIGAQGGWIDGIAPAWQRWVGRDGW

SEQ ID NO: 134803 - protein, 70 aa, Oryza sativa
  Clone ID: PAT_MRT4530_36540C.1.pep
MAALATTIGGGATDVGATDPTPAMTADGRDDGSGAGDDAPTMSAGGGGGRSDVGDNYRRWGCGRFDAPTA

SEQ ID NO: 134804 - protein, 106 aa, Oryza sativa
  Clone ID: PAT_MRT4530_36541C.1.pep
QMNQLYVIVFQYCINQHLCSHSSEKCIPTSSILCPNKGKRKGPAYSQSILLSILHQMHVMFSLPSNLALAHCDLLICKAVRTFQESYCLHNIHMNQFFISSWAREN

SEQ ID NO: 134805 - protein, 260 aa, Oryza sativa
  Clone ID: PAT_MRT4530_36542C.1.pep
MKIFSWVANKISGKQEANRFPANSSAPYRANVSDCRKDEFSDWPQSLLAIGTFGNKQIEEVAQVENSSDNVQSVQDTVKFTEEEVDKIRKEFETLLAIKDQAEAQRSHDDDQVGLQKRADGEDNEKHIRQLINKRIIVSKSKNSLGKKGNTLKPRSVASLLKLFMCKGGFTSVVPEPRNTFPQSRMEKLLKAILQKKIHPQNSSTLVAKRHLDWKPDETEINECLEDALRDLDDDGAKWVKTDSECSKGPGKLGVYGVTT

SEQ ID NO: 134806 - protein, 55 aa, Oryza sativa
  Clone ID: PAT_MRT4530_36543C.1.pep
GAISTFFWHFQIRINSKFWGLSNIQLKGKKVLKTTVLWGYRSLHRLPNEVISTLN

SEQ ID NO: 134807 - protein, 37 aa, Oryza sativa
  unsure (1)..(37): unsure at all Xaa locations
  Clone ID: PAT_MRT4530_36544C.1.pep
TAEGWAKFTGGFFLGGISGVLWAYFFFXVIDLQYFLK

SEQ ID NO: 134808 - protein, 207 aa, Oryza sativa
  Clone ID: PAT_MRT4530_36545C.1.pep
MAISPARSGPLRVPAPTGPGSGVLSTPRGVGAGAPQLDGAPLPSAGGAPLHLAFFSVPPVLPSPSRLSPKSQPLLSSRGGGRAVAERHGEQRVSGGLSARRAARGRHTGTASQRLGSTRKPPATRPSSSFLHAAASRAAMRGRGEPATRRRTSSCYAPLSLLSPRDGEQGSGARAQRASGAHPPATRSSLPFSTQRRAGQRCTGVAS

SEQ ID NO: 134809 - protein, 216 aa, Oryza sativa
  Clone ID: PAT_MRT4530_36546C.1.pep
MDLLEKKNIKKGGEVEEEVARKGEERKEEEVVVEEKSHQQQQQQGEEELVGLSLAGGRPKVFPMSSPPPNPSQLTIFYGGSVCVYDSVPPEKAQAIMLIAAAAAAAASATKSNAAIAVKPPVMPAANATQAAVSPVLTRSLSLQSTSVATGQPQVAADPSSICKLQADLPIARRHSLQRFLEKRRDRLVSKAPYPTKSSEGMEASGMEVTAEGKAQ

SEQ ID NO: 134810 - protein, 114 aa, Oryza sativa
  unsure (1)..(114): unsure at all Xaa locations
  Clone ID: PAT_MRT4530_36547C.1.pep
FKRNPWTPGKLDSHHPKGPSFCFITCGFFASAXSHNLVLKXPREIILNQDQANLAASFIDSFANGGDSGKEPIFAGHPKVPVVQVKVKTLVAHPVEIAGPSEGVTVTPKGREGP

SEQ ID NO: 134811 - protein, 147 aa, Oryza sativa
  unsure (1)..(147): unsure at all Xaa locations
  Clone ID: PAT_MRT4530_36548C.1.pep
SVDGGRRGEPELVRLWCNWCAGEVGMTNDAGGGRGSRAGPEPMHARPRQDAAESEGNFACADLDARRGGRARDRCRARGRRXRKTAPCAPRARGHRSPRDAHSIALVEVEESRVSRARGCQDRGARRSPRSLRPARRSQGGSMRDAP

SEQ ID NO: 134812 - protein, 129 aa, Oryza sativa
  unsure (1)..(129): unsure at all Xaa locations
  Clone ID: PAT_MRT4530_36549C.1.pep
AAAAVVAAGNGAGGPPKMYQRPIYRPQAPAAKRRRGGRSSCRFSCCCCFFYAVLVVLLLAFVAAVAGGAFYLLYRPHRPVFTLCVARVDKLSLCYCDTAPSITDFMDVTLTVMIPNKXLVYLYDYFCRY

SEQ ID NO: 134813 - protein, 94 aa, Oryza sativa
  unsure (1)..(94): unsure at all Xaa locations
  Clone ID: PAT_MRT4530_3654C.1.pep
AGGREGSKWQVPTTTFSRIAIEXLLAAGHXALTAMVVHCTAAWGSASTTTAGCAMRKLLARVVVSPPTGDSYLXRVNTNPGPSRGPSHWAAARR

SEQ ID NO: 134814 - protein, 588 aa, Oryza sativa
  Clone ID: PAT_MRT4530_36550C.1.pep
MTAARDSGRAGGVRRFVLDPVKTTWSGLCVQWKLTMALARRREEKPCMHARMAPSARAAPMFPRLPPREYRYVVHEADDRARAWRRRDRSVDGGRRGEPELVRLWCNWCAGEVGMTNDAGGGRGSRAGPEPMHARPRQDAAESEGNFACADLDARRGGRARDRCRARGRRLHLWSLHDRMRGIRYSLPATYPRKTAPCAPRARGHRSPRDAHSIALVEVEESRKRSVCRGRRYREPQFRPLGSCRGASSSSPASSLRSVPLPDQPRGKKRSPTPTFHAFAAASHRPGACRVMTCTALLVPRVHGLRRVDALAAGHWMDSHGSAVEEIGRVSFVFDIVSLFIDLAPLNSKYVTSYSYVFYYYSRILEIMWFERSPKMKSLVFQREQFSIVVEASMNKHTVVMHSMDCLSEAKFNLEEYGLTILKDCAIVLRDTEVLVLVLRRLETAVKYQSPFSVFSGAMLNMVLVFHLLFVVNTEEHKSTLFVSVAGFVLDTVYLFLLGLRKSSQKFRCVGLFLMVISMFLFFVCSPILIYLIDLHFHVSKEQPLGALMYVMTVLTVITAGCSSLVDPREGYFLPGIYIRLAYRIGLK

SEQ ID NO: 134815 - protein, 518 aa, Oryza sativa
  Clone ID: PAT_MRT4530_36551C.1.pep
MADLHTYLYLGLALVSLLAVQLARRRRSSAAHGSGALRLPPGPWQLPVIGSLHHLVGKLPHQAMRDLARRHGPVMMLRLGEVPTLVVSSPEAAREVTKTHDVSFATRPLSSTTRVFSNGGRDIVFAPYGDYWRQLRKITVTELLSARRVASFRAIREEEVAAMLRAVGGYAAAGCAVEIRPLLAALVSDSTVRAVMGDRFPHRDVFLRELDRSIELTAGFNPADLWPSSRLAGCLTGTIRQAKKCWDTMSSVLESTIQEHLQKNGSSGGGAGATDEDLIDVLLRIQKEGGLQFPFDMDVIKSVIHNVFGAGSETSATTLGWAIAELIRNPMAMKKATAEVRQAFAAAGVVSEAALSELRYLHLVIKETLRLHPPGPLLLPRECREQCKVLGYDVPRGTQVLVNVWAIGRDPRYWPGGSPEEFRPERFGDGEPAAALDFKGTDYELLPFGAGRRMCPGLAFGLANVELPLASLLFHFDWEVPGMADPTKLDMTEAFGIGVRRKADLIIRPILRVPVPGV

SEQ ID NO: 134816 - protein, 99 aa, Oryza sativa
  Clone ID: PAT_MRT4530_36552C.1.pep
MGSAGSNPRALDILPAKGIRDQTKQQKGTEFRGLRIENTESPPPRESSLESSFEAAPLSPSRGAKKVVGVQQMLRRRTSRSQNLGVPLPASFASGGVGP

SEQ ID NO: 134817 - protein, 52 aa, Oryza sativa
  Clone ID: PAT_MRT4530_36553C.1.pep
LSGPLSPPIAPSGPLSSGGNLFAAATNFSISDGNTTRFWNSPWVDGRRPKDA

SEQ ID NO: 134818 - protein, 263 aa, Oryza sativa
  unsure (1)..(263): unsure at all Xaa locations
  Clone ID: PAT_MRT4530_36554C.1.pep
MALTGGGGLRWTVSTARGRSGAPRGAHVAATWQPRGQRXLDSPDLPEGRSDGGGSAWPARTGGSSRPSSHGTRRCGSTQQQRKAATSGDRPAAEGGGXAATRTATAAAKRLGGGAAAKRRRREGGXEEGPHRRRLTTVSDGGXWRQLDELRDHLRNQKGEVREGEGNHGWLGRQPKAPAMVKLTGARXNGVLAAESSGGEADSVALGLANPTAATARLGAVASGYRSGGGGGGEEGDGARAIEGMGELDEMEKKREGRAGMLI

SEQ ID NO: 134819 - protein, 136 aa, Oryza sativa
  Clone ID: PAT_MRT4530_36555C.1.pep
MARTKQTAKKSTASNVPRKLLVMKVARKSAPTMAGLKKPHRFKPGTVALREIRTYQKSTELLIRKLPFQRLVQEIAQDVRSYVRFQSSAVVALQEAAETYLVGLFKDTNLCVIHAKRVTIMPKDIQLARRIRGEKA

SEQ ID NO: 134820 - protein, 67 aa, Oryza sativa
  Clone ID: PAT_MRT4530_36556C.1.pep
YLNQLFFSGKDLRLFVKKKKGLFFLCNPPIKNAARGLVIKTPSRNPVMGFLLGLPRRFLNPETPRCF

SEQ ID NO: 134821 - protein, 55 aa, Oryza sativa
  Clone ID: PAT_MRT4530_36557C.1.pep
ETEEQDLMRFRAKVWKEKEDECKNLGGWCGRNGTEEFPTPKPEGEAKVAAQLCRS

SEQ ID NO: 134822 - protein, 599 aa, Oryza sativa
  Clone ID: PAT_MRT4530_36558C.1.pep
MATGPDLTPPAAAASAEAPSASAAKKDRHIVSWSTEEDDVLRTQIALHGTDKYEFFPLPISIDFFFLDLITIFYTVFPFPFGSWTIIAAQFKDKTARQCRRRWYNYLNSECKKGGWSREEDLLLCEISELANMRSVTSSVRQQARHIAMPMELSMYAQKVLGNKWTEIAKVVSGRTDNAVKNRFSTLCKRRAKDDELFKENGSLCSSTSSKRALVQTGCLTSGASGSAPPIKQMRPCNSDFKENMTPNMRLVGQDKSTQDSRQPLAIVYQNNQDNMNTMDTQNLVAKTAAKQLFAGEQNCVKHEGNFLNKDDPKIATLLQRADLLCSLATKINTENTSQSMDEAWQQLQHHLDKKDDNDMSESSMSGMASLLEDLDDLIVDPYENEEEEDQDLREQTEQIDVENKQNSSQTSMEVTSQMVPDNKMEDCPNDKSTEDNNMEPCPGEDIPTSENLTEAAIEDSLLQCVEYSSPVHTVIQAKTDAEIAASENLSEVLEHNRLQCIQLASPAQTTTPVEANAETPASEKLREVVKCNNPSCIEFTSPAHTVPTFLPYADDMPTPKFTASERNFLLSVLELTSPGSRPDTSQQPSCKRALLNSL

SEQ ID NO: 134823 - protein, 41 aa, Oryza sativa
  Clone ID: PAT_MRT4530_36559C.1.pep
MEAIVYYLQRHWRCSGRGGRPLSMESRGGQSRARDNQIHAR

SEQ ID NO: 134824 - protein, 197 aa, Oryza sativa
  Clone ID: PAT_MRT4530_3655C.1.pep
MPPPSPSRAPPVLQSPNRCHMPLPTRRAAIDACGVNGDLAVARLAAAAAHACDTVATLRYCAPTPLLLLRSASFRYCAAPPGPCWPAPSIGLIPCLLGETARGRLREKTFGRLCITVHGEQKQIQLRVQGNARFQEKENELLDAVARRLWQGLARRGSSSRRLPHGFGQKKSRRSRFRVTSSSCSSPWPGISTVEAR

SEQ ID NO: 134825 - protein, 677 aa, Oryza sativa
  Clone ID: PAT_MRT4530_36560C.1.pep
MVMMSCKRRKVSPASGATVVLPEEMMIEVLQWLPVESVLRFRAVCRSWATALSSDQFRGFHTAKNKIKPLPPKLFFVSQTAGFGSTSVHTSSPLSRSVPGGDIHRDLLLPSGQCARRFHHDAYTVPWPHLSARCYGTRVLRSQCGNRVDQPSATCQTVPSGSAGLGFDARTGEYKVVRLFREIISGEPHTKCQIYTLGGKHGDSWRPASGGVPFKFRTAGTYSISASQQHKLLPVFVDGFLHWLTGSLFSFLRPHAAILSFSVTEETFRLVRSPPFQVSGVHLVDLSGNLCMVRDLRRMSSTLEIWKLNDLYSSDWSLEHRIDLSTEHVARDLMKPDFIRVIGSAGSSGMSGKKNVIIATSNRKAIAYDPTSETLETILEIKGTPLPYQTARSALGLISLFEDSLAPVCKTNEEIALSSPLAKVIKEALLRLPGDYAVQFKLVSKQWHRFIESWSFARGYHMYNNRDRRPKIRLVGMGTVPEGLLSTFQIEYLVIDFVTIMLLLPPPLPVNDMPPAYLAGFLYWMSEPRLSQSKTSAILSFEIATKTFVVIQCPSCALTRHNRSPCESFVVELEGMLCVVLANPFEEELDIWKMEHGQWDRAYRVCLKGWPGYSLGANVVVPMAVDPKDGRILLNTGSKLGLYDPTKRVIENLYDLDEVLRVKQTDETLHVEDKEKS

SEQ ID NO: 134826 - protein, 114 aa, Oryza sativa
  Clone ID: PAT_MRT4530_36561C.1.pep
MSCVRANAAAGPRYVCKVWTQAPPDAETGVKDTIMMEANVRSFSVPGEVAMDDGTVLCVPPRMLHGASMEMPLRVRIDKLGAGTTNRSAIAAQTKKAMHKRQAKRYSNVRYDMV

SEQ ID NO: 134827 - protein, 44 aa, Oryza sativa
  unsure (1)..(44): unsure at all Xaa locations
  Clone ID: PAT_MRT4530_36562C.1.pep
KISPFCFPCPKFGTPKHHKLDLFLLNQKVFCSLIPXTPLXXXXL

SEQ ID NO: 134828 - protein, 135 aa, Oryza sativa
  Clone ID: PAT_MRT4530_36563C.1.pep
SCRRRHPPPQTPPPQPPPAPADRPDLATAAACHCRHGHAAASSAPPPLQPPTPPTRPPPPPSLQPPGFAGGGSGGGEVGEGRRGSGAARPVSPPASPPEAERPSVCKFAFELPKTTFESLKHQEVSDSHPIWGPV

SEQ ID NO: 134829 - protein, 256 aa, Oryza sativa
  Clone ID: PAT_MRT4530_36564C.1.pep
MKESGGTGVGGGGQPVSRAAVATQEGVERVPKGGERSGGSDMIEGRGKKKLGGGTERGEASGGGVRRRRVATEVEADRARGDAQRAAGSSSAWWDTAATAGSSSSSWARGVRRRAGTRRCLRRRLASPPRLPPPPHTAGARLLLRRCLLRRTPPPLASSSAAASPRLEQRELPPPLASPCSLPPPPPCLTAAAASSAAPRRRSPTLSPLASRRSLPPPPPRLAAATASSVANSPRRPSSRVKNVRFYGSRGNSYFF

SEQ ID NO: 134830 - protein, 186 aa, Oryza sativa
  Clone ID: PAT_MRT4530_36565C.1.pep
MWDEDQVNNATPNPKGKLLLLVVISFLSVLPWHTLASGSGKPLVTAITKDGATKLYTIAVKDGHPLALDLSGELVWSTCDASHSTVLPYERECVEIILSSSLWGPHKARRRGGGGRAGSSHGWSIKFGIRRPNLFLHWLLRSSSRTDLCRHRRPTLEFIVLATAGVAEEEEETTKPAVASLRLGDV

SEQ ID NO: 134831 - protein, 60 aa, Oryza sativa
  Clone ID: PAT_MRT4530_36566C.1.pep
NQVVSNRRQIQWHYKKDERDQRVSDPEHSSDKQKRQNPEGLNIHQKIKSREEEEEKRKES

SEQ ID NO: 134832 - protein, 126 aa, Oryza sativa
  Clone ID: PAT_MRT4530_36567C.1.pep
MWREKFNKRQVCPYLLLLHLTTAQRDGAPMLTGHNGGTDGDNEAGGGLVSALGATTAGRQGPAVAARGRGQSGHGDGRAMAPAADSTPPSSLGALQPLLSSRAAAPPHATAIAKPLLLSGHAAGQR

SEQ ID NO: 134833 - protein, 88 aa, Oryza sativa
  Clone ID: PAT_MRT4530_36568C.1.pep
SAGPWASCAPPCSAPWLTALLLGSISLGFLGLLDLQVCLSLLASLLGWTAAARQAQQKKKKKRGLDGDGVRRKKKKVLWIGRVGGRVG

SEQ ID NO: 134834 - protein, 220 aa, Oryza sativa
  Clone ID: PAT_MRT4530_36569C.1.pep
MASVHYYVQSHIQMNEYRDRVVLPKASKMFGKQINTCLKVMDMTGLKLSALNQIKMLSTITAIDDLNYPEKTETYFIVNAPYVFSACWKVVKPLLQERTKRKIKVLYGSGRDELLKVMDYEALPNFCKREGSGSSNDSSDGVDCYSYDHPFHQELYNYIKQQALNEDFIGPIKQGSMHVDVPTPDLEEAKIMETIESELHKFSGANGLSHSFNKIKIEGP

SEQ ID NO: 134835 - protein, 243 aa, Oryza sativa
  Clone ID: PAT_MRT4530_3656C.1.pep
MKHRLKIQPLIQVLPVLLRISGDKQVSLMDMQPGHYQQRRMVASSKAIKVGPWGGTAGSPWDDGAHRGVRSIALTYGRFLESMRVEYDRNGHPVHGEKHGGGGDGRTSRTAEVKLDYPYEFLTGVGGRCGPVAHGGSTVVRSLTFRTSTGAVHGPFGDASGDGVPFEYPMEGGVVVGFSGRSGWWHLDAVGLHVAALRPETLCDVVQERGAMAYRSFVYGNGGSSSGAHQLQQKRKPFEWCYK

SEQ ID NO: 134836 - protein, 94 aa, Oryza sativa
  Clone ID: PAT_MRT4530_36570C.1.pep
MALSTKATSAKVAFYVDFVIMFLGDGHDGDLSGDGEPALFLHSKNLKESHGQARFGGQELTATRSSGPEFAANKSNLSMPLGGGGEVDEDMVQY

SEQ ID NO: 134837 - protein, 348 aa, Oryza sativa
  Clone ID: PAT_MRT4530_36571C.1.pep
MAAASEEAIKQFSALMELLDEPLKTTFQHVHQGYARGTLVRFLKAREWNVPKAHKMLMDCLNWRIQNGIDSVLAKPIVPSDLYRTIRDTLLVGLTGYSKQGQPVYAFGVGLSTLDKASVHYYVQSHIQMNEYRDRVVLPKASKMFGKQINTCLKVMDMTGLKLSALNQIKICKITDSGLILYVMLSTITAIDDLNYPEKTETYFIVNAPYVFSACWKVVKPLLQERTKRKIKVLYGSGRDELLKVMDYEALPNFCKREGSGSSNDSSDGVDCYSYDHPFHQELYNYIKQQALNEDFIGPIKQGSMHVDVPTPDLEEAKIMETIESELHKFSGANGLSHSFNKIKIEGP

SEQ ID NO: 134838 - protein, 188 aa, Oryza sativa
  unsure (1)..(188): unsure at all Xaa locations
  Clone ID: PAT_MRT4530_36572C.1.pep
KDCGRKNFSAXKNRAARGRWCSAWCGEGSRGCERPAKITLSGGRPRLNTYRRRIGLTACEIGWRRVGANPDATRGSGEGENNRLGGECKNWRDLSRVEAKSHSAAAXWTSAHGVERRFLAAVVVPALSSSRLVRXMTVXEGVGRVIARQGDRARASGPEVDARRHGARQSRTTGRRAXGEEEAKKSTV

SEQ ID NO: 134839 - protein, 140 aa, Oryza sativa
  unsure (1)..(140): unsure at all Xaa locations
  Clone ID: PAT_MRT4530_36573C.1.pep
ASHDAGRRRRLPVWLPSPSLPDPAMGRPGEGGGGKARGRPRRGVAASAPXRGSPALPDPAGGRPGEDGGGESRXGHSATCGATTSALGASPLPSPPRSGRREAGGGWRRRGARPVGRDFFLFVQRIFAGGPMAVSMSFIS

SEQ ID NO: 134840 - protein, 73 aa, Oryza sativa
  Clone ID: PAT_MRT4530_36574C.1.pep
FHPREPSYHSPPRRRRRWWCRQCIWWRPPPPPTPTRRPCRLTTLTLTPTRTRTRTRTLTTLWRRFGGSFCVTQ

SEQ ID NO: 134841 - protein, 89 aa, Oryza sativa
  Clone ID: PAT_MRT4530_36575C.1.pep
SERVLTTRAESAKYRGRAPTLLYRSQAGSQAPRFIAGRVTDGRWGRPSISRGLSSTGDTNGCQADIHQGTTGCPPRTRVEHRGVCLKPE

SEQ ID NO: 134842 - protein, 97 aa, Oryza sativa
  Clone ID: PAT_MRT4530_36576C.1.pep
PRINAQALRQAAEQHPGVHGRRRLVAVSSAERVLLLPRHPRRALVPPWSRCPPRHTVARRRPSRLCFAAKLPSFHRAAVPHGIILRSRGGGLHSSAV

SEQ ID NO: 134843 - protein, 176 aa, Oryza sativa
  unsure (1)..(176): unsure at all Xaa locations
  Clone ID: PAT_MRT4530_36577C.1.pep
ARGELEEHRRRAHLVGEEGYAEEFSIEAIEAGAIDPSLVLEQIEAHIATVKEEAFSRKDILEKVERWQNAXEEEAWLEDYNKDDNRYNAGRGAHLTLKRAEKARTLVNKIPGMVDVLRTKIAAWKNERGKEDFTYDGVSLSSMLDEYMFVRQEKEQEKKRPRDQKKLQDQLKAEQE

SEQ ID NO: 134844 - protein, 392 aa, Oryza sativa
  Clone ID: PAT_MRT4530_36578C.1.pep
GQAGEGDAQGARDVPHRRRRQEDEAHQVLQEGLRHHHHRSSARRVDELLLRFALRVRVWSGVEGEGKGGGMMHAKSESDVTSLAPSSPPRSPKRGGGVGVGGANYYVQSPSRESHDGGYKSSSMQATPVYNSPNESPSHPSYGRHSRSSSVSRFSGTLRDGSRKAGGERKALNDKGWPECNVIEEEGPYEDLAGDTGLSRRCQIVLGFLCFVLLFTVFCLIIWGAARPYEPDVVVKSLTMDDFYAGEGTDHSGVPTKLVTLNCSLHIAVYNPASMFGIHVTTGPIRLLYSEISIGVGQVRRYYQPRKSHRLVTAVVHGNKVPLYGAGGGLMLSSSGGAVPLTLDFDLTSRGYVIGKLVRVTHKVHVTCPIVVDAKKTKPIKFSKKACAVYKI

SEQ ID NO: 134845 - protein, 83 aa, Oryza sativa
  Clone ID: PAT_MRT4530_36579C.1.pep
SVSALAIPAIARSRTVVACARRSSRRVWSASLRDHGAQEHAQRVAPDVHRHDGELPVERLQQLRVVCCGSLMRRMASAHHRAM

SEQ ID NO: 134846 - protein, 426 aa, Oryza sativa
  Clone ID: PAT_MRT4530_3657C.1.pep
MHCAKKAKVESQSAESLDRLSSLPPELKVAILSKLNVVDAIRASILSSAWRNVATYSVRYVSHLRHITVQIYYTDSDINNLISSCPRLNTLRLKYFKGINRLRIQAQAVQVLEVKGSFEDFHLHAPNLSNVYVTLNKTKVADRSKNYMMQAFVSLTGIEALVMKRCMVALPQTFEGFKRLSVLNLKYIYSTDADIANLISSCPWLKTLHLKYFEGISCLRIQAPALQHLEVQGNFEDLHLHAPNLLYLTLDKTETEQCDAVAGDKKNYPKEAFVSLTSIELSINGPSLTYLSEGCLLTKPPGVLDRLRKVLGACSIFRNAPMLRELEIQSFSRPDDSWSQPIWDHDQTEIKEPTLHHLLTATITGFVGLEYEVDLVRLLLRWSPALEELKVVRDDEDVLNDACMCESLTKLLALPRASTKAKIIAI

SEQ ID NO: 134847 - protein, 65 aa, Oryza sativa
  Clone ID: PAT_MRT4530_36580C.1.pep
VHIIHEWVWAGTPNEGAAWLCLQRLADTWHRILLIPVTGGVVVGMMHGLLEIFDQLKLVKPPQKQ

SEQ ID NO: 134848 - protein, 173 aa, Oryza sativa
  Clone ID: PAT_MRT4530_36581C.1.pep
MMASQIESHRAGAEIVTGDGVCRKKSIELLEELGLPKGLLPLEDIEEFGYNKETGFMWLVQRKKKIEHTFKKIKQTVSYAGEVTAFVEKGKLKKITGVKTKELLLWLSVVEVYVAEASPEKVTFKTGTGLCKTFDAAAFALGERAANFIENVRSKLYRSKKVYKLSTFGPSYL

SEQ ID NO: 134849 - protein, 62 aa, Oryza sativa
  Clone ID: PAT_MRT4530_36582C.1.pep
MSTMVYDCMVHKQSEESSEMHVRMRPLIRMRQHRPDVAGSRSGGGRGHQHRTPPNRSLPGLC

SEQ ID NO: 134850 - protein, 142 aa, Oryza sativa
  Clone ID: PAT_MRT4530_36583C.1.pep
MASQIESHRSGAEIVNGDAICRKKSIELLGELGLPKGLLPLEDIEEFGYNRDTGFMWLVQRKKKIEHTFKKIKQTVSYAGEVTAFVEKGKLKKITGVKTKELLLWLSVVEVYVAEASPEKVTFKTGTGLSDTFDAAAFALGE

SEQ ID NO: 134851 - protein, 64 aa, Oryza sativa
  Clone ID: PAT_MRT4530_36584C.1.pep
NFHHDMPSSVSSLSLHICLVEGTMSGHNFPAPKIVSFPGAVPMCTVIKSILKKIMVVVGMDPFC

SEQ ID NO: 134852 - protein, 166 aa, Oryza sativa
  Clone ID: PAT_MRT4530_36585C.1.pep
MAAEAAATSRFAAACGALSQYVRAADNVHRARTAAAAAAVRPLPLMPGADVAGDEREEEGGGAAASSAAAQMTIFYGGRVLVLDECPADRAAALLRLAASSRGVPRDDLASTAAAAGESADLPVARKASLQRFMEKRKGRLAARGQPYRRHDAAAAARGDHLALAL

SEQ ID NO: 134853 - protein, 112 aa, Oryza sativa
  unsure (1)..(112): unsure at all Xaa locations
  Clone ID: PAT_MRT4530_36586C.1.pep
GGKHQRTQTKQRNKRQETQSAPKAQRPNKEHGQARREREEQPGRGXHRKHSPERQAGNPGETKNHQTPPQNSRQXYKKTXLDGKVLPTVPRNVVCSLMNSGMSWLXVWQGFT

SEQ ID NO: 134854 - protein, 42 aa, Oryza sativa
  Clone ID: PAT_MRT4530_36587C.1.pep
IFNLLYQNRTYLVSCRIYTITYKVLILNCTYLSSCCTRTLIS

SEQ ID NO: 134855 - protein, 38 aa, Oryza sativa
  Clone ID: PAT_MRT4530_36588C.1.pep
LAYMIFRVRLTGGLHQRRPVLGYKRGTHFALSDADDLD

SEQ ID NO: 134856 - protein, 213 aa, Oryza sativa
  unsure (1)..(213): unsure at all Xaa locations
  Clone ID: PAT_MRT4530_36589C.1.pep
KKKKGKKEKKQKKRKKKKKQRKKRKQKQKKKKKTTEKKRXKKKKKKKKRKNKENTKKKKTXNKTTQKTTKRPXRNNRKRTKKQXKNKKQRXNNKGKAXSQXTXXXXERSRKXKXTXSXNSKEQPKRGKKHPPRAAEEAVEXEGEEKKKAEQQRVRRRLLPRPPHPPPRHRRATAPQLRPRLRRAPATAAGGGGGSPRCSGFHCHRVRSAEGDD

SEQ ID NO: 134857 - protein, 966 aa, Oryza sativa
  Clone ID: PAT_MRT4530_3658C.1.pep
MVSAADAVIPACAAVGIAFAVWQWLLVSRVKVSPYSAAAAAARNGGAGRAVFRPEGEVDDDDGGCGDDEEADGDGGVAAMASGIGGGDAAEVVAKALSHPAATPSLPRRTRKATTAALGGQIEDDGVDGQIKEEEPLRGKGGEGRAVAVVSTAVGGCAGLGAPHQLRGGGGGRTTTAWTAAEVVWRSGRRQRSSGDGVDNGGGRGWRRRGRQRPSRLTTAPAALGAIKSLGEVVGDALRREMRRASGAETGKTSSGNTTSSFVHTTMAVPCGDQDSIRKVMTILGGANSFLFTQYKYLAAFTAVFAVVIFLFLGSVHRFSTESQPCQYTRGKACKPALANAVFSTIAFLLGAATSVASGFLGMRIATAANARTTVEARRGIGPAFAAAFRSGAVMGFLLASLGLLVLYVAIKVFGLYYGDDWEGLYESITGYGLGGSSMALFGRVGGGIYTKAADVGADLVGKVERNIPEDDPRNPAVIADNVGDNVGDIAGMGSDLFGSYAESTCAALFVGSISSFGADHNFAAVSYPLLISSAGLIVCLITTLFATDLYRVKTVDGVAPALKLQLLISTVLMTVGVLVVTFTALPHEFTMFDFGEVKRVKNWHLFFCVTIGLWAGLAIGFTTEYFTSNAYSPVRDVADSCRTGAATNVIFGLALGYKSVIVPVFAIAVSIYVSFTLASIYGIAVAALGMLSTVATGLAIDAYGPISDNAGGIAEMAGMSHRIRQRTDALDAAGNTTAAIGKGFAIGSAALVSLALFGAFVSRAGMAVINVLSPKVFVGLVVGAMLPYWFSAMTMKSVGSAALKMVEEVRRQFAAIPGLMEGRATPDYASCVRISTDASLREMMPPGALVLLAPLVAGTFFGVQTLAGLLAGALVSGVQVAISASNSGGAWDNAKKYIEAGASDHAKALGPKGSDAHKAAVIGDTIGDPLKDTSGPSLNILIKLMAVESLVFAPFFAAHGGLIFK

SEQ ID NO: 134858 - protein, 129 aa, Oryza sativa
  Clone ID: PAT_MRT4530_36590C.1.pep
WRSNKRLAVFARMLLRSCCKLAVRSLPTLPRNLSSLILRRFWHLFGGVLVSLAAATRRRLLVDALDTRGTFWLGLVALGDFGVVCFLVCSWFFLWAGLFSFASQYNTHTASFSWLLNHSRPRVGLVYIV

SEQ ID NO: 134859 - protein, 105 aa, Oryza sativa
  unsure (1)..(105): unsure at all Xaa locations
  Clone ID: PAT_MRT4530_36591C.1.pep
NFPRPSEVAVREIATYWFEDQXTSRIISRTPMDVAVQEIATYWFENQRASRIISRTPVEVAVREIATYWFENQRASRIISWTPMEVAVREIATYFSRVVQPWPVL

SEQ ID NO: 134860 - protein, 103 aa, Oryza sativa
  unsure (1)..(103): unsure at all Xaa locations
  Clone ID: PAT_MRT4530_36592C.1.pep
RFRVESPHVRYGTEESELDYHYDHAXNVSRRYDXQTRKATEAPRLMRKSHHMIECARMLGVTLAGRILINGSSLTAGIILNRKGNQWPTKDMVQHVKYSGSIT

SEQ ID NO: 134861 - protein, 250 aa, Oryza sativa
  unsure (1)..(250): unsure at all Xaa locations
  Clone ID: PAT_MRT4530_36593C.1.pep
IGYPKYCTGVIIMNKSNTGFGQQDVGLAYILVPTIPILCKYRNRDIKRRQWHASTSSDXIGTIIVIDNLVYRDHPSLKIRGVPKDVRSYDVERVRNRIHPACSYKENIFQEQLSTRVGCGQVHCIIENGLDKCRVVAPNLPTKTDDLSHSTGHGWTTREKCLSYDYYLVLDQRCSDSPITSTSTKLMSGKFYSTLSKAPCLYGSTPRSTKTSTINVDKAPSQTLRQLDYSRTVGGSRQGIRNEKMVYPPR

SEQ ID NO: 134862 - protein, 237 aa, Oryza sativa
  unsure (1)..(237): unsure at all Xaa locations
  Clone ID: PAT_MRT4530_36594C.1.pep
MVNKSNTGFGQQDVGLAYILVPMIPILCKYQNRDIKHRQWRASMSSDEIGSITENSVLRDRXLQDVATAAADIDSAFFEYILDIIYYMSCLLENIFQEQLSTRVGCGQVHYIIENDLDECRVVAPNLPTKTDYLSHSTGHGWTTREKWLSYVYYLVLDQRCSDSPITSTSTKLISGKFYSTLSKAPCLYGSTPRSTKASTTNVDKASVQILRLLDRSRTVGGSRQGIRNEEMVYPPR

SEQ ID NO: 134863 - protein, 130 aa, Oryza sativa
  Clone ID: PAT_MRT4530_36595C.1.pep
PGFPPSPPPVGGAPLLASPPGTPPPRMEKEGGFFPMPLPFGSQLNAWALPVHGGPPVGGSPWLGTFSLPPSAWGPFFPPPFPFFLKPALPVNPVGCFPKRGNFARVSPPLMFGVLSPPVCFGAPLFWPFF

SEQ ID NO: 134864 - protein, 237 aa, Oryza sativa
  unsure (1)..(237): unsure at all Xaa locations
  Clone ID: PAT_MRT4530_36596C.1.pep
IMNKSNTGFGQQDVGLAYILVPTIPMPCKYCSRDIKRRQWRARHISTQVFNILSVIYRIYSDHTALXIHDLLCLPRAYFLYNIYCASVPDSCLLENIFQEQLSTRVGYGRVHRIIENDLDECRVVAPNLPTKIDDLSHSTGHGWTTREKWLSYDYYPVLDQRCSDSPITSTSTILIPGKFYSTLSKTSWLYGSTPRSTKASTTNVDKALSQTLRLLXRTVGGYRQGIRNEEMVYPPR

SEQ ID NO: 134865 - protein, 33 aa, Oryza sativa
  Clone ID: PAT_MRT4530_36597C.1.pep
FQDHPLCSVYLTREVSTSFFCQKRLVPHAKVTC

SEQ ID NO: 134866 - protein, 169 aa, Oryza sativa
  unsure (1)..(169): unsure at all Xaa locations
  Clone ID: PAT_MRT4530_36598C.1.pep
MARFAGSLQLYCLSVLLVILTQLGGGSAMGLPRPPPNVNFTIGVEGAVWCKTCRYAGYVKSKDASPLPNAAALLRCRRGKWALSVWGAXDARGYFLIQTGTQVAAFTSKDCRVYVPRSPSRAACGVALQPGRKTGSPLKFRRFVALPDGLQGRYSAGNFVFGPRDPKKC

SEQ ID NO: 134867 - protein, 59 aa, Oryza sativa
  Clone ID: PAT_MRT4530_36599C.1.pep
MGRKKLKAKQDIAPLMITHAGMADADVDWTSPDSGPVQAGFRQLHNSTPDSTPEAKFRS

SEQ ID NO: 134868 - protein, 45 aa, Oryza sativa
  unsure (1)..(45): unsure at all Xaa locations
  Clone ID: PAT_MRT4530_3659C.1.pep
FFXXIXFFFFFXFVYFFFXLXXNHWQSIGCCIMNKPKLMKYXXRH

SEQ ID NO: 134869 - protein, 80 aa, Oryza sativa
  Clone ID: PAT_MRT4530_365C.1.pep
RAHRTFQKRTWQPSLGPTPPLPPGHVSSPPYPHSLTSGPTRLSPPPPPSPTRGPGVAVPTCHRLRSTASLPCTQGTHPPL

SEQ ID NO: 134870 - protein, 91 aa, Oryza sativa
  Clone ID: PAT_MRT4530_36600C.1.pep
HHYHHHRCSAPSSRIPIPTHSRVPIMQPGFSLRLPPYLIYRMPAQIHRASRRSSRGLGLTPLWLTWSACTWSVGSIYLQKRAGLLLRVVLW

SEQ ID NO: 134871 - protein, 228 aa, Oryza sativa
  unsure (1)..(228): unsure at all Xaa locations
  Clone ID: PAT_MRT4530_36601C.1.pep
RPARVGELAGAREVGRGIGGHLRVEGIETNPMVLTTTRNDARRRPATRRSGAAARVDGGGGAPVVGGERGGAAEVPLTTAHLTAMTASGGDGGDGAATXPKTAGGGGGLGARRGGARRHGRARERGQTEXDDEGKLYIALDXRDRAPNERNRFGKKSNSILGIKSKRIRFGENTQRFALIFGGKERGEREEQNPSKTRRNRGRIEADLRGEXGGSGGLRGGGRRLKTA

SEQ ID NO: 134872 - protein, 35 aa, Oryza sativa
  Clone ID: PAT_MRT4530_36602C.1.pep
WRKLFRSEEECKLDALVERMRSVVLSLRPPRVGVG

SEQ ID NO: 134873 - protein, 110 aa, Oryza sativa
  Clone ID: PAT_MRT4530_36603C.1.pep
GGGAAAFAAVAGSLGASARAHPPPPPVPPQPRPHPRHLPLHATTAGTDDDEEDGGDAAAFAVVAGSLGGSARARSLGGPARPRVPPPPVPPRPHPPPRQLPRRQQHRRQL

SEQ ID NO: 134874 - protein, 77 aa, Oryza sativa
  Clone ID: PAT_MRT4530_36604C.1.pep
EYVVLDQFLNNLGFFFYKMSLSYMDPSIVYQFFGKPYIFFYKCVFLRHLISRTAFYMMKKNFIVPSVCLYPQQFNKT

SEQ ID NO: 134875 - protein, 149 aa, Oryza sativa
  unsure (1)..(149): unsure at all Xaa locations
  Clone ID: PAT_MRT4530_36605C.1.pep
FPVTSKARARPRASSKQRSTIVSPPPAVVSIPSARRMPLYQTNHHLSPSLLLPASPINPNPRAIPLAGIARTLELQFPPQPRRIRGSLVCCRSDIVRPGFESSNADFVRGRGPWVDYXTVRFFSTDFDLVSLIXLPDDVDVVRVQEPLR

SEQ ID NO: 134876 - protein, 62 aa, Oryza sativa
  Clone ID: PAT_MRT4530_36606C.1.pep
MVEMYKILKTKRLTVTAVPGVPEAGSKELLIGKPMISSCDLHGKPKDTSETLAVDEHSMGVY

SEQ ID NO: 134877 - protein, 669 aa, Oryza sativa
  Clone ID: PAT_MRT4530_36607C.1.pep
DIAEEVVKLEKQIQQVIKLKEQWLHPSQLNPNQLAETGRPRSHDNFPYLVKDEDLVGIEDHKRLLAGWLYSDEPDRAVITVSGIGGLGKTTLVTNVYEREKVNFAAHAWIVVSQTYNVEALLRKLLRKIGSTELSLDSLNNMDAHDLKEEIKKKIEDSKCLIVLDDVWDKKVYFQMQDAFQNLQATRVIITTRENDVAALATSTRRLNLQPLNGADAFELFCRRAFYNKGHKCPKELEKVANSIVDRCHGLPLAIVTIGSLLSSRPAAEFVWNKIYKQLRTELANNDHVRAILNLSYHDLSGDLRNCFLYCSLFPEDYTMTRESLLRLWVAEGFVLGKEKNTLEDVAEGNLMELIHRNMLEVVDNDEIGRVNSCKMHDIVRVLALSIAKEERFGSANDLGTMLLMDKEVRRLSTCGWSDDTVSTVKFMRLRTLISLSTTSLPLEMLSSILCGSSYLTVLELQDSEITEVPTSIGNMFNLRYIGLRRTKVKSLPESIGKLSNLHTLDIKQTKIEKLPRSIVKIKKLRHLIADRYVDERQSDFRYFVGMHAPKELSNLQELQTLETVESSKDLAEQLKKLMQLRSSFPHLKTLVLKHMPNVNQLKIMDGALPSIEGLYVVSLSKLDIVPEGIESLRTLKKLWLLYLHRDFKTQWHKNRMHQKMQHVPEIRV

SEQ ID NO: 134878 - protein, 86 aa, Oryza sativa
  Clone ID: PAT_MRT4530_36608C.1.pep
IIRQSCERQGKRLLQVPDNVLQNTGSGWQKVTHSLFTTRHTHRPLNGGPCVLDVTTMGHYYSVSDDTSAIQGSSPRMIQSYRRWLS

SEQ ID NO: 134879 - protein, 900 aa, Oryza sativa
  Clone ID: PAT_MRT4530_36609C.1.pep
MAEAVLLSVKKVGNVLADEAANAVIAKVSEKVTNLKEMPEKVEEIRKQLTIMNSVILQIGTSYLTGIVVKNWIAEVRKLAYHVEDVMDKYSYHAIQLEEEGFLKKYFVKGSHKVVVFSDIAEEVVKLEKQIQQVIKLKEQWLHPSQLNPNQLAETGRPRSHDNFPYLVKDEDLVGIEDHKRLLAGWLYSDEPDRAVITVSGIGGLGKTTLVTNVYEREKVNFAAHAWIVVSQTYNVEALLRKLLRKIGSTELSLDSLNNMDAHDLKEEINKKIEDSKCLIVLDDVWDKKVYFQMQDAFQNLQATRVIITTRENDVAALATSTRRLNLQPLNGADAFELFCRRAFYNKGHKCPKELEKVANSIVDRCHGLPLAIVTIGSLLSSRPAAEFVWNKIYKQLRTELANNDHVRAILNLSYHDLSGDLRNCFLYCSLFPEDYTMTRESLLRLWVAEGFVLGKEKNTLEDVAEGNLMELIHRNMLEVVDNDEIGRVNSCKMHDIVRVLALSIAKEERFGSANDLGTMLLMDKEVRRLSTCGWSDDTVSTVKFMRLRTLISLSTTSLPLEMLSSILCGSSYLTVLELQDSEITEVPTSIGNMFNLRYIGLRRTKVKSLPESIGKLSNLHTLDIKQTKIEKLPRSIVKIKKLRHLIADRYVDERQSDFRYFVGMHAPKELSNLQELQTLETVESSKDLAEQLKKLMQLRSVWIDNISSADCANIFAFLSSLLLSAKDENEELCFEALRPRSTELHRLIIRGRWAKGTLDCPIFHGNGTNLKYLALSWCHLGEDPLGMLASHLPNLTYLRLNNMHSANILVLSQSFPHLKTLVLKHMPNVNQLKIMDGALPSIEGLYVVSLSKLDIVPEGIESLRTLKKLWLLYLHRDFKTQWHKNRMHQKMQHVPEIRV

SEQ ID NO: 134880 - protein, 72 aa, Oryza sativa
  Clone ID: PAT_MRT4530_3660C.1.pep
MTTAPRVKEGQQHGGGERKGGRGGRAVVKKTSPRLEGGHERVVRCGARVAEDPRTFGEQRDTWQIFGEEKLL

SEQ ID NO: 134881 - protein, 49 aa, Oryza sativa
  Clone ID: PAT_MRT4530_36610C.1.pep
METYNIYIFKVQKQALEYHEFGSGFLQIVSQCGFVYGFSMWPSLNTVAM

SEQ ID NO: 134882 - protein, 454 aa, Oryza sativa
  Clone ID: PAT_MRT4530_36611C.1.pep
MAPAHHQAAAATTVTTQDIRRAQRADGPATVLAIATANPETRRSQDEYADFYFRVTKSEHLPQLKEKLERIYVDKFYINTVELYAMYNFILESHYKLLYLFWDSLQSSNFENFLQIRKPHQGKKSGIENRYTYVNDEVMKAHPEFSDRKLPSLDARVEIASNAVPELAAAAASMAIAEWGRPATDITHLIFSTYSDLKAPSSDRRLASLLGLRHTVCRTILSLHGCYGGCRALQLAKELAENNRGARVLVACSEISLIAFYGPEEGYTDTDTLVAHALFGDGSGAVIVGADPVDAVERPLFEMAFASQTTVPDSEGAITVQHKKGGMEYHIARGLPEMLAGNIKRCLADAFGAIGVAARWKDLFWAVHPGGRRILDLIEEALGLDNGAMAASRQVLREYGNMSGTTVIFVLNELRRRFAADGAEGADWGALMAFGPGITAETILLRVASGLKGN

SEQ ID NO: 134883 - protein, 97 aa, Oryza sativa
  unsure (1)..(97): unsure at all Xaa locations
  Clone ID: PAT_MRT4530_36612C.1.pep
FSFLEQPIKQFEPPTEVQITHPRGNEKTTRHKIFFPEPTLDQNNAKTHNGGNPPPNKKXKTXKXLFTPQKQKKIRPVELKQRCHLKGLWGHFAVYWN

SEQ ID NO: 134884 - protein, 65 aa, Oryza sativa
  Clone ID: PAT_MRT4530_36613C.1.pep
AESPLMWTVTGYPPPARSNPPRRRAGTTITVHVYIPKSRVSPTDSDFRSRQANAAQIDPINNLVP

SEQ ID NO: 134885 - protein, 38 aa, Oryza sativa
  Clone ID: PAT_MRT4530_36614C.1.pep
VFFMPMNLHDRLYNREVLKGKKVTPKVLFNFVHQVYKN

SEQ ID NO: 134886 - protein, 57 aa, Oryza sativa
  Clone ID: PAT_MRT4530_36615C.1.pep
MSRYAVLTRPPRNLRDLQLGTPRADKALSDPVETKDHLGARITLSSEKNSPMTRLGA

SEQ ID NO: 134887 - protein, 87 aa, Oryza sativa
  Clone ID: PAT_MRT4530_36616C.1.pep
TMLNHRIVNMDSTYSCDSSRVQYDSCFFLKVGIVTGQCKAIQWHISHVEFLTVLVQASVMGPAAYGGLDTCDPSVMATPPPHLPGVG

SEQ ID NO: 134888 - protein, 250 aa, Oryza sativa
  Clone ID: PAT_MRT4530_36617C.1.pep
MEMGFSAWTGAMGSLLRKLDSPPQAGDGGHMEAAYDGIHSFRDDIEESHGFLRKLSQLEETTMADKCWMKEVRELSYDVDDFLDEIALAAADNADAILIAGKVSKFRERAQEARQRRRRTRYGLCHHPTSRRSSRRRCSSTSITTRRPPPRFGADVEVAATDEVARWATDVGGEEWGLKVAGVVGAGGTEVLAWAKEKRPSVKNSWMIKEVDWGPYQDLLQVFFHFTTSLLVHRRQEIKFHTFWIRIRAS

SEQ ID NO: 134889 - protein, 69 aa, Oryza sativa
  Clone ID: PAT_MRT4530_36618C.1.pep
GMVIRAQLQYLFCYIFTNCHKDALEFTLKIQVDPFVQVRPILARAVKDFSLQKKVLYCFEYCSYFMRRF

SEQ ID NO: 134890 - protein, 50 aa, Oryza sativa
  Clone ID: PAT_MRT4530_36619C.1.pep
MVVHGPPRRISVKSELLCCGAMKLGNDNTYGVEAAMSLGDKLGNDNTYLA

SEQ ID NO: 134891 - protein, 513 aa, Oryza sativa
  unsure (1)..(513): unsure at all Xaa locations
  Clone ID: PAT_MRT4530_3661C.1.pep
MASLQAPEFLASCLLLLATILLFKQLLAPSSKQRAASPSLPRPRGLPLIGNLHQVGALPHRSLAALAARHAAPLMLLRLGSVPTLVVSTADAARALFXRDNDRALSGRPALYAATRLSYGQKSISFAPDGAYWRAARRACMSELLGPPAGAARLRRPPGEREAAALVAAVAAAGASPVNLSDMVAATSSRIVRRVAFGDGDGDESMDVKAVLNETQALLGGLWVADYVPWLRWVDTLSGKRWRLERRFRQLDALYERVIDDHLNKRKHASDEEDDLVDVLLRLHGDPAHRSTFGSRSHIKGILTDMFIAGSDTSAVTVQWAMTELVRNPDVLAKAQHEVRRVVAAGDKVREADLPELHYLRLVIKETLRLHPAAPLLVPRETTEPFRTAHGVEIPARTRVVVNAMAIHTDPGVWGPDAERFVPERHRDDADGCAQQHDGFALVPFGIGRRRCPGVHFAAAAVELLLANLLFCFDWRAPPGREVDVEEENGLAVHKKNPLVLIATKSKRNTGGH

SEQ ID NO: 134892 - protein, 56 aa, Oryza sativa
  Clone ID: PAT_MRT4530_36620C.1.pep
RRACRDAHLRNHHVLVRHDHTPQTQSQALVETPQPQGRRRRRRQGVSVCARFSPRA

SEQ ID NO: 134893 - protein, 184 aa, Oryza sativa
  unsure (1)..(184): unsure at all Xaa locations
  Clone ID: PAT_MRT4530_36621C.1.pep
RARRGRGAEHEAGATAAARAEGRGSRQRNRRRGCDGVRRGDRTARGSGVNGTAMARGGVETRRGIGGTGLEAARGRARDDGMGNATARRGSRRWRHARRGSGMATATARQRRRAARSGDATGGRRGAGLGAAWRGSARLGGARRDGDRRRDSDAARARGGDGTAQCGRGGGRARGPHQXRWRAM

SEQ ID NO: 134894 - protein, 98 aa, Oryza sativa
  Clone ID: PAT_MRT4530_36622C.1.pep
MWKMELVAGLQFQGVYQRETQLRGLLGIEAEVVERLTPMAEVMHSAEAQRKELVEHWLGKSAKSAPPELTADETVAFASIALEFIWFPKVNAQETDVL

SEQ ID NO: 134895 - protein, 754 aa, Oryza sativa
  Clone ID: PAT_MRT4530_36623C.1.pep
MAAKSKPSKISIFGAKAGFLIPKNKLPGSLIARSSSNAKNESPTASSSAAASSNSKSKEDNNNNSTQRNTKWGPDLTLDPAVRKSRASAYQSRLEQITKELISGSLEISENEGSISTARGSNSDGANNEKENVQGMVELLELERREIIGEILHLNPGYKAPEDYKPLLKETKIPLPTKTYPGHNIIGVLMGPESNAQKRLQEETGAKIRVYGIKRTNGEKSEIHQADIGEVQGAYEDLYINVSADTHDKVDAATALIELLLTPVSINSRAIEANATVSSAVSSGGADLADLRQVQNNSSQPGFLQYQSHDAHWLSTSQANAPPIPSSEPPPSALPNNSFPLQPPGGSLSTLSYTGPPPLMNIMPRNPLPIPGPQPLVSNAQQPPLQFQANPSIGSPFGRPPGIVSPQLTPSSTLPRSVRPLQTPHASGGWLNFSSVPVQSQRPSPAFMPVRPPISVSPLVSSPQLEGAAVPSFPRQSNISTSYGTQHHPSGASFASSATMPSIPPGAPQLSPQGPSSMPVLSSPAGLTTQPPYPLPMQMRPPMATPAQMRGPPSPFPQTGPTPGMPPAGGFGVPGSGNMTAMRPPRPSSGDFTFRPLVSASPTPELGASGSQVPLFHPGNQRPPMARVEGFQRPIDMGHQGRAYATGPPHPHQHPHPHAHFGGGGFLPRNPAASVLQSAGTRGFVGAFPLPPAAVEAQRPFHVLAQAQQKPIYDPFVPSGAVMSGGPGGGGGRKRKTEDDKAEYEDLMASVGVK

SEQ ID NO: 134896 - protein, 220 aa, Oryza sativa
  Clone ID: PAT_MRT4530_36624C.1.pep
QCSRHVDPRSVSSSSSRQRPMPTDATASLPKSDRFGERVSDAQSGGYNEAVPLVGRRPCPRRHRHLHRPPRPRPDHLPPPHLLPPHRDALARTHSAAVSLDRLPSVSASSSFASIAILNDPIISRVFPEAGFRSRDIKLTILRPAPPMPLLGRLPTCTHPPPLFLCSFATVDDVDVPSPAGNLAGVGEENCCHITEILSHGRNSHCRQGRAVPACPRHPR

SEQ ID NO: 134897 - protein, 190 aa, Oryza sativa
  unsure (1)..(190): unsure at all Xaa locations
  Clone ID: PAT_MRT4530_36625C.1.pep
YSPRIQLKALDLCFVVSLDRLPSVSASSSFASTPMNPPSPTPSWPPSSTPRPTSAATRTPSTSTTRPPPPKLPPLSRSSSPSXVLAILNDPIISRVFPEAGFRSRDIKLTILRPAPPMPLLGRLPTCTHPPPLFLCSFATVDDVDVPSPAGNLAGVGEENCCHITEILSHGRNSHCRQGRAVPACPRHPR

SEQ ID NO: 134898 - protein, 304 aa, Oryza sativa
  unsure (1)..(304): unsure at all Xaa locations
  Clone ID: PAT_MRT4530_36626C.1.pep
MERAAGGVSYQRFPRVRIRELKDDYAKFELRDTDASMANALRRVMIAEVPTVAIDLVEIEVNSSVLNDEFIAHRLGLIPLTSAAAMAMRFSRDCDACDGDGSCEYCSVEFHLAARATDSDQTLEVTXRPPPTCPVAITWGILILKLHRGQELRLRAIARKGIGKDHAKWSPAATVTFMYEPEIRINEELMETLTLEEKRNLVESSPTKVFNIDPNTQQVVVEDAEAYTYDDEVIKKADAMGKPGLIEINAKEDSFIFTVETTGAITAYELIMNAITVLRQKLDAVRLQDDDADLGELGAHLVGG

SEQ ID NO: 134899 - protein, 164 aa, Oryza sativa
  Clone ID: PAT_MRT4530_36627C.1.pep
AELSGRAHWVFHRFTPLPINRLGPQSSTASISAAVVSNSKRRRVKETRSIISGGERNKPGRSNDTGEMKMEQVSQRKAPLLVLVILCGLLLLLPLVSSVPLSRSVSLRNHQASVSALEAPVQVVSAAAEERDLDEVAARMVIEVNDYPGSGANNRHDPKSPGRA

SEQ ID NO: 134900 - protein, 125 aa, Oryza sativa
  unsure (1)..(125): unsure at all Xaa locations
  Clone ID: PAT_MRT4530_36628C.1.pep
IYXKRASSTASLASNLGDAYTGLKHPRWIAHLTRGAICFPAGKETTGTGSRFTGRPVGAQYQTKGQDDPVYPLARDLGPRESRQPIAARHVARFGPDFFTGEWNPLYLVVVVHIHITIFCFRPWX

SEQ ID NO: 134901 - protein, 66 aa, Oryza sativa
  Clone ID: PAT_MRT4530_36629C.1.pep
LFYLSDIFELGPHDVHAMDDHRGLKLMAQSNGTKMVNLAFCFKLIEVLGDQILLGLFLALPYYQER

SEQ ID NO: 134902 - protein, 214 aa, Oryza sativa
  Clone ID: PAT_MRT4530_3662C.1.pep
MAGRTTPPTSPQNPPLPPPALATVGAGTTPSTSSTTSPSRPAKIGDEPPPPHPTMPPPLRRRLPPIPARATPSRASSPSSPRLSPLSPCAPQLRRSSAVSSRAPPPLLPPPCCVASTAGFATAQANSASTPFPHSIVGTPFAGPAPPSPWSSSSFPVPVIVISVSISLLLPFLSFPLFAAPAAACASPPCLGTARHRSPRAPPLPAPVAALPHA

SEQ ID NO: 134903 - protein, 81 aa, Oryza sativa
  Clone ID: PAT_MRT4530_36630C.1.pep
MAHKFPYPIIYALDVLRGGGGLMIHNATPLYTFWKHHTLHSGRVILRQGSCPRLSSSPYTHMVIDSCSDRTMLRAWCSVSN

SEQ ID NO: 134904 - protein, 371 aa, Oryza sativa
  unsure (1)..(371): unsure at all Xaa locations
  Clone ID: PAT_MRT4530_36631C.1.pep
MASGGALSPVEEKPTVVKTTKAEQHEEEAAVAVKSAAEMMKKSSPCCPRCNSIKTKFCYYNNYSMAQPRYFCRECRRYWTQGGSLRNVPVGGGCRKSKRSSASSASASAASPPAPAVGAAPPVVPALSSAISKLLQSEPMAAPCADFPNVLPTFVSTGFELPAAAGDRLSLGSFGAFGNLSAAVAAPGGGGGSSTTTSFMDMLRGVGGLFDGVGNSHQMGGNGGGGGSYYAPLITGAGNGMLMPPPPLPPFSGSLMQHGMQGLFANHAMGGGGGGVMNAGEDGSVMAGLGGGQWPPALGGADEQQGGGDGGEAVMTKDTGGGASSSASRPDYFYGWNXPPAASSLEAASAATPPLPPEQRHGRASSTAARP

SEQ ID NO: 134905 - protein, 51 aa, Oryza sativa
  Clone ID: PAT_MRT4530_36632C.1.pep
MDHAGVKGKQEASADEPNPVVKGEVARKFRALGQEVPTRYLCSGEEGARKF

SEQ ID NO: 134906 - protein, 111 aa, Oryza sativa
  Clone ID: PAT_MRT4530_36633C.1.pep
MAWWLPASFGYKVLRKVGQEGSRVVAVFFDSIRGGRAREPSSSLAFSHPWQESSGGTTAIVFNPIHSGRAQEPPTSLSLVLDVENGGRDGKKEQGEWRKMELTCGSHVYGV

SEQ ID NO: 134907 - protein, 64 aa, Oryza sativa
  Clone ID: PAT_MRT4530_36634C.1.pep
VVPGAKGGDMWGIERGFRAASLLPESAKHPTSDSVVHAVAPAMPVLLVPYPTPSVLINTSQWGS

SEQ ID NO: 134908 - protein, 60 aa, Oryza sativa
  Clone ID: PAT_MRT4530_36635C.1.pep
MGYGEITTRVQSKPMWLLIDRQIRCMWMKVDKYSLFPAGNVSMFTYRLCYCFLWETVLHN

SEQ ID NO: 134909 - protein, 570 aa, Oryza sativa
  Clone ID: PAT_MRT4530_36636C.1.pep
MARPLLKIGHGLDRFRWRRSTSSSSSSPLALSLSSSSAAALSDDDPGSPMDPEMPPAARRALSRSSGSRGRLSFELPPLAGGPSDKEEAPPRTSSAPAPARPAPAALHEGPPSDAEMVREKFSKLLLGEDMSGTGKGVSSALALSNAITNLAASVFGEQRRLQPMAADQKARWRREIDWLLSVSDHIVEFVPSKQVSEDGSTMEIMITQQRRDLQMNIPALRKLDAMLLEYLDNFKDKQEFWYVSKDASESEKGNTPRQDDRWWLPTVRVPPGGLSDASRKWVQHQKDLVNQVLKAAMAINANVLMEMDVPEAYIESLPKNGKSTLGDSMYKIITEDHFNPEELLGTVDMSAEYNIIDLKNRIEASVVIWQRKMVHKEGKLSWGHGVKFEKREKFEARAENVLLLIKHRFPGIAQSALDISKIQYNRDIGLAILESYSRTLESLAFTVMSRIEDVLHADSLAQASNTRTQESMRMASLSRYDTDKVVIDAKAEVERLGRMEPVSATLFDFVSPRDQDVVATKMDSKEKGCRGDAHSRKLTKVSPIATKRIYTDPQNAFLVLIGRWAMQGL

SEQ ID NO: 134910 - protein, 65 aa, Oryza sativa
  Clone ID: PAT_MRT4530_36637C.1.pep
RHEDRTPPSTDLPRTTGDARRTAPPPAALPTDVSSPPPEHSRRARARKPPIMADHEQEQEMEVEA

SEQ ID NO: 134911 - protein, 63 aa, Oryza sativa
  Clone ID: PAT_MRT4530_36638C.1.pep
MRCSFQGSRLKVPRGFPITLRLDASGVLYLVSNNGSYTKNLTKVSAATQARAGSSYTLFVKTG

SEQ ID NO: 134912 - protein, 199 aa, Oryza sativa
  Clone ID: PAT_MRT4530_36639C.1.pep
MENEFQDGKTEVIEAWYMDDSEEDQRLPHHREPKEFIHVDKLTELGVISWRLNPDNWENCENLKRIREARGYSYVDICDVCPEKLPNYETKIKSFFEEHLHTDEEIRYCLEGSGYFDVRDQNDQWIRIALKKGGMIVLPAGMYHRFTLDTDNYIKAMRLFVGDPVWTPYNRPHDHLPARKEFLAKLLKSEGENQAVEGF

SEQ ID NO: 134913 - protein, 134 aa, Oryza sativa
  Clone ID: PAT_MRT4530_3663C.1.pep
MYSLVNLLFIRCFARFVYYFIKFKTPFSLLYHVTSTCTNTVKPNPYKLFNLPIYCSFALAHLVPNKYYPVASKCRFRKPTVKSFVLDCEIVAYDREKKKILPFQILSTRARKGVTISDIKVSVCTFGFDILYIN

SEQ ID NO: 134914 - protein, 97 aa, Oryza sativa
  unsure (1)..(97): unsure at all Xaa locations
  Clone ID: PAT_MRT4530_36640C.1.pep
MTPHHRGHRPRNPFPPPPRPPATEXRRRRSPSISMPPPRTPATPPRGSSPSPTTTEADSPAQPSYRDRSSPPPPPAGGGSGERRRASVAPSGKGNEL

SEQ ID NO: 134915 - protein, 74 aa, Oryza sativa
  Clone ID: PAT_MRT4530_36641C.1.pep
FIVQFQSIGGTVWYSLQTYANCNNDNLQLHYVQLFSPVPKQMPFKLMVQAATLTMCCVVWLHARSKTMAEYLLS

SEQ ID NO: 134916 - protein, 49 aa, Oryza sativa
  unsure (1)..(49): unsure at all Xaa locations
  Clone ID: PAT_MRT4530_36642C.1.pep
LFQLFKYQHSYSTINMLAFTSXNPPQGHVXPSFSIQHITPQLIPFRWCH

SEQ ID NO: 134917 - protein, 896 aa, Oryza sativa
  Clone ID: PAT_MRT4530_36643C.1.pep
MDVAGVVPAALPSPATEDETIARRRSRRVSFAEITAVHVFDRDEDFETPPEERAIAVGYPSPSPTPSLSPGKPAAEEGEETEGEEEEFLRPPFRFLNNGDVDSSSPGSAAGSLVSNDDEDFFGPVSRSFIQSGRPSDSGMSEDGNHDITLDSETFSMHYRNIAPPDDFSVNSVGSLRTPNSASTGPLKEQTGSGYGVKSCNSHDALTDMSLLADNPERYDYAKLSPTLSNLLQQVEDVHELISPKNGTGTVTPDHSSALAACKKKNREEKSSIVNGISSSELDTIGSRKEHVPIRNSVPTSTDPIQEDNAMTVDVNEKSQVTSEDILNTPKAVVQTFQIPQGSISSLRSKRRQLFSPITHSASNVVSQDASSLGSEFVKHSKRIVALADRLKFGLYESPATKIQEMPCNALMTDDQPSHECNSIQDSDLDRGGRKRSSSENGHAAQKRPQKISKPPRSPATSLKQLPCVSLSSSMMEENQSVTHGNQQSINVDWNKVASMVSNATSQVFSTSISKVKPQQLDMIEDMLGGIQRARNFKRLSTAVRIQDCGNDKQKRLAEARSLVDKLLYEKAKLQINHVKLEKLQNRAQVCKDGIQECRYLKSKISDQKGVPLDSTTLITASDRQEGLALITEKMHALEMIKKKVERARSSLESFCNTKGDISCDDFIKAAEQQLEMRNQCRIINQQARLWKLNDLVKRENKRDIVLNYCSLLFQRIVLNISDMSGIFVSNSLNGTKIGQAFPNLNASVAFNFVFKAEGTQRVSDLRSLQKMTTETSLLLGNLIDVLKEIKMAKLELLNLTAAAFDMASQTCQLALSLCFMSFKSGKRISFTIDMTDLNRAVYPSELLINVREAQTTVAQPSLDEFMSSLRDLQSGRLMILRLCRMGSQLIHELPS

SEQ ID NO: 134918 - protein, 125 aa, Oryza sativa
  Clone ID: PAT_MRT4530_36644C.1.pep
VLFFFWFFFFFFFFFFFFFFFFFFFLKTKLWIGEIPKNTVGGKDPGWGGTKPKRGGEKHQPCQDFGQKGLAINPPRIRGGPAHAGGKAFLPPLAAGGPGGETLGTVNPTGFDRGPAWAKRQGHPP

SEQ ID NO: 134919 - protein, 39 aa, Oryza sativa
  unsure (1)..(39): unsure at all Xaa locations
  Clone ID: PAT_MRT4530_36645C.1.pep
RXDXRXDEXGXWLXKWRDADPESICRFNGGKMTMSRHAC

SEQ ID NO: 134920 - protein, 80 aa, Oryza sativa
  unsure (1)..(80): unsure at all Xaa locations
  Clone ID: PAT_MRT4530_36646C.1.pep
HKVSTCGFGFPFCWILSFCWNVFTFVPLATAVRFSVGVVSLRWNASLWXGTRLSPRLTSFSXGDAARRHAERVWSSWVRH

SEQ ID NO: 134921 - protein, 64 aa, Oryza sativa
  Clone ID: PAT_MRT4530_36647C.1.pep
GRYFRYDYNNGQSLTTSMRREANHPSIRQQAKGNLKALPHFHDESTTSIVSTSHVVCLFQRFHH

SEQ ID NO: 134922 - protein, 552 aa, Oryza sativa
  Clone ID: PAT_MRT4530_36648C.1.pep
MGMVTATAAAALLASPPQGHLGRRCHLVVPGLRLRPPASSSPPHAAPPLRLSNFVPRCYITNVEVDVSHTSEQEALDDHPPLLPACAIPVVHLRDVPDASPFPLHESASHSTDFEELPVLSEGELHTIAATPAHPAGLYALYASYLFGNLVEQLWNFAWPAALAILHPSLLPVAIVGFFTKLSVFIGAPIVGKLMDHFPRIPMYTGLNAVQVATQLISAAMVIYAMKNVTHASTSAVVLKPWFIALVAAGAIERLAGLALGVAMERDWVVLLAGTNRPVALAQANAVLNRLDLVCETVGASVFGLLLSKYHPVTCLKIACGLMICSFPVLVVLGQLINRFSCHALDSSRTPSEESICANLLDVLQNGLSAIRNGWNEYKQQTVLPASVATVFLNFNVALAPGAIMTALLMHRGISPSIVGAFSGLCSIMGLVATFISSSLVERVGILKAGAAGLIVQASLLSVALVVYWTGSISQRTPLLIFLAAIALSRLGHMSYDVVGTQILQTGVPASKANLIGGMEVSISSLAELVMLGMAIIANDVSHFGFLAILSV

SEQ ID NO: 134923 - protein, 150 aa, Oryza sativa
  Clone ID: PAT_MRT4530_36649C.1.pep
MGYLDEQFNQLEELQDESSPNFVEEVAALFFKDSSRLLTNIEQAIDKYPQDFYRLDSLVQQLKGSGSSIGALRMKNECSVFKVNCNDRNLEGCRRSLQKMKREHATLKQKLESYFQHCYMAKQLGYLLFLLLMQLLRQVGPRDYAVSSRK

SEQ ID NO: 134924 - protein, 298 aa, Oryza sativa
  unsure (1)..(298): unsure at all Xaa locations
  Clone ID: PAT_MRT4530_3664C.1.pep
TFRSRSFMFAFSLSSRFVHLRSFVHFTFRSRTFVHLRSFVHXTYVKFTFAHVHVRFTFVHVHVLVNVXFVRSRSRSRSRTFVRLRPFTLTYVKFTFVHVHVKFTFVHVRVHVHVRSFVHVHVKFTFVQLHVRSFIHDRSFVHVAAAEWQCGGSGAAAWRRGCGLARRRRGGXGVGVARRWRAAAVWRGPASWHGGRDAVRRRCGGIIXHCRRDVVGDGGRIEVGVGIGGXAESCSTASTSAAASATRRPVAVWGEREIEVVEREREADVTFSVDVRDDGEIRRRRRCEDALGSGNKEK

SEQ ID NO: 134925 - protein, 272 aa, Oryza sativa
  Clone ID: PAT_MRT4530_36650C.1.pep
MARRRVAALASQLLRRQLLMRRPPPRFLSSAAAAASGPLDRLRSPPFARTAARHGSPALSPWSRFGGQKRGMFIQTQSTPNPQSLMFYPGKPVMEVGSSDFPNARTAMTSPLAKALFAIDGVTRVFFGSDFVTVTKSEETSWDYLKPEVFAVIMDFYSSGQSLFLDSSTAASMDTAIHEDDSEIVAMIKELLETRIRPAVQDDGGDIEYRGFDPETGIVKLKMQGACSGCPSSSVTLKSGIENMLMHYVPEVKGVEQELDGDEEAELTGQLE

SEQ ID NO: 134926 - protein, 76 aa, Oryza sativa
  Clone ID: PAT_MRT4530_36651C.1.pep
MKGKFVGAILKEGRASERMTRKLMKDGGGQAHMGGHRQLKLKEIKSSLHGFTLPRREAGALRTRALPRKVGWGVEN

SEQ ID NO: 134927 - protein, 108 aa, Oryza sativa
  Clone ID: PAT_MRT4530_36652C.1.pep
TVASMDTAIHEDDSEIVAMIKELLETRIRPAVQDDGGDIEYRGFDPETGIVKLKMQGACSGCPSSSVTLKSGIENMLMHYVPEVSLLCFISVSSKPPLLLAHYIRRFI

SEQ ID NO: 134928 - protein, 148 aa, Oryza sativa
  Clone ID: PAT_MRT4530_36653C.1.pep
GTGDAMEVAIGAVDGRRNSDEGAIGGARSRRRRNRDGARNGWRNRRRWRKGTTSGMLRRRRQMGTTSTPIVRRRWPVARRTEDAHGLRRSEEAAGIRGQKSSWQARRQRDSWGGVIAAGICVALRLSHRVGAELVESLITDEWMDKIR

SEQ ID NO: 134929 - protein, 115 aa, Oryza sativa
  unsure (1)..(115): unsure at all Xaa locations
  Clone ID: PAT_MRT4530_36654C.1.pep
MNFLRNCYCKQDDASKNNVVSVEELQICDELEADNKEDLEXEIIDDMCRLAQHLQRLYQLKDLREIAGSATSYHXQLPLYHTTIAFLSEMNIRINLDGQCKINITKIDQDASAEK

SEQ ID NO: 134930 - protein, 392 aa, Oryza sativa
  Clone ID: PAT_MRT4530_36655C.1.pep
MERTRSWFGRRRRRKARGEGGGGGGEEGEGQKVVVDGSEIRELVEDREAFGMFAESKFRELDADGDGRLSVRELQPAVEGIGAALGLPARGSSPNADHIYSEAISELTHGKKEEVSRTEFQEVLSDILLGMAAGLKRDPIVILRIDGEDLRDFVDSPRYEPEAAAIFSKIGSEDMSLRQCLLAALQLLNVDNGMPPASDPWVAENIIEPALQKLPAGQLEQPASQDIFLEQLKKLLSNIAERLQEQPVIVAHTENTFDGSCVKRLLDNKFELDKLLDSVWKDVLIEHKNKGSRECLIAALDKMADAAGLPPYGAVNQVDAVVNEALKTVNADERTAVDEAGFKKLLTDILRAVMMQLNRQPIFVSNSTVVHEPLFSSSAILSSPPVKSSPSE

SEQ ID NO: 134931 - protein, 63 aa, Oryza sativa
  unsure (1)..(63): unsure at all Xaa locations
  Clone ID: PAT_MRT4530_36656C.1.pep
MEPGGRQAGGRRDSDFRRLEESRHXDAVRRTADAGGLVGGGAVRTAASEETRSRREPETKHHA

SEQ ID NO: 134932 - protein, 639 aa, Oryza sativa
  Clone ID: PAT_MRT4530_36657C.1.pep
MAQASDLEPLRSGAGALPSSADPDSPSTPRRSRVRELLRSLDRRLSSRGRHHRHAAEGAAASPRGGGGGEPGSEDSDELGDGAPPEWALLLVGCLLGLATGICVAAFNRGVHIIHEWAWAGTPTEGAAWLRLQRLADTWHRILLIPVTGGVVVGMMHGLLEIFEQIKQSLSSQREGVDFMAAIFPTIKAIQAAITLGTGCSLGPEGPSVDIGKSCAYGCAEMMENNRERRIALVAAGSAAGIASGFNAAVAGCFFAIETVLRPLRAENSPPFTTAMIILASVISSTVSNVLLGEKAAFIVPTYELKSAAELPLYLILGMLCGVVSVAFRQLVVWFTKTFDLIRKKFSLPAVVCPALGGLGAGLIALRYPGILYWGFTNVDEILHTGKSASAPGIWLLAQLAAAKVVATALCKGSGLVGGLYAPSLMIGAAVGAVFGGSAAELINSAIPGNTAVAHPQAYALGAVGLAIWVPSVVMSGNKEAFEATSPRHGYSSLLPPTDRNETDRRRPDRDDVELAILDDDPYRYGINNEDMLLDDLKANSSLVSSCLTRGFQYHGNERGLVTCFPDTDLSTAKVLMEVKGIKQLPVVKRRAGRRNDGRRKVLGLLHYDSIGWCLREELERWKAIYQRENFQQSAVNGH

SEQ ID NO: 134933 - protein, 109 aa, Oryza sativa
  Clone ID: PAT_MRT4530_36658C.1.pep
MPLVVCNLIPFPTFRLASVRREEKRRRLLHAEEQRRSEGARPQCEKGRAAAATAAVAQAEGEGAAAVVVCEGVLALCGTAAATACGGVATLGGSAAPMREGRDSSGCYA

SEQ ID NO: 134934 - protein, 684 aa, Oryza sativa
  Clone ID: PAT_MRT4530_36659C.1.pep
MAGLAAARELRREGLDVTVLEQLAGVGGQWLYDAATDAGDPLGMAGVHSSVFASLRINGPRESIGFSDFPFRPTNDAGGDARRYPVHGELLRYIRDFCDAFGLMDAVRLNTTVTRVAMAPPRRDGSLRWAVRSKRHGEAETEEVFDAVVVAIGHYSQPRLPTFDGMDRWRRKQLHSHSYRVPDSFAGEVVVIVGCSVSGAELALELRRVAKEVHLSTKSTEETITSAMSKSVARYENLHLRPQVEHLREDGTVVFDDGSFVVADAVIYCTGYNYSFPFLDTNGKVTVDDNRVGPLYEHVFPPELAPSLSFVGIPAKVLLPVFIEVQARWVAQVLSGRRTLPSQEEMQRAVEEHTRGMEAAGLPKRWTHDMFLNLERCDDYGERICGFPRMEQWKKEIFVSSLSDMVDDIENFRDGYHDSDLVRDALRRHARSPAAPLPAPRSPPLPGADSGGGRAAATGGGGGGGYRGPPALPFLAPSQIWPEGGGGRTVATRVAVAAAAAGGCQRRAATTDGRRRLAAGGGGGGRRPLPDPPSLPDLARGGRGEGSGRRRSPPSLPPRSGLRGVGGGRWPRVRQRQRREVGGGRRKGAVRGGVRGGGTNGLVGISACARRRKRRFWAPILSLPSPQTSVPAAQTAPAAPFPDLDGRGEPASSYGKGGAPLALGQQRRTEVESRRPEGDADAGG

SEQ ID NO: 134935 - protein, 179 aa, Oryza sativa
  unsure (1)..(179): unsure at all Xaa locations
  Clone ID: PAT_MRT4530_3665C.1.pep
EGTLQPTKTPSKLPERGGGDRGGDRGGXGRGPPGRGRGGDRGRGRRRGPRREEEEKXXPXTKLGRQVKEGRIRSXEQIYLHSRPIKEHQISDTLAGPTLKDEATKNTPGQKQTRAGQRTRFKAFXRVGDNNGHVGQGVKCSKEVATAIRGAIIPAKPSVIPVRRGHWGNKIGKPHHRPC

SEQ ID NO: 134936 - protein, 131 aa, Oryza sativa
  Clone ID: PAT_MRT4530_36660C.1.pep
MSIIQWINVELGYLPWMLPHVQSKVGCRSGQGNKAQWGRLFFPSSLPLSSLSTATVTESSWARCGGVAAGRSRWPAGEELGAAGGQRGRSGARPARVEMGAAGNRRGRSWAAAAGEKLDVVVVVVVGGGGD

SEQ ID NO: 134937 - protein, 42 aa, Oryza sativa
  Clone ID: PAT_MRT4530_36661C.1.pep
GLAAVLAPVVFDAGAHLVLHLVLHFGVHDDALYARLDGRHEC

SEQ ID NO: 134938 - protein, 91 aa, Oryza sativa
  Clone ID: PAT_MRT4530_36662C.1.pep
HTSKGKFWTCTGVKQISQASCFLSTRFWHARWDRLEVRITTTVFLMAEKPPASPSSAGKDGSAKTKFPRLGLSEITGDNIVPVTLDKLTPE

SEQ ID NO: 134939 - protein, 209 aa, Oryza sativa
  Clone ID: PAT_MRT4530_36663C.1.pep
MAPAALAAPIASISPSSAGRVTAAAAGLRSARMASSPVAQPIGEAVVLRPNQMFRSVLRQRRRLVVRSSSSDETNSTTEEKTPFGYTRKDVLLIGVGVTLLGYGLKYGLELVGVDPLQAGNAVQLIIVLGMTVGWISTYMFRVANKDMTYAQQLRDYEKQVMEKRLESLTEAELQVLLEQVEEEKQRLTPVRDQGVTFTRKTEDQANAS

SEQ ID NO: 134940 - protein, 162 aa, Oryza sativa
  Clone ID: PAT_MRT4530_36664C.1.pep
MSSLQAVAFTALQAGAALALSLAAHTLPSLPPARTATALATAMVTMAMWSSSIGLEKARSDDEYGSASTYHGMPTYSPRTAFVEDFFSTEPPQGELGMDYWHAAPQVTQPTQEMGAIQAPNVTPQQAARERHPPDNLTYPTEQVRRRKKGGPSKRAKGTDRP

SEQ ID NO: 134941 - protein, 73 aa, Oryza sativa
  Clone ID: PAT_MRT4530_36665C.1.pep
MFCSQTPFGYTRKDVLLIGVGVTLLGYGLKYGLELVGVDPLQAGNAVQLIIVLGMTVGWILTYMFRVANKDMT

SEQ ID NO: 134942 - protein, 63 aa, Oryza sativa
  Clone ID: PAT_MRT4530_36666C.1.pep
TGHGHIIAHPLKTHRLPHQHTKHASWLSPAAGAYISSRHVRDRPDHICMAHHWGTRVVAINQP

SEQ ID NO: 134943 - protein, 481 aa, Oryza sativa
  Clone ID: PAT_MRT4530_36667C.1.pep
MAAAAEARSLPPWVVLDPVVRLHEPDGEEENPGWAAIRCETTAYVTLRADVEGLRRDDELSPFDDDGLKLLALVADPPRPSRLSIRLDGDPDDDEEEGRRGFLGGVLLADPDDDGYLPQVLCLLPSSAPFDRHCWGTRRPIFRSEKPKKFNAHQTFSFQGSSYWVDLGQGILSCSCHDLISNTNDDVQFRYIALPTGCNVDFDSLYLTAPPSQYRDIRCVGNSIRFVSIEGYNTLPGYNMLLSMWELMMPSSGQWRKVGSIRVGRLWEQEGFRRSGLPTNTSPTHPMLSTEDDGVVYLLMGEFYAEDEKDRSLYAFSVDMFDQGRCNEIIWGLVAVASRNSLSCVGVSTSFTAASMVCHHNLLARRTARAILHISPPSRGHGGDGGERVAAVRREGWEERREEGEEDAGRAKVGAMLGEHGHGERWIVGAREEARDMWIPPYATSAKRADPVLGRLASSASAARFAHLADPSSAAAAAFDD

SEQ ID NO: 134944 - protein, 35 aa, Oryza sativa
  Clone ID: PAT_MRT4530_36668C.1.pep
GQSGAIDYFLYIDARSFARVPSTSQRLLPLPQRVE

SEQ ID NO: 134945 - protein, 308 aa, Oryza sativa
  Clone ID: PAT_MRT4530_36669C.1.pep
MTITIEQPHLDAIADRKVAGGGGGDNAAELVLDGGFVVPDSNAFGNAFRNYEAESERKETVEEFYRVNHINQTYDFVRRMREEYGRVDKTEMGIWECIELLNEFIDDSDPDLDMPQIEHLLQTAEAIRKDFPDEDWLHLTGLIHDLGKVLLHPSFGELPQWSVVGDTFPVGCAFDECNVHFKYFKENPDYLNPKLNTKFGAYSEGCGLDNVLMSWGHDDYMYLVAKENKTTLPSAGLFIIRYHSFYPLHKHGAYMHLMNDEDKENLKWLRVFNKYDLYSKSNERIDVEKVKPYYMSLIEKYFPAKLRW

SEQ ID NO: 134946 - protein, 114 aa, Oryza sativa
  unsure (1)..(114): unsure at all Xaa locations
  Clone ID: PAT_MRT4530_3666C.1.pep
SXXXRDFALVVSGGPAGXFXWXRXXXXXDXYRRXXGIFXXAXGVDXXSPLXNRSGXTXQXXXXXRSXXXXXSPXXYRRXXXXMXGSXXXXMEIGCXNPTXXEDSSXLIDWXXGX

SEQ ID NO: 134947 - protein, 153 aa, Oryza sativa
  Clone ID: PAT_MRT4530_36670C.1.pep
MGSLCCVASRPHGASTASREWSSIGRSDPLWRTNAGFSPPLSRRWEYRINSEGLSYGSQGDSGAAAHYGSSLSSNSKEPSRSWERSDVPPDHHRYSTSEGAISYFNSPDVTFQNHHIMLPMLQDSGIDEYMRVSVAEPIGALLLSEGISGQQN

SEQ ID NO: 134948 - protein, 41 aa, Oryza sativa
  Clone ID: PAT_MRT4530_36671C.1.pep
LGHTLHITYAWIKKRHTHNTKPDNNRTSIQILEDPINGRVV

SEQ ID NO: 134949 - protein, 96 aa, Oryza sativa
  Clone ID: PAT_MRT4530_36672C.1.pep
IPYEEVRSEDTNLDLVVGGPMHHTQSCHLSRYEDLYQLHQHTILHLMINHQHLDHVRALSEHFLHAHGERSHHNNWVQRQLDVKKTLQHLLSLKKT

SEQ ID NO: 134950 - protein, 51 aa, Oryza sativa
  Clone ID: PAT_MRT4530_36673C.1.pep
MPSLSSSRRATADTFITHWLASVGRRLVGEAHAVFNAGRGSLPEMHEYPLG

SEQ ID NO: 134951 - protein, 58 aa, Oryza sativa
  Clone ID: PAT_MRT4530_36674C.1.pep
MARHTGRRWRDPSNKQASSFIKHGVVLLNGLALDRSGQARMEWAKMARRYYSRCATVQ

SEQ ID NO: 134952 - protein, 70 aa, Oryza sativa
  Clone ID: PAT_MRT4530_36675C.1.pep
GTGDGVMMAPECLILAWREDQMATLLRYVGGDSDLFGLLANSLIKNLLGVRYSSLDICDDSLCFVLEQFK

SEQ ID NO: 134953 - protein, 44 aa, Oryza sativa
  Clone ID: PAT_MRT4530_36676C.1.pep
ISCLAKESGCPLDSEVTEPELSIHAKHVLTLLTGCGLTLTPEAR

SEQ ID NO: 134954 - protein, 198 aa, Oryza sativa
  unsure (1)..(198): unsure at all Xaa locations
  Clone ID: PAT_MRT4530_36677C.1.pep
MDRRWMYKSDRSSIEYXRGVADFINVVEQDKSRTNNEWMTCPYFDRKNEKMLXNSAKTRMHLIYRGFMDGYSCWTKHREQXLENIGDKAGGGLNKEEHKHDMFVQSSLAGDREDVNNETIPVMLRDVEDLTYNERDHEKFTQLMNDFETPLQARCTVKHTKLSATLYLMKLKXSNGWIDKSFTQLLGLTWAVLGVVIT

SEQ ID NO: 134955 - protein, 676 aa, Oryza sativa
  Clone ID: PAT_MRT4530_36678C.1.pep
MVQYNFKRITVVPPGKDFIDIILSRTQRQTPTVVHKGYSISRIRQFYMRKVKYTQSNFYEKLSTVIDDFPRLDDIHPFYGDLLHVLYNKDHYKLALGQINTARNIIAKIAKDYLRLLKYGDSLYRCKCLKVAALGRMCTVIKRISPSLAYLEQIRQHMARLPSIDPNTRTLLICGYPNVGKSSFMNKITRADVDVQPYAFTTKSLFVGHADYKYLRYQVIDTPGILDRPFEDRNIIEMCSITALAHLRAAVLFFLDISGSCGYSIAQQAALFHSIKSLFMNKPLVIVCNKTDLQPLENLSEEDMKLVMEMKAEAMKTLGHGGEANEEGVLLTMSTLTEEGVMAVKNAACERLLDQRVEIKMKSKKINDCLNRFHVAMPKPRDNKERPACIPQAVLDARASAAAAKEKKKLERKLEKDLENENGGAGVYSASLKKHYLLADDEWKEDILPEILDGHNVADFLDPDILQRCEELEREEGLRLEEEAAQEAFQIDGHELTEEQREILGQIRKKKALLIQEHRMKKRTAESRPIVPRKFDKDRTFTTNRMGRQLSSMGFDPRAALDRARSRSRGRKRERSLSRAASDGDDMDIDGQQSSKKLRALSRSRSRSKSRPPEEVVPGEGFKDSAQKKKAIKKAKDSVRNRNKEARRGEADRVIPTLKPKHLFSGKRSIGKTSRR

SEQ ID NO: 134956 - protein, 69 aa, Oryza sativa
  unsure (1)..(69): unsure at all Xaa locations
  Clone ID: PAT_MRT4530_36679C.1.pep
TVCNQWGTLCAALLCRALCIYVCCNVGMMLADLTHHXGCWHHRQHSCQQQGCSSHQVFAGKTASLLPLL

SEQ ID NO: 134957 - protein, 36 aa, Oryza sativa
  Clone ID: PAT_MRT4530_3667C.1.pep
MKTSSMGCKITIHLILLYTYYPYELVETPRLYCGAR

SEQ ID NO: 134958 - protein, 82 aa, Oryza sativa
  Clone ID: PAT_MRT4530_36680C.1.pep
MLLTQHVETPVSRVQAAGQKVKYKVYMVVGAQASQQIINIYDRRGLAVTAAPDPSPSLYILAATRPQGQILDSQHLKPKVSY

SEQ ID NO: 134959 - protein, 82 aa, Oryza sativa
  Clone ID: PAT_MRT4530_36681C.1.pep
MQMQIRVSFSYLLVLSMSPTWSSRWLLLLAQVNTSLLVKVLPGVRQRGSKQRLRLNRRRPPPSTAMVPSSSSMVVCRRSVGF

SEQ ID NO: 134960 - protein, 172 aa, Oryza sativa
  Clone ID: PAT_MRT4530_36682C.1.pep
MEDIHGTAVVRLRSGHLLLLVGGEAPPLGWPASASTGTAGVRLHSGHLVVIVGGGGGGRGLTPPAVACCQAARLPPRECVRGEERKLEVRIRIRRGLRRLPDVRPRPTMAMGPMAMRQTEQCRVVNEDGLFLAIAASRDVSPVRRAWPATGEHCARKRLGEPVTSGSQRRWR

SEQ ID NO: 134961 - protein, 110 aa, Oryza sativa
  Clone ID: PAT_MRT4530_36683C.1.pep
RNMIILALSSPLYRGWSCPLQALLHVQLGVETKGNPKHSFPSKETSRPDETQSDSDLPVKPATHRRSDWPSTGGLTAQHTAVRPALLKSKLKVFKFCLTNLNLELKIFKI

SEQ ID NO: 134962 - protein, 62 aa, Oryza sativa
  Clone ID: PAT_MRT4530_36684C.1.pep
KGCFNLSMVEHSDTVNFGVKIEEYMQNHLSPQSGHRLKKLVLHTIASTHPISICWNPKKSRI

SEQ ID NO: 134963 - protein, 125 aa, Oryza sativa
  Clone ID: PAT_MRT4530_36685C.1.pep
VNPLCCLCFLVLSVSVSAQQSAFAVGVLSDLNAFHRSTGNSLCPYHTVIVSSPRKEVDDPWAFHLHAALLRQAFAHCGKFPTAASRRSLGRVSVPVWLIILSDQLLIIALARIDDFHHVKVTLYR

SEQ ID NO: 134964 - protein, 488 aa, Oryza sativa
  Clone ID: PAT_MRT4530_36686C.1.pep
MSAAAEGRPPAAAAAGEMVREATAWCALHGLVVGDRADPRSGTVPGVGLVHAPFSLLPTHLPESHWRQACELAPIFNELVDRVSLDGDFLQDSLSKTKQVDDFTSRLLEIHRKMMEINKEENIRLGLHRSDYMLDSETNSLLQIELNTISASFPGLGSLVSELHRTLIDQYGHLFCLDSKRVPGNEASSQFAKALARAWDEFNVDSAVIMMIVQPEERNMYDQYWLAKHLKESYPFMLFLSSTWSKHKIYTPLTIHYTWHNDYQENFVRDGKTVSVVYFRAGYTPNDYPSEAEWAARLLLEQSSAVKCPSISYHLVGTKKIQQELARPNVLERFLENKEEITKIRKCFAGLWSLDDEEIVKSAIQKPELFVLKPQREGGGNNIYGIDVRETLIRLQKEGGDALAAYILMQRIFPKASLSNLVRGGVCHEALTISELGIYGAYLRNNDKVVMNEQSGYLMRTKVSSSDEGGVAAGFAVLDSLYLTDKAM

SEQ ID NO: 134965 - protein, 222 aa, Oryza sativa
  Clone ID: PAT_MRT4530_36687C.1.pep
MEGTVFTPSLQGIKNVKSESGVILTKPFLEVCKHILPVLDKFGSAMSIVKNDIGGNITRLETKYASDPSKYEQLHSMVKVEISSKTAKSSSSCTNGLLWLTRAMDFLVALFHNLVQHPDWQMSQACSDAYSKTLKKWHGWLASSSFSEYLTIPEFQVAIKLAPDRKKFMEIISGSGDINADIEKFCATFSPLLAENHRFLVAVYNRFVYFQASVGMDDLKAS

SEQ ID NO: 134966 - protein, 77 aa, Oryza sativa
  Clone ID: PAT_MRT4530_36688C.1.pep
GTEVVSMRVIFQSLTSPSGLRIRRCHKLRCRVTDAAWIWCCHGCGLGLSCSSDSTPSLRISICCRCSHKKKKNPYDT

SEQ ID NO: 134967 - protein, 118 aa, Oryza sativa
  unsure (1)..(118): unsure at all Xaa locations
  Clone ID: PAT_MRT4530_36689C.1.pep
VNQSVMENKAWSNPKEKTTSLSLTNQVQNXGFPYSKPNKRFGKGGLLCSQTRGKPLFTGLFLSMLVDQHPILYKTSVLHSNEIVVTSYILPQAHSSLTVEAKCEKPAKHGENNRHGHV

SEQ ID NO: 134968 - protein, 134 aa, Oryza sativa
  unsure (1)..(134): unsure at all Xaa locations
  Clone ID: PAT_MRT4530_3668C.1.pep
NERWVILDPATGKMEYKIRRSDADVRGIIVFDSTSTVTLTPMNFHGLPKYDGCLSTLHASQLVLQAHKEAVNSLGGNGPTKXGRVATVVAAANATAIESYKEVEAAMKVSLRAALCSTTNKLSQGHMDDLTIMM

SEQ ID NO: 134969 - protein, 46 aa, Oryza sativa
  Clone ID: PAT_MRT4530_36690C.1.pep
MAGSAVQGQCEADRARQETIGSAHLGGTVVKEDRPGNATNVFVGPR

SEQ ID NO: 134970 - protein, 88 aa, Oryza sativa
  unsure (1)..(88): unsure at all Xaa locations
  Clone ID: PAT_MRT4530_36691C.1.pep
RRRWRRRRRRGEPDGDRHVFCDACSSSSFSNHSYFLPGVKVRIDCMISVKSASKEEIKITAEKVTNXFGAYQLXIPAIEGFRVRQLPR

SEQ ID NO: 134971 - protein, 40 aa, Oryza sativa
  Clone ID: PAT_MRT4530_36692C.1.pep
SIEQLLLCILNAELTKQNKLLTHQIFYYPHLDTFIKSKTL

SEQ ID NO: 134972 - protein, 881 aa, Oryza sativa
  Clone ID: PAT_MRT4530_36693C.1.pep
MSRRRDAAPTAREGERDLVVKVKFGGTLKRFTAFVNGPHFDLNLAALRSKIASAFKFNPDTEFVLTYTDEDGDVVILDDDSDLCDAAISQRLNPLRINVELKSSSDGVHQTKQQVLDSISVMSTALEDQLAQVKLAIDEALKFVPEQVPTVLAKISHDLRSKAASSAPSLADLLDRLAKLMAPKSKMQSSSGSADGSSGSSSGRGQTLGSLNIKNDTELMAVSASNPLDMHNSGSTKSLGLKGVLLDDIKAQAEHVSGYPYYVDTLSGWVKVDNKGSTNAQSKGKSVTSSAVPQVTSIGHGAPTVHSAPASDCGEGLRSDLFWTQLGLSSESFGPNGQIGGDLNSTCPPPPLFPRYPLQSLRADKSSIKGGCSYPPCICKSSTSKPENLSHYPVQSLQADRSLKGGHYFPPCTCKSNTSKPDNLSPVGLYGPYSEGSSCNRCPYRDLSDKHESMAQHTLHRWIQCDGCGVTPIAGSRYKSNIKDDYDLCNTCFSRMGNVNEYTRIDRPSFGSRRCRDLNQNQMLFPHLRQLHDCRFIKDVTVPDGTVMAPSTPFTKIWRIHNNGSSMWPYGTCLTWVGGHLFARNSSVKLGISVDGFPIDQEIDVGVDFVTPAKPGGYVSYWRLASPTGQMFGQRVWVFIQVEHPVKTSSNKQSAAINLNMPPEGSNTEWKHSVDANIQSADIVGKYSGSTITDPLAHALYHEATKPMEPELVSSAVPSVPRAFESVLVPATDLLTSSAGAEKASKPAATPGPAPQAVPLPKPVSIPASGPAPAPVSATTAAPVGAAAAPISEPTAPAAAIGMPSATARAASCLPTEPSSDHISAVEDNMLRELGQMGFGQVDLNKEIIRRNEYNLEQSIDELCGILEWDALHDELHELGI

SEQ ID NO: 134973 - protein, 390 aa, Oryza sativa
  unsure (1)..(390): unsure at all Xaa locations
  Clone ID: PAT_MRT4530_36694C.1.pep
MQQKGLNKLSGHDEASSARRAFEAFLGSLTRTKESGHDEASPARRAFEAFLGSLTRTKESIGRATRLALECDKQGIAGVEMDIIIEHLEKESNLYAFPSLIQAVLPRILYASAPPGNSGNAFPSLIQAVLPRILYASAPPGNSAWENRRQCLKVLKLWLDRKTLSEYIIRHHIKPLRDNEGMLVDEYGSNTGFHLPNLIGTKLLEDEEGSSSEERSFEAVTPEHEATGANEQEASQMHVAKHRLVLEEVDGDHEMEDLAPSSEAEGEAISSCQPDLTVARCATTKQNVDSVPPLPDDKPPSPPPLPSSPPPLPRPPCPPLPPPPPPPLPPPPPVAPFHPPGPHFSGPSVPPHHGNNYHQPPSVPPPNNXITCSHHHIPFSSVFPPSSLSL

SEQ ID NO: 134974 - protein, 160 aa, Oryza sativa
  Clone ID: PAT_MRT4530_36695C.1.pep
MEATVDELSEAYQEFVAAAAAVVEARGQSGGEKNAATDAALEAFKQRWELFRVACDHAEELVESIRQRIGSECLVDEATGASSSSSAALAAPGIKPISAVRLEQMSKAVRWLVIELQHGAGGASAAGPGGGGGAAAAASGVAGQHGHGGVDTRFPEDGAQ

SEQ ID NO: 134975 - protein, 237 aa, Oryza sativa
  unsure (1)..(237): unsure at all Xaa locations
  Clone ID: PAT_MRT4530_36696C.1.pep
QSSNSRSASCSLVPIERRAHSCPSRRSMATTGRLLLPHDMYRRLQAPTAAAAASLFILAPHLHFQRPTAGRLPLPHRKGTATVASAPSRRAARPSPPWRRRRPARRRRRTAPCAWRPSRRRATXPMRKXRAAMPSMRAASSSGCRSAASARSAASRCPPRRRRRRDCGHCPRLVLVRGHDQHQLRACLPFPSHPSHRARPLGARAPPPPSTSIAPTPSSPVRPRPPSRRRRLRPPPP

SEQ ID NO: 134976 - protein, 231 aa, Oryza sativa
  Clone ID: PAT_MRT4530_36697C.1.pep
MERSRWKVLSKADDNRLGPTYDEEHEEDEHSHKEPVPEIPPMRKAYTVRLEIPSRVGNGDQKDGCETYARPRADGCKSGAMMLPIMDPIRRKSTRTARNPYKAMPPKHAAKEKGGDGQTSSSGCCCCCSSIADPPEETGSPRIGGAEAGLRERRRWLGNSQGSLHFGIEAETEKRREYVSIRTGLREDDLRSYVWSGVVELSKPSSTTPVHFVRELHPTPLPVLVELKLFG

SEQ ID NO: 134977 - protein, 153 aa, Oryza sativa
  Clone ID: PAT_MRT4530_36698C.1.pep
MAQRSVVLALALWCLVADGEAVWMELSTTATKCFSERIQSNVVVIGDYDILFDGYPTRPILSIQVILGLLLQVTSPYGKVLHHREKVMQGQFSFNTAEPGVYLACFSVDTLDKELGVALELTKLETAVQAVHGNLMYLRSKESDMRDKLLFEI

SEQ ID NO: 134978 - protein, 136 aa, Oryza sativa
  Clone ID: PAT_MRT4530_36699C.1.pep
MSSQVSTSRGLPSPSKLGTFESPHTWQMSGPTGQAEAGSSDDQDIRLLSVSWNQDFGCFAAGTSNGFRIFNCDPFKETFRRDLKSGGFGIVEMLFRCNILALVGGGSNAHYPPNKVMIWDDHRSHCIGEFAFRSDV

SEQ ID NO: 134979 - protein, 152 aa, Oryza sativa
  unsure (1)..(152): unsure at all Xaa locations
  Clone ID: PAT_MRT4530_3669C.1.pep
MSITGDNNNTGDKEKEPPVNTNGGNTASNSSEGPFSGYNVSLLPFVLRFLXLLVAILLHSLVYIDAYSILSMLMLYTYNNVTRSTQITNIKIYRIVTKFPTALGAGLPSVXYVVSLQTIATDVANYRRQRVLSTLSLSPLPSSLFSKPLQNL

SEQ ID NO: 134980 - protein, 92 aa, Oryza sativa
  unsure (1)..(92): unsure at all Xaa locations
  Clone ID: PAT_MRT4530_366C.1.pep
SCCCLGSTRRKCLCGDSSQLRRSRPTAYVHDRCVTRAEKDHPLXMQFFKQVDKSXQYYEFRCXTRLVKPSILHFQNLYKEGLLEQLLQSTAL

SEQ ID NO: 134981 - protein, 114 aa, Oryza sativa
  Clone ID: PAT_MRT4530_36700C.1.pep
MAMHGIDSVEWRALAQAVALWNEFAIARAPNVGSTTSQSPELQKKFITEHSSWTNYPLTWLEKRACQLGKCANDSMKLKDRNGGDEVIKQMGGWMVQVTVGSILENAFLGHSLA

SEQ ID NO: 134982 - protein, 222 aa, Oryza sativa
  Clone ID: PAT_MRT4530_36701C.1.pep
MEVAPAAAMTRAEEESRRRAATRLPRLLRGVVSGMLTGIFAVAGGLTGAVTGALAGRASDGGVLRGAGLGTFAGAVLSIEILEASRAYWCQDRSSSPGSLSMGDFVKQLIHARFVQEQNEASGHITYRWQVGIADVVNGAVHEILGDVPSGEGLSKYSLMKLPYHVVIDHNNGSIGESLSCPVCLQDVVAGQTVRRLPKCSHTFHQPCVDKWLVGHGSCPMY

SEQ ID NO: 134983 - protein, 87 aa, Oryza sativa
  Clone ID: PAT_MRT4530_36702C.1.pep
KKKWERQRFFKPSFLNPANKFISGIKMKTMSRKQVTKTGNNSARHKVGYWCPTPSSFPFFFFFFFFFFFCYFLFLFFISDAWSTGIR

SEQ ID NO: 134984 - protein, 52 aa, Oryza sativa
  Clone ID: PAT_MRT4530_36703C.1.pep
MGASPTASISVREEVARRNRSTPSGYLACYCNTVKWMMPVMDGTGEAQQAAG

SEQ ID NO: 134985 - protein, 59 aa, Oryza sativa
  Clone ID: PAT_MRT4530_36704C.1.pep
MDGVLATCENCLLMTTKTMRNYRSRRFSSWTDYLILGPSRKIAITVVRDCYDLLVEDKV

SEQ ID NO: 134986 - protein, 243 aa, Oryza sativa
  Clone ID: PAT_MRT4530_36705C.1.pep
MTTLLGCWKSMSTVCLHRVAITDEELGFFLAGCLVLERLDLSFCNSIGALKIPSALRRLRSLRVRSCRMLRTIESGAPMLATVWYDGWPLLRFWLGGALERTHLEIAYGIRWYNDQNRGNPDDGASCRGREASKLRNGGIVGNLRKVTITGFCSANSLVELTCHILVIAALSLEHLTLDTSPGYDRKCSSYDRCRKMSTEALREAETALAAARKYVEPKVPDSVNLMVLGPCGRCHLGMEYGS

SEQ ID NO: 134987 - protein, 167 aa, Oryza sativa
  Clone ID: PAT_MRT4530_36706C.1.pep
FSRGKPLDSYVQKNGGNPCRLTRQTSIISAWILDQKHHKKLKRTEQASNQPASTSTYILYSRDLVGDETMTRRRRPAGAAEAHRSITWAPKAAGASPCPPCRRRPPRAAPPLPPAWPRPRPRGVPAAAGRRRAPAHAASPGAPTCSRARCSWRINHRFLLGPSCYAI

SEQ ID NO: 134988 - protein, 115 aa, Oryza sativa
  unsure (1)..(115): unsure at all Xaa locations
  Clone ID: PAT_MRT4530_36707C.1.pep
AFGVXLSVTRVLPVAISFXGPVXXXXCVXGXGXXXTETLVYWDGDFGKDPRVEYGDGDGVVNSASILALDTVIGDDPKQEYYRSVKITGASHVGVVSGAAALRRVIAVILQDNFV

SEQ ID NO: 134989 - protein, 612 aa, Oryza sativa
  Clone ID: PAT_MRT4530_36708C.1.pep
MVVVHAPNGKQEEHAECHEERRPSSSSGCRSHGGGEEVRLALLGIHVIQAPLSPLFEHSEILQVDPSCGPHQAGCWIKLTGTPSSRFRTYTAKEISQSFVFFRINADLGRAPRRHRRGGRRGSWRLSLRCVCSKFVTFQILPSKEFLSIVRIIFNCCNTHDIWQHIHSRMPMRDAARAACVSHRFLRFWRGYPTVTIDQETLGLSSQRFWITSEDERGEYILTKAQKVLESRLSGSTIVQSLKLDLSTFRKAIVSATVAGGLLDCWLRAFVKPGIVDITVLLPKCEDDDDCYYYYGHDCLPEYTFPCSLLSDDEDKITSLQSLSLSSCGFHPTEGMTTLLGCWKSMSTVCLHRVAITDEELGFFLAGCLVLERLDLSFCNSIGALKIPSALRRLRSLRVRSCRMLRTIESGAPMLATVWYDGWPLLRFWLGGALETTHLEVHATRMGDVIQYAGSKLPSAALNLETLVLSTVYEIAYGIRWYNDQNRGNPDDGASCRGREASKLRNGGIVGNLRKVTITGFCSANSLVELTCHILVIAALSLEHLTLDTSPGYDRKCSSYDRCRKMSTEALREAETALAAARKYVEPKVPDSVNLMVLGPCGRCHLGMEYGS

SEQ ID NO: 134990 - protein, 41 aa, Oryza sativa
  Clone ID: PAT_MRT4530_36709C.1.pep
VVPKYLCFFGSSHSEQFFYFLLQICFALKLQNSLQINGSYL

SEQ ID NO: 134991 - protein, 39 aa, Oryza sativa
  Clone ID: PAT_MRT4530_3670C.1.pep
MAKSECRWHDIEGNIKGRRKSAIDASRQGTTIAVMGRRR

SEQ ID NO: 134992 - protein, 53 aa, Oryza sativa
  Clone ID: PAT_MRT4530_36710C.1.pep
MAMPTTIVQQRRGDYNDDSRGVKEANKGGGMHPRLAHHLQPRIPTFVHATACT

SEQ ID NO: 134993 - protein, 131 aa, Oryza sativa
  Clone ID: PAT_MRT4530_36711C.1.pep
SRGKIAFRILPQNQRFKRAPSPLLAPSIAPLFPTTLPAPFAAAPARSRFPAQSRPHPPLAPPLRPWPQRRRRLPPSSPTTGSRHRAPTMRPSSPSATAVGLRELAPDDATLRRAADGHPAAASLRPRPHPH

SEQ ID NO: 134994 - protein, 601 aa, Oryza sativa
  unsure (1)..(601): unsure at all Xaa locations
  Clone ID: PAT_MRT4530_36712C.1.pep
WRRGAPPTRPSRSSSGSTAPSSAGSPSPRSSSSSPPSPRSPRPRSPSLPRPPPPPTSRAQSPVWRSRRPCTIGXIWKPPPRRERMPAPRAFRLTREMVGARARGGAIVVTFGNHAFLDFILTWVRHLTDLGVDSLLVGAMDTKLLRELYLRGVPVFDMGSRMATEDAVWGSPTFHKMGREKVLLINALLPFGYELLMCDTDMVWLKNPLPYLARYPDADLLTSSDQVIPTVTDDSLENWREVTGAYNIGIFHWRPTEPAKRLAKDWKDLLLSDDTLWDQNAFNDLIHKKFGYPVVGEDELVYSYDGKLKLGVLPASIFCSGHTYFVQGMYQQLRLEPYAVHTTFQYAGTVGKRHRLREAMLFFDQPSYYDSPGGFLSFRPNIPKSLLLDGAHTVKSHFALVNYQLKQIRTALAIASLLKRTLVMPPLWCRLDRMWFGHPGVLEGTMTRQPFLCPMDHVFEVHVMLKDLPKEEFGPHIDFREYSFLENPSLPKQVKESFLEVELCNEHSTRCSTTNRTNKGAPVLLPRNSTEQTLLDIFKPYKDIKILQFSSMVNAFGGFSDALREIGHIYYDMYWDEKPGWKPLPPQTKVEDHPPWLEVQE

SEQ ID NO: 134995 - protein, 106 aa, Oryza sativa
  Clone ID: PAT_MRT4530_36713C.1.pep
QPFYFGCLSHLADQITTLTGQTWRVILAGQTMGPTTPTISLFAQIAEDHGSGGVAVAFLVVRHRRRLPRACGEPSPPASRAQGAAAAVPACLIAAHVRGEPPPPSL

SEQ ID NO: 134996 - protein, 66 aa, Oryza sativa
  Clone ID: PAT_MRT4530_36714C.1.pep
FYPDPTYHEEMNTPKYTRKEAIGVQPWQLKLLHLLGTWGANFPKLETRNNHFTCNMHERTIFLIVS

SEQ ID NO: 134997 - protein, 51 aa, Oryza sativa
  Clone ID: PAT_MRT4530_36715C.1.pep
IALKNITNIIGGKDMGLRQLHKNINTLAYGTSWNTTQDLVKVYWKEVKTKT

SEQ ID NO: 134998 - protein, 112 aa, Oryza sativa
  Clone ID: PAT_MRT4530_36716C.1.pep
MRRTAASLLRHSGIGGGGGGSGGGIPQALADALVCPLSKKPLRYCEDSGSLVSDAVGVSFPVVPSDTSWGLCPAVIEIVDGIPYLVPKDGKLLDHDQDKSEDCGAKDSSHRH

SEQ ID NO: 134999 - protein, 49 aa, Oryza sativa
  Clone ID: PAT_MRT4530_36717C.1.pep
ASGLGKYQAPKRVTMYYATTRSLLLLSAYNNERNLGRELIKKKKKGGSR

SEQ ID NO: 135000 - protein, 177 aa, Oryza sativa
  Clone ID: PAT_MRT4530_36718C.1.pep
KITSKYLKDPIIIDLVGDEDQKLPEGISLYSIASEHYGKPSILGPLIKEHANGGKCIVFTQTKREADRLAYAMGRSYACQALHGDISQNQRERTLSGFRDGRFNILVATDVAARGLDIPNVDLVIHYELPNTSELFVHRSGRTARAGKKGSAILIYTNDQARAVRIIEQDIGCKFTE

SEQ ID NO: 135001 - protein, 895 aa, Oryza sativa
  Clone ID: PAT_MRT4530_36719C.1.pep
MPGPCCAGATEAAGVPWLAEPPGVQVHTGVVVQPGGGGGRRWGRRAGGREAGDLAVDRGEARRTGHHQALPHPGVDSRMKCLAPDEMLAFLGLESLELGQACCGSIMVDSITPPSSVETERAVLDPAMQGKDMIGRARTGTGKTLAFGIPIMDRILRHNEKNGSGRNPLAIILAPTRELARQVEKEFKESAPLDSLCVYGGVPISHQMRALNYGVDVVVGTPGRIIDLLRRGVLNLSEIQFVVLDEADQMLAVGFDEDVEVIMENLPQNRQSMLFSATMPSWIRKITSKYLKDPIIIDLVGDEDQKLPEGISLYSIASEHYGKPSILGPLIKFAPLTTLFSTLPQEHANGGKCIVFTQTKREADRLAYAMGRSYACQALHGDISQNQRERTLSGFRDGRFNILVATDVAARGLDIPNVDLVIHYELPNTSELFVHRSGRTARAGKKGSAILIYTNDQARAVRIIEQDIGCKFTELPKIEVADEASDMFNVVRDNRSRLAGSPRTGGSSFGRGGYGGFGEGRSRGFGDFDGFGSSPNRGGRSRDAGSRYGSGFGDFRRPSNAFGRSSSKQPDGFGFGDFGEGNFSRNGNRRSRSFDDSGSTRIFKELASGAKIHQQDSSQEEITIHQTNLSQIQDRKMGKKIGDLQQISTMHKIYSIMSLNPVFSIALGLRPCAGKRKVNWAQMPSQRSSDPLGLRPLQKAQPEKRTTATAGVDGDSSVAAPVQVKPRMIIKGMLGRYERWNPVHPTVGTFWGIGLGLGCGVGWGPGFGPEVIGYVGAGCGVGFSVGVTLAGVGVGLPQHGLIRNQYHSGFASNIPFESARFYTFTIIRGLVWDAISYASQVAAVRKESRQRLLNFHENPQISGGVNLPKLGKGVSSSIQSTMECIKAFKDQHWPP

SEQ ID NO: 135002 - protein, 48 aa, Oryza sativa
  Clone ID: PAT_MRT4530_3671C.1.pep
MEPDVQLPSLMLACVPRTPLMRDSQIKVLDGVPCRRESFQAKSRLKEE

SEQ ID NO: 135003 - protein, 1861 aa, Oryza sativa
  Clone ID: PAT_MRT4530_36720C.1.pep
MSSGGGASSALGGGGGGGGSGGGGGGPSGGGGGGGGPCGACKFLRRKCVSGCIFAPYFDSEQGAAHFAAVHKVFGASNVSKLLLQIPAHKRPDAVVTICYEAQARLRDPVYGCVAHIFALQQQVVNLQAELTYLQAHLATLELPSPPPLMPAPPQMPMPAPFSISDLPSSTSVPTTVDLSALFDPPPQPQWASPLQQQQHHHHQHHHHQQQQHQLRQPSYATLARAPSGMTAAAESSGGGGGGGGGDLQALARELLDRHRVRDDEEESKQRDWNGPVMASRLQERKVIQIHPARRRIRRGIMASPAAAPPPTPPESDPRLVEAFVPFLEKLIKNASWRNKAHSKLSHTAKSILDRLQNPPPPAAAAQAPSTPTSPTTPTSSSSQPGPLRSLSLADSELLLGPINSALGSGSAKLAEAGLELLHRLIAHSYIHGEADPSADPSAQLVASLLDAACNALHLDDEHIELLLLKTLLSAVTSTSVRLHGDCLLRAVRACYDMYLGSRSVVNQATAKASLVQMLVIVFRRMEADSSTVPVQPIVVADVIELPEAASGASPAADANFVQGFISKIIGDIDGAITPLARTTSSAAAGAGGAAAHDGAFETRAAEEGAHPADLLDSTDKDMLDAKYWEINMYKSALEGRKDEIGVEGAVVGALDDDADVRIGNKLRRDAFLVFRALCKLSMKTPPKDAPADPIVMRGKILALELLKILLENAGAVFRTSERMVNGLLKTAQGPPAGVSTTLVPPQDTTMKSEAMKCLVAILRSMGDWMNKQLRIPDPDSPKVESEQNDNDGGHEISHTEDNGDECSEASDSHSEMSNGVSEAASLEQRRAYKMELQEGISLFNRKPRKGIEFLINANKVGESPEEIAAFLKSSSGLNKTMIGDYLGEREDLSLKVMHSYVDSFDFQGMEFDEAIRAFLQGFRLPGEAQKIDRIMEKFAERYCKCNPKAFSSADTAYVLAYSVIMLNTDAHNPMMSPEDFIRNNRGIDDGKDLPEEFMRSVFYPATDVVVLKFMVEVCWAPMLAAFSVPLDQSDDEIVISQCLEGFRSAIHVTAAMSMKTQRDAFVTSLAKFTSLHSAADIKQKNIEAIKPDLDKSKQAKSSILPVLKKKSPNTVPASKRGSYDSAGVGGKASGVDQMNNVVTSLLEQVDMAEMNRVFVRSQKLNSEGIIDFVKALCKVSMEELRSASDPRVFSLTKIVEIAHYNMNRIRLVWSSIWHVLSDFFVTIGCSENLSIAIFAMDSLRQLAMKFLEREELANYNFQNEFMKPFVVVMRKSRAVEIRELIIRCVSQMVLARVSHVKSGWKSMFMVFATASYDDHKNIVLLAFEIIEKILREYFPYITETESTTFTDCVNCLIAFTNSRFNKDISLNAIGFLRFCAAKLAEGDIGSSSRLKENPPSPRLTKDGKQESAVLVDKDDTIHFWFPLLAGLSELTFDLRPEIRKSALQVLFDTLRNHGHLFSLPLWEKVFDSVLFPIFDYVRHAIDPSSGSPQGQNVESDPSELDQDAWMYETCTLALQLVVDLFVKFYDTVNPLLRKILLLLTSFIKRPHQSLAGIGIAAFVRLMSSAGSVFVDEKWLEVVLSLKEAATETLPDFSYIASGAYLENVPIENGGSSEKTEDESRPLEDGTGEASRSRNLYFAIGDAKCRAAVQLLLIQAVMEIYNMYRARLSSQNTVILFEALHTVATHAHKINSDNDLRSKLQELGSMTQMQDPPLLRLENESYQLCLTILQNICLDRSPNERSVEVESHLVGLCKEVLEVYLSTANPSQLSGAPQPLGHWLIPVGSSKRRELAARAPLVVSTLQAISGLGDSSFEKNLGQFFPLLAGLISCEHGSSEVQVALSDMFSTWVGPVVLQTC

SEQ ID NO: 135004 - protein, 1789 aa, Oryza sativa
  Clone ID: PAT_MRT4530_36721C.1.pep
MASPAAAPPPTPPESDPRLVEAFVPFLEKLIKNASWRNKAHSKLSHTAKSILDRLQNPPPPPAAAQAPSTPTSPTTPTSSSSQPGPLRSLSLADSELLLGPINSALGSGSAKLAEAGLELLHRLIAHSYIHGEADPSADPSAQLVASLLDAACNALHLDDEHIELLLLKTLLSAVTSTSVRLHGDCLLRAVRACYDMYLGSRSVVNQATAKASLVQMLVIVFRRMEADFSTVPVQPIVVADVIELPEAASGASPAADANFVQGFISKIIGDIDGAITPLARTTSSAAAGAGGAAAHDGAFETRAAEEGAHPADLLDSTDKDMLDAKYWEINMYKSALEGRKDEIGVEGAVVGALDDDADVRIGNKLRRDAFLVFRALCKLSMKTPPKDAPADPIVMRGKILALELLKILLENAGAVFRTSERFLGAIKQYLCLSLLKNCASAHMIVFQLSCSIFISLVSRFRPGLKAEIGVFFPMIILRVLENIAQPNYQAKLIVLRFLEKLCADSQILVDIFLNYDCDVHSSNIFERMVNGLLKTAQGPPAGVSTTLVPPQDTTMKSEAMKCLVAILRSMGDWMNKQLRIPDPDSPKVESEQNDNDGGHEISHTEDNGDECSEASDSHSEMSNGVSEAASLEQRRAYKMELQEGISLFNRKPRKGIEFLINANKVGESPEEIAAFLKSSSGLNKTMIGDYLGEREDLSLKVMHSYVDSFDFQGMEFDEAIRAFLQGFRLPGEAQKIDRIMEKFAERYCKCNPKAFSSADTAYVLAYSVIMLNTDAHNPMVKNKMSPEDFIRNNRGIDDGKDLPEEFMRSLYERIWKKEIKMKEEEFVPQQQKSTSSNKILGLDNILNIVVRKRDSRMETSDDLIKHMQEQFKEKARMSESVFYPATDVVVLKFMVEVCWAPMLAAFSVPLDQSDDEIVISQCLEGFRSAIHVTAAMSMKTQRDAFVTSLAKFTSLHSAADIKQKNIEAIKAILLIADEDGNYLQEAWEHILTCVSRFENLHLVGEGAPPDATFFALQQPDLDKSKQAKSSILPVLKKKSPNTVPASKRGSYDSAGVGGKASGVDQMNNVVTSLLEQVGMAEMNRVFVRSQKLNSEGIIDFVKALCKVSMEELRSASDPRVFSLTKIVEIAHYNMNRIRLVWSSIWHVLSDFFVTIGCSENLSIAIFAMDSLRQLAMKFLEREELANYNFQNEFMKPFVVVMRKSRAVEIRELIIRCVSQMVLARVSHVKSGWKSMFMVFATASYDDHKNIVLLAFEIIEKILREYFPYITETESTTFTDCVNCLIAFTNSRFNKDISLNAIGFLRFCAAKLAEGDIGSSSRLKENPPSPRLTKDGKQESAVLVDKDDTIHFWFPLLAGLSELTFDLRPEIRKSALQVLFDTLRNHGHLFSLPLWEKVFDSVLFPIFDYVRHAIDPSSGSPQGQNVESDPSELDQDAWMYETCTLALQLVVDLFVKFYDTVNPLLRKILLLLTSFIKRPHQSLAGIGIAAFVRLMSSAGSVFVDEKWLEVVLSLKEAATETLPDFSYIASGAYLENVPIENGGSSEKTEDESRPLEDGTGEASRSRNLYFAIGDAKCRAAVQLLLIQAVMEIYNMYRARLSSQNTVILFEALHTVATHAHKINSDNDLRSKLQELGSMTQMQDPPLLRLENESYQLCLTILQNICLDRSPNERSVEVESHLVGLCKEVLEVYLSTANPSQLSGAPQPLGHWLIPVGSSKRRELAARAPLVVSTLQAISGLGDSSFEKNLGQFFPLLAGLISCEHGSSEVQVALSDMFSTWVGPVVLQTC

SEQ ID NO: 135005 - protein, 577 aa, Oryza sativa
  Clone ID: PAT_MRT4530_36722C.1.pep
MASLFRARRRRSPEDDGEGEDGSASGRVTRRRLSPEEGALSLAEASASVAAAGAGAESSPGWLSSIVSGARRVISSVLFSSPEEAASGEEEEDDDEEDETEDNHGAIVSYNESKLAIEEMVMKETFSRDECDKMVKLIQSRVTDAALPEAPEYGTPKEIPTRNTVVGNDFTGAWRSLSRHRNGTEPVPFSSIGSGSFSPGSPLHASPELLSAAVMEAKKWLEEKRQGLGSKPEDHGPCTLNTDMLNSGFESDMGSPVDLAKSYMQSLPPWQSPFLGSQKFKTPPSAGLHMYDYEGKSKYSLPSSKVTTKEEYLSNFWENLEESRRSRLGSSGSSPDASKVRQYGSTSRLFENDTSIFSSGTDKKVDKPEQNNKGSDKVAGAEPANGHSSPITDKNHVFVDPVDPANDIGNVVKECNAASKVHIEEISQGNQISSTSVTKDADRDGDVKAPVAEPEIHMESDINSASELRTKDTGPHIHASLNGSTKKTSANGLRDQSNANSGVESSGNDNPSCTNSSTGVPPTNNEVNDPKADAADGDSVENGTRLNSEEPAQVDPKPAYVRRGRKRVVRGTRGRAK

SEQ ID NO: 135006 - protein, 34 aa, Oryza sativa
  Clone ID: PAT_MRT4530_36723C.1.pep
IFPISSIPYVASSIIRSSPNSSFWQLPYVPVVND

SEQ ID NO: 135007 - protein, 193 aa, Oryza sativa
  Clone ID: PAT_MRT4530_36724C.1.pep
ADTGEQTVGSTAVVAVVGPRRIVVANCGDSRAVLSRGGVAVPLSSDHKPDRPDEMERVEAAGGRVINWNGYRILGVLATSRSIGDYYLKPYVIAEPEVTVMDRTDKDEFLILASDGLWDVVSNDVACKIARNCLSGRAASKYPESVSGSTAADAAALLVELAISRGSKDNISVVVVELRRLRSRTTASKENGR

SEQ ID NO: 135008 - protein, 130 aa, Oryza sativa
  unsure (1)..(130): unsure at all Xaa locations
  Clone ID: PAT_MRT4530_36725C.1.pep
MEEKGMGKQRWEKMLLQAAFDGNLRLLRKMARGLVTTGRGRGEADVLAAVADGGSGSRALHLAATEGRMDVLTYLVEDLRLDVNQTNDRGSDXLIXSAFFGRTASTRYLLDHGADPMIVGKSGSPLHAAA

SEQ ID NO: 135009 - protein, 76 aa, Oryza sativa
  unsure (1)..(76): unsure at all Xaa locations
  Clone ID: PAT_MRT4530_36726C.1.pep
SFSDAWIPIHALXVDTVKRESGANLGLYDPHHLGEAPHGRGRAHHGIHAQHGGGAPHEGRGAHGRLRGDGHGHDHR

SEQ ID NO: 135010 - protein, 163 aa, Oryza sativa
  unsure (1)..(163): unsure at all Xaa locations
  Clone ID: PAT_MRT4530_36727C.1.pep
MQQHLMQMQPMMAAYYPNNVTTDHIQQYLDENKSLILKIVESQNSGKLSECAENQSRLQRNLMYLAAIADSQPQPSPLAGQYPSSGLVQQGAHYMQAQQAQQMSQQQLMASRSSLLYSQQPFSVLQQQQGMHSQLGMSSSGSQSXHMLQSEAHYVGGNATIGT

SEQ ID NO: 135011 - protein, 52 aa, Oryza sativa
  Clone ID: PAT_MRT4530_36728C.1.pep
GGSKKKRVKKALRKTALKTTLDSCCSSRKWGGGHPVLFCRVQKQGRHHGAAP

SEQ ID NO: 135012 - protein, 55 aa, Oryza sativa
  Clone ID: PAT_MRT4530_36729C.1.pep
MTVLSTIHCDPKDSFPPLNRHGFLRTSTFPPLKNPTDGDTTVDTRLKVLPMAAPP

SEQ ID NO: 135013 - protein, 523 aa, Oryza sativa
  Clone ID: PAT_MRT4530_3672C.1.pep
MVSCSSRADAPPRRRAAARGLGLGLAGCFGGGSSGAATGGGGGGGATAASSSRAHEVESWQAARAVAEMDFRASVAAKDIRISSESDPRVHPSSSTISHHLRFNHLNSHENKEDALGTEIAETSVRQSSSGKEVMPRGNFSNEVAYAEITSREGISHIGRDILEPAANNAETDTVCIPEVGGPVSESGFSSSQRASERIMADLEAGEIAHGTSSTTIMSSERSDTSQSSLTSVLPATSTAPSTIGESLPDTVPSREDVPIFSGTQGEIGGNTLHDDMMSIFSNDGPARVRDSSSNEMRRSHRRVLWDTFSRRSSRGYLDSDTDDLGFYSRWLDLGDELFADEIEEARFFHRRRHGSIRVSQYSRSRIREHRRAVFDSGTDQSTVACPLGIHQIGRCTCDSFLIAEESSARASISRIVMLTEALFEVLDEIHRQPASLSLSMVSAQAPESVVNSLPCKSYKKQTAQCSDDMEQCHICLTEYEDGDQIRSLPCKHEFHLLCVDKWLKEVHRVCPLCRGDVCEGAA

SEQ ID NO: 135014 - protein, 400 aa, Oryza sativa
  Clone ID: PAT_MRT4530_36730C.1.pep
MADGEDAAAARRRASVTEYRKKLLNCRELESRVSTVRENLKNAKKDFTKTEDDLKSLQSVGQIIGEVLRPLDNERFIVKASSGPRYVVGCRSKVDKEKLTSGTRVVLDMTTLTIMRTLPREVDPVVYNMLHEDPGNVSYSAVGGLSDQIRELRESIELPLMNPELFLRVGIKPPKGVLLYGPPGTGKTLLARAIASNIDANFLKIVSSAIIDKYIGESARLIREMFGYARDHQPCIIFMDEIDAIGGRRFSEGTSADREIQRTLMELLNQLDGFDELGKVKMIMATNRPDVLDPALLRPGRLDRKIEIPLPNEQARMEVLKIHAAGIAKHGEIDYEAVVKLAEGFNGADLRNVCTEAGMAAIRAERDYVVHEDFMKAVRKLNDAKKLESSAHYSADFGKE

SEQ ID NO: 135015 - protein, 40 aa, Oryza sativa
  Clone ID: PAT_MRT4530_36731C.1.pep
LPTPAQLAKSTNGRPFPVHHLYGACNKEYQSGFLPCLGWY

SEQ ID NO: 135016 - protein, 48 aa, Oryza sativa
  Clone ID: PAT_MRT4530_36732C.1.pep
GFTIGVRRNLWILKLVISRDRDYKALYRIRSGRGETRLDQILEIMRDD

SEQ ID NO: 135017 - protein, 74 aa, Oryza sativa
  unsure (1)..(74): unsure at all Xaa locations
  Clone ID: PAT_MRT4530_36733C.1.pep
IKATPPRTPPNNGTNILATLLITRGTGIATIRASSTDTGRILVITTRACNDGDGXRSGAADDRSTKDVQRLVPN

SEQ ID NO: 135018 - protein, 102 aa, Oryza sativa
  Clone ID: PAT_MRT4530_36734C.1.pep
TVIPPNPPPNFFLFHPPFFFFFPFFFFGGAPPQGDKPSPYFPKLKVCPKGQCVPFSKRVGWVVKGLFFFGAPKKKKKKKKKKKKKKKKKKKKKKNQKKKKNK

SEQ ID NO: 135019 - protein, 33 aa, Oryza sativa
  Clone ID: PAT_MRT4530_36735C.1.pep
MPSLQSSVAAPGDEATTCEETHFRNGNMFRKRI

SEQ ID NO: 135020 - protein, 81 aa, Oryza sativa
  Clone ID: PAT_MRT4530_36736C.1.pep
MAKMGVGRRKVVGPTGFKAQRRGAPAMLAPWSTGCHGAAVRRRATVVCLPSWCRHLTQPLHRQPGARAPQPGKRSRTSLTA

SEQ ID NO: 135021 - protein, 62 aa, Oryza sativa
  unsure (1)..(62): unsure at all Xaa locations
  Clone ID: PAT_MRT4530_36737C.1.pep
DXEAKLSFMGTRIEYIFFCMVXVKLITAVQKILFSIQVIELIFCLECSMNHWYFLCYSKLQQ

SEQ ID NO: 135022 - protein, 170 aa, Oryza sativa
  Clone ID: PAT_MRT4530_36738C.1.pep
MRRRVVFRSAVGTARRVNWSAASDKGRREWMGACSRLRAQLDEHGLARLLLAAIIAGMRSSFGYSGNQQGARLGGPGRWREQWGGTATVTDAATTAVAAFPACPAPRRFLRHHHRQTWRKKGKEGEKRLWRGGGFADSGSLPSCTRRRWRPSCARRRRSHHHPPPTPAPP

SEQ ID NO: 135023 - protein, 224 aa, Oryza sativa
  Clone ID: PAT_MRT4530_36739C.1.pep
METAAGRNCGAPVAAAAAATSVGRSFWRWCCRRRWLPTAPAICNVHGGSRPDLGAVGGGRLATPVGDSGGGVVAAVGGGGCWLLGGGGRRRNDGLRRRWFASVAAARRPGCGGGAVAVIRGMAASDGLPRAWETVASGRRGIVGWRGRRSAWRREAQPMAAEAGSAREARAVEMEAGLAQAAEMEAGLAREAQPMEGGRIGARRIRWRRPAWCREARPAVEEAT

SEQ ID NO: 135024 - protein, 129 aa, Oryza sativa
  unsure (1)..(129): unsure at all Xaa locations
  Clone ID: PAT_MRT4530_3673C.1.pep
MGPSRAARISPSLARRRRNPKSSLPVREKRQAVVAAMPVEVCVKVXVAHPDTLRNXPFSHRTLLTLDSNMVPYKMKLFYVQNYTDWFLKIIPQXKVPVFNPADRKRIPDSDVITXLIEEKNKSPSLATP

SEQ ID NO: 135025 - protein, 73 aa, Oryza sativa
  Clone ID: PAT_MRT4530_36740C.1.pep
SFFWGGVCFNLDYSVFFIRKNYPWGGRPIEKRKKFRGGFSKKVPGFFWFFFGAFFFFFPNLGLMVWFFLGPFF

SEQ ID NO: 135026 - protein, 435 aa, Oryza sativa
  Clone ID: PAT_MRT4530_36741C.1.pep
MAHISDIKLIRTDTTLDLSKKAEKGMSSYVALPIVLYQPPPYPPLSPGEVARSAAHVALGGRNCTNRDARSDGTTATGEVAADEPHHEPSLVVLILVLPPQLPLICSPVPSAEVAREASISGRPSPPSSSSASPPPERPPAKPRGRKDGGGGAPHFLVNLISSGRPGEQPRAVATVTARSAPPRPDLAGWRLAAGMETAAGRNCGAPVAAAAAATSVGRSFWRWCCRRRWLPTAPAICNVHGGSRPDLGAVGGGRLATPVGDSGGGVVAAVGGGGCWLLGGGGRRRNDGLRRRWFASVAAATAAVTVEAVATLVARKESAAAVVVTVAVIRGMAASDGLPRAWETVASGRRGIVGWRGRRSAWRREAQPMAAEAGSAREARAVEMEAGLAQAAEMEAGLAREAQPMEGGRIGARRIRWRRPAWCREARPAVEEAT

SEQ ID NO: 135027 - protein, 222 aa, Oryza sativa
  unsure (1)..(222): unsure at all Xaa locations
  Clone ID: PAT_MRT4530_36742C.1.pep
MATARWLSVRQQRLRWWCRGGHQRHGGLRRLAEGVGDGCIWPARHRWVEGSEISLAQRSAADGSGGRLGARGAGGGDGGRLGAGGGDGGRLGARGAADGGRPDWRERCVRWRRPAWRERRGRRWTRRPRCEEELPMGVARSSTHEGWPAGDAGAGVPHVGRAXVVVEHRCVSRGFAXAGRKPSLGSXEPRRTAATXFPSLLFLKASFWHPLGGDLRXVPLLV

SEQ ID NO: 135028 - protein, 249 aa, Oryza sativa
  unsure (1)..(249): unsure at all Xaa locations
  Clone ID: PAT_MRT4530_36743C.1.pep
WLFNCIESMSVLMFLWRNWHVRNEIMHGKAAPPIEPSKRFIVSYVDALFQIRQNPGADLSKGKCIASATKGTVVTSALRIIQPSWERHVLGWMKLNIDGSFDCSIGGGGXGGIGAILRDSTGKTIFASCKPLERCNGALESELRACVMGLTAAIQRTLLPILVETGCISVVQHLYXQREGLFTPICIVQEAKDLLLRDREVVIRKVSRSXNAVSHFLANKARVEFCTGFWLEGNCNQISQLVCENFSNK

SEQ ID NO: 135029 - protein, 194 aa, Oryza sativa
  unsure (1)..(194): unsure at all Xaa locations
  Clone ID: PAT_MRT4530_36744C.1.pep
RRIRPPDGGSSHPAAGSSQLVAGAAELATTWRQQQGKLVEGAPVAVATAVLGPRQRRQHPLAGASRGGAVGGGGCRRRPRSXQRPRRLSAGSGWSAGDAYWXQRRRLLAAWWWRATVQRQFAEAVAHVGGSGDGGRDCGGGGDVGSGERDGDGEVAECSTAAAAVVVTVAVIRGMAASNGLPRAWETVASGRRG

SEQ ID NO: 135030 - protein, 66 aa, Oryza sativa
  Clone ID: PAT_MRT4530_36745C.1.pep
FRWSTGDIPTVRQVPSRRSNCGRTRVRSARATGAAGDIDVQTGPDGPWVPAGPAYLMDRGPVGPGY

SEQ ID NO: 135031 - protein, 120 aa, Oryza sativa
  Clone ID: PAT_MRT4530_36746C.1.pep
MINLTSSVSRLNMDKNYKVALRGRRANYSLLIVVLPLILLQIDPQSSSCWATVASPIALAYMRVLLSRLAPQQEGSACINGAIGDAAVAQSYLERIGDRSGEKVELEKRKASEGFTCKFG

SEQ ID NO: 135032 - protein, 161 aa, Oryza sativa
  Clone ID: PAT_MRT4530_36747C.1.pep
ERVANESVEGLMMDVTAAEEEIKRWKMAAEEEAEAGKAIEQEFETQLSSLNKELDEAKQAMLELENKLKFKEETAAAAMAARDAAEKSLKLADMRSTRLRERLEEINRQLEESDNRRDSSNRNGHRYMCWPWQWLGLNYVRLPPTEADQTSNEMELSEPLI

SEQ ID NO: 135033 - protein, 199 aa, Oryza sativa
  Clone ID: PAT_MRT4530_36748C.1.pep
MAERQLRRGGGRGGRWRRRKSSNWGLPSSATVEAPADSVESAETVRRGDSVESVETHTPQFLGLSAPSPPPPPQGKRWSSSSHGGSGAGSGVIVGVFPDHLSFSDAGMPPPPAKWKGCCEPATSMAPWMLTVAASTMDRSIRTTVRLGNNLYFDGESLYQPNDSLNTFYPLVYAGASGKPFAEFCGNGSLDGFDVRGKI

SEQ ID NO: 135034 - protein, 79 aa, Oryza sativa
  unsure (1)..(79): unsure at all Xaa locations
  Clone ID: PAT_MRT4530_36749C.1.pep
GGLRARCXQVRPELPATTTRLPPVGSLTCHSLPQVPTSSCETXRGGRTLXLNQIKQAPMMCDEMLCDPCCPGVAVSLCN

SEQ ID NO: 135035 - protein, 107 aa, Oryza sativa
  Clone ID: PAT_MRT4530_3674C.1.pep
KKKKKKKRRGGKKKKKKKKGRKKKKKKIKKKKKKKKKNREKKKKKKKGRPALGEPKLTSPSLRGGGVFFRAPKIKSTGRGFPPSPRENPWGPPPKSPGSTSPFAPLA

SEQ ID NO: 135036 - protein, 72 aa, Oryza sativa
  Clone ID: PAT_MRT4530_36750C.1.pep
TYHIYFAIYQNIVRICFAIDPEQPSYTITTVSVTRLLHSKHTKKKSPTTFVIFYFLFSFPKYGLKDIHCIIR

SEQ ID NO: 135037 - protein, 67 aa, Oryza sativa
  unsure (1)..(67): unsure at all Xaa locations
  Clone ID: PAT_MRT4530_36751C.1.pep
KLLFWNKLHLSVLILVRCSYAASVYISFKGLYLCLLRCSYAASVCREFYSVIPHDFXFKKMSELLTL

SEQ ID NO: 135038 - protein, 107 aa, Oryza sativa
  Clone ID: PAT_MRT4530_36752C.1.pep
FMMNGGYNVLNQINQVKHKCLILWGEEDGIISNKQAYRLHQELPDAILRQVRECGHIPHVEKPSEVLKHVLDFLGTHGQARKGRAGFFLTIDSWDLLKQNWILKARV

SEQ ID NO: 135039 - protein, 206 aa, Oryza sativa
  unsure (1)..(206): unsure at all Xaa locations
  Clone ID: PAT_MRT4530_36753C.1.pep
YTWGWKECVPTGRVISDQSSGGTLEKDERQSAIAADQVSPRSQVSRTSSGXASGPSEXRGTDDSTKRRXLSSTKHAPESSTSSDENLSAPPCVVTFNTGVKIMAVAAGGRHTLALSDLGQVWGLGYGGEGXLGLGXSRIRTVSSPHPIPCIESALYSKDRPAAMKGNKSAEVQISKXMGNCVKAIACXGRHSAVVTDSGALLTFGW

SEQ ID NO: 135040 - protein, 1149 aa, Oryza sativa
  Clone ID: PAT_MRT4530_36754C.1.pep
MEYGFTANYKVWTYHGEFANPEDDDEELSFEMNEAENFIIEDMSRERMDVDVSTDSDDFDGGFDLEDSDKGKHGKIPSMVMWYLPIKDRLKRLYSNPTDAELMRWHQESRKIDGMIRHPADARQWKTFDAKHPEFAKDPRNVRFALSTDGMNPFVENDTALVARGGTYVYEITKKIKVVYGKGKKKTVKRKKADGDNGTASPFKKHSIFFKYLDYWKDLEIRHAIDVMHLEKNVFDSTVGTLLDIPRSMIEGYTTEEAVECCMDYIKDANAIGIPVHRHEGRLSGRGTVGRKQFFDNDYKKVSAAHNSVLQQLAIVEPFIERHLEKIKACFPGRSNDWISREHKRRFPLWLKDLNLPVGDYVEEFTLQRLACGTSSIVNSWQGYDINGFTLSMTTKDMKSTAQNSGIRVEAIDTSGEKRSYYGTIQEIWELDYGLNIQIPVLRCEWVKDTIGVSVDDYGLTIVDHSKTGHKDDPWVLAERVAQVFYVKDPSDERKTIVISGKQQIVGIDNIEDPNDYNQFDDVPLFTDLPMRIKKVERTIDEANMSYVRADGVAKPDTSSEETWRTPSDPFPMEITQVAPRDDDPDYIPIEQAMVVRRRSKRKAGRNRTEQEVEMDTAMSAPERTETSTSAGGSGKKRRGERSKNKLPKETYNVIALDQDGKPVEPPIVRSKFSNTCGTLKYFVFPPGSEADWDTFVADHTTAEALALRKKMSELAKKNRYPHRLGSSGYAGHVDQWREIEQRFAAAGKPLLVDPMVERSKNWVWARSTGQVSDEGDILFETPDIEEVTTNLQQIVEKERSGQFVPRRERDQLTAALGTAEHSGRVRDLSSKTSWKVGFPQDAPSYKKRDKYKEQLSDKIYAQVKEHFYSLAAENPTAFPRNSEKRKKLAHVLSDSQKSVLVAQDEVQSWLSADVPKTYEYGKPFLPTYLMNKLPWEMRVMHECMQFHEADRTGAKVGYVDPTRICKTQHTVELREDCEQLVGKTPEEKEEYVKTLHKRKKLEVATYLAIAMLAHADKDVLMVPYQFTAHKYYRKRGGPVHIPSQKKLSVRTGWPCYKQPPGTNLCGYYVCEMLRVNGRYKTTSNQIPEIPYIAQRFNDTTILNVAADLCQFIRRDVCNARGLFYDNQSELAMDDKFKPLREWEKEHMQ

SEQ ID NO: 135041 - protein, 84 aa, Oryza sativa
  Clone ID: PAT_MRT4530_36755C.1.pep
KSVWASYREHRNRPSVCAKKIVQCCVSFLRMLRGKEDFLVPFLLFQIFYLCTINRCYSIILVFFCPLVCVFLLPLFFLSFNKWM

SEQ ID NO: 135042 - protein, 897 aa, Oryza sativa
  Clone ID: PAT_MRT4530_36756C.1.pep
MSNEKVPSNAPIAPQEGNAPQNSGSNKQPDASSEETWRTPSDPFPMEITQVAPRDDDPDYIPIEQAMVVRRRSKRKAGRNRTEQEVEMDTPTSAPERTETSTSAGGSGKKRRGERSKNKLPKETYNVIALDQYGKPVEPPIVRSKFSNACGTLVRTRCPINVKLWETVDDNIKTLLWNELQKYFVFPPGSEIRGRDYALKKMGDRWRQWKSDLNRDYVQKNLPPFTDYGHISQADWDTFVADHTTAEALALRKKMSELAKKNRYPHRLGSSGYAGHVDQWREIEQRFAAAGSVQTTTFPVDSITGPTPCSLVVPIGRAGKTKEVATGLAIPGRQFHNTAIPEDYARVQVAKVHSDHVSLELDIPAPEGIELLGDAVNQFILWHRRDIILSAAVPAAGSSTPSSSQAMTAAAPAPPSPPEPPSPRHPPSPPPLRSPPRQPTPPPSPSQQPPLPAPQPVQASPTSPAKQHAPPAPPSVQTSPPTPQSALVEQVHIPDGITSEPKSNTLELSRIIPKLISTYDPKEIDKDKEKFMFSAFRNSEKRKELAHVLSDSQKLVLAAQDEVQSWLSADVPETYEYGKPFLPTYLMNKLPWEMRVMHEWYMKASRKGLGFISVAVPEGAFMSGPNGIFFISFQDLYALYKLDKMDVNLVAAFCLMQFHEADRTGAKVGYVDPTRICKTQHTVELREDCEQLVGKTPEEKEEYVKTLHKRKKLEVATYLAIAMLAHADKDVLMVPYQFTDHYILFLVYPKDQLIISLDPAHYDKETFMEFLTILNLAHKYYRKRGGPVHIPSQKKLSVRTGWPCYKQPPGTNLCGYYVCEMLRVNGRYKTTSNRIPEIPYIAQRFNDTTILNVAADLCRFIRRDVCNARGLFYDNQSELAMDDKFKPLREWEKEHIQ

SEQ ID NO: 135043 - protein, 86 aa, Oryza sativa
  unsure (1)..(86): unsure at all Xaa locations
  Clone ID: PAT_MRT4530_36757C.1.pep
MAAASGRLLAAWWQRAMAQKRSAEAVTSVGGSGDGSRDCGGGGDVGGGEGVGCEVRMATARWXGPRAWETAASGRCWCFLTTLLEI

SEQ ID NO: 135044 - protein, 468 aa, Oryza sativa
  Clone ID: PAT_MRT4530_36758C.1.pep
MVMWYLPIKDRLKRLYSNPTDAELMRWPQESRKIDGMIRHPADARQWKTFDAKHPEFAKDPRNVRQIKGKTGCLICLEKTSYKYLTSSLKTVYMWHRRFLPQRHRYRKMARLFDNTVENDTAPAARGGTYVYEITKKIKVVYGKGKKKKDLEIRHAIDVMHLEKNVFDSTIGTLLDIPSKTKDGLKSRNDLVDLAIRHDLHPVVLPNGKTEIPPACYSLTLEEKKAFCKCLLGVRVPTGFALNIRKLVSMKDLTISGYNAHECHRLLTVFLPIAIMAVKPVHTKVVITKLCYFFNRILQKVFDPLELGPLHTFSVETVCQLEMYFPPSFLDMMEHLIVHIVPQIIELGPLYLHQMWAYERYMSILKGYVRNRAHPEGSMIEGYTTEEAVECCMDYIKDANAIGIPVHRHEGRLSGRGTVGRKQFFDNDYKKVSAAHNSVLQQLGIVEPFIERHLEEIKACFPGRSNDW

SEQ ID NO: 135045 - protein, 844 aa, Oryza sativa
  unsure (1)..(844): unsure at all Xaa locations
  Clone ID: PAT_MRT4530_36759C.1.pep
MEYGFTANYMVWTYHGEFANPEDDDEELSFEMNEAENFIIEDMSRERMDVDVSTDSDDFDGGFDLEDMLRHVEPEDRLKSLYSNPTDAELMRWHQESRKIDGMIRHPADARKWKTFDVKHPEFAKDPRNIREDWMSDMSGENFVQILDIVFEDMENDTAPAARGGTYVYEITKKIKVVYGKGKKKTVKRKKADDYWKDLEIRHAIDVMHLEKNVFDSTIGTLLDIPSPLQTFAVETVCQLEMYFPPSFLDMMEHLIVHIVPQIIELGPLYLHQMWAYERYMSILKGYVRNRAHPEGSMLEGYTTEEAVECCIDYIKDANAIGIPVHRHEERLSGRGTVGRKQFFDNDYKKIPVLRCEWVKDTTGVSVDDYGLTIVDDSKTCHKDDPWVLAERVAQVFYVKDPSDERKTIVISRKQQIVGIDNIEDPNDYNQFDDVPLFTDLPVRIKKVERTIDEANMSYVRADGVAKDLSTPSPSPSPPPSRPRHRRLLPEVAPSLATAVAAARTSTPLPSPSPPHGPLPPRHRQVVAAGRQVVPATAISSPKSPPSSSSSPQPAPLPPRASSLPSPSRHRRQYLLRSKVPRTRCPINVKLWETVDDNIKTFLWNELQKYFVFPPGSEADWDTFVADHTTAEALALRKKMSELAKKNRYPHRLGSSGYAGHVDQWREIEQRFAAAGKPLLVDPKVERSKNWVWARSTGQVSDKGDILFEAPDIEEVTTNLQQIVEKERSVQFAPRRERDQLTAALGTAEHSGREHFYSLAAENPTAFPSLVVPIGRAGKTKEVAMGLAIPGRQFHNTAIPEDYARVQVAXRDIILTAAVPAAESSTPSSSQARTAAAPAPPSPP

SEQ ID NO: 135046 - protein, 78 aa, Oryza sativa
  Clone ID: PAT_MRT4530_3675C.1.pep
IRISSSPLPLRGGKFTQSPLSQCPPRPIPSLFHPKPSPPPMAHYCRAGELPHISLLYPSTPCVPTTVTAGPVLTAPGT

SEQ ID NO: 135047 - protein, 210 aa, Oryza sativa
  Clone ID: PAT_MRT4530_36760C.1.pep
LPQERSIGVYWLPSSEGSYICMDQEEHVICGIEDARRLVGLPPPIHITMTECLVKDAGEVLKLLDENITSGRWTVSDETVALLRVLAEGCEDLMYAKKELTDTVKAAQDDLITLGGNTLSVEEQLLLPEKEDRRILVLRALNLPPDSKPSRSFDVENIDAVLAARGRLRGQIVQARADMEGLRQYITETWLPWVEQRLNTHLTLGEPVMP

SEQ ID NO: 135048 - protein, 760 aa, Oryza sativa
  Clone ID: PAT_MRT4530_36761C.1.pep
MARLFDNTVENDTAPVARGGTYVYEITKKINVVYGKGKKKTVKRKKADGDNGTASPFKKHSIFFKYLDSRKDLEIRHAIDVMHLEKNVFDSTVGTLLDIPNMMEHLIVHIVPQIIELGPLYLHQMWAYERYMSILKGYVRNRAHPEGSLIEEYTTEEAVECCMDYIKDANAIGIPVHRHEGRLSGRGTVGRKQFFNNDYKKVSAAHNSVLQQLAIVEPFIERHLEEIKACFPGRSNDWISREHKRRFPPWLKDLNLPVGDSVEELTLQRLACGPSSIVNSWQGYDINGFTLSTTTKDMKSTAQNSRIRVEAIDTSGEKRSYYGTIQEIRELDYGLNIQIPVLRCEWVKDTIGVSVDDYGLTIVDHSKTGHKDDPWVLAERVAQVFYVKDPSDERKTIVISGKQQIVGIDNIEDPNDYNQFDDVPLFTDLPMRIKKVERTIDEANMSYVRADGVAKDLSPLAVAVAAARSPSPPHGPLPPRRCCRRRSTDLSPLAVAVTTARTSPPSPLPSPPPGPLPPRRRRRRRTDLSPLAVAVAAARSSPPPSRPRYRRLLPEVAPPLTVADAAARTSTPSPLPSLVDDNIKTLLWNELQKYFVFPPGSEADWDTFVADHTTAEALALRKKMSYAGHVDQWREIEQRFAAAGKPLLVDPMVERSKNWTTTFPVDSITGPPPCSLIVPIGRAGKTKEVAMGFAIPGRQFHNTAIPEDYARIQVAKRHNPERGLSCSRIFNPILITGNDCCRSCTTVALSRPEITQRAFL

SEQ ID NO: 135049 - protein, 45 aa, Oryza sativa
  Clone ID: PAT_MRT4530_36762C.1.pep
YILFFFIYNFSGGFFFIIFFDKHQVIPKIPSHPLQAIKFFLIEVI

SEQ ID NO: 135050 - protein, 353 aa, Oryza sativa
  Clone ID: PAT_MRT4530_36763C.1.pep
MVKTSVKISRTSHPLGEVVWSFLSRRRVDVVRGLRVVWLTNRTTLTCPAARGATNWREKTRRKRSALRVTCEADARTHAVAVSWSCDRLLHITRPSEITLTDLTRHRDNKQHYLDPDQLSLSLLLSFEPIQPRPLILLRSPAFARHGAHCQGCRQQQGSTCGAAPCAVLRPAAVLRLIVPGPHVAGDGMGRRQDGVLGSERWRGGQGVPGQRRGRCAHDDANAASGGEDGATDAVRSEPWCWALARIFTVHCTVRGNDRRGGKEDSKLNQSRFAVARGAACSRWLAAVAHVMKEGEWSGFLSSRRFFRTTNRLDFSRSGSDQETKRENTKIPPRRKMKRQIYPFRIYTAKLTG

SEQ ID NO: 135051 - protein, 632 aa, Oryza sativa
  unsure (1)..(632): unsure at all Xaa locations
  Clone ID: PAT_MRT4530_36764C.1.pep
MSNDKVPSNAPIAPQEGTAPKKSGSNKQHDTFSKETWRKPSDPFPMEITQVAPRDDDPDYIPMEQAISAEHRSKRKVARTRREEEVEMDTATSAPERTDTSISAGGSGKKRRGERSKNKLPKEIYNMIALDQDGKPVEPPIVRSKFSNTCGTLIRTRCPINVKLWETVDDNIKTLLWNELQKYFVYPPGSDLNRDYDQKNLPPFTEFGHILQADWNTFVKDHTTVEALALRKKXMSDLAKKNKYTHRXGSIGYAGHVDQWRETKQRFAAAGKPLLVDPMVERSKNWVWAHNTGQVSDEGDILFETPDIEQVTTNLQQIVEKERAGQFVPRRERDQLTAALGTAEHSGRVRGLSSKTSWKIGFPQDASSYKKRDKYKEQLXDKINAXVKEHVTLRFSSKDIQIPFLTSNSLQIQSLCQSLFCVPRIFVGQFPPSAHLLSAWFSPLCCSSPHVLARALRTRESHSLSSLPRSLSLSLSLYLNRKNNQIGKIEKNHCSLRCKCSTRFPSPALPPTARASCPEQPRAVAITAWCHVPSPSPPAAPEPXAPSPSPPAAPEPPXPSPSPPAAPEPPRAVTXPPSSSRPAPLPCRVAVASPVAVTSPXAVPSPRATRSPPRAPRHALVEPEGVADPSEG

SEQ ID NO: 135052 - protein, 1036 aa, Oryza sativa
  unsure (1)..(1036): unsure at all Xaa locations
  Clone ID: PAT_MRT4530_36765C.1.pep
MSNEKVPSNAPIAPQEGNAPQNSGSNKQPDASSEETWRTPSDPFPMEITQVAPRDDDPDYIPIEQAMVVRRRSKRKAGRNRTEQEVEMDTATSAPERTETSTSAGGSGKKRRGERSKNKLPKETYNVIALDQDGKPVEPPIVRSKFSNACGTLVRTRCPINVKLWETVDDNIKTLLWNELQKYFVFPPGSEVRGRDYALKKMGDRWRQWKSDLNRDYVQKNLPPFTDYGHISQADWDTFVADRTTTEAMALRKKMSELAKKNRYPHRLGSSGYAGHVDQWREIEQRFAAAGKPLLVDPMVERSKNWVWARSTGQVSDEGDILFETPDIEEVTTNLQQIVEKERSGQFVPRRERDQLTAALGTAEHSGRVRGLSSKTSWKVGFPQDAPSYKKRDKYKEQLSDKIYAQVKEHFYSLAAENPTAFPRLFPDSQQPTQSAQQTTNVPSSVGSVQTSTFPVDSITGPTPCSLVVPIGRAGKTKEVATGLAIPGRQFHNTAIPEDYARVQVAKVHSDHVSLELDIPAPEGIELLGDAVNQFILWHRRDIILSAAVLAAGSSTPSSAAAPAPPSPPEPPSPRHPPSPPPLRSPPRQPTPPPSPSQQPPLPAPQPVQASPTSPAKKHAPPAPPSVQTSPPTPQSALVEQVHIPDGTTSEPKSNTLEPRRIIPKLISTYDPKEIDKDKEKFMFSAFRNSEKRKELAHVLSDSQKSVLAAQDEVQSWLSADVPETYEYGKPFLPTYLMNKLPWEMRVMHEWYMKASRKGAFMSGPNGIFFISFQDLYALYKLDKMDVNLVAAFCLMQFHETDRTGAKVGYVDPTRICKTQHTVELRQDCEQLVGKTPEEKEEYVKTLHKRKKLXVATYLAKAMLAHADKDVLMVPYQFTDHCILFLVYPKDQLIISLDPAHYDKETFMEFLTILNLAHKYYHKRGGPVHIPSQKKLSVRTGWPCYKQPPGTNLCGYYVCEMLRVNGRYKTTSNRIPEIPYIAQRFNHTTILNVAADLCRFIRRDVCNARGLFYDNQSELAMDDKFKPLREWEKEHM

SEQ ID NO: 135053 - protein, 689 aa, Oryza sativa
  Clone ID: PAT_MRT4530_36766C.1.pep
MAEAVILFAVRKIGVALGNEATSQAVSYFRKFVTQLTELQGSMGRIRRELRLMHEFLCRMDVRNRNNQTYEIWVEEGRVLVHGIEDIVDEYLHLIGQKLDTGWSTYLKKGIKGPNVVVSLNRIASLVKEAEVNLVHLFQAKDRWVLLPSDSNDNSSYIVERSQHLAATSCSISDEDLVGIDDYRRDLEKWLEDDEPAHLVIALLGMGGLGKTALAANIYRRAKEKFECHAWVSISQTYSRQGVLRNLIGKLFKDIEDVPTDIATMDITSLEEKLHLFLVEKKYLIVLDDVWSTEAFTDLSNALVHNGTGSRLVITTRDSEVAGLASKNYVVELKTLPSDKAMELFCKKAFRSDTDDKCLAKLNDISVEIVSKCKGLPLAIVSVVCFQRTILLKERNLYGYGGRKVHCGKGYMSVLELSGVPIKTVPNAIDIRCLPRRIVKLKKLRHLFAEKLHDATWRNFRCCTGVRFHKGLGNLTSLRTLHGLEAQEESIRHLGELRQLRSLRVWNVKGAYSGRLCTSLVKLQFLSNLYIVASNENEALQLEEMNPPPPNLQRLFLRGRLADDILQEESPLFHHAARRNLGQERPAVEGNDANTRVMRASGEDGPATRATNPAAQPSGVFMVTTTVGSGSGGAALGNGCSDNDGGRQIWRHHPREGWICRPREWLRQQQRWLVRAVDSAGGEQIWRRP

SEQ ID NO: 135054 - protein, 187 aa, Oryza sativa
  unsure (1)..(187): unsure at all Xaa locations
  Clone ID: PAT_MRT4530_36767C.1.pep
MQFHEADRTGSPVGYVDPTRICKTQHTVELREDCEQLVGKTPQEKEEYVKQLHKRKKLEVATYLAIAILAYADKDVLMVPYALTSILNLLTTXKQLFSSNIAHKYYRKRGGPVHIPSQKQLSIKTGRPCYKQPLGTNLCGYYVCEMLRVNGRXPKIPYIAQRIDDSTIWNVGAELCRFLCRDVCNAM

SEQ ID NO: 135055 - protein, 144 aa, Oryza sativa
  Clone ID: PAT_MRT4530_36768C.1.pep
MPRADAARVPADAATAAPADAATTIDAAVSASLIEGAGVAEEEGEGDGRMGRRRGRGRGRMDGEVVGKCIWLAEAQWLKLQSWLFLAEIQIGGLELCLCDHTFELNMVYNIIEVWCNTIKPLTYLTGAVLILSLTSSVSQYFLQ

SEQ ID NO: 135056 - protein, 77 aa, Oryza sativa
  unsure (1)..(77): unsure at all Xaa locations
  Clone ID: PAT_MRT4530_36769C.1.pep
QPEYKPSPKPYPQPYPQPEYKPTTPAPYPQPQPEYKPSPKPYPQPYPQPEYKPTTPAPYPQPVYQPAPKPRXYPRGQ

SEQ ID NO: 135057 - protein, 58 aa, Oryza sativa
  Clone ID: PAT_MRT4530_3676C.1.pep
MDVVFSLPTAQAWRRLNQHVGPIIICILIRIALIPTVHCDSPSHSNSMETTTLHTSDG

SEQ ID NO: 135058 - protein, 2830 aa, Oryza sativa
  Clone ID: PAT_MRT4530_36770C.1.pep
MPPPIVGNGRAKSGRLPLPPATIPVAVPAPPVAGSLPHPIKWDPHPPFSRFSPIPSLPVPSTSSTPRFRRNAIAANLYIRLAGVVRPPVPPRRAPVDHTSTTSGIAAASGVVLVVLVPVQPLPAVLVASSPVPVVVVVVVVILSSFPVVVAFVPPSSRSRSSSSLRQDRCSPVLVFVLGSASSSLVPAASRLRPRIAAEAVPSPFVSVVPVCLRRARSSLSFPRLVAWWANEGYTSCGPVVEMSYGGGLVPNARGSVLPACPGYPGRRAKEHALRENMTKIFCPCRHCKNQKLLVDPGEILGHIMEYGFTANYKVWTYHGEFANPEDDDEELSFEMNEAENFIIEDMSRERMIVDVSTDSDDFDGGFDLEDMLRHVEPEDRLKRLYSNPTDAELMRWHQESRKIDGMIRHPADARQWKTFDAKHPEFAKDPRNVRFALSTDGMNPFGDLSSSHSTWPVLLTMYNLPTWICQKRKYILLTILIQGPNQPGIDIDVFLEPLMEDMEELWKEGLRLWDEFKREHFNLRAIIFVTINDLPANFSLSGQIKGKTGCLICLEKTSYKYLTSSLKTVYMRHRRFLPQRHRYRKMARLFDNTVENDTAPVARGGTYVYEITKKIKVVYGKGKKKTVKRKKADGDNGTASPFKKHSIFFKYLDYWKDLEIRHAIDVMHLEKNVFDSTVGTLLDIPSPLQTFAVETVCQLEMYFPPSFLDMMEHLIVHIVPQIIELGPLYLHQMWAYERYMSILKGYVHNRAHPEGSMIEGYTTEEAVECCMDYIKDANAIGIPVHRHEGRLSGRGTVGRKQFFDNDYKKVSAAHNSVLQQLAIVEPFIERHLEEIKACFPGRSNDWISREHKRRFPLWLKDLNLPVGDSVEELTLQRLACGPSSIVNSWQGYDINGFTLSTTTKDMKSTSQNSGIRVEAIDTSGEKRSYYGTIQEIWELDYGLNIQIPVLRCEWVKDTIGVSVDDYGLTIVDHSKTGHKDDPWVLAERVAQVFYVKDPSDERKTIVISGKQQIVGIDNIEDPNDYNQFDDVPLFTDLPMRIKKVERTIDEANMSYVRADGVAKDLSPLAVAVAAARTSPPSPSPSPPAGRRRHCTELSPLAVAIPAARSSPPPSRPRYRRLLPEVAPPLAVADATARTSPPSPSPSPPHGPLPPRRCHRRRQVVAAARSSPPSLGASSEETWRTPSDPFPMEITQVAPRDDDPDYIPIEQAMVVRRRSKRKAGRNRTEQEVEMDTATSAPERTETSTSAGGSGKKRRGERSKNKLPKETYNVIALDQDGKPIEPPIVRSKFSNACGTLVRTRCPINVKLWETVDDNIKTLLWNELQKYFVFPPGSEADWDTFVADRTTAEALALRKKMSELAKKNKYPHRLGSSGYAGHVDQWREIEQRFAAAGKPLLVDPMVERSKNWVWARSTGQVSDEGDILFETPDIEEVTTNLQQIVEKERSGQFVPRRERDQLTAALGTAEHSGRVRGLSSKTSWKVGFPQDAPSYKKRDKYKEQLSDKIYAQVKEHFYSLAAENPTAFPRNSEKRKELAHVLSDSQKSVLAAQDEVQSWLSADVPETYEYGKPFLPTYLMNKLPWEMRVMHECMQFHEADRTGAKVGYVDPTRICKTQHTIELRQDCEQLVGKTPEEKEEYVKTLHKRKKLEVATYLAIAMLAHADKDVLMVPYQFTAHKYYRKRGGPVHIPSQKKLSVRTGWPIPEIPYIAQRFNHTTILNVAADLCRFIRRDVCNARGLFYDNQSVTPESASFADTGYDPPPKKWKGICQVGPSFEAISCNRKFIGARWYIDDEILSSISDNEVLSPRDVEGHGTHTASTAGGNIIHNVSFLGLAAGTVRGGAPRARLAIYKACWSGYGCSGATVLKAMDDAVYDGVDVLSLSIGGTKEDVGTLHVVANGISVVYAGGNDGPIAQTVENQSPWLVTVAATTIDRSLPVVITLGNGEKLVAQSFVLLETASQFSEIQKYTDEECNANNIMNSTVKGKIAFCFMGEMLNNKQQTSYPDVTTAVAAKGGRAPDIAAPGVSILAAAQIPYYKGVSYHFDSGTSMACPHVAGIIAVLKSIHPKWSPAALKSAIMTTDYSIPLAGVHQRSGEQVSGTSAFDVLHREKAAIRHCDFTMADFADALRPDKFTGVHFKRWQIRVTLWLTAMKCFWVSTGKPEGVLTAEQQKQFEEATTLFVGCILSVLGDRLVEEYSVEGLIASLDVEEKAREKDAASKGDGGQSSANVVHKAQNKSKGKYKAQQTTNFKKQKKNNNNPNQDERTCFVCGQVGHLARKCPQRKGMKAPAGQTSKSANVTIGNTGDGSGYGNLPTVARGSTVLMGNGSHASVHGVGTVDLKFTSGKIVQLKNVQHVPSIDRNLDTHSGSNQPSEIIPSSIIPPEQTEHTHELVSEEDVSEAPRRSKRQRTAKSFGDDFTVYLVDDTPKSISEAYASPDADYWKEAVRSEMDSIIANGTWEVTEQPYGCKPVGCKWVFKKKLRPDASHGLLVHQMDVKTAFLNGELDEEIYMDQPDGFVVEGFGVNEADKCVYYRHGGGEGVILCLYVDDILIFGTNLEVINESHYVEKILNRFGYIDSKPSPTPYDPSLLLRKNKRIARNQLEYSQIIGSLMYLASATRPDISFAVSKLSRFTSNPGDDHWRALERVMRYLKGTVELGLHYTGYPAVLEGYSDSNWISDVDEIKATSGYVFTLGGGAVSWRSCKQTILTRSTMEAELTALDTATVEAEWLRDLLMDLPVVEKPVPAILMNCDNQTEIKKLRSYNVGLHPNSEKPGRSLHEGTITKYYSMPLAGVHQRSGEQVSGTSAFDVLHREKAAIRHLRKVSTKQQI

SEQ ID NO: 135059 - protein, 79 aa, Oryza sativa
  unsure (1)..(79): unsure at all Xaa locations
  Clone ID: PAT_MRT4530_36771C.1.pep
GGGGPNPPTRPLEGSSRLCSPPPSRKGGLAPLDRPKPKAKLCCPXPPPQGGGLPQPPPCPGGHSPRWGGRPPPPPRKRV

SEQ ID NO: 135060 - protein, 453 aa, Oryza sativa
  Clone ID: PAT_MRT4530_36772C.1.pep
TRISSSLLPHHSHISPSPSSWGSLHISLSLARLLRFGGFFCRVGLDSTRRREAAPMTAADAEACAVAAAADIICSLRGADLAGWTPPWGTAAAKGKEVVVEEEEEELAWPTVARGKRSRSSRRRSPSGSGSAATKGRWARGSPASPLDYSGGSGSGSGSAASTSGGEDGAFCSPPPPPPPVVTAAAATTPTAAPTPSPAKRVCLVRLTPTLRRGAAAAIHKGRWVPVRLPLPSLQPRAAAYRFCPICPFASSLTSGGNPVISPALILDLTSSIAFVAVGSGPCRTAPADPTDPASPARRTATTEEDGPAQRLPEIQQLVRSLTVENDGLREEMVALQRACTALSKENCKLELQGVLLTVHACFVFNQPYMSGIFPPIKNAMLPGHDLNLCTPTRILDMTRLEKSSKRNGTKSEGQQARPQPDEPAAKQESQNGFVLPDLNLPVEDMAADGSAP

SEQ ID NO: 135061 - protein, 316 aa, Oryza sativa
  Clone ID: PAT_MRT4530_36773C.1.pep
MAAVAGGSRAAPPADSAAVAAVAKEAEYQKGVQKLVDLLSKLNPAAKEFVPSSAAVSSPSRKALSADAPVFDYNSIGGWNGGGKESGADAYQQRRLTAYHQRRRRNGYLSQGRRRMNERARHADREDSIRRTVYVSDIDHTVTEERLADIFANCGQVVDCRICGDPHSVLRFAFIEFADEEGARTALNLGGTMLGFYPVRVLPSKTAILPVNPKFLPRTEDEKEMVIRTVYCTNIDKKVTQLDVKNFFEELCGEVSRLRLLGDNVHSTRIAFVEFVHAECAIMALNCSGMILGTLPVRVSPSKTPVKPRLNRVASN

SEQ ID NO: 135062 - protein, 170 aa, Oryza sativa
  unsure (1)..(170): unsure at all Xaa locations
  Clone ID: PAT_MRT4530_36774C.1.pep
MATSVRWTATSFSVTGGYGADGYRNYGRCNGVPRQPATIKPIARARGAVARDVTIRIATDVVANXGRQPALRPARAVQLLNNDGTVQRQCGNTATVLAFGVPXQLLFKDHPRPRRGNDNAVRAAASIVPPAAARQGCASMRHRGSMHIRRPPRRHLYSPVLSSRARTCSL

SEQ ID NO: 135063 - protein, 638 aa, Oryza sativa
  Clone ID: PAT_MRT4530_36775C.1.pep
MKYMKLGSKPDVFQTEGNNIRFVATELATDIVIIVGEVKFYLHKFPLLSKSSRLQTLVASTNEESNDEIDISDIPGGPAAFEICAKFCYGMIVTLNAYNVLAARCAAEYLEMFETIDKGNLIYKIDVFLSSSIFRTWKDSIIVLQTTKSLLPWSENLKVINHCVDSIATKASIDPSEVEWSYTYNRRKLPSENGLDSHWNGVRKQQMVPRDWWVEDLCDLEMCLYKKVIMAIKAKGRISSEVIGEALRAYAHRRLFSSLESAVSNGLDCTRHSAALETIISLLPSEEGSVPCSFLLKLLRASCLLGSDEACRDNLTKRIGAKLDEASVSDLLIPANSDEAAMYNVDMISAMLEEFMAQHREDDDGAKLQEDDDQEAMDGDDDNLNGVSRSSKLAIAKLVDGYLAEIAKDPNLPLSKFIALTEMVPLATRPVHDGLYRAIDMYLKEHPGLTKGEKKRLCGLMDCKKLSPEASMHAVQNERLPLRVVVQVLFFEQVRAASSASAAAAADMPPAARSLLPREQDGNSYGSSRSTATEDDQWAPPPTTTSVDVTSFRSMSLANNKNGGVSGGGGDQAACKKPPPSSASAKGSGGGGLMPKKILSKLWSGKASSGENSSSDTSESPGEETRSTPSRNTRHSVS

SEQ ID NO: 135064 - protein, 109 aa, Oryza sativa
  Clone ID: PAT_MRT4530_36776C.1.pep
MAASSGTAAGEDSEKPLVKEPLPQAEVDFILAWKREPSPCPDDVHWALLSPEQRQLHEEMAAMGKEFEDSFEEFQDEAQLKEGWAAIDWSDVVCADWDDFNDPNCYRSL

SEQ ID NO: 135065 - protein, 515 aa, Oryza sativa
  Clone ID: PAT_MRT4530_36777C.1.pep
MAFSIAGARAGVIPLPPTWDLSAPPPIHSAAWALFERSIGQWNNDYAMTTVFTRTSNDRDILVSLRLAAPPASSCVQFYTDDTGAYSMVWRHQPSLVTADGDLLVHTIHHDVDTLKLPLFEWEVDGTLQLEEEFWSLPSYQGSPLPRITPTFPVFSMHEADVLHFILDRPGYDDKCWHQCTPRVRDAGADEDARAQASSVPATRPSAMGTFLGHFVPGLAFAILGLWHALNTVRAYKLKGASGFRAAAWFPFPSPVPGLKHLELYLLLSFSVLAIVDQLVDFPLLSFTIQPDALEHATMYLHLAVYASVALAADGVAASSSHHGGAQAQLGEVVAALAASVFGQELFLLRFHSADHAGLEGHYHWLLQLVVTASLVSTSATVVLPRSFAVAVVRSASVLFQGLWFIVMGFALWVPALVPRGCHGAEAGGGAMRSAVACPTDEAARRAVVMANLQFSWVLAGVWAVTAYLCLRVGGSRSMEYRQIQAPSGGDVGALAGDGDATQSQKRVFPVSDNV

SEQ ID NO: 135066 - protein, 43 aa, Oryza sativa
  Clone ID: PAT_MRT4530_36778C.1.pep
FLNQFVYILKLPGSIRHVIVVLLSEVSSFSILTSLESCSLMVA

SEQ ID NO: 135067 - protein, 77 aa, Oryza sativa
  unsure (1)..(77): unsure at all Xaa locations
  Clone ID: PAT_MRT4530_36779C.1.pep
PHLWRPEXSRHAAFNAVCNALNRSVTGRMTDGTGVVRLCAACVSGDVRPDMSHLPAGPRDDILLDSPPGPQPQLEES

SEQ ID NO: 135068 - protein, 60 aa, Oryza sativa
  Clone ID: PAT_MRT4530_3677C.1.pep
LLIGKVPNFKIEDSPRQTRVWSKFKVYFFPPSKKNSPTFNLGILLDFCANSLLIGQYKPF

SEQ ID NO: 135069 - protein, 292 aa, Oryza sativa
  Clone ID: PAT_MRT4530_36780C.1.pep
MISSRKLAQLAKKWQMMVASSGRQTANIDGCCSTATVYVADKGHCVLYTTDGARFEVPLMYLNTVVFCELLRMSQEEFGFTSDYKITLPYDAAVMELRNGTDPEIWTQATCGPHEACVLDTKTGQYSHTMWCPYIHELFLWQERKRATMISAKRLAQMVKKWQRMAAFGRKRLTWTAPKATDKCCSSVAVKGHCIMYTADGRRFEVPLAFLATTIFAELLRISQEEFGFTSDGGITLPCDAEVMEYVMCLLKRNASEEVVRAFLSTIVKPCHYGSGFAQSLGFVQQVAASSF

SEQ ID NO: 135070 - protein, 339 aa, Oryza sativa
  Clone ID: PAT_MRT4530_36781C.1.pep
KKCIRGCCQGIPEHHCEILPLWASLFTELLRMSQEEFGFTTDGGITLPCDAEVMEYVLCLLRRNASEEVVRAFLSTIVKSCHYGNGFAQSLGRVAQLAKKWQRMAALGRKRLTVRAKQDQECCSSMAGKGHCAMYTADGSRFEVPLAYLGTAVFSELLRMSQEEFGFSIDGRIMLPCDAAVMEYAMCLLRRNASVEVEKALLSSMVASCHYTGSMVPTVGPEFWQGIVTTELRNALSTSSDAFLLSKHITYSIAAASQGSVILPSPPANPNSSCDILRSSTNTVVPRYGNGTSNRAPSDVYTAQWPLSATGDGEVDVQPASSSSLLLAAVLILCSFLAS

SEQ ID NO: 135071 - protein, 401 aa, Oryza sativa
  unsure (1)..(401): unsure at all Xaa locations
  Clone ID: PAT_MRT4530_36782C.1.pep
HLGSLGPVAGSLSTGRKWRRAVTSLPVVTLQAKITVLLSFGPLALMLQCLSAYPQGWVFLFSLLGITPLAERLGDATMRLTLFPGPRIGGLLDGTIVNATKMIISLYPWKHXKNGFIRXSIIGSILLNIQLVLGFAFVLXFSGGLDHPSRDQVFNKASXSVNSGLLLMAVLGLMFPAVLHFTHSEVQSEVSLSRFSSCIMLVAYASYLFFQLKSQRSLYSPIGEEEEVTEDEEEEKEITQGEAICWLFVLTIWISILSGYLVDAIQGASESLNMPVAFISVILLPIVGNAAEHASAIMFAMKDKLIPFCVVIGWIMGQQMDLNFQLFETATLFITVLVVAFMLQEGTSNYFKGLMLILCYLIVAASFFVHVDPDSTLQFKGHWITGLHSPYTFPNGASCAT

SEQ ID NO: 135072 - protein, 104 aa, Oryza sativa
  Clone ID: PAT_MRT4530_36783C.1.pep
LAVIDVVANRGRRPVVSEVVVACHRHRHAPADSAGAACSRGRRHLAQRREHEQVGDRLINGLGVDHPRRSRRRRRRRLRRRGQLHEAGEEEGGEQQQVHLQGGH

SEQ ID NO: 135073 - protein, 81 aa, Oryza sativa
  Clone ID: PAT_MRT4530_36784C.1.pep
PLSPTSLPKWTRMRISVNPIPQNRPKSFRRVLGSFRNPFFVDDEVVPISFNMAHRVYPATFNPVNSSDVDPVLIPKTCPLL

SEQ ID NO: 135074 - protein, 48 aa, Oryza sativa
  unsure (1)..(48): unsure at all Xaa locations
  Clone ID: PAT_MRT4530_36785C.1.pep
TDFHLKFMDVFGLXPIIYLLCVLIRSIVHEDPFVDTSHLYYYSSYXXS

SEQ ID NO: 135075 - protein, 90 aa, Oryza sativa
  Clone ID: PAT_MRT4530_36786C.1.pep
MGILSYYFYISVPIREKDESNWFREPDNVQQTMICGTMIVADAFSWIMEATNDSKCGCLHHRCRAHGGAVLVKFRGGDYLWGGEVSLTGA

SEQ ID NO: 135076 - protein, 108 aa, Oryza sativa
  Clone ID: PAT_MRT4530_36787C.1.pep
TWCGPKGAFWGRPPTRGGTCPAPSTRSGSRSRVLLKCEKLQILGKIWLRLAVESLVGGEELVLNFRGNGLRLNLDKGGQTYPPSFNVRSTPGGGDPGYFSLDPLLGSL

SEQ ID NO: 135077 - protein, 97 aa, Oryza sativa
  Clone ID: PAT_MRT4530_36788C.1.pep
NVSRTKVQFSLKLKEEIAVECYVIRWIAHPIGLIDRLQPPAHWPTLLLSTLSLLSSFFSSLVNDSLRASSLPGPDHLRRLSRRIRRLLTHRPDGPPH

SEQ ID NO: 135078 - protein, 53 aa, Oryza sativa
  Clone ID: PAT_MRT4530_36789C.1.pep
TRYSNPLSLFHNVSHSSISHIRIDVNESRHIHLSRFININMNVKNARITYIAK

SEQ ID NO: 135079 - protein, 121 aa, Oryza sativa
  Clone ID: PAT_MRT4530_3678C.1.pep
MSSVGETQESPRQLLILVQTALVYSQAWNIWAHDSASFPQRLPRKQIRLSRVQGNGGNKVPDLEEHRIGARFRIDPPSGSQSSVQKKELFPSPSTILHPAARQCSAFLSCGNVKDTQWRSG

SEQ ID NO: 135080 - protein, 53 aa, Oryza sativa
  Clone ID: PAT_MRT4530_36790C.1.pep
GKIFQGELVFSQKGINPLIINPPELEKRNPREAAKIIKQRFPEGGDIIKKGEM

SEQ ID NO: 135081 - protein, 196 aa, Oryza sativa
  Clone ID: PAT_MRT4530_36791C.1.pep
MRTAATPPLAAAAAAVAAVFLSALLLASASASASRLPPPRRLLPLVGGEVAVAVVAGEEEKVRLGSSPPSCYSKCYGCSPCVAVQVPTLSAPSVPAAAAAAARRRAARGDVHQLQAARVEVPVPRPPVRPLTLRRARPVARRGVAWRVHGGARARALAVNYGVCGRVACPAAHGAALLLMLVVVESLSSRRAERDC

SEQ ID NO: 135082 - protein, 56 aa, Oryza sativa
  Clone ID: PAT_MRT4530_36792C.1.pep
MGAKSNKSLYFDKLKGLLEKYTSIFIVEIDNVSSQQMHEIRHALRNKGVVLMCKNT

SEQ ID NO: 135083 - protein, 44 aa, Oryza sativa
  Clone ID: PAT_MRT4530_36793C.1.pep
FCPRAMALRRMVRGYSLSMCTMLVVYTPFNSLGLKIGCFESYCC

SEQ ID NO: 135084 - protein, 140 aa, Oryza sativa
  Clone ID: PAT_MRT4530_36794C.1.pep
MQIFVKTLTGKTITLEVESSDTIDNVKAKIQDKEGIPPDQQRLIFAGKQLEDGRTLADYNIQKESTLHLVLRLRGGSRGGYPKGIEPNLRELAQKYNENKLVCRRCYARLPLRSTNCRKKKCGHSNEIRAKKRFMSKLSK

SEQ ID NO: 135085 - protein, 698 aa, Oryza sativa
  Clone ID: PAT_MRT4530_36795C.1.pep
MDHAKNQKKKREQEAQSFKRRAAPKKAKDTGKCGSRSQDAAEKPLLPAPPRRSPRLAGNPPALVDGVCKESMVRGKQSAIVPFRRSLRLRHNQNSQNAFSMDQNHESSSRRSQKNTVVKLSMRMVPGKSAEECLSRVHADLSTPTPIAPRPRTSKMKFSPLGHFTLSDPKHPNVLEPSFRRRTAKQKSLAAQKTVRHLLKKQCLTDQTQEADHFSIFETSPTVLPVEFSFEDSPGTPNSSGKKLLARLETVKNVGINPAEPSPAVLKPIKNVILHEKYVDRLSRREGTTRPRKKAAGSKALDSVKTQQAGGVKAARNALITEATDFISHFKKMQANPLAHVVEDDEDDEIDVASDIISRLISSLITKYSNQSTADHKLERLQWLLLRARTIVEEAHGRQISNQGMLLQLRQLMQSMYQGYYILNAFQEQHITGKRRRSSSSLKLKKLQAAMEDLESAIDDSKKEFVVFLLGCPCLPQRPYDTHLFREKCMFGRHEEKELIREFLLQPCDSPLRVLPIIRPREVGKNTLIEHVCNEESVHEHFSRVVRFKSDDLNNEENQESFFKTSELVASSTMSLVVVELVNDDISDETWRGFCSSIANGCSKMIVISRSETISRLGTTQALKLKRLKRHEFWYFFRTIAFGTADPEEHPELLRIARRIATTDQRVDTISRLGTTQALKLKRLRQHEFWIHFIFFRN

SEQ ID NO: 135086 - protein, 80 aa, Oryza sativa
  unsure (1)..(80): unsure at all Xaa locations
  Clone ID: PAT_MRT4530_36796C.1.pep
SIPPSTNPPSLPSRQWRRATRAGGHARRAARGWPGWWASRRRRRXQRVTLLXIXGGGIRGLIPGTILXFLEARLQELDGP

SEQ ID NO: 135087 - protein, 1226 aa, Oryza sativa
  Clone ID: PAT_MRT4530_36797C.1.pep
MEATAVSVGKSVLGGALSYAQTAIAEEGALKLGVQRDQSFIRDELEMMQSFLLAADKEHDGHHHEVIRTWVKQVRDVAYDVEDCLQDYAARLKKPPWWSLPCTVHRERRRIGNEMKELRAKVEDVSQRNMRYHGVSAAAPQSSSVTAAELLQSTAAIDDIDEARRAAKQQEKVDLVKLITNDGQGGLRVIAVLETRSGPAGTVPVVRAAYQKLKGEFECHAWVRLMHSFDANQFIGSLVRQFKANSREGTGKTPQGTPSGVSVLNEMEAQDYNLLHDFTGYVTNKKYLVVLNGLSTIEEWDWIKTYLPNNHNGSRVLVCTQQAEVASCCTCTDDKYKVSEIQHEGSFSKPLYVFYKEVVSQPVNSDSTKMKSETRSSMEGASTTSDSKTVPSDGVIQEDGPKDLPESSLPPHLNRDSNTVSVKELSRSTTQLIGRGKEKDDVIKLLSDCNPIRQVISVWGMGGIGKTTLVKSIYQSSELEKLGFERRAWVTVLRPFQLTELLRSLAQRLVKDSPGKKVESIPGLARSGLSTMGSEELIDKLKQDLTGKKYLIVLDDLSTTTEWDSIIRNLPINNNGSRIILTTRFKLVAQHCSKKEMNMHNIEGLTDGDALELFLTKVRMDGDESELKPDLKEEAKIIIKKCGRLPLAVATVGGFLSARPRNIIEWREFSDRISEEFDNNPSLEMIKKILASSYEGLTYHLKSCFLYMSIFPEDSDIRYRRLLRRWTAEGYSRATRNRSNEKVAEEQFTALLNKSMIQQSKTIASGKTGFCQVYNLMHEIIISKSEEENLVLVLDDHITSRSKDKVRHLVVSKSWSREKNDMQNIVDVSHIRSLTVFGEWKSFFLSKKMRMLRVLDLEDAEGLQDPDLVPIGKLHHLKYLSLRGSFGVFNLPNSFGNLLNLETLDIRGTWVTKLPATIGRLQNLKYVHAGSLDDEDDQPIIKLLHQFRSIREEMGTRFAVSYIMLFITAWLRNLDVCGVKVPRGIGRLRSIHTLSIVNIARGKALLKNLKKLTQLCKLGVTGINKNNCKELCSAIADHGRLQSLLLRAEGNAGLEGCLDNMSQPPKDLKSLQLYGNLVTLPEWIKDLKILQKLSLRNTNLKADTTMEVLGNLPMLAILRLQDNACEEEELCFGPERFTGLTSLELLNWESLKSVKFERGATPKLKVLLLHYCWQIHNGGFSGIETLSTLKEVSILGYNYDQTYTEFKEQLQKQLDMNKNKPNLSIL

SEQ ID NO: 135088 - protein, 114 aa, Oryza sativa
  unsure (1)..(114): unsure at all Xaa locations
  Clone ID: PAT_MRT4530_36798C.1.pep
PFSRLSAAGXPPPPPPRTAAAEPSSPPPPPPRPPRRPARTRRRSAAPCTAPAAHPTATGEKSSHPSPYWRTHCVAISTSLLPSTINSSKPKMGGLESSNHTPMIGGEGGGSGLF

SEQ ID NO: 135089 - protein, 703 aa, Oryza sativa
  unsure (1)..(703): unsure at all Xaa locations
  Clone ID: PAT_MRT4530_36799C.1.pep
HLGENRPRTIAINYSFLQEQSHDLTDLEDPFIEDEIKXAIFHARSDNAPGPDGFTGAFFKKCWEIIQEDVVLAINQVANHDTRSLWLLNSAYIALLPKRSEALRVGDYRLISLIHAFGKLFSKLLANRLAPKLQQMISKNQSAFKKGRNIXDNFLFVNSLVRELHSSKTSAILLKLDIAKALDTVSWPYLLDRLRHLGFGDRWIGWIISILSTSSSKIILNGKAGDSFLHGRGLRQGDPLSPMLFILAIDPLQRLLAKAQEEGLLQPLQRRTSRFNVALYADDAVVFTRPDKQELQTVQAILHNFGLSTGMVTNLSKSEIYAIRCEDLDLQDIISPFPAQLKAFQCTYLGLPLHIRKHKKSDVQPLIDRFSARLPTWKGKLLNKTGRTVLIKSTLSALPTYHLTVFPLKKWAKKKIDKIRRGFLWTGSEQAQGGHCLVNWKRACRPKNMGGLGITNLELFDRYLRLRWLWQECTAVDKPXQGSTLPCDETDRQVFRASTVITLGNGNRTKFWHDRWLEGSSPKELYPSLYQIATRKNKTVAQELQDNRWLRQMRRMNTTVQVREFIPLWHQIQQVVLQEQMDDTIMWRWTSNGTYSAKTVYRIQFVGGIQDNRSDFFWKAKAENKCKFFGWLMIHKKILTADKLHIRAWDNSHICPLCGVELETATHLLMDCSFAKQVWRLIWQKAGLHMPLASLFNGDMLAW

SEQ ID NO: 135090 - protein, 278 aa, Oryza sativa
  unsure (1)..(278): unsure at all Xaa locations
  Clone ID: PAT_MRT4530_3679C.1.pep
FLWKGDEDALGGCNLVAWDKLCLPIENGGLGIINLGRMGIALRTRWLWLRRVXPERHWVSFTLPQDRKAEHCLAAGCRIVLGDGKSSFFWTDDWLPDGGSILNRAPILCSFVKNRGRTVHSALQDDAWTGDIRGGLSLXAMFEYLQIWDLVATVSLNPTQPDLFSWKPATDGGFSVKSAYSLLCTGKTRSAVGKLIWKSRAPTRCKFFMFLAIRGACLTADNLQRRGWHLAPYCHLCGKDAESCAHMFHACEYTRAVWTRIRSCLGLSCVSPTDDMLD

SEQ ID NO: 135091 - protein, 505 aa, Oryza sativa
  Clone ID: PAT_MRT4530_367C.1.pep
MASAVASTMPSPPPPAVSFGWLAPTRVSPPPALPAVAVAAEQAVSKEFIDFEFSLGGSATMLPADELFADGKLLPLRPHPVAAEKAVAMEAEKAVPELVKAVRPAVAVAAEVFDPYVFSPKAPTCSSRWRELLRLKKVQTPTKPSASTSASPSTATAATPSRSSNSSAARSLKLLLLQRNGGRASGAAASDLSVAPLLRDSSDSEASLSLASSRFSLSSSSSSSCHEHDDFRRHSLDSVDPTPRPRLRVVRSQPQPHPPAAAAAAAAAVAKPRAAIQSPARRRPSPPPPPPPQVASVDSPRMNSSGKIVFQGLERSSSSPAGSVHSSLRSRSRVMDRSYSAGVRAATPVVLNVPVCSRPVFGFFKDRKDAAAKDSSASRPRSALGRKTAPHAGNGGGASRDLGRPVVGRRSDGRPAMREKGRRGGGGPGAGRNRGATCDRGDDARAFPDWPGTTAALIETSGGGSATRRLRVRSPWAADGEKRLLLSLLERAAAGGIMVGTWGRG

SEQ ID NO: 135092 - protein, 264 aa, Oryza sativa
  Clone ID: PAT_MRT4530_36800C.1.pep
MKEQKKTEIIPSHAITVRRGTDGIKVKAALARDFCNARSAAQLRKAKLGDRRDEEDMHGKAEWQKAAAANRAGGAGGGACGAGDADGEGDGAGAAEPGKTGPPLPPGWKGGSGSGQGSSPDGAWRYGWGWAASPGGKGSGFGFGYGGSRGEGGGGGGGGGGGSGRAYGFGGGYGGHPGGFGGGGGGGGGGGGRNYGGGSGGIGGYGNYGGGYNGEPGGGGGGAGEGGGYGGDYGGGDVGANWSKRGSFRGGGGKTQQKDGGGNN

SEQ ID NO: 135093 - protein, 112 aa, Oryza sativa
  Clone ID: PAT_MRT4530_36801C.1.pep
MFFFFVGGVEQGAGRVLKEAARRCLRCGGAADLVETEKVLKLFFVPVKRWPGKDPAYLCRECGLLGPGSLGGGGGEAGTGPPLLPRDARCGACNRAVADPQFRFCPFCGSAL

SEQ ID NO: 135094 - protein, 408 aa, Oryza sativa
  Clone ID: PAT_MRT4530_36802C.1.pep
MAGRLPGAASAAAAPLPRALLLLAALALFSLTFLSLRSLRPAAAPPSLAIGGSRPSSFARPSVYHSAEAFAAGYAEMERSFKVYMYPDGDPKTFYQTPRKLTGKYASEGYFFQNIRESRFRTGDPDKAHLFFVPISPHKMRGKGTSYENMTIIVKDYVEGLINKYPYWNRTLGADHFFVTCHDVGVRAFEGLPFMVKNSIRVVCSPSYNVDFIPHKDIALPQVLQPFALPEGGNDVENRTILGFWAGHRNSKIRVILAQVWENDTELAISNNRISRAIGELVYQKQFYHTKFCICPGGSQVNSARISDSIHYGCVPVILSDYYDLPFNDILDWRKFAVVLKERDVYQLKSILKSISQEEFVELHKSLVQNISCPQVQKHFVWHSPPLPYDAFHMVMYELWLRHHVIKY

SEQ ID NO: 135095 - protein, 216 aa, Oryza sativa
  Clone ID: PAT_MRT4530_36803C.1.pep
MTMTMSNEQGKPEANVRGGRRSGHRVHARHLPGLPTLAAAPARTNGSSWAPGKTEHCTAQHKRRLQAVRDKPQQASVMASEGAVSPAFAYTVVYVKDVAKSAAFYSAAFGYTVRRLDQSHKWAELESGTTTIAFTPLHQRETDALTGAVQLPDSAGERGPVEICFDYADVDAAYRRAVDSGAVPVSPPEQKSWGQKVGYVRDIDGIIVRMGSHVRA

SEQ ID NO: 135096 - protein, 86 aa, Oryza sativa
  Clone ID: PAT_MRT4530_36804C.1.pep
PGKMYFFYKHYKLRSPWALRVSISTFSGTKRSISSSISVFALSDLRSIPLDLFSPPHKDLSPVICITLPDQPAPPQELLEKRRIGG

SEQ ID NO: 135097 - protein, 106 aa, Oryza sativa
  Clone ID: PAT_MRT4530_36805C.1.pep
ESGSELKQLNFGWLIRHLVNPLGHILNIIRTTCVKHPSISRSNVGSETLRRSSGPTEKFRRLCDIFCCLKNVFTASHALDASQAHKYMYTICLDSQRVYIQVSEPN

SEQ ID NO: 135098 - protein, 639 aa, Oryza sativa
  Clone ID: PAT_MRT4530_36806C.1.pep
MRPRGRGDDVDEEEEEEEEAVDYSPHRSELEPEPEPESETDADADAALQPPPPPPARAPLSSLVVKPSPREGDGASSSYPDAAAAAARSSPTPAAGAPGRHRGSSLPRRRRDLSPPERERRRSPPPPLLARRRPPGSPPPQRRRLSPPPTRRLTPPDFQPRHPRPYHELQGLSPQRQHRPENRNFDDTFGPRYAHGYQGGGRGVARFRDGSPPYGRGGRSYGRGSGAPGKEFINIDGEYVHRNDPNLSPREGDWICQNPNCGNLNFARRTHCNNCNKYRYSREVCEPGHSPHRDYVNPPRGPARNLGPSDRAPPREMARYGSPPRGWGSDPKGYPARSPPDHAGRYADPVQRERMGFRGDCQLRDRVKHDWSSAEDYNPRERPHDMYLERSRRRSVSPRDNWGHNMRDRSRSPAGGRLKGSFTGGGRPDLYADPYAGRGRPNNLDDVRGRGRGRGRGRGYIPGGPLVLRPGSSDVAADSAWAPHARSAWAMGGGPRPYVLRFPGEGPQMAATSSLTATAASPPLLLKPAPSPLAASFLRPVSRFSRFQSVKTKATENDQTEKSPPKGSSLVCQDCEGNGAIVCNQCKGDGVNSVDHFNGRFKAGALCWLCRGKREILCGSCNGAGFLGGFMSTSDSTAE

SEQ ID NO: 135099 - protein, 50 aa, Oryza sativa
  Clone ID: PAT_MRT4530_36807C.1.pep
LRRLCILAPALRTAAGGDLELVAAAGIILTAADYICINDFRSDSSYHSIM

SEQ ID NO: 135100 - protein, 85 aa, Oryza sativa
  unsure (1)..(85): unsure at all Xaa locations
  Clone ID: PAT_MRT4530_36808C.1.pep
MSMDDVVGSPPSPYMGRDEKKKRWKWKLGPATILGFXLLESIAFSCVALNLVVYLDTGLHWTLDFNAAHVDTWNGTTFIVPVIGA

SEQ ID NO: 135101 - protein, 571 aa, Oryza sativa
  Clone ID: PAT_MRT4530_36809C.1.pep
MATASSPASVQDYPDLQEDDDDDFQDDDDLDDEDEEDDDDQEPSPSPSDEARLQSVLRRLTAEEVRIRVHDVEIRGCCRTRRAAVEAAVGSDLPRAATVRDLVRAAAAAADRIRRLGAFDTVSITLDAAPPGIPGNAAVIVLVDVAEARGRAAGELGIFANKGTRSCSVQGSVKLKNLFGYCETWDASGDLGLDQTVELSTGVAIPRIGAIPTPLVARISFLSEDWLKSSLKEHMMGVSVGLLSTMNHNLAYNLSWRTITDRALMSSNSIRGQLGHSLLSSIKYAYKVDQRDSRIRPTRGYAYLFSSQVGGLAPESKDARYIRQEIDLRVALPLGVLNGAVNAGVAAGIIHPLARGSTGSISPLSEQFYLGGNRSLMCRLGGPSSLLGFKKRGLGTDLRSSTPENSENVASTSPELSARGGDIAVTAFADLSFDIPLKPLRELGIHGHAFVSAGNLAKLTEPDLRKFPLAEFLQTFRSSAGFGVVVPTRLFRIEVLKKSSNVFLQVQVRQPATMFDKPPNSVIQLFKRKSHQLEELALYQIGIIMRKGQIICIAKEIPAEQWGQEERKAKG

SEQ ID NO: 135102 - protein, 105 aa, Oryza sativa
  Clone ID: PAT_MRT4530_3680C.1.pep
RTRIWASSPPRRSCARGTRTTTPRPPQARPRRRRRRRRSLRPRPPRRVARPRAPPRTRAAASARASRSPPPPPPPPRHPPPQRASRPAPAPPPQAPPPPPPPTSP

SEQ ID NO: 135103 - protein, 180 aa, Oryza sativa
  unsure (1)..(180): unsure at all Xaa locations
  Clone ID: PAT_MRT4530_36810C.1.pep
TGRIPVIHHLIDVDFRRARTGTRSPVCPKRSSQLRMVERRCASYHRDETGHTCRTPPNTRLTRTWLPAVLSVIRPATHRSQFGQARSTPHSMWRGALALPALKAVRWAXRGVHLTSLAXRPRGDRPDGSGQPRXRAREGWLPPIHGPDPXGGKRHVDIGESPVRKKINSSNILCLLQNYL

SEQ ID NO: 135104 - protein, 144 aa, Oryza sativa
  unsure (1)..(144): unsure at all Xaa locations
  Clone ID: PAT_MRT4530_36811C.1.pep
PDSMRXXLHPCAARIQEHXRISRRXEEHPAGASGSADCRRRGPGWRARRTATRFERATTRNEXTAKNAPAGTPSGPPAAAARXTAKEATTXEQXHSRFSPNSXSPSPSLGFPTTCRXRITXMMRATSMAMRDGPSIPADLALAP

SEQ ID NO: 135105 - protein, 167 aa, Oryza sativa
  Clone ID: PAT_MRT4530_36812C.1.pep
MEEWSPPSSPSLVVRSPRQTVSLLRNRHPWRESRSPPTSTSTSLAGGPKLSEVYGFVGSITTVIATTVYLVWAYMPERCLRSLGITYYPSRYWALAVPSFVIVATALCMVVYVGFNFLATPPPTSFNTIFDEYSRERTMFDPANANATGERGEVEKAIEPISDISID

SEQ ID NO: 135106 - protein, 473 aa, Oryza sativa
  Clone ID: PAT_MRT4530_36813C.1.pep
MTEKMLQWNDGLSGEADASGSTALHFAASAEGPEIELEKSSLLRRLALRWPCSRNGRRRRRTSTQVLLKADPSLACRPDSNGEYPIHVAASMGNLKLVALLLHRCPECAGLRDARGRTFLHVAVDRGREEIVGFATDDRRRRDGSQLATPILNAQDDDGNTALHLAVASGVLNVFCYLLRNRRVCLDLANNDGLTPADLSRCTIPAGLNYKTNARTWILWSLVVAKALSGNIRRDHFQQQYVPKLDEIAESKKMTESTQILGVGSVLVATVAFAAAFSPPGGYAAGDGNNNNGRGNVVVVAGSPALSGRYAFDAFMYAVTVAFTCSMLATFSLIYAGTAAVDWKIRHRYFKHSLSWMRKSTRSLLVAFALGVYLVLAPVSRATAVGVCVFTTGTLLFRNREVVRMLICAYVLQRRMGITVLAKIGVPITVDLVKSNLVYLVIFGGPLCTPLCVLFFVWRLAPVIMRYVHRKLI

SEQ ID NO: 135107 - protein, 219 aa, Oryza sativa
  Clone ID: PAT_MRT4530_36814C.1.pep
SARTWILWSLVESNALGSNFRRNDHFEEEYVPKKDESAESKKMTESTQMLGVGAVLVAAVTFAVAFSPPGGYGGDGGGAPALAGQYPFDAFMYAVAIAFAYSMLATFSLMYSSTAAVDWKLRRAYFERSLAWMRQSTRSLLVAFALGVYLVLAPVSRATAVGVCVFTTGTLLFRNREVVRMLICAYVLQRRMGITVLAKIGVPITVDLVKSNLVYLVIF

SEQ ID NO: 135108 - protein, 63 aa, Oryza sativa
  Clone ID: PAT_MRT4530_36815C.1.pep
YLSVRYSTFHGLALERPYHELPLPTGKRCQLRVMWVKHAISVEINELFEQPCPWSRASVRCFS

SEQ ID NO: 135109 - protein, 196 aa, Oryza sativa
  Clone ID: PAT_MRT4530_36816C.1.pep
MTQQPPQLPPPSPTAVGAPALAGQYPFDAFMYAVAIAFAYSMLATFSLMYSSTAAVDWKLRRAYFERSLAWMRQSTRSLLVAFALGVYLVLAPVSRTTAIGIMVSASGTLFLRNREVLRMLMCAYVLHKRMGIMVLARIGVPMAVVLLQSSLIFVVIFGAPLCPPLCLLVFVGKLVHEDVSFLRYVNGKVGSLPFQ

SEQ ID NO: 135110 - protein, 424 aa, Oryza sativa
  Clone ID: PAT_MRT4530_36817C.1.pep
MPAIADCAADPPLADSYYTLLRLGGDDDDDACTKVTTTPQPVSECELPMIDVGCLTAPTGAAAAAAVGQQHQAEERAACAAAIAAAAAEWGFFQVVNHGVAQELLEAMRREQARLFRLPFEAKSSAGLLNDSYRWGTPTATSLRQLSWSEAFHLPLAGISGKSCNYGDLTSLRDVTREVADAMSRLARALARVLAESLLGHAAGERFPEGCDDATCFLRLNRYPPCPFPPDDAFGLVPHTDSDFLTVLCQDHVGGLQLMKGSRWVAVKPIPGALIVNIGDLFQAWSNNRYKSVEHRVMTNATTERYSVAYFLCPSYDSPIGTCREPSPYKAFTFGEYRRRVQEDVKKTGKKTGLSNFLLSLTVYKYWPPSRGGGGGPTVGGAVADDDDNGGQRAQLLPRRPLARARGTHQGAAQRRAAKGDDRR

SEQ ID NO: 135111 - protein, 271 aa, Oryza sativa
  Clone ID: PAT_MRT4530_36818C.1.pep
MASSSLLVRLASDEMPQTLDASSSSSCYDAFVPVFHPDPSSGFSAASVVAAADRLRSQFLSVEPDLFHDALVAPSPDHLGFPDEEEEEEIRWDCLQLDDDDEEEEGVADLRLEASNAAEEFDWEEVASPSGGAGMDQPEPEWEVLADVPPPPPPPADEGFVYTSDRDVYEVLVGEGLFLKSKPPAARSAVEALPSAVVAAGEDGEGEECAVCRDGVAAGERVKRLPCSHGYHEECIMPWLDVRNSCPLCRFELPTDDPQYESWKASRAAAA

SEQ ID NO: 135112 - protein, 41 aa, Oryza sativa
  Clone ID: PAT_MRT4530_36819C.1.pep
CKGFHWAIVSFLPHWSWISNQYVCNRDLSFKVCVFQQDADM

SEQ ID NO: 135113 - protein, 64 aa, Oryza sativa
  Clone ID: PAT_MRT4530_3681C.1.pep
DTSELVIVKNPVHPINREKPVNLCRLINLCLPDPCGKYLYGRKGSWKSPTKRFSGFSLSKVVSP

SEQ ID NO: 135114 - protein, 43 aa, Oryza sativa
  Clone ID: PAT_MRT4530_36820C.1.pep
RWGVHKVTAVIAMEFESFFQSSVRFPPSELLIFLPSVPSISSK

SEQ ID NO: 135115 - protein, 43 aa, Oryza sativa
  Clone ID: PAT_MRT4530_36821C.1.pep
SEDIIVELVVRQGARSLVPCLTACIARTFIGSGMGRAINRTIN

SEQ ID NO: 135116 - protein, 86 aa, Oryza sativa
  Clone ID: PAT_MRT4530_36822C.1.pep
CPWCWLVLFITIRDCPNVQVSCPLVTFLVVVTIQAFSFCSIWSLYVQCLFFVLFIGHYWCLIFSIAVKSSSFIKPPLYYSFPFPDS

SEQ ID NO: 135117 - protein, 896 aa, Oryza sativa
  unsure (1)..(896): unsure at all Xaa locations
  Clone ID: PAT_MRT4530_36823C.1.pep
LQLIAAPWFATTQDSWSDRHIGSVRLQLQMAKENVFRFDVAQENRSLSPXETWLQRDLKLKCLGLACLARARXRSRLIWLKEGDRNTMFFHLHARARRRKNFITRLQDGDQLAVSHDELQELASSHFGAILGTSVERDFALDLHSLGLCPAHLGGLDNPFSEEEVWAVVKALPSDKAPGPDGFTGRFYKTCWSVIKPEVMAALNSLFLANGRGFSSLNDTLISLLPKKDEAVDVKDFRPISPIHSFGKLFSKIPASRLSPHLGELVAPNQSASSKADPFHDNFRYVQLAARALHAKHIPRLLLKVDIAKAFDTVSWQFLLEMLAHLGFSQRWRDWIFLILGASSSRVLINGVPGPXFPGLRQGDPLSPMLFILVMDVLNTMLRKASESGGFLPLNDHASLYADDLVLFLSPVRQDLEFIQGILSIFGAASGLRTNFAKCSVTLIRCSAEDLDLVQSCFPRSISDFPXSYLGIPLSIRKLPKAALQPLVDKVSHRLPPWKGQLTTLVSRSVLVQSVLSSIPVHVSMVIGLPAWMIKAINKKRRAFLWTGTDSAHGGXCRVSWTNVCRPKAFGGLGIPDLKLAGFALXVRWLWLQHSGNPYWDGLKAPAERAVTDMFQASTFFVPGDGESILFWSDQWIGGRSVASLAPDLLFVVPPRLRGSRTVSSGLANNAWISDIRGALTVPGISQFLLVXDAVLHFQLSPGVEDRLVWRWTSDQRYSAHSAYQAFFLGQHSFACVDLLLNAKGPAKCKFFLWFAFQQRCWMADLLQKRSIDSHSTCPFCAQELETANHILLDYVFARQVWLRVLSPPGWNALSPXRGSWLQDWWPSSKAGLPDHLRASFDSLVLLVLWQLWKEHNSGVFDSALSSVSVVLESILSEGRLWSLAGVASFRDLLGV

SEQ ID NO: 135118 - protein, 29 aa, Oryza sativa
  unsure (1)..(29): unsure at all Xaa locations
  Clone ID: PAT_MRT4530_36824C.1.pep
MEQLDPPPPRLQVLNQGVQLQDHKPXVLA

SEQ ID NO: 135119 - protein, 194 aa, Oryza sativa
  unsure (1)..(194): unsure at all Xaa locations
  Clone ID: PAT_MRT4530_36825C.1.pep
PRVRKVAPNLVDLDYAMDVVENNYTDDEQIKHNLWIMYKQMISSAPLASLFHGQPFRAGEASKPGAGTVELQPHNLMHVWVGDLLSYPNAEDMGAYYAAGRDPIFYTHHANIDRLWDVWRSNGKGEDFTDPDWLDSSFLFYDEEARLVRITVXRDVLDMDKLRYTYRGVGLPWLDAPPPTTPNVKSRVKNMVQK

SEQ ID NO: 135120 - protein, 243 aa, Oryza sativa
  Clone ID: PAT_MRT4530_36826C.1.pep
MPPPFVPPSSQPALKHGHAAPSPPTTRASSARPPCTRPLCRAGLPASPAEPPVPPSFSPPLPATTYATPFLGAASLPCHRAAFVLPPPPHHGTVALPSAWPSHRHATSHRPRAEPHPAAGPPCTPRPSIPPLHHRRPSPYRCQSAPPFFPVPPPSPPRWLPSPCRARPGHMLRRTSCTAVVVAATAVLVCSVPPLAPRRRWHWVPGGAPLLPRPHAGPSRLGPSCRLRKGIFDISRDFSLLLN

SEQ ID NO: 135121 - protein, 195 aa, Oryza sativa
  unsure (1)..(195): unsure at all Xaa locations
  Clone ID: PAT_MRT4530_36827C.1.pep
RRRVWLRLGGRGAAAVAFLSSWSRRSVAVEQGTCCGDKAQAHPXPSLLCEPPASPSSRSASPAAFRSSIFSTKSSLPXELELLGDVEFGGGDGAWGRVWLRRDPPLLRGAASSTAIAALLAGDCVERLPPMTASATLAAPQPSQPLHIATAAVAATLAAAPCRRQWSRGRETQQGEEKERERERQYGLGLYYFVG

SEQ ID NO: 135122 - protein, 107 aa, Oryza sativa
  Clone ID: PAT_MRT4530_36828C.1.pep
MARRELLEVVLCVVVVEPLVLLPQEGKRELERGERVIVDVPGTNGIEAARAWNTCALPHPMDKRQSRFWLVFLIDRSVSVTQENLEPRDQPLSPYGSGMRNGHQSHL

SEQ ID NO: 135123 - protein, 527 aa, Oryza sativa
  Clone ID: PAT_MRT4530_36829C.1.pep
MAAGASFAARTSPTTILGSLRRPLHLPEHRWLRASPPLPQRAARRRLRAPLHRPKLRRPLGPKLGPPSSSARSIAPFISLSTASCGCPSATPSTALRCPLLPPLLLPPPRAPLPPPPVTRSSARRPREQSPINRDKMVQHHQAAANDDHQAIPLLTPYKQAGRPGSKLDLSHRVLLAPLTRCRSYGHVPQPHAALYYSQRATRGGLLIAEATGVSPTAQGYPDTPGVRTRQHVEAWKPIVDAVHRKGALFFRQLWHVGRVSTTGFQPDGLAPISSTDMPITPDGSGMVYSKPRRLRADEIPQIVDDFRLAARNAVEAGFDGVEIHGANGYLLEQFMKDSSNDRTDEYGGSLENRCRFAVEVIDAVVGEIGAHRVGIRLSPFLDFMDCVDSDPEALGSYMVEQLNKHEGFLYCHMVEPRMAIVDGRRQIQHGLLPFRKPFKGTFIAAGGYDREEGNKAVADGYADLVAFGRLFLANPDLPKRFELDAPLNNYDRNTFYTQDPVVGYTDYPFLDEHHHDAVADSNAPSA

SEQ ID NO: 135124 - protein, 1287 aa, Oryza sativa
  Clone ID: PAT_MRT4530_3682C.1.pep
MSRHRSPSRSPLDDDDLLGEILLRLPPIPSSLARAACVCSRWRRLVSDPALRRRLRAHHRDHLPLHGFFYHSDHSARLWPILERPDRIPAWRVAPTEKLLPGWQVLSCSHGLVLHKDREKFMVLDPVAGEQHAVPFPSSVEDTSGFVLGMVVPSRRSSSYRVVALFAGRSTSTRVAAYVYSSESGSWGDSDSPIATLVLPSKAKHRARHGTIVGSVIHWFLDGHKVLTFDLERQILAIIELPPEVVKDTDSFYEFRCQIIPALDDGVGEVRLAVLADPNMQFWERKKTGGDGSGAAYTWVLSSTVRLNFPSIESIRSDLKYQVLGFDDESNAIFIWVQNVLFMVYLRRRRARPTTAAPGWRRVGSGRRELAGLPVPLCGWRWRRAAAAIITEIDSTPPPSVAAVGALQWAVRNFIRAGDCITLLHVCPSARSRRRRRSLRLGGFQLALAFRELCNGIAEAKVEIVVRKGEVGETVLATVNQLTATTLVIGLHDKSFLYRSTNPYERMRRVGCRVLGIRQHATARDGSFNAELTQIETINLHITLPMREQYFGIFNHKKDTKEYLLREIRKKENGLELAEPSKERIDMGNATLTDMTLLPSVDPDDALSGMAATSSAPAQGAKPKKKTMKSLYLQFFDTAPDGKSRVCKLCKKSYCMTTATGNLGKHLNNRHPGYCQLSEGEATQSTTPTSMVSRAKRSQPLARTRSQAQSQSQVQPQSQVQHQPQPQTVSKVRHQPKAKPAIDIDHVNWLLLRWLISSSLPTSTLEDSMLIDSCRYLNPPVQLWPKEKAHEIVLQVFRSMKEDVKASLQCVSSRFSITLDFWTSYEQIVYLSVKCYWIDEGWALRKVLLDVRRIPYPCTGPEILQVLMNVLHEFNIDSKILACTHNNSQHAIHACHELRQELESRKLPFCYIPCAARMLKIIIKDGLENVRPVLSKIREFVLETNSNQDMMEDFMHWTEVYQEGSWKLPFDHSSNWSGDYNMLDVVKKAPNAMDNTIKKFEGVFGPRDWVLSSTEKSAVNSLHSYLEPFYKTTTNLCTCKIPTVGLVFFFMDHVIELINVCHDSTRQDWLKKIASDMSETAHNFASQAYNIYTFTAAILDPRIKGELIPETLNSTSNLEDARNQFVRDYSSTFEAVGNGYNTQDTTDGGDAFSFAEEIVRKRRRVSMITAADELSQYLAEPPAPISTDALEWWKGHSSRYPRLSLMARDFLAIQGTSLDPEELFTSKGDSMRKQHYCLPLSSIQATMCVKSWMQSGYQFNFQSTIIDFERLVESAVAPDAVDAPEFS

SEQ ID NO: 135125 - protein, 92 aa, Oryza sativa
  Clone ID: PAT_MRT4530_36830C.1.pep
LRFGGGFSERVGGLRRRLRPRPRRRRRPRKHQYQHPYMCSSPLSNVAVGVLLVCADIAAGVLLTLVCARRSMHQRLHGWNRSTSMLKCDLVP

SEQ ID NO: 135126 - protein, 104 aa, Oryza sativa
  Clone ID: PAT_MRT4530_36831C.1.pep
NHRDSLHEDFEFGNSWTNDDFSLLLNSLGIKNEGHNCAPFGILGFHPYKEVIYLEEEIHKPGGVIMVNSSKIPYLGYSRPKCYGHTHNGIEGSFVYTPCMIGDL

SEQ ID NO: 135127 - protein, 131 aa, Oryza sativa
  unsure (1)..(131): unsure at all Xaa locations
  Clone ID: PAT_MRT4530_36832C.1.pep
FFFFFFFFFMVFTSDIVLLFYXCFIYCXLVLVTILFWIFVLVFIYLFCLFCSVSCYYLLAFLLICLCFIFIFIFCLFLFIFVLLVLFCWYSCSAIIYLFCVVFLLMLLLLCCVVVVVVLLSVCYSVYFLCV

SEQ ID NO: 135128 - protein, 107 aa, Oryza sativa
  unsure (1)..(107): unsure at all Xaa locations
  Clone ID: PAT_MRT4530_36833C.1.pep
FFFSPPPPRERGKKKKRKKPSSPPPPPPPWWRLAGAPPPRRPSAXXXXLPPPPPLPRSAPRRRRRPRRRRVRCPGESRRIRRRPRAPARARXPRPREIEGIRLSLWW

SEQ ID NO: 135129 - protein, 112 aa, Oryza sativa
  unsure (1)..(112): unsure at all Xaa locations
  Clone ID: PAT_MRT4530_36834C.1.pep
DHCLFLLHPLVLIPYYACIRQLYCIACSPLLPSAAXXLIHNHFLLHLKLKKQQSHYQDINFGQAIFHQLHLLXFGILYIDXHLVQAHALVNSISPSTYVIFPWIYFAPVSIT

SEQ ID NO: 135130 - protein, 57 aa, Oryza sativa
  Clone ID: PAT_MRT4530_36835C.1.pep
MASIAKCVCAGDGPRQDTSPWHAGFCGVARKHVGVVRFNGSVPRASGRALKYEQERQ

SEQ ID NO: 135131 - protein, 307 aa, Oryza sativa
  Clone ID: PAT_MRT4530_36836C.1.pep
MATQRPLAVLLLLLLAACALPLARSRAAPRTAVGGGGGAAAADTIHELLRTHGLPGGLLPRGVESYSLDEANGLLEARLSAPCYAKYDDGDLAFFDTVVRGNLSFGALRGVEGLSQEELFVWLPVKGIVVADPGSGVILFDIGYAHKRLSRSLFEEPPDCKPSASAGTDAADAARWKDRQGIKSHAKFPSLNLFAFVTGRCSWPEVHGRGIIRSRKPPGPEVKRGVKTRKCNEGEIQTRRQRQLAEPVFPLCKNPVVRLLLMLQTTTATACRGFGCIYLREMWVLLQPVFFSLYLFCLLSLSLFLSL

SEQ ID NO: 135132 - protein, 57 aa, Oryza sativa
  unsure (1)..(57): unsure at all Xaa locations
  Clone ID: PAT_MRT4530_36837C.1.pep
TPFTLKCIITRRSXVGIPFNSTWVMSRVHYXSGNNPREHTSCKEWENHSSQSWRRIK

SEQ ID NO: 135133 - protein, 53 aa, Oryza sativa
  Clone ID: PAT_MRT4530_36838C.1.pep
DMTGSFSSTVSIAQTVALAYNILLTVIRTVSLSYFFQCADSYFGSINVNMKPF

SEQ ID NO: 135134 - protein, 121 aa, Oryza sativa
  Clone ID: PAT_MRT4530_36839C.1.pep
MAGWRRATRQATVSGWWRSGAARRTGGDNRGGQRGEEAGNGVWWWRSGGRVWAVVIGAGAEMGVAESDDAALAVEIGDPQCRRRVLNHNQFQSQLNELGGKEQGLRARRRRPASTCEAATG

SEQ ID NO: 135135 - protein, 127 aa, Oryza sativa
  Clone ID: PAT_MRT4530_3683C.1.pep
KKQNNSHALTCTFLASTHACRHALLLVSLCIPLTAGLWGGQPQPQPDAGPVLQLQLPAGVAVPGGAVAGCVCMLLLLPACILHPASACSTVPHSLHLTCSCVVEPAVVCTDPVRTYHWTLCTLALAV

SEQ ID NO: 135136 - protein, 386 aa, Oryza sativa
  Clone ID: PAT_MRT4530_36840C.1.pep
MAPQLATLAEEPGGGEEAARARRKTGLHAALHRWARARIPLRFLSGGGGGGGVGGGGGGGRPSPDLRVLLSVLACPLSPVPVLPRHPRNVASSAQYILEQFRATTGCAKIEGAAKSMYAAGRVRMAMAPEPGGGIGIGGGGGGGHEGCFVVWQLVPDMWLVEMAVAGHAVAAGCDGRVAWRRTPWLDAHAARGGGARPLRRALQGLDPVTIASVFSAAEHVGEKAVDGEDCFALRLDVAPSVLSAWGDGAAEVIRHGMTGYFSQRSGLLARLDDSQLTRIQTPGAPAMYWETTVSSRLGDYRAADGAVVAHAGTSVAHLARFGADVGAARAVTRMEEAWTIDDVAFNVAGLCPESFIAPEEVRSGGGGGSSSRRYDGGGGAIAKKK

SEQ ID NO: 135137 - protein, 100 aa, Oryza sativa
  Clone ID: PAT_MRT4530_36841C.1.pep
MHIYKEQEAEPSTGLMMPEPAPAASPGSGSSEGSSIEDTADRQVTFCKRCNGLLKKAYELSMLCDAEVALIVFSSRGRLYEYSNNRYCIPLPLFSSRNLN

SEQ ID NO: 135138 - protein, 376 aa, Oryza sativa
  Clone ID: PAT_MRT4530_36842C.1.pep
METKVTVGVVLLLLCLCGGAACAAGRSGGEFSIVGYSEEDLASHDRLIELFEKWVAKYRKAYASFEEKVRRFEVFKDNLNHIDDINKKVTSYWLGLNEFADLTHDEFKATYLGLTPPPTRSNSKHYSSEEFRYGKMSNGEVPKEMDWRKKNAVTEVKNQGQCGSCWAFSTVAAVEGINAIVTGNLTSLSEQELIDCSTDGNNGCNGGLMDYAFSYIASTGGLRTEEAYPYAMEEGDCDEGKGAAVVTISGYEDVPANDEQALVKALAHQPVSVAIEASGRHFQFYSGGVFDGPCGEQLDHGVTAVGYGTSKGQDYIIVKNSWGAHWGEQGYNRMEEGTGAGEVGSGRDTTASRGAQAKGEGLCGINKMASYPTKDN

SEQ ID NO: 135139 - protein, 321 aa, Oryza sativa
  Clone ID: PAT_MRT4530_36843C.1.pep
MAFGSGSKKRRRSEIAAHEDVGGADADVVVHEDDSNTNDELGADGSEEEDAGSSKKSGTVNPLYDEVTVVKAPKGKNDSGTKQWQCKHCQKKLKGSLTRIRIHLLGPPPGKKAEVARCVALLKDPIKCKALRDKVKKAEQNGDGSKSVGTRQGNPLADCFGEGKRHDADMKIVKFLCANGIPFNILRSPQFAEMVTAINKAPSGYKGPSSEKARTTLLDACKRSVEHDLAIVKSTWCTQGVSIVSDGWTDIKNKPLINVIASNSRGSCFLYAEDFSGVEKTGEAIAEFLLKAIDEIGPGNVLQVVTDNASNCKAAGKEIEK

SEQ ID NO: 135140 - protein, 122 aa, Oryza sativa
  Clone ID: PAT_MRT4530_36844C.1.pep
QKERVTLVIKAKPKPPTMLLRRQLKGNIIKRYADNTKKAARKLRPGINTDGSARPSGGNLQGGDRRQNPLPRAAQRTREGFHPKGETDHRGTPSRWKRCPHTSDMPNLEHLKGLPPQTHQRG

SEQ ID NO: 135141 - protein, 85 aa, Oryza sativa
  Clone ID: PAT_MRT4530_36845C.1.pep
MVMPIRMPRWPELMATPGGVGPEIVCSHKPACRVIRFGHFWFPRVEAKGRQILRAGLPDATEWGTQGINCGCSVTRRWCTEGSRF

SEQ ID NO: 135142 - protein, 77 aa, Oryza sativa
  Clone ID: PAT_MRT4530_36846C.1.pep
QPDSLPTTARPSATTPPPTAGTPLPTPGTTTPPPAAATPLPPTTATWRRPSSTPPWPSAAPVLPRHALHEHGKCLST

SEQ ID NO: 135143 - protein, 242 aa, Oryza sativa
  Clone ID: PAT_MRT4530_36847C.1.pep
MAALALGAAATWPEAIVLCLLFILAAAMLVALHSLPRRAAHRLRRASSAGSSSAAAAQSRRHFAQGAQLLARARAAAAGGTKKPPGPLARAALAEADRAIALDPRDAAPLILKALALDLQGHRLPALRALDAALAPPLARSLEPRERGDALAKRAEIALALHRRHRRRLDQAADDLAEAVRLSPQNARAHALLGECYERKGMAAEALDAFKTAASIDPSLAAARDALRRTEGSDDGVESDSD

SEQ ID NO: 135144 - protein, 165 aa, Oryza sativa
  unsure (1)..(165): unsure at all Xaa locations
  Clone ID: PAT_MRT4530_36848C.1.pep
SILVELILGHLRPRASTYPTPLKSFHKVGLESSSTGSSFPADSAKPIIFAVVSRDSRQXTVGISLTIHGQFGKVGNGIKVNRPIVTPADYPHLVEFLHFDIQRSGHXITLRQHPRXDHRNALFXLNSRIPLVRTSSESVVRRPAKAPEGXAVPGPSPGRHVADRS

SEQ ID NO: 135145 - protein, 124 aa, Oryza sativa
  Clone ID: PAT_MRT4530_36849C.1.pep
MTHPSPAPLHADVPLWLHCRPPSLLQWAAPDATRIPPMPPVPPMLAPGPGEKGDLGSLASGLWTISTAWLFGVIFHHDYRDCVNIFILNASSCTLVHDALPHACDHYLHSLHQLYPGLQVEFGL

SEQ ID NO: 135146 - protein, 119 aa, Oryza sativa
  Clone ID: PAT_MRT4530_3684C.1.pep
VDVVIDQTYASDPAEYKLSTFLESINVDRDSCFSFVANRSIWRFDKRIGYSKKKDWFDGAISQPQLVLADLIEIFFPTGNYTTIYFRNLMKDEGVTEVVPEMCSRSISTPMEPTILPCQ

SEQ ID NO: 135147 - protein, 77 aa, Oryza sativa
  Clone ID: PAT_MRT4530_36850C.1.pep
MQYHYENLQEQGFGQLGEQGSEEMLEIKMGKRIRNRTGVGLTSIYYIIKTTLKGDTMFVVEARNSHINRRKRKTESM

SEQ ID NO: 135148 - protein, 125 aa, Oryza sativa
  unsure (1)..(125): unsure at all Xaa locations
  Clone ID: PAT_MRT4530_36851C.1.pep
THACGHLYLACSCWRSRRWDRGATAALDTLGEYEATAHRMGSPARPRVGCRCGALSLCDEPAXRCSFDQTLRREDFQDSRVVRSLGSIHEQETYCREIITGAIESCMKKQGDSLLNTLNGMSGRL

SEQ ID NO: 135149 - protein, 51 aa, Oryza sativa
  Clone ID: PAT_MRT4530_36852C.1.pep
EACCGGRGNSEAPTVVRIKAWGARSSTSTLERRRRGGAGLRWRGGGNAGGH

SEQ ID NO: 135150 - protein, 65 aa, Oryza sativa
  Clone ID: PAT_MRT4530_36853C.1.pep
QHSMSTSPAHVSNKKKERRSHELNGLDSSMCIRVNAYNSVIIQYNLYAECMAWLNCTSKFITFVF

SEQ ID NO: 135151 - protein, 87 aa, Oryza sativa
  Clone ID: PAT_MRT4530_36854C.1.pep
KLASGGSFQSPLIFSGSMFMPILNYPSTLSRNLCKHLLNQSTIHPQTPTNPTKWRCLRVDCLGVSTPVWNSGHRVTLEGVPHVFPNR

SEQ ID NO: 135152 - protein, 78 aa, Oryza sativa
  Clone ID: PAT_MRT4530_36855C.1.pep
PRPARPRGPAAPPTARPRRPRRPRGAPPPPPAAPRAPSPWRRNQQARLLFLSATSASAPCVRVSVAWRRAASSLGGFI

SEQ ID NO: 135153 - protein, 82 aa, Oryza sativa
  Clone ID: PAT_MRT4530_36856C.1.pep
SISIIVLYHTVHPSPLSYLLFLYLEDHCPPTSFYDGCMLIQYGSTAYFCFLRIVCSDGCKSKFHHLCKDPPSGFCSSKKKTE

SEQ ID NO: 135154 - protein, 125 aa, Oryza sativa
  Clone ID: PAT_MRT4530_36857C.1.pep
SLGAPVARHRCVRTPTRRCRAVPQEEMQIMAHLARECLQWEPESRPTMSEVVQILATIAPSSRKHAAAATLVTRIGRSSSAGDTMHSTRLAVKCSVGESWRSPEMEEETVVDLTEPRLEPAIFFN

SEQ ID NO: 135155 - protein, 98 aa, Oryza sativa
  Clone ID: PAT_MRT4530_36858C.1.pep
LGSIHMRFHITEISDYLMAYLDMLYKITGYANSARINSSDCYTFACLHTHYRPLGGGVPTLHDLMARRTSHIRTLPSMTADGTSAMACPTRSAPCCTS

SEQ ID NO: 135156 - protein, 157 aa, Oryza sativa
  Clone ID: PAT_MRT4530_36859C.1.pep
AFEEAATAAHQDQPPIGDTNGKDPERRELPRQATPPPRGIGDLRDQINDRREARRTWDDANRSRRHVSSRRHDRGNRPNEDRDYNDRERRGPDNTGHGRRRNDDDEGDRRRDNSERQRQDARDPGRHPRNRERKAGGAVRQAEPRHGRANAHPTRHV

SEQ ID NO: 135157 - protein, 68 aa, Oryza sativa
  unsure (1)..(68): unsure at all Xaa locations
  Clone ID: PAT_MRT4530_3685C.1.pep
KSSSNVLKVLAWXKKKRPSLRNAWMIEEVDWGPNQDLLQVFFHLTTSLLVHRRQEIKFYTFWIRIQAS

SEQ ID NO: 135158 - protein, 106 aa, Oryza sativa
  Clone ID: PAT_MRT4530_36860C.1.pep
TPGPSMLLRWPKLRNCFWSDNVRWKACGAWYDIRIGDTSTRVWMRPDPSHGTSYQSRRALPHGRPADTRGLCVGPREDVMMNACFRDINVLNVCMVLMCKSKPDNL

SEQ ID NO: 135159 - protein, 199 aa, Oryza sativa
  Clone ID: PAT_MRT4530_36861C.1.pep
GEDPEQRELPRQATPPPRGTGDLRDQINGRRKARRTRDDANRSRRHVSSRRHDRGNRPNEDRDYNDREQRGPDNTGHGRRRNDDDDGDRRRDNSERQREDSRDPGHHPRNRTLEPSDPSSSSSSASSSSSDRHPRSLQHHHRENCTCEVHGRISLRVSSAQDTGTEGNNHYSRERKAGGAVRQAEPRHGRANTQPTRHD

SEQ ID NO: 135160 - protein, 127 aa, Oryza sativa
  Clone ID: PAT_MRT4530_36862C.1.pep
GDFPRAPRGPPPPGKGLPGGRLQVPHWSQGFLGSQVLKGFGVLPWSLAHAFFLRLPFVLPGWASFYPFVGRVLKTLSFSFFPGFLVPFPPVPCVVFVTPLWGPFNSPVRGLSLKKKKQKKKKKKKKI

SEQ ID NO: 135161 - protein, 116 aa, Oryza sativa
  Clone ID: PAT_MRT4530_36863C.1.pep
GGTRDFGALEHHAADGAFVARAAMVAGSHTLRAGTGALTDGGQPGRWPCHPRARQQGWNSQQSLPTEQPALLLRQDRRRRRRDAERATPVRRASPRRDTTSTPGTRSCKSTARPDA

SEQ ID NO: 135162 - protein, 240 aa, Oryza sativa
  unsure (1)..(240): unsure at all Xaa locations
  Clone ID: PAT_MRT4530_36864C.1.pep
TERSPQSRRGSSRTPSSRGRTVTFSSPIPASMEPLLQVLAPADSTVREGLNAQVQALADERAALEAEWAQLTADRARVDEGRRAVDGLVETGRKMCQARLAEIQACEETLDSVMRETEEERXAALIASSALEEALGNIRLXYEAYAKHLAKRAEDARGVLDAAAAQERRAXEVDTSLRAREVALEAERTRSAQEFWLQLPRRADLPKLQRLHDQRKRKGFYSNKLHITSRNKAQKWVLDF

SEQ ID NO: 135163 - protein, 313 aa, Oryza sativa
  unsure (1)..(313): unsure at all Xaa locations
  Clone ID: PAT_MRT4530_36865C.1.pep
MPSPLKERPAGRLGRLLAALRPARAGPLPVQTGFPTSLADLVVKNHGRLKKPSASASRRKKRGGPEAPPSPSPSPSPSPPPQPSSPPPPPPSPPPAAAVSVSPPTQPRPRPELPPPSPSPPSRSSCSSPPTAPTSXPPSPLPRLXPMAAPPPQAVRPPRTPXPPPPHHSPSPPSPPRPLPQQHPSLPAKSGVEGPRXPLGPDPRSVVTAPAPSPPPXPQTSPPLPSPEPPSPPPPXPVPLHTPPPRPLPRSXTSPPKPPPQGKLPPSRRQPGTATSTRPLRAPPAAAVLPPAAKLPPHRAGLLSLRPLPRWAD

SEQ ID NO: 135164 - protein, 138 aa, Oryza sativa
  unsure (1)..(138): unsure at all Xaa locations
  Clone ID: PAT_MRT4530_36866C.1.pep
MARTVAGGVERGGGGGGRARGRRSHPSLPVPCPCLLRQAWGSLNALVGRFRAAFEEHGGQPEANPFGARAVRLYLHEVYDCQAKARGIAYEKKRWKRPPTSSSHSQAAAAATSSAXPAASPLPPPPLPERSADVVDCA

SEQ ID NO: 135165 - protein, 65 aa, Oryza sativa
  Clone ID: PAT_MRT4530_36867C.1.pep
NQAKSEVREVNHHRRSMTKQASGSKLGYHNIHLPFFFFFFFFFFFFSFANPNFFQFLRTRGRTRG

SEQ ID NO: 135166 - protein, 39 aa, Oryza sativa
  Clone ID: PAT_MRT4530_36868C.1.pep
FIERVVVLSPLYYPTSVIYEAYSCVLISTLDRLVQYDFY

SEQ ID NO: 135167 - protein, 87 aa, Oryza sativa
  Clone ID: PAT_MRT4530_36869C.1.pep
SLLLIAAWLSPQSTVVRANASTSYSILYRVSKDLCKVSKLQPKLDHHFRLILSLNLIQDSAKTFLRTLHALGGWSLSACGSARCIIL

SEQ ID NO: 135168 - protein, 101 aa, Oryza sativa
  Clone ID: PAT_MRT4530_3686C.1.pep
MGDVERDARVDTVVVVAAGKGMAPRQPSPEDADVGAMSTTDGGNRVQLDIREGHVQTVAATLSMLRDSPTLLRHRRRVADRRTSSPASSRRPSSHPPAGLP

SEQ ID NO: 135169 - protein, 64 aa, Oryza sativa
  Clone ID: PAT_MRT4530_36870C.1.pep
PCCHHRDLFYAPQGIYGYPRTNGPGDSKCCQQLERSSPSSPLPALPLSLPMDRQLKKCKLWTVG

SEQ ID NO: 135170 - protein, 63 aa, Oryza sativa
  Clone ID: PAT_MRT4530_36871C.1.pep
FAEVLAWAKEKRPSVQNAWMIEEVDWGPNQDLLQVFFHITTSLLVYRRREIKFYTFWIRIRAS

SEQ ID NO: 135171 - protein, 125 aa, Oryza sativa
  Clone ID: PAT_MRT4530_36872C.1.pep
KIAGRYKAHQPKMMCEILSKKLRARFSVPASSRRRRRRCATSSSSSCPSSEQTDVPANSTPPPGAMWPGPAAAGRRQRLAGRGTAVRHHRASQRAPTRRRAEETVERADRREGVRRRSRRVGPRA

SEQ ID NO: 135172 - protein, 85 aa, Oryza sativa
  unsure (1)..(85): unsure at all Xaa locations
  Clone ID: PAT_MRT4530_36873C.1.pep
EERQCSFNAYRRATPACHSNSVQSAQSACKYAQEIHXFRTVLEVEESSWMDQGNCVLMSMDTAFVVHVWSYCYEFSINKXKXKKK

SEQ ID NO: 135173 - protein, 943 aa, Oryza sativa
  Clone ID: PAT_MRT4530_36874C.1.pep
MSVKNASSISFEDIEKSISNWKIPKVNIKEIYHVEREINSIRAKHQYHYLHFGLIQVAIRSLTRKGLNVSVLACLRDCRNKRFKDSLLGMMEASLSNGLVYFNTFPDFSVSLSDTDIHKVLTLNLQTSGYELELGSENISVTYRVYYKAMTTLAPCAKHYTPKGLTTLLQTNPNNRCTTPKTLKWDEITLPEKWVLSQAVEPKSMDQSEVESLIETPDGDVEITFASKQKAFLQSRPSVSLDSRPRTKPQNVVYATYEDNSDEPSISDFDINVIELDVGFVIAIEEDEFEIDKDLLKKELRLQKNRPKMKRYFERVDEPFRLKIRELWHKEMREQRKNIFFFDWYESSQVRHFEEFFKGKNMMKKEQKSEAEDLTVIKKVSTEWETTSGNKVDSVHPPFESIQLSHNRGKACPLKSISKNTYGETAKVEHIGHLVEQQNYANISLRSLGQQTDRIETILMEGYKTRRPEVKINIPSNSQSSSSQSVSPMFVPTIDPNIKLGKQKAFGPAISEELVSELALKLNNLKVNKNINEISDNEKYDMVNKIFKPSTLTSTTRNYYPRPTYADLQFEEMPQIQNMTYYNGKEIVEWNLDGFTEYQIFTLCHQMIMYANACIANGNKEREAANMIVIGFSGQLKGWWNNYLNETQRQEILCAVKRDDQGRPLPDRDGNGNPTDFRWYKDTFLSKLYTLPEPNQDFWKEKYISGLPPLFAEKHITLIDSGADVNCIREGIIPHKYFCKATHRIRGADGGLLTVEYQIPEIYICISELCIKTSFLLVKNLKQDVILGTPFLSLIRPFLVTNEDIQFEIMGKQVSLRFSSNTDEILDQLVQTKREQVVNSIYLHDNSFPKSMDLPEIEEAITTDYEYQLVFQNKITRIFISKYYNQSYEYFKGAGRIIKPDFGNECSKKSYYRSLAQWFQKKTEPSEIDTVQSAPTIINEDNE

SEQ ID NO: 135174 - protein, 353 aa, Oryza sativa
  Clone ID: PAT_MRT4530_36875C.1.pep
MSVKNASFISFEDIEKSISDWKIPKFLGYKIQYDRVQPVARVIEFAEKFPDEIKDKTQLQRFLGCLNYVSDFYKDLAKDRKILTERLKKKPPAWTAKHTQAVKKIKASCSSEKSIGTMSIKNASSISFEDIEKSISNWKIPKVNIKEIYHVDTNIHKVLTLNLQTSGYELEPGSENISVTYRVYYKAMTTLAPCAKHYTPKGLTTLLQTNPNNRCTTPKTLKWDEITLPEKWVLSQAVEPKSMDQSEVESLIETPDGDVEITFTSKQKAFLQSRPSVSLDSRPRTKPQNVVYATYEDNSDEPSISDFDINVIELDVGFVIAIEEDEFEIDKDLLKKELRLQKNRPKMKRYFER

SEQ ID NO: 135175 - protein, 1061 aa, Oryza sativa
  Clone ID: PAT_MRT4530_36876C.1.pep
MDEVITAENVAEAVDSIIDKLKKSDVSNVVYFDGWEGLGVSAVLRAVAERLTLGQITDPELRFEKIIHIDCSRWKSIREMQRKIAEKLEMTQAKDLIDEQDEADDINGKDESSRDVINDVGIAVNDVLMSGRFLVVFHNGSDNEIKDVTNFGLPLYQLYKGNKILWTFRGRFRLSTKIQDKVQKADVFLAAEFHNKIYGMEFQDQSHWWDILCEEAAEIASNTCSGVAKLHPTTIAKCWLYISKLNFVGRDIIDYDWAVHASNYWVCDGIIQEWEIADALQQEMWQEWDDPGLYHMMRNTDNWISTSHLISSNYGFLAASAVAQTVSSFFLAEHQIDTESKDTVELVEYFFKSKLNPAHLLQNYNDMFQHAENLRVLKLSLCTFRFASPPFLCCRGLRFLGLDNCLDLNIDAGEEVQSWNCFHGLWVLDLQYTQWVFSPQMIEEMNNVRELNVKGVKLHNLRHIWKRQHNKIQKLRVIKTIDQDYTATKDEKDPFTFTFSGMEKMEILDLSGNSTMQAFPDLSKATCLKTVTLDGCVGLDSVSDSNLPVSLEEFSLVAASEQYPKAANITKISLSGCCRLKKLILSGLPKLEELDLSGTILEKLDLDAMQAEKLNRLLLFGCLHLCAIKWSDVTKPQLDELHVDTVGVHLEGKRQNSLSPVQDDDKLFQSHVVIMDPRLLRFLQLFAMQSHHVHFCMSPVFVNYCKDEGQSKQCSSEQIRNAHVDRTVAGNMCSDIFDRVVALSVAPVICPCPPLPLESKCNRSCKVEIRNRKQLQGNDNILGNFIDIVHSLNVHDDSWMTSIPGSNWGRIKWCCIERCPKLHSVFKLRDHDQIVAFSWLETFWASHLQTAHCIWSMEVKHVNVDSFKKLQYIHLDSCPRLIHVLPLSNNLPSLETIQILYCTSLIYVFPLNTANSKGTVSNDAIDFPKLKHVHLHELPSLKGICEAKIMSAPMLEAIMIRGCCSLRHLPDVQGLHEPRPIVYCEKDWWDNLVWPQKEGGYDQSLLYKRQSAQYYKKALPKGSILRDLLEMNCMASNTTRHAILGCNRLVDSIDYNGHRHR

SEQ ID NO: 135176 - protein, 1416 aa, Oryza sativa
  Clone ID: PAT_MRT4530_36877C.1.pep
MTTLAPCAKHYTPKGLTTLLQTNPNNRCTTPKTLKWDEITLPEKWVLSQAVEPKSMDQSEVESLIETPDGDVEITFASKQKAFLQSRPSVSLDSRPRTKPQNVVYATYEDNSDEPSISDFDINVIELDVGFVIAIEEDEFEIDKDLLKKELRLQKNRPKMKRYFERVDEPFRLKIRELWHKEMREQRKNIFFFDWNESSQVRHFEEFFKEKNMMKKEQKSEAEDLTVIKKVSTEWETTSGNKVDSVHPPFESIQLSHNGGKACPLKSISKNTYGETAKVEHIGHLVEQQNYANISLRSLGQQTDRIETILMEGYKTGRPEVKINIPSNSQSSSSQSVSPMFVPTIDPNIKLGKQKAFGSAISEELVSELALKLNNLKVNKNINEISDNEKYDMVNKIFKPSTLTSTTRNYYPRPTYADLQFEEMPQIQNMTYYNGKEIVEWNLDGFTEYQIFTLCHQMIMYANDCIANGNKEKYISGLPPLFAEKVRNSLRKEGGGSINYHYLDIGKITQKIQLVGAELCNDLKIKDQLKKQRILGKREMGDFCYQFGFQDPYVHRKRKTHSKPMTKSNDKSKMSFQATKRKPKRIYNKNIRTKDTESKETICYKCGLKGHIANRCFKSKVKKEIQALLDSESEDVKEKLEAILNNIDNDSSSDEEKNAEINCCQDSGCSCYEPDNSEEESDENILVLTSLEEFVLDTFETIQDPEEKRRVLEKFLSRVKTDKDKLKKDIQKSKFLSIDEVFKRLDEQKKKNEKPDLISLFEEQKIMKQDLEEIRKRLYMLELKEGFHMEEKDEPIQEDDQHITLIDSGADVNCIREGIIPHKYFRKAAHRIRGADGGLLTVEYQIPDTYICISEVCIKTSFLIVKNLKQDVILGTPFLSLIRPFLVTNEDIQFEIMGKQVSLRFSSNIDEILDQLVQTKREQIVNTIYLHDNSFPSYLPKSMDLTGKTSWEDRYLLKATKNFEYICKEMASQKSEWFTNMSSWRLPQLPRGHEERFNHNFRVTELQQGLLNLLWQTKNKKEKAHALNGLAYYFKNFVTSDQKITEKRAKLQDIPHHEERLLDYREEKSRDGQDKLPMEVEQSMATDKNTKPKAPCRSCAYKDSCQKKLKSQNPMSSTYENLQPRLSFKTEQTLSCFGQDIFNLVWQKFKERQMKIFLGLQDYFFDLLEGRERNPAIRVIIYMLPLLRLDDQAISDPSYRFLVLKAEINLQRFWNLPTYNHEEISLQTIIDHGLVNSIYATLDQILQSDLGSAVKDVYRRLGHGRYRIIFSSIPPKFTPPVRPAIHYIYIMNGQFNFQEDGTSKLSDEEEEIYTTIANHENWRLFSEAAEIEEAITTDYEYQPVFQNKITRIFISKYYNQSYEYFKGAGRIIKPDFENECSKKSYYRSLAQWFQKTEPSEIDTVQSAPIIINEDNE

SEQ ID NO: 135177 - protein, 149 aa, Oryza sativa
  Clone ID: PAT_MRT4530_36878C.1.pep
MEMEKKVMSGCHIPAFGAWNYRDDDLPITQCFDLAIQDRLMRRANRRGDGNCKRRLVVPFDAWPPAPRGAAHGKVIRRELAQKQWDNVAEEMMQWRAVGAYGTKRKVGDKAVDEDLYKVPQPLIYPKRRKMRKVVWSLWIGCLGLDCIA

SEQ ID NO: 135178 - protein, 542 aa, Oryza sativa
  Clone ID: PAT_MRT4530_36879C.1.pep
MREQRKNIFFFDWYESSQVRHFEEFFKGKNMMKKEQKSEAEDLTVIKKVSIEWETTSGNKVDSVHPPFESIQLSHNGGKACPLKSISKNTYRETAKVEHIGHLVEQQNYANISLRSLGQQTDRIETTLMEGYKTGRPEIFKPSTLTSTTRNYYPRPTYADLQFEEMPQIQNMTYYNGKEIVEWNLDGFTEYQIFTLCHQMIMYANACIANGNKEREAANMIVIGFSGQLKGWWNNYLNETQRQEILCAVKRDDQGRPLPDRDGNGNPTELKEGFHMEEKDEPIQEDDQVVGTIQKYMKQKWYTEVMYRFIDGSYFQYITLIDYGADVNCIREGIIPHKYFCKAAHRIRGADGGLLTVEYQIPEIYICISEVCIKTSFLLVKNLKQDVILGTPFLSLIRPFLVTNEDIQFEIMGKQVSLRFSSNTDEILDQLVQTKREQVVNTIYLHDNSFPSYLPKSMDLPDQKITEKRAKLQDIPHHEERLLDYREEKSRDGQDKLPMEVEQSMATDKNTKKTVLANYRMKRKKYIQQLLIMKIGDYFLKL

SEQ ID NO: 135179 - protein, 562 aa, Oryza sativa
  Clone ID: PAT_MRT4530_3687C.1.pep
MDPRLHKAAVQGNTASLAALLGEEQGGGKILNSTTPQGNTALHIAAGLGRVAFAEAAAAEHGDLLVARNDQGDTPLHLAARAGKMAVADMLITFITMAGPCWPEEEPLMMMNKTRNTPLHEAVKQRRSAVALRLLEAEPNCGHTPNVDMQTPLHIAAREGLADVVDKILDQPWVPEKFVTADNVSGTALHQAVLGGHTRVVEILLMKTAPGLIDLTDAVGNTALHFAAQKNDKRMVRMLLDHKPDLAHRRNERQQSALHVAAYYGSTAAAAELLRHSPDAAEMLDREGRNAVHVAVSSGKVDALRCLLGRVRPAEVVNRGDNSGDTPLHLAAKMARIKSALMLLRDPRVDPCLLNREGHSARSLVEERVAGGEMDAYVVYLWEKLKKYESRRCKNQQLPPVATYQSLRSRRPGSGSNDEYFELSVGTYTLVATLIATVTFAATFTMPGGYNQNTGLAIHADRAPFKIFVVSNTVAMCSAIVVVFCFIWAWRDPVKFKLDQLTWGHRLTVVACLAMIVSLMTSVYLTVLPTERWLAYLVIAIGACTPAVVILILRWEVFYVPL

SEQ ID NO: 135180 - protein, 1204 aa, Oryza sativa
  Clone ID: PAT_MRT4530_36880C.1.pep
MDNKIFKPSTLTSTTRNYYPRPTYADLQFEEMPQIQNMTYYNGKEIVEWNLDGFTEYQIFTLCHQMIMYANACIANGNKEREAANMIVIGFSGQLKGWWNNYLNETQRQEILCAVKRDDQGRPLPDRDGNGNPTGNISDALATLIYNIIYHFAGNYHDIYEKNREQLINLKCKTMSDFRWYKDTFLSKLYTLPEPNQDFWKEKYISGLPPLFAEKVRNSLRKEGGGSINYHYLDIGKITQKIQLVGVELCNDLKIKDQLKKQRILGKREMGDFCYQFGFQDPYVYRKRKTHSKPMTKPNDKSKMSFQATKRKPKRIYNKNIRTQDTESKETICYKCGLKGHIANRCFKSKVKKEIQALLDSESEDVKEKLEAILNNIDNDSSSDEEKNAEINCCQDSGCSCYEPDNSEEESDENILVLTSLEEFVLDTFETIQDPEEKRRVLEKFLSRVKTDKDKLKKDIQKSKFLSIDEVFKRLDEQKKKNEKPDLISLFEDQRIMKQDLEEIRKRLYRLESKEGFHMEEKDEPIQEDDQVVGTIQKYMKQKWYTEVMYRFIDGSYFQHITLIDSGADVNCIREVCIKTSFLLVKNLKQDVILGTPFLSLIRPFLVTNEDIQFKIMGKQVSLRFSSNTDEILDQLVQSKREQVVNTIYLHDNSFPSYLPKSMDLPGKTSWEDRYLLKATKDFEYICREMASQKSEWLTNMSSWRLPQLPRGHGERFNHNFRITELQQGLLNLLWQTKNKKEKAHALNGLAYYFKNFVPSDQKITEKRAKIQDIPHHEERLLDYREEKSRDGQDKLPMEVEQSMATDKNTKVFSDKILISTDPASSMVAFHININNLLQSFPHNKPSSSTKRHDTIPQTPYILHNHPNSFLPQYILRTQPKAPCRSCAYKDSYKKKLKSQNPMSTTYENLQPRLSFKTEQTLSCFGQDILDLVWQKFKERQMKIFLGLQDYFFDLLEGRERNPAIRVIIYMLPLLRLDDQAISDPSYRFLVLKAEINLQRFRNLPTYNHEEISLQTIIDHGLVNSIYATLDQILQSDLGNAVKDVCRRLGHGRYRIIFSSIPPKFTPPVRPAIHYIYIMNGQFNFQEDGPSKLSDEEEEIYTTIANHENWRLFSEAAEIEEAITTDYEYQLVFQNKITRIFISKFYNQSYEYFKGAGRIIKPDFGNECSKKSYYRSLAQWFQKTEPSEIDTVQSAPMIINEDNE

SEQ ID NO: 135181 - protein, 1025 aa, Oryza sativa
  Clone ID: PAT_MRT4530_36881C.1.pep
MSVKNASSISFEDIEKSISNWKIPKVNIKEIYHVEREINSIRAKHQYHYLHFGLIQVAIRSLTRKGLNVSVLACLRDCRNKRFKDSLLGMMEASLSNGLVYFNTFPDFSVSLSDTDIHKVLTLNLQTSGYELELGSENISVTYRVYYKAMTTLAPCAKHYTPKGLTTLLQTNPNNRCTTPKTLKWDEITLPEKWVLSQAVEPKSMDQSEVESLIETPDGDVEITFASKQKAFLQSRPSVSLDSRPRTKPQNVVYATYEDNSDEPSISDFDINVIELDVGFVIAIEEDEFEIDKDLLKKELRLQKNRPKMKRYFERVDEPFRLKIRELWHKEMREQRKNIFFFDWYESSQVRHFEEFFKGKNMMKKEQKSEAEDLTVIKKVSTEWETTSGNKVDSVHPPFESIQLSHNRGKACPLKSISKNTYGETAKVEHIGHLVEQQNYANISLRSLGQQTDRIETILMEGYKTRRPEVKINIPSNSQSSSSQSVSPMFVPTIDPNIKLGKQKAFGPAISEELVSELALKLNNLKVNKNINEISDNEKYDMVNKIFKPSTLTSTTRNYYPRPTYADLQFEEMPQIQNMTYYNGKEIVEWNLDGFTEYQIFTLCHQMIMYANACIANGNKEREAANMIVIGFSGQLKGWWNNYLNETQRQEILCAVKRDDQGRPLPDRDGNGNPTDFRWYKDTFLSKLYTLPEPNQDFWKEKYISGLPPLFAEKHITLIDSGADVNCIREGIIPHKYFCKATHRIRGADGGLLTVEYQIPEIYICISELCIKTSFLLVKNLKQDVILGTPFLSLIRPFLVTNEDIQFEIMGKQVSLRFSSNTDEILDQLVQTKREQVVNSIYLHDNSFPKSMDLPDQKITEKRAKLQDIPHHEERLLDYREKKSRDGQDKLPMEVEQSMATNKNTKKTVLANYRMKRKKYIQQLLIMKIGDYFLKLQKLKKLSPPDYEYQLVFQNKITRIFISKYYNQSYEYFKGAGRIIKPDFGNECSKKSYYRSLAQWFQKKTEPSEIDTVQSAPTIINEDNE

SEQ ID NO: 135182 - protein, 87 aa, Oryza sativa
  Clone ID: PAT_MRT4530_36882C.1.pep
ISFQLFLTSQFTTKKITFCYTEVIYWLQVRGKDKQINKGPCRVLEYLDGIASNCFRWHQDTCQITIIFVHVSNPKMKSDNCFHKLEP

SEQ ID NO: 135183 - protein, 1275 aa, Oryza sativa
  Clone ID: PAT_MRT4530_36883C.1.pep
MSIKNASSISFEDIEKSISNWKIPKVNIKEIYHVEREINSIRAKHQYHYLHFGLIQVAIRSLTRKGLNVSVLACLRDCRNKRFKDSLLGMVEASLSNGPVYFNTFPDFSVSLSDTNIHKVLTLNLQTSGYDLEPGSENISVTYRVYYKAMTTLAPCAKHYTPKGLTTLLQTNPNNRHTIPKTLKWDEITLPEKWVLSQAVEPKSMDQSEVESLIETPDGDVEITFASKQKAFLQSRPSVSLDSRPRTKPQNVVYATYEDNSDEPSISDFDINVIELDVGFVIAIEEDEFEIDKDLLKRELRLQKNRPKMKRYFERVDEPFRLKIRELWHKEMREQRKNIFFFDWYESSQVRHFEEFFKRKNMIKKEQKSEAEDLTVIKKVSTEWETASGNKVDSVHPPFESVQLSHNGGKACPLKSISKNTYGETAKVEHIGHLVEQQNYANISLRSLGQQTNRIETILMEGYKTGRPEKYDMVNKIFKPSTLTSTTRNYYPRPTYADLQFEEMPQIQNMIYYNGKEIVEWNLDGFTEYQIFTLCHQMIMYANACIANGNKEREAANMIVIGFSGQLKGWWNNYLNETQRQEILCAVKRDDQGRPLPDRDGNGNPTGNISDALATLIYNIIYHFAGNYHDIYEKNREQLINLKCKTMSDFRWYKDTFLSKLYTLPEPNQDFWKEKYISGLPPLFAEKVRNSLRKEGGGSINYHYLDIGKITQKIQLVGAELCNDLKIKDQLKKQRILGKREMGDFCYQFGFQDPYVHRKRKTHSKPMTKPNDKSKMSFQATKRKPKRIYNKNIRTQDTESKETICYKCGLKGHIANRCFKSKVKKEIQALLDSESEDVKEKLEAILNNIDNDSSSDEEKNAEINCCQDSGCSCCEPDNSEEESDENILVLTSLEEFVLDTFETIQDPEEKRRVLEKFLSRVKTDKDKLKKDIQKSKFLSIDEVFKRLDEQKKKNEQPDLISLFEDQKIMKQDLEEIRKRLYMLESKEGFHMEEKDEPIQEDDHVVGTIQKYMKQKWYTEVMYRFIDGSYFQHITLIDSGADVNCIREGIIPHKYFYKAAHRIRGADGGLLTVEYQIPEIYICITEVCIKTSFLLVKNLKQDVILGTPFLSLIRPFLVTNEDIQFKIMGKQVSLRFSSNTDEILDQLVQTKREQVVNTIYLHDNSFPSYLPKSMDLPGKTSWEDRYLLKATKDLEYICREMASQKSEWLTNMSSWRLPQLPRGHGERFNHNFRITELQQGLLNLLWQTKNKKEKAHALNGLAYYFKNFVPTDQKIT

SEQ ID NO: 135184 - protein, 97 aa, Oryza sativa
  Clone ID: PAT_MRT4530_36884C.1.pep
SFTNPMKFLWNDTLYVDFRRNLARAQTSRKISLESTSLIRFLRFSCAPIKRPFLCFSCVLQSSVLHFNSCQNHVLEVFRLASQGDGLDDLDSTPHSF

SEQ ID NO: 135185 - protein, 1634 aa, Oryza sativa
  Clone ID: PAT_MRT4530_36885C.1.pep
MTTLAPCAKHYTPKGLTTLLQTNPNNRHTIPKTLKWDEITLPEKWVLSQAVEPKSMDQSEVESLIETLDGDVEITFASKQKAFLQSRPSVSLDSRPRTKPQNVVYATYEDNSDEPSISDFDINVIELDVGFVIALEEEEFEIDKELLRREIRLPKNRAKTKRYLEEVDESFRMKIREVWHNEMREQRRNIFFFDWYENSQIIHFEEFFKRKNMIKKEQKSEAEDLTVIKKVSTEWETASGNKVDSVHPPFESIQLSHNGGKACPLKSISKNTYGETAKVEHIGHLVEQQNYANISLRSLGQQTDRIETILMEGYKTGRPEVKINIPSNSQSSSSQSVSPMFVPTIDPNIKFGKQKAFGPAISEELVNELALKLNNLKVNKNINEISDNEKYDIVNKIFKPSTLTSTTRNYYPRPTYADLQFEEMPQIQNMTYYNGKEIVEWNLDGFTEYQIFTLCHQMIMYANACIANGNKEREAANMIVIGFSGQLKGWWNNYLNETQRQEILCAVKRDDQGRPLPDRDGNGNPTGNISDALATLIYNIIYHFAGNYHDIYEKNREQLINLKCKTMSDFRWYKDTFLSKLYTLPEPNQDFWKEKYISGLPPLFAEKVRNSLRKEGGGSINYHYLDIGKITQKIQLVGAELCNDLKIKDQLKKQRILGKREMGDFCYQFGFQDPYVYRKRKTHSKPMTKPNDKSKMSFQATKRKPKRIYNKNIRTQDTESKETICYKCGLKGHIANRCFKSKVKKEIQALLDSESEDVKEKLEAILNNIDNDLSSDEEKNAEINCCQDSGCSCCEPDNSEEESDENILVLTSLEEFVLDTFETIQDPEEKRRVLEKFLSRVKTDKDKLKKDIQKSKFLSIDEVFKRLDEQKKKNEQPDLISLFEDQKIMKQDLEEIRKRLYMLESKEGFHMEEKDEPIQEDDHVVGTIQKYMKQKWYTEVMYRFIDGSYFQHITLIDSGADVSCIREGIIPHKYFYKAAHRIRGADGRLLTVEYQIPEIYICISEVCIKTSFLLVKNLKQDVILGTPFLSLIRPFLVTNEDIQFKIMDKQVSLRFSSNTDEILDQLIQTKREQVVNTIYLHDNSFPSYLPKSMDLPGKTSWEDRYLLKATKDFEYICREMASQKSEWLTNMSSWRLPQLPRGHGERFNHNFRVTELQQGLLNLLWQTKNKKEKAHALNGLAYYFKNFVPSDQKITEKRAKIQDIPHHEEMLLDYREEKSRDGQDKLPMEVEQSMATDKNTKVFSDKILISTDPASSMVAFHININNLLQSFPHNKPSSSTKRHDTIPQTPYILHNHPNSFLPQYILRTQPKAPCRSCAYKDSCQKKLKSQNPMSTTYENLQPRLSFKTEQTLSCFGQDILDLVWHKFKERQMKIFLGLQDYFFDLLEGRERNPAIRVIIYMLPLLRLDDQAISDPSYRFLVLKAEINLQRFRNLPTYNHEEISLQTIIDHGLVNSIYATLDQILQSDLGNAVKDICRRLGHGRYRIIFSSIPPKFTPPVRPAIHYIYIMNRQFNFQEDGPSKLSDEEEEIYTTIANHENWRLFSEAAEIEEAITTDYEYQLVFQNKITRIFISKFYNQSYEYFKGAGHIIKPDFGNECSKKSYYRSLAQWFQKTEPSEIDTVQSAPMIINEDNE

SEQ ID NO: 135186 - protein, 104 aa, Oryza sativa
  Clone ID: PAT_MRT4530_36886C.1.pep
MNKSVWLMRGLKKKKKKGRPRWMTCGAPRFIFSFWSVFSCCLLHVQFDFFFHGSMVYGFFPVCFESSSLAPVKVGEPISLWCHHLCKKGIDRRVKKSFLLPWLQ

SEQ ID NO: 135187 - protein, 343 aa, Oryza sativa
  Clone ID: PAT_MRT4530_36887C.1.pep
MDGEMFGSGHWGGSFPYASIPKESQFVFDAKASPLQLQLFGSAAVPAVGSTGYYNYIANNHLSAMNQERNTNNDVGHEKQLNLQMSLNYFPVENLDRLARIGNPSAVSTGLRLSYENNEHTSITSGSGNMSSLPIMASFVDEVMAELDKENKEFNCYFGLQVEQLVKCMKDVKQRQMVEFLASLERGVGKKLKEKELEVEAMNRKSKELNEQIRQVALEVQSWQSVALHNQSVANSMKSKLMQMVAHSSNLTREGSGDSEVDNTASSQNVNAVPGVFFQSGLLGINSMADGGLGACRLCRMKEAAVLVMPCRHLCLCADCEKNADVCPVCRFPKSCSVEINMS

SEQ ID NO: 135188 - protein, 54 aa, Oryza sativa
  Clone ID: PAT_MRT4530_36888C.1.pep
HNYHSLSGPCRRPYTSSVDKEPETDMATDTNAQFHLSSQATQPLLGINEHTWCY

SEQ ID NO: 135189 - protein, 61 aa, Oryza sativa
  Clone ID: PAT_MRT4530_36889C.1.pep
DATASSCFCPGSPQRGEIVLFGGSRPRREGSRRRPLLKANSFGHRDAAKGYHTKRQVGRED

SEQ ID NO: 135190 - protein, 96 aa, Oryza sativa
  unsure (1)..(96): unsure at all Xaa locations
  Clone ID: PAT_MRT4530_3688C.1.pep
LXPQHAAACRRRRXPKHAGGXRLRQAXGEGIHEERRGGRRXGGGRARXAXVAGGGGGXRRVSEPFLPDSCIKEEIXTLPFLFXSVFLICLFRFVPV

SEQ ID NO: 135191 - protein, 53 aa, Oryza sativa
  Clone ID: PAT_MRT4530_36890C.1.pep
SGSCLRKASERSHQQKCNTGTRPSLLSICAGCSYNFLDLDLSYIQSSATGHGR

SEQ ID NO: 135192 - protein, 251 aa, Oryza sativa
  unsure (1)..(251): unsure at all Xaa locations
  Clone ID: PAT_MRT4530_36891C.1.pep
SITTVNTDSQLVDLAFQXLIGSIREKFSSQDFESLAHLAQKVSAHEQRFQEAKKVKKVNYVYRYVYDSEEETEDLEISLAEWSMIKKTTMCQWVKYINKEEEYDFDINKANKIFDLLLQEKQIQLLVGHVLPSAEELKKRKFCKWHNTGSHHTNGCKVFRQQIQSAIEQGRIKFDDGKRSMKIDGHPFXPVNMVYAMIDSIRLINKYQKRHDKQQDEEYCQGDKFDPHWSCEFFRFCWNEGMRLLLTVLKS

SEQ ID NO: 135193 - protein, 72 aa, Oryza sativa
  Clone ID: PAT_MRT4530_36892C.1.pep
MWPVRPCYSATARKLAVEVLSEGPIGLAGGRSDRASAAGQTGLMRRSDRPLGVGQTGQGTPVRPAKWPKWPV

SEQ ID NO: 135194 - protein, 155 aa, Oryza sativa
  Clone ID: PAT_MRT4530_36893C.1.pep
MDVHRLGLEGVGPGRWLAPWARAAGMWSRESIIMGSACVAHVYACLAYPGGGGEGERRRTARVGDGAGERGALSNVDYDRLLAPVKASPQPLSREGEEEEGDIAMVAAQSFVSTQDSASDTVVDYSGNEDEFHEPWERRYTATRLQVDVYSKPMS

SEQ ID NO: 135195 - protein, 172 aa, Oryza sativa
  Clone ID: PAT_MRT4530_36894C.1.pep
MDQEERRESSSSPEAREGGGKREGSGGLYSGPFVIGPSYPSFDVIISSEIRCHSSYPSVAVIVDPELSPPQHPLAEVREDKCQQHNLDPTISSMKEPMPLGLLHKLREVVGTRLIELREALYHPYIELIRSELPYEVRKINGYKALTSKVLHHRFIGWYRQGFDGGGWCRRL

SEQ ID NO: 135196 - protein, 107 aa, Oryza sativa
  Clone ID: PAT_MRT4530_36895C.1.pep
PPRARAAPSPPTGPPPAVAVLGPPPLPRPSLKQLLAEAHAALHRRDATHLASTLRDLSASAAMTSDSGEAALPPLPPRHPHPPPPAAAPCAPPPAREREKKEEEYDM

SEQ ID NO: 135197 - protein, 136 aa, Oryza sativa
  unsure (1)..(136): unsure at all Xaa locations
  Clone ID: PAT_MRT4530_36896C.1.pep
FFFFFFFXCFFFFFXGGXXXXXKXXXAXIFLHTNTXRSTSATQLTNSXLFAMXXXXSXXTXSXTXRXDMXXFXPXPNFXDQQQTXQXMXXLDYXRAXPNKTKHLXRASRATXPXGPFIGXKXPFIIPXTSLXQKXR

SEQ ID NO: 135198 - protein, 42 aa, Oryza sativa
  Clone ID: PAT_MRT4530_36897C.1.pep
KFFLCITFWGHYKFPFCPHKFYIIPNSRNSPSLDNSTFFLNI

SEQ ID NO: 135199 - protein, 86 aa, Oryza sativa
  unsure (1)..(86): unsure at all Xaa locations
  Clone ID: PAT_MRT4530_36898C.1.pep
TPPRRRIEXAAPRFGRARSPPPSQSPCAAAEPEGVADPSEGRDLQDSEQGKSSLFLEHVDPNYEIVLFTNKNCXNNEHPTCDYAMP

SEQ ID NO: 135200 - protein, 77 aa, Oryza sativa
  Clone ID: PAT_MRT4530_36899C.1.pep
HRPGTARGKVRKVTGPPFPGLFRPPPVARRRWVLMARHPSVPGRLSHWEWRTKGDGWTHGWAAAAHGTVWSPADSVP

SEQ ID NO: 135201 - protein, 56 aa, Oryza sativa
  Clone ID: PAT_MRT4530_3689C.1.pep
MAAFRWNHWPECTAHGGGRSGRRGEAAAAVGEFRAVNRSMDSRRGYKWKEQMWACL

SEQ ID NO: 135202 - protein, 32 aa, Oryza sativa
  Clone ID: PAT_MRT4530_368C.1.pep
TLKSNVKKWFKHWEYQIKEILLLLFRMLTPLI

SEQ ID NO: 135203 - protein, 122 aa, Oryza sativa
  unsure (1)..(122): unsure at all Xaa locations
  Clone ID: PAT_MRT4530_36900C.1.pep
GLQGWRRRVLGLGEPAHRGKAAAGRGCGGAGVGCGGTRGCSGASGSSSRRASRGCGXGGAGRTAVRAARRAAAAAPAGVGCGGARGCSGARVSRGTATLSGAQAGARAGHGGAGPHHSRCCP

SEQ ID NO: 135204 - protein, 99 aa, Oryza sativa
  Clone ID: PAT_MRT4530_36901C.1.pep
KDLSAACKNEPESTEAKRAVELLYETALISSGYTPDSPAELGGKIYEMMTIALGGRWGRPEESEAATSESNVEVESSEGSATEVVEPSEVRPESDPWKD

SEQ ID NO: 135205 - protein, 352 aa, Oryza sativa
  unsure (1)..(352): unsure at all Xaa locations
  Clone ID: PAT_MRT4530_36902C.1.pep
MASPMLSAATVPLQGGGLSEFSGLRSSSSLPLRRNATSDDFMNAVSFRTHAVGTSGGARRAPTEAKLKVAINGFGRIGRNFLRCWHGRGDSSPLDVIAINDTGGVKQASHLLKYDSTLGIFDADVKPVGDNAISVDGKVIKVVSDRNPSNLPWGELGIDLVIEGTGVFVDRDGAGKHIQAGAKKVLITXPGXSTTHSYTGDQRLLDASHRDLRRARAAALNIVPTSTGAAKAVALVLPNLKGKLNGIALRVPTPNVSVVDLVVQVSKKTLAEEVNQAFRDSAANELKGILEVCDVPLVSVDFRCSDVSCTIDASLSMVMGDDMVKVIAWYDNEWGYSQRVVDLADIVANQWK

SEQ ID NO: 135206 - protein, 81 aa, Oryza sativa
  Clone ID: PAT_MRT4530_36903C.1.pep
EEVNQAFRDSAANELKGILEVFDVPLVSVDFRCSDVSCTIDASLSMVMGDDMVKVIAWYDNEWGYSQRVVDLADIVANQWK

SEQ ID NO: 135207 - protein, 67 aa, Oryza sativa
  Clone ID: PAT_MRT4530_36904C.1.pep
LIWNNPLSFICSIDIYTTSVSVQMFISGEESYTGICCSSSCVTLIRTPAYQLMRPNLVRIFLFWAMR

SEQ ID NO: 135208 - protein, 58 aa, Oryza sativa
  Clone ID: PAT_MRT4530_36905C.1.pep
QPFSAARAASVVFIAASIKSDCWPQPPPPSVPPAPPPPPTPRSCCYLTPLSPSGRLIQ

SEQ ID NO: 135209 - protein, 58 aa, Oryza sativa
  Clone ID: PAT_MRT4530_36906C.1.pep
RSSSRLTLCNLTFLFHEGRGLYMPLLRKRHVANARALVSSRNSSASSATQTAHPARTA

SEQ ID NO: 135210 - protein, 108 aa, Oryza sativa
  unsure (1)..(108): unsure at all Xaa locations
  Clone ID: PAT_MRT4530_36907C.1.pep
CQLYRLPQRKCSIVSGVPGPLFFVHGAKYQEIVNIRLGDGTTRCGQILEVDGEXAVVQVFEDTSGVDNKYTIVQFTGGFWGGAAEGRWWPPTRCFLVPRRSRPLSYPQ

SEQ ID NO: 135211 - protein, 107 aa, Oryza sativa
  Clone ID: PAT_MRT4530_36908C.1.pep
PPPVGLGAPPGVFFEGHHSERPPRQGGPCSSRRRSSWRRAIMRRGGNPPPSTGLGFKMPKQFGGCIRKQGQGHDFYSPPGSPVLIPVFTSTFRMGFGRLTRVKTGGG

SEQ ID NO: 135212 - protein, 123 aa, Oryza sativa
  Clone ID: PAT_MRT4530_36909C.1.pep
GQNQNFFGAGFRFALGIILHGSVGLAGDFAFTCPVSPSPNDRPIVVVVLLQQPQVGARENNFVQFNPAPQKKMERVGPSRGAEGLFLPPVFLKPGGFFPLELFYCPCLTFSKPIVRTRGLGLP

SEQ ID NO: 135213 - protein, 295 aa, Oryza sativa
  Clone ID: PAT_MRT4530_3690C.1.pep
MKFGKSLSSQIVETLPEWRDKFLSYKDLKKRLKLIGGGGGGEERQAKRARVAADGGEEEAAAAAMTPEEAGFMRLLEAELDKFNSFFVEKEEEYIIRQKELQDRVARAAGRESKEELMRVRKEIVDFHGEMVLLENYSALNYTGLVKILKKYDKRTGALIRLPFIQKVLQQPFFTTDLLYKLVKQCEAMLDQLLPSNELSVSSEDGRGDSTNEDKPSNPSSSLVNGGTIPELDEIEYMESMYMKGTVAALRSLKEIRSGSSTVSAFSLPPLQGDSSPEEQQELWNKIPVIEQAAK

SEQ ID NO: 135214 - protein, 148 aa, Oryza sativa
  unsure (1)..(148): unsure at all Xaa locations
  Clone ID: PAT_MRT4530_36910C.1.pep
VSRVICVGRHASYYYLSKVHHQSLNLYRCVIPVLKFANRPFRSSNLFYCVIPVPILADHSFRYSNLFSCVTPVPKLXFEYHLGQIGRDWGDTTEQVGEPKRVICKFRDRDDIVEQCAPKCEKISKIKKSGGGCQPHWRAPPTTSVPTH

SEQ ID NO: 135215 - protein, 587 aa, Oryza sativa
  Clone ID: PAT_MRT4530_36911C.1.pep
MGAMAMVEQEGCVENRQPLAAPSRPVSDGSSYGGGGGGLAQMSPPVSSSANSISGLRRTSGPIRRAKGGWTPEEDETLRKAVEAYKGRNWKKIAECFPYRTEVQCLHRWQKVLNPELIKGPWTQEEDDQIIDLVKKYGPTKWSVIAKALPGRIGKQCRERWHNHLNPEIRKDAWTTEEEQALINAHRIYGNKWAEIAKVLPGRTDNSIKNHWNSSLRKKQDMYNTSNNMVVPKLLVHDKFKDKPKLMAMEGHLDLNKAPIINSKDQPGTAHRSNCSGFLSRSSLPTAQPLTSREASVVDGSAVTLVAQALESDSVRGKGLEIDSVHEKGLEVNSAPDHTGNSWTIQLEAAPSKGEAELSLKNEARSLGPLCYQIPNMEDVVPVSSSLFSDHLTGNHTSEHCGDDILSPAGCTTPPPTKGKLTSQLSVDSILKSAANSFPGTPSILKRRKRDKSTPVSASEMKISGSNTDRFYTPMGMEPATATPESFKTTSFLSLGSLDGSVKSFDVSPQYRARSKRMALTKTVEKQLDFSSDGLDTCGSEILNSSCNNSQSTLSITEAPKLKEKEHAVQLENGTKNFAHTTNLDVT

SEQ ID NO: 135216 - protein, 50 aa, Oryza sativa
  Clone ID: PAT_MRT4530_36912C.1.pep
TTKVKIVRSGKIEIYATTCFMTYLAKQYALAYSTLNVLLHLGCREVKKVY

SEQ ID NO: 135217 - protein, 140 aa, Oryza sativa
  Clone ID: PAT_MRT4530_36913C.1.pep
MKKKKKKATTTTQAEIVESTPSVAVSCRVARGAQQRSGISTQIWGLPDSSGMQPRRVCTSHTHKLLLPHVTRVVHRPAAKPNAPTRTHPHPADDVHALVPKEKWAPKSGHPLPGGAHVLTPTSSGHVDHWRVRRRRIEDE

SEQ ID NO: 135218 - protein, 34 aa, Oryza sativa
  Clone ID: PAT_MRT4530_36914C.1.pep
TLQPWHLERDYVRVVMVWNLVVPYESRSSSNIPK

SEQ ID NO: 135219 - protein, 240 aa, Oryza sativa
  Clone ID: PAT_MRT4530_36915C.1.pep
MPSPLVLLLQCFGDVALTDLLVGLALLLSCLQSRRRWLDARSKQQPAPLESERFEVGMDSVLLGAYELGFAALYPPLDSGLVGPTAMALMKEAERLDVPFQFNPVVSRLDALDVESLRVKTGEESGLSPSKSRADASPKVMVVTKQEASHNAALLTERFVEALNYYAALFDGLEEWHERLERWVGRLEGAGFGRIPLSYYALLQARRVAQGLGCDGFKVREEKGNLFLFFVSTWRGRRFD

SEQ ID NO: 135220 - protein, 81 aa, Oryza sativa
  unsure (1)..(81): unsure at all Xaa locations
  Clone ID: PAT_MRT4530_36916C.1.pep
AERERGITIDIALWKXFETTKXYYCTVXDXPXAPLTXIKNHDHGYXPGLTXPVLIIDXTTGGFXAGISKDGQTREHGLLAF

SEQ ID NO: 135221 - protein, 476 aa, Oryza sativa
  unsure (1)..(476): unsure at all Xaa locations
  Clone ID: PAT_MRT4530_36917C.1.pep
MVQDEGSSSSVTSSPLHNFSNMPLHPAAAASPTPPWMVRELRSDERGLCLIHLLLNCAAAAAAGRLDAANAALEHIASLAAPDGDAMQRVAAAFAEALARRALRAWPGLCRALLLPRASPTPAEVAAARRHFLDLCPFLRLAGAAANQSILEAMESEKIVHVIDLGGADATQWLELLHLLAARPEGPPHLRLTSVHEHKELLTQTAMALTKEAERLDVPFQFNPVVSRLDALDVESLRVKTGEALAICSSLQLHCLLASDDDAAAVAGGDKERRSPESGLSPSTSRADAFLGALWGLSPKVMVVAEQEASHNAAGLTERFVEALNYYAALFDCLEVGAARGSVERARVERWLLGEEIKNIVACDGGERRERHERLEXRWARRLEGAGFGRVPLSYYALLQARRVAQGLGCDGFKNSTLGVAISTCRKKRPRSSSPCRKFHGIGSRWRGVSKFHQTSAKVGSSNLKSVPALLSTVTA

SEQ ID NO: 135222 - protein, 104 aa, Oryza sativa
  Clone ID: PAT_MRT4530_36918C.1.pep
MRAADDDDDGEAAAGSSVRTADVNDETASGSGVQDGEPAAAASGRGGDWASRALGARRGRAATRPGGELGAVAAGRVGRGGEPGASAAQMTTSTRRTVDVKHEA

SEQ ID NO: 135223 - protein, 116 aa, Oryza sativa
  Clone ID: PAT_MRT4530_36919C.1.pep
KSQEASFCRIGETTSQQDISRARLWFFEGKKKILLYSERSHFYHRYKIRGAHHLIIYSLPGRKEFYPELVNMLSESENRKCTVFFSRLDLLKLERIVGTFAAQRLVSSDKSIFVFR

SEQ ID NO: 135224 - protein, 120 aa, Oryza sativa
  Clone ID: PAT_MRT4530_3691C.1.pep
MDAGNNAYAAAIFAIVVLVTATVYILAAAVPAVYVLGDSLADVGNNNHLLTLLKADLPHNGIDYPGGKATGRFSNGKNFPDFLGALSSQGANRRKYGGSLCLKGTKNHRRRKVVSVARRG

SEQ ID NO: 135225 - protein, 120 aa, Oryza sativa
  Clone ID: PAT_MRT4530_36920C.1.pep
LDSHAMPPPLLAAAAAPFANSGDCHLFFPSLHHVLSAAGAGGDWSGRGSSGRDGNERLRAVGTLRPPPLGRHGWCVLLLFSPSGSRQSGARPPPPPRSLDSSVGVWGPRIRLILEVPIGY

SEQ ID NO: 135226 - protein, 128 aa, Oryza sativa
  Clone ID: PAT_MRT4530_36921C.1.pep
PPPRISRRAALGVRPRRQRLLQRRPGLPCRRQAAGERVVGVGVRAGGGGRRQLGVGEEGRPEHGRPRAVPGAPGQPRHGRRAAGRGPRQRVRLLRPQLRRRHVGGGGAASSRGSPVVERRRRRLHHII

SEQ ID NO: 135227 - protein, 173 aa, Oryza sativa
  Clone ID: PAT_MRT4530_36923C.1.pep
MQIRGTRPSSPASLCRSLPCGPGELYAEADVWLPITPSRWTGRHAQPCRALHEPRGQFLEIAIEVCVELLGVHTWASTTPSHAKVYRALKAMAAVSIGMHEEDNEAAGKPRFSTAHDAGAQASRKQRQRRQKPTKQRPSVSLQLWSAGGPRGAVDSPTFRVGQGGPASLVDLT

SEQ ID NO: 135228 - protein, 101 aa, Oryza sativa
  unsure (1)..(101): unsure at all Xaa locations
  Clone ID: PAT_MRT4530_36924C.1.pep
FGSRSAHTLNQISPKSTRRHLRFKMQIFEKTLTGKTITLEAESSDTIDNVKAKIQDKEGRRPDHPLGGFHAGKQLEDGRTLADYNIQXQSTLHLALRHRGG

SEQ ID NO: 135229 - protein, 166 aa, Oryza sativa
  unsure (1)..(166): unsure at all Xaa locations
  Clone ID: PAT_MRT4530_36925C.1.pep
NRPAADGPRLAQAQLRAAGHTVNEHRLVMVKVAALAPPAARVATRTTMTSTAEEADISMYPAGGGCIRRWKGTRAVTVLLLPPPPLGLGVXGSESSRIPPSAXSDVAVLADSDLPARTPLRSPTAYAALSAALRSEGRSSPAAPPTRVVCCEREGKGKKREKGEER

SEQ ID NO: 135230 - protein, 132 aa, Oryza sativa
  Clone ID: PAT_MRT4530_36926C.1.pep
MDCSLGRFRSHFPDPFAGSNQSGDCSTRPCCKVPCQVGADGLNLAVTPQAAPQLREVERQVREIAGRWRLGSEKELGGLSSARSGGRGGQATAAAYKAVVAVGRGIDGGRATDSMGLRTVIEDPFSRSARFV

SEQ ID NO: 135231 - protein, 540 aa, Oryza sativa
  Clone ID: PAT_MRT4530_36927C.1.pep
MAAAVGRARGAASLAAAVRVAAATARPASSVAAAAGLGFAGLVVQGEDTPFGSVWWWAYAGISCFLVLFAGIMSGLTLGLMSLGLVELEILQRSGTDAEKAQAAAILPVVQKQHQLLVTLLLCNACAMEALPIFLDRIFHPVVAVILSVTFVLAFGEVIPQAICTRYGLAVGANFVWLVRILMIICYPISYPIGKLLDCALGHNESALFRRAQLKALVSIHSKEVISQFNAFLPLQAGKGGELTHDETTIISGALDLTEKTAEEAMTPIESTFSLDVDSKLDWEAIGKILARGHSRVPVYSGNPRNIIGLLLVKSLLTVRAETETPVSAVSIRRIPRVPADMPLYDILNEFQKGSSHMAAVVKAKPKIVPLPDKTEPNREVSGAPQLTAPLLSNNEERVESLVVDIEKPQSRQVNGNKPCSMQQNEMPYAMSRSSEDIDDGEVIGIITLEDVFEELLQEEIVDETDEYVDVHKRIRVAAAAAASSVARAPSIRRLTGQKGTGTQNRQGQPTGILKKPTEGDSNPSKHQVNLVEPLLENKR

SEQ ID NO: 135232 - protein, 229 aa, Oryza sativa
  unsure (1)..(229): unsure at all Xaa locations
  Clone ID: PAT_MRT4530_36928C.1.pep
MGGSAAAGNHGRXGEELRLAWAGAEETAGGGWAQGWRRAGAEEAAGGGRGAEAGDGRGRRRQRAAGGREASDGQGRRRQRAXAGGGRGAEVSRAPVSGEEPRLAVAACRGRGGGXGGPRAPTTTRRSPPPTARPRSPGRPSXSSXACVVLGLPPPPFLVLHVLDFPLTAPTLLRRLRLLLRTNVLSADIHAVRATLCAVLADRPRRPLIPAPSSLTARAHRLSSLCALH

SEQ ID NO: 135233 - protein, 145 aa, Oryza sativa
  Clone ID: PAT_MRT4530_36929C.1.pep
TARSRGEAPPRRRRRRPCPRTPERRTAPTGAPPARRGTARRTPTAPPTPAPAPPRRTAAGTTASPASSPPPPPPPCRCCCCWDSVPGRATRPRRWPSPRSRSPPPASPPAPPPSPRRWRRGTATTTTTCPRRRRRRRALTCRAPG

SEQ ID NO: 135234 - protein, 53 aa, Oryza sativa
  Clone ID: PAT_MRT4530_3692C.1.pep
FFFFFFLGVYDPSRYTHHQSIVYVHASAGYIHKGTRSFILHDLSRYTSSETCH

SEQ ID NO: 135235 - protein, 206 aa, Oryza sativa
  Clone ID: PAT_MRT4530_36930C.1.pep
SGSPGCRLVFPNTQHCFSYWHILKNAQSHLGTVNTSQTFQNMFIKCMQGPNSETELEESWATMLNEYKLQENSWLSDLYRSRNKWCSAFNKDTFDGGINSSQWGEVSNNTFTGISDESTPLTRFALLLEKVFKGLRRNESEEDFRCSQTAPVRAIKHSTVLKQAAESYTHKIYKLFEAEFLDGCGATSCHESSCGGNLLRFEITMQ

SEQ ID NO: 135236 - protein, 70 aa, Oryza sativa
  Clone ID: PAT_MRT4530_36931C.1.pep
PRRRESKRRSRAPPSLRLAPPLPSWSSPHPTCSPEKRKKLFPPELPFRAPGSPLGFGARSFGVAPEPVAL

SEQ ID NO: 135237 - protein, 91 aa, Oryza sativa
  Clone ID: PAT_MRT4530_36932C.1.pep
MSPKSEGGGTRKRAAQGCRKRSSDTGSTKRARGRTESSAKHGGGKRRRTEGGDKSAQGSTDKSKAHGGGKRSAWSTGRDKSARGRRGQCAA

SEQ ID NO: 135238 - protein, 95 aa, Oryza sativa
  Clone ID: PAT_MRT4530_36933C.1.pep
MAATVAATAGTVLLLLFVINVVSVVAVAARPLEGDGWLESGIGMVTEVLRAAKSGPHATPPRALSLTTIDIAVLLHEAPTPCPAPAMASLPLSSC

SEQ ID NO: 135239 - protein, 108 aa, Oryza sativa
  unsure (1)..(108): unsure at all Xaa locations
  Clone ID: PAT_MRT4530_36934C.1.pep
PTRSAVRVAIFGAQVIWSEMMLRDMQCQREVHDIPMDACRXVLDWPLTDQERXQSMIRRHGALVLRMLCCHELHDVSLECXCSVIRRMVMIYDESMPMPLVQGWSLSS

SEQ ID NO: 135240 - protein, 78 aa, Oryza sativa
  Clone ID: PAT_MRT4530_36935C.1.pep
PKKLQNKRIVLQNFVPLADQFFLFPLVKKNFFIKGGCLPFLLSIKSLLKNGKEPFLVDSQIGVLSLNCSYIINPWFLI

SEQ ID NO: 135241 - protein, 72 aa, Oryza sativa
  Clone ID: PAT_MRT4530_36936C.1.pep
GRGNVDIMTGGNITNANGNVDCSAIQPSQPCYQPDTLASHASYAFNSYYQQNGANDVACDFGGTGVRTTKDP

SEQ ID NO: 135242 - protein, 531 aa, Oryza sativa
  unsure (1)..(531): unsure at all Xaa locations
  Clone ID: PAT_MRT4530_36937C.1.pep
MAHVAFVALLFLLLVGHCLGGKVGICYGRNADDLPAPDKVVQLIQQQSLKYVRIYDTNIDVIKAFANTGVELMVGVPNSDLLPFAQYQSNVDTWLKNSILPYYPATMITYITVGAEVTESPVNVSALVVPAMRNVHTALKKAGLHKKITISSTHSLGILSRSFPPSAGAFNSSYAYFLKPMLEFLVENQAPFMVDLYPYYAYQNSPSNVSLNYALFSPQSQDVIDPNTGLVYTNMFDAQIDSIFFALMALNFKTLKIMVTETGWPNKGAAKETGATPDNAQTYNTNLIRHVVNDSGTPAKPGEEIDVYIFSLFNENRKPGIESERNWGLFFPDQSSIYSLDWTGRGNVDIMTGGNITNANGTWCVASANASETDLQNGLNWACGPGNVDCSAIQPSQPCYQPDTLASHASYAFNSYYQQNGANDVACDFGGTGVRTTKDPSYDTCVYMAAGYGKAFSYLCSIFXEAFFHHLLLQQKLLPVVLHATHYDCCMHCVICSERDLAEAFCHGGWNGNRLILETSTGLFVIVSGVL

SEQ ID NO: 135243 - protein, 91 aa, Oryza sativa
  unsure (1)..(91): unsure at all Xaa locations
  Clone ID: PAT_MRT4530_36938C.1.pep
SPRLASSSKREFEAAAPPLPWRRRLGFSAGAGSSWRRRRARGPAXGFPRPALAGRGRRLTNXGGRXHAKEKRGIMQPRGPVYDAPQQRSAG

SEQ ID NO: 135244 - protein, 140 aa, Oryza sativa
  Clone ID: PAT_MRT4530_36939C.1.pep
MAPDGGGEEKDRKGRIGGGRGGSRRGGRSISARAAFCAGRRPHRFICQPCPCRFLRPPLPAAISVLAATRAALYAGRRPPAAPLSLVDLAPSMRWGIEEERGEGEEEVEVVLTCGSHVGPTLTQLPRRIKPGSMPLKDPE

SEQ ID NO: 135245 - protein, 117 aa, Oryza sativa
  Clone ID: PAT_MRT4530_3693C.1.pep
MSAGGKHLPPPFRPLPSLPLPYDCLLGCASLGNMFPRQRRRSPPTRAPAPLLSLFSVFGWKKKQKERGYGRKKKRKRKEKNLPDRVYFILDGNMWHFEHRIIRLPISDLFALEQESI

SEQ ID NO: 135246 - protein, 92 aa, Oryza sativa
  Clone ID: PAT_MRT4530_36940C.1.pep
HANSFVFSCVNARLVNLEGKEKSNLGIILHVLSPPITVVVRHHNRCRSRRSSVISDEVDACTALKMKHGKRNLGPVNIPGHSISVEKKKKKK

SEQ ID NO: 135247 - protein, 117 aa, Oryza sativa
  Clone ID: PAT_MRT4530_36941C.1.pep
MAPLPQLSLPPPPLVCAFPLLQPLLFCLNPAHSSTQPPPTPPGLIHSHAPSLLGLPPAATTLLLVVRHPLSTLPVVCRPEEDGKSEEERWEEEGKQLAAGMWVSPRQPKSTTISSRN

SEQ ID NO: 135248 - protein, 44 aa, Oryza sativa
  Clone ID: PAT_MRT4530_36942C.1.pep
SLCVQVKGAIPSMPDRKSVMDLLESVQPPFILNNGARGQIRRIQ

SEQ ID NO: 135249 - protein, 95 aa, Oryza sativa
  Clone ID: PAT_MRT4530_36943C.1.pep
MGVSNQRGLLLPLPRPLPAPARSVHRAARRPRCDVVVLLSSAQLVVAVFARGREGLELTDVQVDSWPGYSIPGEDSCKHKRTDGVALQSEVFAYT

SEQ ID NO: 135250 - protein, 115 aa, Oryza sativa
  Clone ID: PAT_MRT4530_36944C.1.pep
NIPLPTKNILGGGGKTQGWPKKIKKRRQKLRKNKEKKWRGALPKKLQKTIKKGANNGQKTPANVGRARNYGPVPAGKQALLKGGVIIACQKTSINSLLKKRGIPYKKQKKYYPEA

SEQ ID NO: 135251 - protein, 262 aa, Oryza sativa
  unsure (1)..(262): unsure at all Xaa locations
  Clone ID: PAT_MRT4530_36945C.1.pep
PLSSCSLGGSRDRPPFAVVPRSPCRRSPSPPRSGRTPSVGICNMAYRFHPRPAXGDDISTFRPTVGENDPTFGHMCTVMRGMDRMHSDLHKASKALNDGKLVRIIALMDEIARLKKENAQLKGLPAPGGVRIRTTPRKSTTAPVRIKLAPRNPPPPAIPAAPAAPPVPPAAAPTPAPVPVSAPASALSFAPASATRGPASGNGGWLPAIPSGSRDQSSSSSSGSELGSSETYLPDSRSRSEGPGDKQENAFNSTDRRSRSEH

SEQ ID NO: 135252 - protein, 35 aa, Oryza sativa
  Clone ID: PAT_MRT4530_36946C.1.pep
GTIGTLRVINEACQFSSPLKCTQSTTEITLVLSHY

SEQ ID NO: 135253 - protein, 437 aa, Oryza sativa
  Clone ID: PAT_MRT4530_36947C.1.pep
RPLRISRRHAAPDPPLRGGPLAAGEVPRAEAVVPDVAGRERRRQRFCRGSSARGMGMKAAPAGAVRAAEDDWSAARGWRRPHPARARRFSAQRPAAEDVVKEAKYLRETNERLTRQIEQLHADHCAHVEELVYLKWVNACLRYELRTHDGDDGAGRISARDLSKSMSFRSSEKAKELMLKYGTHGLDGFDPSIFSPLHESVYGDGDGDDFEQRRPNGDVVVDEAPRSPSTAVAMAAAAAGAESPSRRGNKLKFLGNIKKLLPTSKKGHGRGDRRSSRKQSAAAEAEPPRDEHLEKALQWLSSHDVLDDDDSYESTPLSSCERTPLSSVTTAGSTHARSTGGAAGETAAAAASRLLEAETARARSDVGASSYGREAPSRYHALRPYHPGAGAGNVGGDGPRASPEKRELRRRSEELRSPASMFAGARDNRMHQLQSNA

SEQ ID NO: 135254 - protein, 77 aa, Oryza sativa
  Clone ID: PAT_MRT4530_36948C.1.pep
KNPLFSLLFRLGTVELIDRRIRVDYLRSQVTGGGHYFSFLVYIFLNYFYFYAHRHHTSPSLSVSSSIGFIQVSSPPQ

SEQ ID NO: 135255 - protein, 390 aa, Oryza sativa
  Clone ID: PAT_MRT4530_36949C.1.pep
MGNRLCCHDAADDEKPAAAAVSGGGGGGGREEYRRWPIAAESGGGETGRVLDMPRLRVFTLAELRAVTRGFKPEMVLGEGGFGTVYKGWADERTLNPAKSSAGVVVAVKKLNPESVQGLHEWQSEVNFLGRLVHPNLVKLLGYCKEERELLLVYEFMPKGSLENHLFRRGAFDPLSWSLRLKIAIGAARGLAFLHSSERQIIYRDFKASNILLDVDYTPKLSDFGLAKNGPVAGRSHVTTRIIGTYGYAAPEYVATGHLYVKSDVYCFGVVLLELLTGLRAHDLNRPSHQQNLVEWARPYIAGGKKLAGLMDPRLAGDYPAKAAARAAKLADKCLCGDPKSRPSMDDVVVALQEIESVGTARPAAAKLPPRAPPPAAHRSPHRNPYSKPR

SEQ ID NO: 135256 - protein, 123 aa, Oryza sativa
  Clone ID: PAT_MRT4530_3694C.1.pep
TATATSQIGRAKLLPSPFRPPRLFPSLADWFPGCASLGNIFFRRRRSLSTTGAPAPLLSLSSVFGWKKKQKERGYGRKKKRKRKEKNLPDRVYFILDGNLWYFEHRIIRLPISDLFALEQGKL

SEQ ID NO: 135257 - protein, 184 aa, Oryza sativa
  unsure (1)..(184): unsure at all Xaa locations
  Clone ID: PAT_MRT4530_36950C.1.pep
MSGRGLMKQDLSKLDVTKLHPLSPEVISRQATINIGTIGHVAHGKSTVVKAISGVQTVRFKNELERNITIKLGYANAKIYKCEDEKCPRPMCYKAYGSGKEDSPHCDVPGFENTRMKLLRHVSFVDCPGHDILMATMLNGAAIMDGALLLIAANESCPXPQTSEHLAAGXIMRLQHIIILQNRM

SEQ ID NO: 135258 - protein, 573 aa, Oryza sativa
  Clone ID: PAT_MRT4530_36951C.1.pep
MPPPPPPPPPPAAPDPPQLHGVVIITLPPPDQPSKGKTITAFTYTDDDVTPPPPTPPPTHLPTRALVPAGAGAGAEARRSRRGFSPRRAAAMVLVLGALAVAAYYSFYSDVAVQFLGMQEEAQNERNETKSFLLPLYPKARQGRALREFGDIKLAARRFDNDGGGGVGRKSRNKLEVKKAAAAGTNSTALLPIKGNVFPDGQYYTSIFVGNPPRPYFLDVDTGSDLTWIQCDAPCTNCAKGPHPLYKPAKEKIVPPKDLLCQELQGNQNYCETCKQCDYEIEYADRSSSMGVLARDDMHIITTNGGREKLDFVFGCAYDQQGQLLASPAKTDGILGLSSAGISLPSQLANQGIISNVFGHCITRDPNGGGYMFLGDDYVPRWGMTSTPIRSAPDNLFHTEAQKVYYGDQQLSMRGASGNSVQVIFDSGSSYTYLPDEIYKNLIAAIKYAYPNFVQDSSDRTLPLCLATDFPVRYLEDVKQLFKPLNLHFGKRWFVMPRTFTILPDNYLIISDKGNVCLGFLNGKDIDHGSTVIVGDNALRGKLVVYDNQQRQIGWTNSDCTKPQTQKGFPFFL

SEQ ID NO: 135259 - protein, 574 aa, Oryza sativa
  unsure (1)..(574): unsure at all Xaa locations
  Clone ID: PAT_MRT4530_36952C.1.pep
MSRRGLMEQDLSKLDVTKLHPLSPEVISRQATINIGTIGHVAHGKSTVVKAISGVQTVRFKNELERNITIKLGYANAKIYKCEDEKCPRPMCYKAYGSGKEDSPHCDVPGFLMKQDLSKLDVTKLHPLSPEVISRQATINIGTIGHVAHGKSTVVKAISGVQTVRFKNELERNITIKLGYANAKIYKCEDEKCPRPMCYKAYGSGKEDSPHCDVPGFENTRMKLLRHVSFVDCPGHDILMATMLNGAAIMDGALLLIAANESCPQPQTSEHLAAVEIMRLQHIIILQNKIDLIQEGAAMNQHEAIPNLFQGLFRSMXAECAPVVPISAQLKYNIDVICEYIVKKIPIPERNFTSPPNMIVIRSFDVNKPGSEVDEIRGGVAGGSILRGVLRVNQNIEVRLGIVMKDESGNIKCTPIYSRIVSLYAEQNELQFAVPGGLIGVGTTMDPTLTRADRLVGQVLGEVGSLPDVYVELEINFFLLRRLLGVRTKGTEKAGKVSKLTKGEILMLNIGSMSTGARVVAVKNDLAKLQLTAPVCTSKGEKVALSRRVEKHWRLIGWGQIQAGTTLEVPPCPL

SEQ ID NO: 135260 - protein, 66 aa, Oryza sativa
  unsure (1)..(66): unsure at all Xaa locations
  Clone ID: PAT_MRT4530_36953C.1.pep
TSPPNXNLSVIGAASCGDVCARKGGKGXGKGGAKRHSKVPXRHHSWDXQAGXPDXGEEGRRGAHXR

SEQ ID NO: 135261 - protein, 100 aa, Oryza sativa
  unsure (1)..(100): unsure at all Xaa locations
  Clone ID: PAT_MRT4530_36954C.1.pep
GGGGXXXXXXXXDNRTGRXKSPTSKKGDPGPNQQHRYNLQGGRRENKRQPRGPTSINRGGGPRRTPATVYSQHRQSKPGSPARRPLENQGQAKGNPPGAG

SEQ ID NO: 135262 - protein, 34 aa, Oryza sativa
  Clone ID: PAT_MRT4530_36955C.1.pep
MASGDAGRWIMDGRLRFHGFEEDRFFPRINTDGD

SEQ ID NO: 135263 - protein, 215 aa, Oryza sativa
  Clone ID: PAT_MRT4530_36956C.1.pep
MEVAEGRTVAAAAAGGGGLGGGARTEAEGLACPRCESTNTKFCYYNNYNLAQPRHFCKACRRYWTRGGALRNVPVGGGTRNKVAPAPCTGRRKRAAHAAHAAAPPPTTTASSAPLPLMPPAVAYELPFLPPPPPLPLAAVDPDRRLLDLGGSFTSLLAPAQLHNGHFTTGFLLGTMSSAPPPPPPPATSTPSPAPAAHPPVSDSIWAMGWPHLSI

SEQ ID NO: 135264 - protein, 38 aa, Oryza sativa
  Clone ID: PAT_MRT4530_36957C.1.pep
NRSPNIPKLFFLKKNFFSTVLFFLSKKIFFKTPPFLVL

SEQ ID NO: 135265 - protein, 171 aa, Oryza sativa
  Clone ID: PAT_MRT4530_36958C.1.pep
MRVRFKGVGASPGFKESVSGAGWNGGAPRRAGDERRPPGADGNGSEAMPIDGGARKWFGEVLGSSRTVFARVVDELGPDDARNMAMAWMCWAAKAVDQTAEFSSRECGLARSGSESWQPCSELAAMRRQSMTVAEVELDSGNREESRDGFKVDSDIRGIGTSIWRRFKGGD

SEQ ID NO: 135266 - protein, 71 aa, Oryza sativa
  Clone ID: PAT_MRT4530_36959C.1.pep
FQAWSKGLKIGLFYFRTRAVVDPIKFPVDPPLLRANGKTAPKVPKKKAVELKMAQMVCSLTTREECLGCGS

SEQ ID NO: 135267 - protein, 448 aa, Oryza sativa
  Clone ID: PAT_MRT4530_3695C.1.pep
MWVAERVVGERRMREIQRFARNAKLTVVCLLLTVVVLRGTVGAGKFGTPQQDLIELRHRFISHPHRALAEHHDALSRGGGSSSSSGRAAQRDDEPDPPPRTLRDPPYTLGPKISDWDEQRAAWHRRHPETPPFVNDVKPRVLLVTGSSPKPCENPVGDHYLLKSIKNKMDYCRVHGLEIFYNMALLDAEMAGFWAKLPLLRALLLAHPEIEFLWWMDSDAMFSDMAFELPWERYGPYNLIMHGWDEMVYDDKNWIGLNTGSFLLRNCQWSLDFLDTWAPMGPKGPVRIEAGKVLTKYLKDRPVFEADDQSAMVYILATEREKWGDKVYLENGYYLHGYWGILVDRYEEMLENYHPGLGDHRWPLVTHFVGCKPCGKFGDYPVERCLKQMERAFNFGDNQILQMYGFTHKSLGSRKVKRIRNETSNPLDVKDELGLLHPAFKAMKTTST

SEQ ID NO: 135268 - protein, 45 aa, Oryza sativa
  Clone ID: PAT_MRT4530_36960C.1.pep
VLQLCDCRFMCGCCLLSKWEKDILTCYSTLVLFHGAHADLKDRRQ

SEQ ID NO: 135269 - protein, 393 aa, Oryza sativa
  Clone ID: PAT_MRT4530_36961C.1.pep
MVHHLRRHMISLLLRPAYPHPTAAISPLSSLRRLLLFSTTAAPVSPEPFAVEDYLVATWGLTGAQARKASKKLSHLRSPSKPDAVLAFLSDLGLPPRKIAAVATADPRFLCADVESNLARRVDELGGLGLSRSQIARLVPLALTCFRSSSVGTNLGFWLQIVGSFDKILKALRMNSSLLGSDLEKVVKPNLELLKQCGMSDFATSFPLYTSRLFTANPIYLRDAVARVEELGLDRSSRMFRHGLIAVAFTSKESVARKIQVMEELGFSRDELLMIIRKAPQLVASSEEKIRQAAEFLKRDVGLEGRYIAHRPVLFLYSLERRLLPRHHLLKVLRMKGLLDCELDYYNTAAMSERKFVRKFVDPYKCHIPGLADAYTSSCAGETANGVASLLGV

SEQ ID NO: 135270 - protein, 175 aa, Oryza sativa
  Clone ID: PAT_MRT4530_36962C.1.pep
MAYYEIAPVECPLQQNELYMHLYLRQADRGPNRDQEVILNPKVRPNDFGLTAATAWTISDSLDPSAKIVARAEGFHMQTSYNNTSWYASFNIVFEDDRFKGSMLQVMGTTPAEGQWAISSGTGEFALAHGIIKQKVIQSTPGENVKELHVHAFYTPMNDSVVPGATDGKSWTLGA

SEQ ID NO: 135271 - protein, 793 aa, Oryza sativa
  Clone ID: PAT_MRT4530_36963C.1.pep
MASLRLLAGVLLILMSSAAVGIAGRPAGCQARCGDVDIPYPFGIGGGCFRSAGFEIACNTSNGGLVPTLAAANDTIQVQNLTVFPRPEVKVMLPVAYRCYNSSGNVTEQFYGDVELNKTGVYRISDERNKFVVLGCNTVAWNKHGDSEGKGLYTSLYYAGCVTYCSDSLSAKNGKCAGVGCCHVDIPPELTDNVVTFQQWPRGEQVDFSPCDYAFLVDKEEYQFQRSDLNMDRKQRMPVWLDWAIRDVASCPAPEVETSKKNMPAGYACVSVNSTCVNSTNGLGYYCNCSSGYEGNPYDDDPNKGCKDIDECAHPNKYPCHGVCRNTPGDYECRCHTGYQPSGDGPKKQECSSKFPFPARLAVGITLGLSFLIVVVLFTLMMLQKRKMNKYFKKNGGSVLQKVDNIMIFSKDEVKKILKNNSDIIGEGGFGKVYKGRLKDDTLVAVKTSIEVNEARKEDFTNEVIIQSQMMHNNIIKLLGCCLEVDVPMLVYEFAANGSLKDILHGDANRLVPLSLDLRLDIAVQSAEGLRYMHSSISHTIRHGDIKPANILLTDKFIAKISDFGTSKLLTADKEFTMVVAGSMGYIDPIFYMTGHLTQKSDVYSFGVVLLELISRKPTIYDKNYSLVIEFQKAYDRENSGRALFDKEIAIEEDVLILEEIGRLAMDCLKEKIEERPDMKEVAARLMMLRRSRNLGQENYNRFSKSRLLELCHEGPSAGLAETKNLGNRLRPEASGEGREENHMGESHRVKAVARHYTGLTSQGPHRRASRAETVRQKPRREGTGFAKYQTPP

SEQ ID NO: 135272 - protein, 372 aa, Oryza sativa
  unsure (1)..(372): unsure at all Xaa locations
  Clone ID: PAT_MRT4530_36964C.1.pep
MAFWLIAAGGLLLLLRFAFAADGITGCPDRCGDVDIPYPFGIGPNCSRGDGFDIACNTTNSTGVLVPTLAAARRHAIQVQKLTVFPRPEVKVMLPVAYTCYNSGGNVTGQFDGDVELNNAGVYRISDERNMFVVLGCNTVAWNQHGDSXAKGLYPSLYYAGCVTYCSDSRSAMDGKCAGVGCCHVDIPPELTDNVVSFQQWPRGEQVDFSPCDYAFLVDKEEYRFRRSDLNMDRKQRMPVWLDWAIRDVASCPAPEVETSKKNMPAGYACVSVNSTCVNSTNGLGYYCNCSSGYEGNPYDDDPNKGCKDIDECAHPNKYPCHGVCRNTPGDYECRCHTGYQPSGDGPKKQECSSKFPFPARLAVGICLQHTF

SEQ ID NO: 135273 - protein, 66 aa, Oryza sativa
  Clone ID: PAT_MRT4530_36965C.1.pep
SSRGIQGPGGMKSEPLGFGLFLGPKLVFGAPLLMAETDSPGGNPGLAVGGKQISLNCLGGEGLRGG

SEQ ID NO: 135274 - protein, 257 aa, Oryza sativa
  Clone ID: PAT_MRT4530_36966C.1.pep
MAKDRRCTDRSGYRGRGRDSPALTAVSSGMILRGRLRCLSAVMRDAGSTASPASWAMMTGDEELVGERKEAKFPPPILLSLPHPRLPPRFTPPLLPPRFSRMACNVHGCKLGRLAVSSIACKAGEGVEAWSCRPPDFRAPSAPVVSATVLKGPMPDVVSGATVRDMGPGNDRSVTGLSPVASDWTGDHALTSPLFPAEWRSIADEAPMTRAASVHLNTSSSTAGCLAAVEASVGVPTMPPAAALKRWIRWLQLAAVG

SEQ ID NO: 135275 - protein, 52 aa, Oryza sativa
  Clone ID: PAT_MRT4530_36967C.1.pep
GPSINPPPAPGPKSTPWAKPTPTGGGVETPRGFPLNTHQVPPPPPTKYEWPF

SEQ ID NO: 135276 - protein, 589 aa, Oryza sativa
  Clone ID: PAT_MRT4530_36968C.1.pep
MSALLRETSCGSLLQKLQSVWDEVGESEEDRDKVLFQLDQECLDVYKRKVDQATKSRDLLLQALDYSKTELARLASALGEKSIDISPEKTARTIKEQLTAIAPTLEQLGKKKKERIKELANIQSRIEQIRGEIAGTLEMGQQVALPQINEDDLTVRKLREFQLQLQELEKEKSRRLEKVLEHVGMVHDLCNVLGMDFFRTITQVHSSLDDSIGNEHKNISNETLSKLDRTIGTLNEDKRLRLEKLQELATQLYDLWDLMDTPVEERSLFDHVSCNRTATVEEVMVPGALAVDVIDQAQTEVERLDQLKYSKMKEIAFKKQAILEDIYASTHVVLDTAVAHEKIQALIESGNMEPSELIADMDSQILKAKEEALSRKEILDKVERWISSCEEESWLEDYSRDDNRYNSGRGAHLNLKRAEKARILVSKIPALVETLVAKTRAWEENHGLPFMYDGVSLLAMLDEYVILRQEREEEKKRMREQKRQTEQLLNIDREGPFGTRVNPYRVTSAKKVAGTKPNGGASNGTPSRRLSTGNQLNESKSTGRSAGKDDKKGASKNTATSLNEAAPADKEAADSSTENFDADPVPGST

SEQ ID NO: 135277 - protein, 440 aa, Oryza sativa
  unsure (1)..(440): unsure at all Xaa locations
  Clone ID: PAT_MRT4530_36969C.1.pep
MWHEARKSERKVHDLMDAARRRAQRRAAYLARRRGDPHQSLQVSGARCRVHRDDALYQATEDQQGLIPWNGKQDVLIDRFDGRALLDFIRDSSSRPFRVQEKSEEEEELEEFVNFERYRDLIKHRLSDEAGLQHVSQELEAKAILPFSFEKPQSSQTPASKGTYSQVGYSYKGDGNEESEDLKSDEEDEEEEDEEDEKGFSSDDSSDERMESIAKEFGVKRYNWLVYMDKKAKEEELVWSFWTKFVYSSNSFCLXIPFLSCRSSGGQILEALHSDPASSLSVEQEXKSTKNLSKAPYQHISTTSKLSKGASPGGPXQNRPVHKLKATTEASQRLQGLNTXRNKLNKQIRKDXAAEIAXKKREQERQRQEKLAEVGRYRGRSRSLSRSPXEGDIIAEAVVGVEVQGGTIHDPSLIPVRLLALQGTEAGQGTEYQLHQSPMK

SEQ ID NO: 135278 - protein, 56 aa, Oryza sativa
  Clone ID: PAT_MRT4530_3696C.1.pep
GEYGNDGVDRGSTAPAFFSHWSAMAACTRVGCQGVGRRGRRNTARRRLSVASKSMV

SEQ ID NO: 135279 - protein, 310 aa, Oryza sativa
  Clone ID: PAT_MRT4530_36970C.1.pep
MEQKPPAVAANNNQLLLMMIMVVVACSNYMISGAGAQPSPGYYPSKTIRSMAFGEGYDNLWGGQHQTLSADQTALTVWMDRSSGSGFKSKRSYRNGYFGASIKVPSGYTAGVNTAFYLSNNELYPGQHDEIDIELLGTVPGEPWTLQTNVYVHGTGDGAIIGREMRFHLWFDPTADFHHYAILWNPDHIVFLVDDVPVRRYPRAAGNTFPDRQMWAYGSIWDASDWATDGGRYKSDYRYQPFVSRYRDLKIAGCEAAAPASCQPVPASPSGATGELSAQQKAAMRWAQQRSMVYYYCQDYSRNHANYPEC

SEQ ID NO: 135280 - protein, 108 aa, Oryza sativa
  unsure (1)..(108): unsure at all Xaa locations
  Clone ID: PAT_MRT4530_36971C.1.pep
MGWKGILGFDHGVVQAPLGPDISGPELAAAVANAGGIGLLRLPDWPAPDRVRDLIRRTRSLTERPFGAAIVLAFPHEENLXVVLEEKLAVLQVYWGEFPRERVDEAHL

SEQ ID NO: 135281 - protein, 74 aa, Oryza sativa
  unsure (1)..(74): unsure at all Xaa locations
  Clone ID: PAT_MRT4530_36972C.1.pep
KLTPHLKGIXXCGPLPVLVYFFCLHNTLETSQTNPTNKKGNQSLPIANPDCPYRGFILARLRQPHRQLLYLANR

SEQ ID NO: 135282 - protein, 80 aa, Oryza sativa
  Clone ID: PAT_MRT4530_36973C.1.pep
TNSSNVNMCRVFALPVQIMYLNTKPDPDSHDQTVRLPAPWVRNLRWLALSSQCCQHQRHGGKCARHIHEFALDILNGLES

SEQ ID NO: 135283 - protein, 660 aa, Oryza sativa
  Clone ID: PAT_MRT4530_36974C.1.pep
IPAENGLHAWQCLEDLQNHIDLVLTEVVMPRLSGIGLLSKITSHKICKDIPVIMMSSNDSMGTVFKCLSKGAVDFLVKPIRKNELKNLWQHVWRRCHSSSGSGSESGIRTQKCTKPKVDDEYENNSGSNNDNEDDDDNDEDDDDLSVGHNARDGSDNGSGTQSSWTKRAVEIDSPQQMSPDQPSDLPDSTCAQVIHPTSEICSNRWLPTANKRSGKKHKENNDDSMGKYLEIGAPRNSSMEYQSSPREMSVNPTEKQHETLMPQSKTTRETDSRNTQNEPTTQTVDLISSIARSTDDKQVVRINNAPDCSSKVPDGNDKNRDSLIDMTSEELGLKRLKTTGSATEIHDERNILKRSDLSAFTRYHTTVASNQGGAGFGGSCSPQDNSSEALKTDSNCKVKSNSDAAEIKQGSNGSSNNNDMGSSTKNAITKPSSNRGKVISPSAVKATQHTSAFHPVQRQTSPANVVGKDKVDEGIANGVNVGHPVDVQNSFMQHHHHVHYYVHVMTQQQQQPSIERGSSDAQCGSSNVFDPPIEGHAANYSVNGSFSGGHNGNNGQRGPSTAPNVGRPNMETVNGIVDENGAGGGNGSGSGSGNDLYQNGVCYREAALNKFRQKRKVRNFGKKVRYQSRKRLAEQRPRIRGQFVRQSGQEDQAGQDEDR

SEQ ID NO: 135284 - protein, 120 aa, Oryza sativa
  unsure (1)..(120): unsure at all Xaa locations
  Clone ID: PAT_MRT4530_36975C.1.pep
TWLPLSVASLALKPSASPLLERSKLRGKGTMARPSLIIVAKKAKKIQTSQPYGPAGGVVFKEGVDASGRVAKPXIYTPEEWSSTGDVYVGGKAGLLLWAITLAGILVGGAILVYNTSALA

SEQ ID NO: 135285 - protein, 142 aa, Oryza sativa
  Clone ID: PAT_MRT4530_36976C.1.pep
MQHHHHVHYYVHVMTQQQQQPSIERGSSDAQCGSSNVFDPPIEGHAANYSVNGSFSGGHNGNNGQRGPSTAPNVGRPNMETVNGIVDENGAGGGNGSGSGSGNDLYQNGVCYREAALNKFRQKRKVRNFGKKVRYQSRKEVG

SEQ ID NO: 135286 - protein, 136 aa, Oryza sativa
  Clone ID: PAT_MRT4530_36977C.1.pep
MRGGAVDTALHQCIASQEPKQSSRFRFSSHTRAHGAHTHVAMVKASRFKNLIISGFLSSHRIGTDRHQTVRGDALHRNTSISCLALQKKLIDHTSSEPWKADIGLGVLGNDEAVKLTTKEAFASKVKKEEGNATCL

SEQ ID NO: 135287 - protein, 447 aa, Oryza sativa
  Clone ID: PAT_MRT4530_36978C.1.pep
MVNVECDLHMTSGEGEGSYAKYSRRQGIDPDSKDLVGPSFSEFRRAIGARHGSQPSPPVHHDCVRSDSKVMGSTYRSCCPAFHAFCPWVNNTPIKVSNIRTIVTNETKPVIEKATIEVYKALLPKTMVIADLGCSTGPNTMLFMSNVINMIAHHCSKLDEHDHVELQFILNDLPGNDFNQLFRSLENIKNSTTTGHKGDLPPSYYISGLPKSYYSRLFPRQSVHLFHSSYSLHWLSQVPEGLEASGKSLLNQDVYISSTTSPLVVKLFQEQFQKDFSLFLQLRHEELVNGGRMVLIFLGRKDEDVYKGDLNHMYGFVTKALESLVGKGLLSKEKLESFNLPTYGPSVDKVKEIVTKSHMFDLDHIKLFEANWDPYDDSEGDVVLDGANSSLNISNLIRSVLESLIASHFGGNILDALFQEFRSLVAQHLKREKTKFALIVMSLKKIY

SEQ ID NO: 135288 - protein, 177 aa, Oryza sativa
  unsure (1)..(177): unsure at all Xaa locations
  Clone ID: PAT_MRT4530_36979C.1.pep
RLGKEHQVQIVRWERFLPVKTLRVLLVENDDSTRQVVSALLRKCCYEVIPAENGLHAWQCLEDLQNHIDLVLTEVVMPRLPGIGLLSKITSHKICKDIPVIMMSSNDSMGTVFKXLPKGAGDFLVKPIRKNELNNLWQHVWRQRHSFLWQMGCERCVSLTPISCYPKPKKSGIDLLL

SEQ ID NO: 135289 - protein, 59 aa, Oryza sativa
  unsure (1)..(59): unsure at all Xaa locations
  Clone ID: PAT_MRT4530_3697C.1.pep
XYFKVSNTNIQLHYQYIIMCYPFNLYNYIYNHFFINPILLTTKCLIYFLIQNIYFILYT

SEQ ID NO: 135290 - protein, 220 aa, Oryza sativa
  Clone ID: PAT_MRT4530_36980C.1.pep
MSAAAGGYRAEDDYDYLFKVVLIGDSGVGKSNLLSRFTKNEFSLESKSTIGVEFATRSLQVDGKVIKAQIWDTAGQERYRAITSAYYRGAVGALLVYDVTRRATFDNVGRWLRELRDHTDPSIVCMLIGNKSDLRHLVAVSTEDGKEFAEAESMYFMETSALDATNVDNAFAEVLTQIYQIVNKKPVEAPEDGSAGPGKGEKINVKDDVSAMKRVGCCSN

SEQ ID NO: 135291 - protein, 166 aa, Oryza sativa
  Clone ID: PAT_MRT4530_36981C.1.pep
SGRIRRGLGWSHRRRSSRRRSRRAPRRSRHRRAPRLPSPRPPSPSRRSRHRRAPRRPPPFVAAAPPSSRGAHSTPSPPAAPPGHLDGRGTCSSPPSPRRPQPPPAAWRSLLLLLPRLALALDAAVAVAVAAVQSYRSRRCCRRRLGGGEEERKVLDLEGRGRKEPR

SEQ ID NO: 135292 - protein, 43 aa, Oryza sativa
  Clone ID: PAT_MRT4530_36982C.1.pep
RVIDGIRVVIVACTGHIIGRPVVSGERTDYSFNYYYHIECTVN

SEQ ID NO: 135293 - protein, 98 aa, Oryza sativa
  unsure (1)..(98): unsure at all Xaa locations
  Clone ID: PAT_MRT4530_36983C.1.pep
IAATARSPSPELHXPNPRAIGFASTWFFLSPRAGGKLTPSRAIVIFTEAQFSLKTPGTPELLSLLITLRSERMGTRVHGTVDTVXKHVGFRIISFGTR

SEQ ID NO: 135294 - protein, 79 aa, Oryza sativa
  Clone ID: PAT_MRT4530_36984C.1.pep
MAQLCDDRTTFVFWDAYHTSDATNQVIADRLYADMVSAGAVQGNGNVTTASKALKYRQQINRPLCAGTTPSPIRYDGDE

SEQ ID NO: 135295 - protein, 692 aa, Oryza sativa
  unsure (1)..(692): unsure at all Xaa locations
  Clone ID: PAT_MRT4530_36985C.1.pep
MINFGGVLCAVTLVVLLPFLEAADGKSTDPSEVSALMAIKGSLVDPMNNLKNWNRGDPCTKNWTGVFCHDLGDTYLHVTELQLFRRNLSGNLVPEVSLLSQLKILDFMWNNLTGNIPKEIGNITTLKLILLNGNQLSGLLPDEIGNLQSLTRLQVDQNHLSGAIPKSFANLRSVKHLXMNNNXLSGQNPSELSRLNTLWHSLDDNNNLSGPLPPELAAAKSLKILQADNNNFSGSSIPTLYYNMSGLFKLSLRNCSLQGAIPDLSAIPQLDYLDLSWNQLTGSIPTNKLASNITTIDLSHNMLNGTIPSNFSGLPYLQLLSLKNNLLDGSVPSEIWAGVNPNRNGSLVLDFQNNSLNMLPAEISPPPPNVTVVLYGNPICENSSETLIINLCRLQSINLEKSKQETSTAMVCGACPTEKNYEYNPSFSDQCFCAVPLGVGLRLKSPGVTDFHPYENAFKIDLTSLLQLFPYQLYIENYIWEVGPRLNMHLKLFPSNTSLFNMSEVVRLRHVLAGWEITLLDVFGPYELLNFTLGSYEDEYPNLASSGLSKAALGGILASTIASAIALSAVVTALIMRRNSRTNRISRRSLSRFSVKIDGVRCFTYEEMASATNNFDMSAQVGQGGYGIVYKGILADGTIVAIKRAHEDSLQGSTEFCTEIELLSRLHHRNLVALVGYCDEENDQMLVYEFMP

SEQ ID NO: 135296 - protein, 539 aa, Oryza sativa
  Clone ID: PAT_MRT4530_36986C.1.pep
NNSCWILSLHIFFLDNIFIAPSYQVLCDKLVGMKKTLVFHSGRAPKGQRTNWVMHEYRLLDADGTQDLHVVCRIFQKNGSGPQNGAQYGAPYLEEDWEEEDDAIENMPASGAFAEMAAVTDTADESTEEDGNFSLKTNDEPLQTQEYQPEITPVKAQGSNEETNGGGYSCDVFSLDEILQEPENVCKNEEQNAIDDKFTIAELSGYPRQDDGYVGENGPVNWIDPSNGDNTNWPLRAYSTQNHVNGTLSADGFFDTVNGTNSYSGPSDNQNLYLQDDGLTSSHQVGDNMPFYDASSNHKWVDGKDDYLNLNDLLYPPAENQPLFDAGDDLMAYFDATEDDFKFDIMGTEDSNSQLPDMSNFVQKDDNNNKFTLDGISNTALYGASSSGSHGNMYPDTAVPDMPMDDTVDKSFGKRLASMLGSIPAPPAMASEFPPSTGKSVVPLSAVNPSSSIRVTAGIIQLGGITFTGSTEHLQKNGDFNLLLSFTVEGDVSTKSIGFEPDTQMSTTPMVLRSGMYLFFVSAMILMLSYKVGLCIYSR

SEQ ID NO: 135297 - protein, 277 aa, Oryza sativa
  unsure (1)..(277): unsure at all Xaa locations
  Clone ID: PAT_MRT4530_36987C.1.pep
TPGQRTCPAAXXXXXXXXXXXXXXXXXQAGPTTPLSIATINPQVPPHIPNAYNDSNRGYPEDVRVPEFTKFSGKDNMTTWEYIGQFSAQWGEASNRDAFKLRLFSLSLSGTAFTWFTSLPVNSIHTWAQLEQKFHDYFYTGKTELRLCHLTSVRQKYNESVIDYIKRFRDXRNRCFSLNIIDRDLANLAFNGLLAPIIEILDGQQLLDVSHLMQKALAXXSRVRESKKFFRSNDKKPNASIVDCPEYSDSDNDDGDHDIYIAEWSWTNKNKPFICST

SEQ ID NO: 135298 - protein, 62 aa, Oryza sativa
  Clone ID: PAT_MRT4530_36988C.1.pep
KKNENVWFGWVFPSDNYTGFLDQRTLSPNRADLVAPPGGPKNWLDNGSRGGIYAPKGAVELL

SEQ ID NO: 135299 - protein, 114 aa, Oryza sativa
  Clone ID: PAT_MRT4530_36989C.1.pep
MERRQAAGRAAGRVDEKDVAVFIDLAGAGEEMQAPAGRKRGATDPCPLGSGSTKLTARVGSYRLGLDPRCGRDRDHRVAGWHATRARASGHRPYDMRCVRAIARFSGEVSVTSA

SEQ ID NO: 135300 - protein, 403 aa, Oryza sativa
  unsure (1)..(403): unsure at all Xaa locations
  Clone ID: PAT_MRT4530_3698C.1.pep
MSLSTVNHAAAAAAAAAGPGKSFSAAAPAAPSVRLPRTRAPAAAAVSAAAVGADRAADRVSALSQVSGVLGSQWGDEGKGKLVDVLAPRFDIVARCQGGANAGHTIYNSEGKKFALHLVPSGILHEGTLCVVGNGAVIHVPGFFNEIDGLESNGVNCNGRILVSDRAHLLFDLHQAVDGLREAELANSFIGTTKRGIGPCYSSKVTRNGLRVCDLRHMDTFGDKLDVLFKDATSRFEGFEYSKKAYTTRVGSGPFPTELFGEEGDLLXRNSGMNLSNRRRKFWLKVVKQQCWILNCXVTNGFSSLNLTKLDVLSGLPEVKLGVSYNQPDGQKLQSFPGDLDTLEQVQVKYEVLPGWQSDISSVRSYSELPLAAQRYVERIEELVGVPVHYIGVGPGRDALIYK

SEQ ID NO: 135301 - protein, 86 aa, Oryza sativa
  Clone ID: PAT_MRT4530_36990C.1.pep
YCTTSALCFILGSSHQGRVEGNMTQSSKSNITQAGICNNSIFSFLGTTPVDRSTSHSTRPIANNNAKVPPTCYILSHLFLLFSIMQ

SEQ ID NO: 135302 - protein, 180 aa, Oryza sativa
  Clone ID: PAT_MRT4530_36992C.1.pep
MSHRHHAALVASASGRSPSWGSAISQSFRQVEAEDPFRRAQSMRGHDEEEEDLRWAALEKLPTYDRMRRGVVRSALLRDGDDDHKDDDDAGTGKAVELVDIGRLATGDAARALVERLLQDDSERFLRRLRDRIDMVGIELPKIEIRYEELSVQADAFVASRALPTLSNSAINFLQAQRVL

SEQ ID NO: 135303 - protein, 302 aa, Oryza sativa
  Clone ID: PAT_MRT4530_36993C.1.pep
METSAAAGGAHLIYVSSDDEEDETRVLLAESYSAEEIQIQQAILLSLDPSSDADAAHSSASSSRPSGAASTSDEPSSLPDRKGKRKLSSEEDGPIESTRKKRRKRGRFKCSVCMEKLQVSEQFTVSFCAHAFCNSCIGRYVAAKISENVAVIGCPDPGCEEGFVEMDTCRDIIPPELFDRWSVSLCELALGEKKYYCPFKDCSALLINDNDGAEKKIRETECPHCHRMFCARCRVPWHDGIKCKEFRKLGDDEKGEEDLMFKKLAGKKKWQRCPNYKMQFSEWKIPESPNFGRVRQCKVVMV

SEQ ID NO: 135304 - protein, 57 aa, Oryza sativa
  Clone ID: PAT_MRT4530_36994C.1.pep
MVTKMSEKVATGILSGVVKVTGYFTNSIANSKAGKKFFNLLPGEIVLASLDGFGMIL

SEQ ID NO: 135305 - protein, 284 aa, Oryza sativa
  Clone ID: PAT_MRT4530_36995C.1.pep
MACRGFFECLLKLLNFVLTVAGLAMVGYGIYLLVEWMRISGGGGGAPPSPAPPAELLMFGRPMLTAVALGDGGSFFDKLPKAWFIYLFIGVGAIIFVISLFGCIGAATRNTCCLCCYAFLVILLILVEAGAAAFIFFDESWKDVIPVDKTENFDVMYDFLKENWEIARWVALGSVIFEVLLFLLALVVRAMNKPAEYDSDDEIIATSRSTSIRQPLIHSQNVPATGVPVATLEQRASRNDAWSQRMREKYGLDTSQFTYNPSDPSRYQQNGAPPAEERNRCVIL

SEQ ID NO: 135306 - protein, 181 aa, Oryza sativa
  Clone ID: PAT_MRT4530_36996C.1.pep
MGLAFGKLFSRLFAKKEMRILMVGLDAAGKTTILYKLKLGEIVTTIPTIGFNVETVEYKNISFTVWDVGGQDKIRPLWRHYFQNTQGLIFVVDSNDRDRVVEARDELHRMLNEDELRDAVLLVFANKQDLPNAMNAAEITDKLGLHSLRQRHWYIQSTCATTGEGLYEGLDWLSSNIASKA

SEQ ID NO: 135307 - protein, 186 aa, Oryza sativa
  Clone ID: PAT_MRT4530_36997C.1.pep
ERHRRANEESTRRRRRRGRTEGAVDERRLVHSPLQQASSSPPRGAVAICIAAAARGAVTAAGLARVRSPLRCRPPTSRAGSRSRRRHRRHRLPPRARGETSSPPPSSRFGWRLRPDSRAGATSAALRTVAGLDLGPPRRCRPRPPPSAPSPAATAAVLRARGRRRREPPPPPLPAYAQSTSMPASG

SEQ ID NO: 135308 - protein, 272 aa, Oryza sativa
  Clone ID: PAT_MRT4530_36998C.1.pep
MLKLLSTRTLASRSGMTGVRTRSDLSGGITVGSPTFAFLRIKKSPHHRPTPYSSPTHRFPPPPVSSVSGAGAGELAPRDSCPPIRGEAGEEMGLTFTKLFSRLFAKKEMRILMVGLDAAGKTTILYKLKLGEIVTTIPTIGFNVETVEYKNISFTVWDVGGQDKIRPLWRHYFQNTQGLIFVVDSNDRDRVVEARDELHRMLNEDELRDAVLLVFANKQDLPNAMNAAEITDKLGLHSLRQRHWYIQSTCATTGEGLYEGLDWLSSNIASKA

SEQ ID NO: 135309 - protein, 304 aa, Oryza sativa
  Clone ID: PAT_MRT4530_36999C.1.pep
MEDGLRRQEPEALALLFFLSSDETTMNQWRDPRRRRMERHRDKGGAGPLLSQGGRCKDAAREEQGAGPLPLKGREAHGRCHRRRDYVMPLPLEGREAHGYRRRRLLGREHAKLMPSEKEEGGKMGLAFGKLFSRLFAKKEMRILMVGLDAAGKTTILYKLKLGEIVTTIPTIGFNVETVEYKNISFTVWDVGGQDKIRPLWRHYFQNTQGLIFVVDSNDRDRVVEARDELHRMLNEDELRDAVLLVFANKQDLPNAMNAAEITDKLGLHSLRQRHWYIQSTCATTGEGLYEGLDWLSSNIASKA

SEQ ID NO: 135310 - protein, 51 aa, Oryza sativa
  Clone ID: PAT_MRT4530_3699C.1.pep
MAKNLSISVQLLLVLFVLLAFASGILAQGGPSTCTDNPVQQDCPPIPGRGN

SEQ ID NO: 135311 - protein, 79 aa, Oryza sativa
  Clone ID: PAT_MRT4530_369C.1.pep
KGGGGGFSSPFETTVNFWGPGLAVFFFFFAPPAAFLFGVYVAQGLIYLVVTPFCFVGKFRSHGKIKRGKKNDYKNKGAF

SEQ ID NO: 135312 - protein, 83 aa, Oryza sativa
  unsure (1)..(83): unsure at all Xaa locations
  Clone ID: PAT_MRT4530_36C.1.pep
MPRTAAXVDVEDLLVRVKNGADAELAEVAREVAALAEXGRLGEDDDEDGVLVPALVFRGAAVGXAEARVRVMAALRGLARCVG

SEQ ID NO: 135313 - protein, 209 aa, Oryza sativa
  Clone ID: PAT_MRT4530_37000C.1.pep
VVGQGGGGGGGEWWRGTAAARRLTPCATTSPSPRRRPQRSGGTDGTNRVACRRRSRRVPSPSPLEPRPRHALSSVTRRRRRLEPRPRAASPPPLPRSPPLLPRSPPSPHPTAAASPPAMRAPAAARLLQCPASPPCPVARLPALAGSAAALASPPPPPCSPRRCRCLLRRTPPPLASSATATLPRRLASPCSLPPPPRSLPPPSPTAHT

SEQ ID NO: 135314 - protein, 318 aa, Oryza sativa
  unsure (1)..(318): unsure at all Xaa locations
  Clone ID: PAT_MRT4530_37001C.1.pep
MGAEAEHRMSPSPAPAPAPPTPVGRTDGDAPPMVLGLQLSALIDHVARVDWSLLNRIPGDRGGSQQVCIEELNHILAEVNAQILPCRDDLSSIRTIAGGSVANTIRGLSAVWISTXITNEFKKEDFKGSKWLVVRYARQNMEQILEAIRIAKQEGLSVSLDLASFEMVRDYRTQLIDLLETGNIDLCFANEDEARELLGGELTFDPEEALAFLAKYCKWAVVTLASKGCIAKHGKQVVQVAATGESNAVDATGAGDLFASGFLYGLVKGLALEECCKVGACSGGSVVRALGGEVRPENWQWMYKQMNASGLLLPDLKN

SEQ ID NO: 135315 - protein, 285 aa, Oryza sativa
  unsure (1)..(285): unsure at all Xaa locations
  Clone ID: PAT_MRT4530_37002C.1.pep
MGAEAEHRMSPSPAPAPAPPTPVGRTDGDAPPMVLGLQLSALIDHVARVDWSLLNRIPGDRGGSQQVCIEELNHILAEVNAQILPCRDDLSSIRTIAGGSVANTIRGLSAGFGISTGIIGACGDDSQGVLFVSNMSFSGVDLTRLRTKKGHTAQCACLVDASGNRTMRPCLSSAVKLQANEFKKEDFKGSKWLVVRYARQNMEQILEAIRIAKQEGLSVSLDLASFEMVRDYRTQLIDLLETGNIDLCFANEDEARELLWGELTFDPKEALAFLAXYCKWPGDPS

SEQ ID NO: 135316 - protein, 108 aa, Oryza sativa
  unsure (1)..(108): unsure at all Xaa locations
  Clone ID: PAT_MRT4530_37003C.1.pep
MWCAMLLDFARWDWCCPTPVGXAVGGCHHNVCGGMQCCVXDLXTPPVAAGCFGVLWCVTPRRCLPAAWNXDGKGVGILAYRLYLMGEPYGXEIYESSRLYIFKKKKKK

SEQ ID NO: 135317 - protein, 82 aa, Oryza sativa
  unsure (1)..(82): unsure at all Xaa locations
  Clone ID: PAT_MRT4530_37004C.1.pep
VVQVAATGESNAVDATGAGDLFASGFLYGLVKGLALEECCKVGACNGGSVVRALGGEVRPENWQWMYKXMNASGLLLPDLKN

SEQ ID NO: 135318 - protein, 125 aa, Oryza sativa
  Clone ID: PAT_MRT4530_37005C.1.pep
MAATATACPAPPPPRSLYRGVALAAPGRRRAGDIPVLIEFWASWCGPCRMVHRIVDEIAQEYAGRIKCYKLDTDDYPQVATSYSIERIPTVLLFKDGEKTHSITGTLPKAVYVSAIVLASSVPAL

SEQ ID NO: 135319 - protein, 46 aa, Oryza sativa
  Clone ID: PAT_MRT4530_37006C.1.pep
ECRFDRLQAFEPIRSVRSQAGTTEFFHVSNEHLHCSWSLCCPVDVI

SEQ ID NO: 135320 - protein, 284 aa, Oryza sativa
  unsure (1)..(284): unsure at all Xaa locations
  Clone ID: PAT_MRT4530_37007C.1.pep
PTPSVGAAAAAAAPLDRQDGGGGPGDQKLEAFLREAEAAKDEMAALRDELSRLQAAHEASKALXRPGAPRAATQAALVRLNCSAGRLRARLASMDRRAPAPATTAATAGLRGRLQDLTAGVQVLRRQVSAERRGDAARCYLAVAGEAPTEEQLDRLVAAGGANTDAEAAVRAAMKSSSEAEEVEGGLLELQQLFLDMAALVESQGARVDDIERHVAAAAGDVGAAEGELREAQRLRVPARRRRLWLSAGLAVLLLVVLAAAAAALALALARRKGGATQRRRRRG

SEQ ID NO: 135321 - protein, 310 aa, Oryza sativa
  Clone ID: PAT_MRT4530_37008C.1.pep
FLAAIKSGVGLASGFNIPDLFPTWTGILTTVTGMKRSLRAIYTTVDGILEEIIAERKGIRDEKISGGAENVDENLVDVLIGLQGKGGFGFHLDNSKIKAIILDMFAGGTGTSASAMEWGMSELMRNPSVMKKLQAEIREVLRGKATVTEADMQAGNLRYLKMVIREALRLHPPAPLLVPRESIDVCELDGYTIPAKSRVIINAWAIGRDPKYWDNPEEFRPERFEDGTLDFTGSNYEFIPFGSGRRMCPGFNYGLASMELMFTGLLYHFDWSLPEGVNEVDMAEAPGLGVRRRSPLMLCATPFVPVVSAN

SEQ ID NO: 135322 - protein, 156 aa, Oryza sativa
  Clone ID: PAT_MRT4530_37009C.1.pep
MRRWCAAAGLGLGRRLLSSSVSAPAHRPLPAHLIPSPRPLPFSSRHHLLTPPLGLHPSSPPPMQWQTQQVRHFAAKDRSRAPRTPTTSKVKKYKIKPPSSMKFRFRVMNDGQVRRWRAGKRHNAHLKSKEAKRRLRKPALVHLAYAKVIKKLNFCS

SEQ ID NO: 135323 - protein, 76 aa, Oryza sativa
  Clone ID: PAT_MRT4530_3700C.1.pep
KREQLSQEEEERTRRRKTKEMETEKRGRRRTRRPRRTAGEGEPEEEMKDRKKEEKRGRRTAHEKPEHQKEKKKKKK

SEQ ID NO: 135324 - protein, 133 aa, Oryza sativa
  unsure (1)..(133): unsure at all Xaa locations
  Clone ID: PAT_MRT4530_37010C.1.pep
ACGSCLDRKHILFEHVVHTMNVPFAXVXRGATKKLSLSRAALCTKRKGCGSRRGAASSCHGWDGARMXTMPRQTGLDMMQLMCTERLVCIRARERIRDLEWCPARLGLKRLQLMKVSEVQVGTGMQHGHQIVQ

SEQ ID NO: 135325 - protein, 136 aa, Oryza sativa
  unsure (1)..(136): unsure at all Xaa locations
  Clone ID: PAT_MRT4530_37011C.1.pep
LVSPMSINMYTRGHCNESXRSIQLLSVHRHPLYRGFYLSYSGTWHLTQGCICLVRFSAKRXVLRFAGPGESIGYVGVVQGXSVYSTSWIALVRLIFLPTNLSCXVNLVLAYRFSSIRCFSLXGFCQYRLNRLARLD

SEQ ID NO: 135326 - protein, 271 aa, Oryza sativa
  unsure (1)..(271): unsure at all Xaa locations
  Clone ID: PAT_MRT4530_37012C.1.pep
MDTGKETPLILGRLFLSTAGANIDVGAGSIVGAWELSKTPCNRLWEGIQAIHVEADGERPQNGFGRIGGFCRTQKCVIPASPLAGIRLICTGKINNPRRGQLFMLACNVERKILENPTEQQAMLVPPIIDVLQEVQNSPQNEKNDMFEMSLPSLMNEEKADAPTLSEEGIKGKLNVAEITQEGDDDVTMATTDATIAHIMDEQEDIKIKSSNEPQLKNQWAALSVMGLXLITSFGTPAQVGPMWGIRLICTGKINNPRRAELEVWLTPHWF

SEQ ID NO: 135327 - protein, 136 aa, Oryza sativa
  Clone ID: PAT_MRT4530_37013C.1.pep
MPVLAACVRQYHKLEDNKPLIRRSSYHDVVRATEVEDVLDISGVQTSHTAPAPPPPHITPACSWWTDTKTRVPAGPPCKLVSRAGAAVAGRAWRPPGWGGACGGLAIPFARSGGGGGAEGMAAVAAGGQQRPLLPD

SEQ ID NO: 135328 - protein, 83 aa, Oryza sativa
  Clone ID: PAT_MRT4530_37014C.1.pep
HEGSMFSKLQLNIPFAMPSWSSPSYPRAIYSLSMELLLFSQHNWVDLSTCISMTIQEDSQILDCWYKLVLGLSLPCQKMLLVQ

SEQ ID NO: 135329 - protein, 636 aa, Oryza sativa
  Clone ID: PAT_MRT4530_37015C.1.pep
MATSSTLSQTQRYAAGALLALALRQAQIHQSVLLGSHGLDDAPAAAAAVPSLADPVDARHLWTHDSHGLLRPVLRFLEIDHKAWPGVETTAATSEPKHHIGAFLRKVFEDEDDGEAAAAERSEQELALAKAVEAMAMGLENDVVAADELIKATGSGGDGDEGWPWLASASSAGGSRTKDYRKMAVLYMLLSACVADVNMAEEGMGSPRIRRGYDARHRVALRLLATWLDVKWIKMEAIEIMVACSAMAAAREEEQSEGSESPRSRWENWKRGGIIGAAALTGGTLMAISGGLAAPAIAAGFTALVPTLHTLIPLIGASGFAAIATAAGHTAGSVAVAASFGAAGAGLTGTKMAKRIGCVREFEFNTIGENHNQGRLAVAILVTGFAFTEEDYMKPWEGWKTNLERYILQWESKHIIGVSTAIRDWLASRFAIELMREGAMQTVLSGIVSAFAWPAYLVSAADFIDSKWSIAIDRADKTGKMLAEVLLRGLQGSRPVTLIGFSLGARVVFKCLEELALLGNNEGLVERAVMIGAPVSDKEELWESTRKMVAGRFVNVYSTNDWILGITFRASLLSQGLAGIQAVNVPGVENVDASELIVGHSSYLTLVNQILDQLELNTYYPVFYPSTPKCGTPKSK

SEQ ID NO: 135330 - protein, 341 aa, Oryza sativa
  Clone ID: PAT_MRT4530_37016C.1.pep
MEQERREVKSRTRALPGQGRLGRWVQGEDYLPKEDDFAMASSPPQGPRKPFRPIKPKGYRAGDRQTAHQGPMSPYNIMYPYKCPFYKGNHVNSPVQPKPWYFDVFFVLGFLRLYDISRLYASFKIFTKVATNRINRKLSGVILKIDFEKAYDKVKWPFLLQTLRMKGFSPRWISWIESFISGGSVAIKVNDDIGRFFQTKKGLRQGDPLSPILFNIIADMLAVMIQRANNAGQLVGLVHHLIDGGLSILQYADDIILFMEHDLEKACNLKMLLNVFEELSGLKINFHKSELYCFGEAQTAQDQYTNLFQCETDVPNINKRIRKIKAPLKIKIFLWLSWLRS

SEQ ID NO: 135331 - protein, 136 aa, Oryza sativa
  Clone ID: PAT_MRT4530_37017C.1.pep
LKGRQAIAGPIVPKLDGPERLLRPSRGRTCHGEVVFLRRIVFALHPSPETPLARQGTRTTLRLTPFLLHSLRHGFRQTWSKGLMPSANKPLTGKGEIGASAETVQTMWYGMRRPLSTDASAETACALFLRLFLPQH

SEQ ID NO: 135332 - protein, 39 aa, Oryza sativa
  Clone ID: PAT_MRT4530_37019C.1.pep
KRTPIFTLDTNMLGEDPCANQRLFWCFRQPSQFLINPIF

SEQ ID NO: 135333 - protein, 111 aa, Oryza sativa
  Clone ID: PAT_MRT4530_3701C.1.pep
MEDNDHNIINATANVTSDWSIVKEEFTFPAGSAPFNSCHASTIVETEKDSFLVAYFGGSKEGAPDVKIWLQRYSDGCWHTPQVADEQDEVPMWNPVLFQLPSHELLLFYKI

SEQ ID NO: 135334 - protein, 50 aa, Oryza sativa
  Clone ID: PAT_MRT4530_37020C.1.pep
ATEIKSTEFHVHGVRPSEELFRQSIIMDQSEFSGQHDVQINAIALVKCKI

SEQ ID NO: 135335 - protein, 92 aa, Oryza sativa
  Clone ID: PAT_MRT4530_37021C.1.pep
TVTSYYNNPINGPPISNNTILVTVEQRNTLYEAPYKFSKYNIHLYINPILIILYFHIFFFFYFFFFFSDAWAHAWADAWADAWADAWANAWA

SEQ ID NO: 135336 - protein, 166 aa, Oryza sativa
  unsure (1)..(166): unsure at all Xaa locations
  Clone ID: PAT_MRT4530_37022C.1.pep
LAVPAPPIFKTMASNTLREFAAPSADNVAIGPQINMGDMDFDLKSSLITMAQASPFCGKPNEDANAHLQQFLEICSTYTIKGVSPDAVRLRLFPFSLLERAKQXFYANCAAVNTWHKCSTAFLSKFFPMGKTNALRGRISSFQQTRDESIPEAWERLQEYVAACPH

SEQ ID NO: 135337 - protein, 615 aa, Oryza sativa
  Clone ID: PAT_MRT4530_37023C.1.pep
MARGPLDLWNAWASQILVLHSLTLQVVLLVFAGIRRRECPGVLKFLLWLSYLLADSTAIYALGHLSIGSAAREHKLVAFWAPFLLLHLGGPDNITGYALQDNELWLRHLQILVVQVLRAGERTWALRCSNFGSIRNSLKELPGNQLRWYKGYLQNKDDTGTTKIIKKLRKEPTLWKLMELELSLMYDILYTKAAVIHTSIGYTIRTLSSIAIATSFLLFHFSGSKDNHRGVDIIVTYVLLGGALVMETTSLLSALGSSWALDFLCAMRWSWLRHAALCTGRWHRLRRMVLSLRRLITTMTAGYLNRSRGWSGTIGQLNLLSFRAAQINATDRCLRKLAMMLGIDEWWDSTCYSWIEEVPMEVKEGAVDMVSRNDLNTMGLLRHRWGEVALDKKHPGLLEELQGWRHGVDFHESIITWHIATDLILAERENKQPMDVMERTGGSDRAQRVHSIRALSNYMMFLLVTRPDMLPGLPQNWLYQRTCDNLDEIFKEHRGRLMSSKGKVNNRIFTVLSALLRGHNRIRPFGLKQTNEFAKILLMALKHMSGKFDPLVPRLTFAHQISQIVLNWKEADPEDVLFDLWTDFLIYAANRCNRESHAKKLNSGGHHWCLAYPYD

SEQ ID NO: 135338 - protein, 139 aa, Oryza sativa
  Clone ID: PAT_MRT4530_37024C.1.pep
GIRNRHRTRHDHHWREGGRAHTRLAGARRGWVHSTHGGTGLWVAPLFTRAARTAGGRSAVGAQPSGVSHTLAPVRLGGRHGALVNRCALRTSRRPQPPGHHPPGAAPISTQWLCSRAPWRSMVREHLGVKPPFLLSLGN

SEQ ID NO: 135339 - protein, 492 aa, Oryza sativa
  Clone ID: PAT_MRT4530_37025C.1.pep
PRALAMPAMEEEAVANEAHHFLVVTYPAQGHINPARHLARRLARAAPGARVTISTAVSACRKMFGDAAAAGAGGELVDEGGVRYAPYSDGYDDGFDRAVHDSASYMTQVRVVGARTLAAVIEGFRAAGRPVTRVVYTLLLTWVADVARDHGVPVALYWIQPAAVLAAYFHYFRGTGGVDRDIAAAAAARDRMAPVRVPGLPPLRLRDLPSFLAIADDDDPYAFVLDAFRDIVAVLSRGDRPTVLANTFDAMEPEAVASLRQHGVDVVPVGPVLSFLDAAKSGGGGGAITTTTSNDLFKQNDTGYLEWLDARPAGSVVYISFGSLSTMSRRQIAEVSRGMAASGRPFLWVLRKDNRGEADDVAIDGGVVVEWCDQVRVLGHPAVGCFVTHCGWNSTLEAVASGVPAVCVPQWTDQGTNAWLVAERLGAGVRAAVSEVDGVLEAGELRRCIDAATSEAVRASAAAWREKARAAVADGGSSEKNLQAYVGKIRAN

SEQ ID NO: 135340 - protein, 50 aa, Oryza sativa
  Clone ID: PAT_MRT4530_37026C.1.pep
LGGHDWAPGLFLVGRCVVIRGFRCPVVWGFKGALFNKTPPCWRGFAWWHQ

SEQ ID NO: 135341 - protein, 184 aa, Oryza sativa
  Clone ID: PAT_MRT4530_37027C.1.pep
WPHRLRATYAALPDGRRAHAGDDRGHPRAAGPQGDVYFGCGIAGVIVGGGKGVPHAVCRRRRKRGSGPWRWNGSTSGTRTPASRSRMSCRGRRCSTPDSRTAKHSSVVFPDHMREWSRKCKFRVVAGDDDGGGELRIIGVSNDDHLRVFSWLMLSVAVGGSVAPDHGGGTGAPAERARRRRVPV

SEQ ID NO: 135342 - protein, 125 aa, Oryza sativa
  Clone ID: PAT_MRT4530_37028C.1.pep
LLSTAGAVVSARVFSSSSSSPLDRALERLLSGPADTALMKSSVLAALLTARPQCRSFPCRVRSRRAPQLEQAWSQHCDGHGRGSSAWSKARPRRHYQQAAAKEIGQMTSTGIRVRGVPGSEDLGT

SEQ ID NO: 135343 - protein, 143 aa, Oryza sativa
  Clone ID: PAT_MRT4530_37029C.1.pep
METTRVTLLEGWFGGLRVRVDHKDRRRLDWQRGGEESGHSARGINAILTGGGAIRRWLRRGGSVRDVRSRRSDDGGGTVEQPSAGEVESRGNEDDLQPAAVLGWGASGEEEREESIWGRPAGGGAAVAREWGGWMREARRALV

SEQ ID NO: 135344 - protein, 238 aa, Oryza sativa
  Clone ID: PAT_MRT4530_3702C.1.pep
MRFRGVQVDLVYAGVCLPWCPTTWSGPQCDRSVLRGLDDLATARSLNGIRVADEILRLVPETAVFRTMLRCVKHWAKARGVYSNVAGFLGGIGWAILVARMCQLYPNTSPACCSRASSAALRGGSGPARLTNKSLSLRNKSGSVASSPQARVCPLKKTVQPGKLALKERWYGRAANLFSLKWQAKDDLIDVDRSRRQGKLRRREKYVKEMGTISVKAELKTNYPKLYGFDHCLTGNIL

SEQ ID NO: 135345 - protein, 93 aa, Oryza sativa
  unsure (1)..(93): unsure at all Xaa locations
  Clone ID: PAT_MRT4530_37030C.1.pep
IDELALIPSCSFLCSARCFVTGFDNLRVDGLVVVTPCSCHSPPNXGLAYSWASLAKINVIRVTLLFVGNITCKIKLIIFILTYQPLNAAIISR

SEQ ID NO: 135346 - protein, 114 aa, Oryza sativa
  unsure (1)..(114): unsure at all Xaa locations
  Clone ID: PAT_MRT4530_37031C.1.pep
IRVSLRGXGREKKKKKKKKKNHQKPSNTQGILIRRNLMGFLLPXSLPGLLAGSAWDWASIGKAYGPQTHSPSPRLLVCADPESRQVRVNGDFVCKNPTGTRVRDDSLQGXPLRR

SEQ ID NO: 135347 - protein, 73 aa, Oryza sativa
  Clone ID: PAT_MRT4530_37032C.1.pep
MSSTTKSIGMKKSRIFTGEAFINEENEVEIYRSISQKSAGDLQLHEKAQKSNLIITNGPRMYVTDSGAHMEVS

SEQ ID NO: 135348 - protein, 75 aa, Oryza sativa
  Clone ID: PAT_MRT4530_37033C.1.pep
MGPPPTPDPPPLRPIEQHKRDGRRMTSAIGSLPAGSHAIAQRRKAATSAAPQAQDLQALSPPHQVTASVSNAYHI

SEQ ID NO: 135349 - protein, 262 aa, Oryza sativa
  Clone ID: PAT_MRT4530_37034C.1.pep
MGQWECAGTGYATYSRLRPPAGTRHASPYRALRRWSSAYCSPARPAFRSYTRASPTDVLAGASRRALLGYVTRVAYPLASLPLTVYCALPAVCLLTGKSTFPSDVSYYDGVLILLLFSVAASVVLGLRWSRVPLRAWWSDEKLWTHALQPAATTRTPAATADLVSRAQSSVSYLRSSFLSNHDLVSSFFSPAAPFNTAKHASISAVAAIRASGRFGFGSGGRDLSVSKRPAVGVSVKGIYCAAWRITSTSTLSPQEIAVFWP

SEQ ID NO: 135350 - protein, 268 aa, Oryza sativa
  Clone ID: PAT_MRT4530_37035C.1.pep
SSSLTQSQYLRSSNGDLDNMHGTSAMITRGSPLGLTGLLNLGNTCFMNSAIQCLVHTPEFARYFREDYHREINWQNPLGMVGELALAFGELLRKLWAPGRTPVSPRPFKTKLSWFAPQFSGYNQHDSQELLAFLLDGLHEDLNRVKHRPYIKSKDADGRSDDEVADEYWANHIARNNSIIVDVCQGQYKSTLVCPACGKVSVTFDPFMYLSLPLQFTSTRSMTVMVFTFDGSTPPTPYTVNVPKQGRCRDLIQAISNACSLRNGERLV

SEQ ID NO: 135351 - protein, 198 aa, Oryza sativa
  Clone ID: PAT_MRT4530_37036C.1.pep
NLILSVSRPQRVVPIPPIPTFIQAAGLRSLHPHRPPVRRPSHSHLAAEVKPAKRSVGLGLPALPPLLPGLASHGQPRVASFCKRLARNVVAMGGGEAPAVPLAANAEITEFINALKQEWDRIEDKYAVTTLAVAASLGMWSAGGVVSAIDRLPIVPGLMEAVGIGYSGWFAYRNLLFKPDREAFFAKVREVYEDIISG

SEQ ID NO: 135352 - protein, 536 aa, Oryza sativa
  Clone ID: PAT_MRT4530_37037C.1.pep
MTPTVATTTPAAAAATTAAAAEVKPAKRSVGLGLPALPPLLPGLASHGQPRVASFCKRLARNVVAMAAGEAPAAPLAANAEITEFINALKQEWDRIEDKYAVTTLAVAASLGMWSAGGVVSAIDRLPIVPGLMEAVGIGYSGWFAYRNLLFKPDREAFFAKVREVYEDIISGSNTQQFTRKHVQTDRELASLINFIIIRGQFTVTQSHVGFKDKPSAVMAMKRGATAALWLVAAVAGMLLHADAQTLVYKYYAQKCPAAESIVFDEVQKAWNADRSMPASLLRLHFHDCFVNGCDGSVLLEASDGQAEKNAQPNLSLRGYDVVDRVKARLEATCKQTVSCADILAYAARDSVRVMTGGYKYEVPGGRPDGTVSRASMTGDLPPPKQRNVDQLARYFTSKGLTVDDMVVLSGAHTLGVARCGTFGYRLTSDGDKGMDAAFRNALRKQCNYKSNNVAALDAGSEYGFDTSYYANVLANRTVLESDAALNSPRTLARVTQLRGNQALFTSSFAAAMVKMGGLRGGYAGKVRDNCRRVRT

SEQ ID NO: 135353 - protein, 241 aa, Oryza sativa
  unsure (1)..(241): unsure at all Xaa locations
  Clone ID: PAT_MRT4530_37038C.1.pep
CSRRRCTWRSGLPRAERRPSRGRGGRCDATKGGGVVWRCSGRQGGLAGVRRSLPYLWPPTPQLPPLPLHVAGFPRAQCPSAPLRPLARNRHPPPPTRAHVPPLPRKSAPPPPAXRALPCPAMQPPCPTAPRPLXPLPQSIAETPLPHSPSXPPPSPTTPRRLSGRPRTASSPPSVPQGQXEPRPPLGSRPPPLESVSPHAPLPAPSAGGRAPPPCHGRPGRSRPRPCPSGSPSTARSAWLI

SEQ ID NO: 135354 - protein, 45 aa, Oryza sativa
  unsure (1)..(45): unsure at all Xaa locations
  Clone ID: PAT_MRT4530_37039C.1.pep
PFLRIVEVVRSFNFDGWXNLYIHASPEXXDKLLRDELAXKAFSAD

SEQ ID NO: 135355 - protein, 37 aa, Oryza sativa
  Clone ID: PAT_MRT4530_3703C.1.pep
MDEEHQQYHEQIADKRGCNSVKRPLCDYMLEKISMSS

SEQ ID NO: 135356 - protein, 55 aa, Oryza sativa
  Clone ID: PAT_MRT4530_37040C.1.pep
PMTLAPSNDTAGRRISIYNSCRCNHLLCGLQIHGVIRENNWNLTYFFFCILCNIP

SEQ ID NO: 135357 - protein, 665 aa, Oryza sativa
  Clone ID: PAT_MRT4530_37041C.1.pep
MAPRKPTKAGSTGEDPSSLGEGWSCFLGKSLVKEAALGELVLSGVLVEGQATCGGEAIVPSPGDNQTVVFAAFFATGLRLPCNDFLLSVLKMYEVKLYQLNPSAFPKLAVFAWMCQTCGFDPTAELFAVLFMACATTKDVDGVLESWLILLRKVARRLSTRDLCEEFCLLRISPLARESGVLVSKDEKVLGLPRLAFPPGVHLRTHGDAETEASKMVGGLTSAEFARLLSRQLDGWANRVHFGELPGRLIPTKAIDDVGTSRKRKRAVAKGGQVRSRRATKDTAESGEEEEEDDGEAESEDDGSRGYTPSPPPVKSGAGSRVSPVHPQDVAMTNTLLAISSTAAKPRGPRGGCASPPPSSNAEAATGGSASAPAIGANNPHNERVEVVPSPARRREGKAPTVEAIVSDVTLTAPHFVPADFATRPEITPFVDGVCQVIAPTEGLGLFTEMNEFGESYAAVVSLFVRGLAAHLSAKKSALERLDGYRLRLRKAKDDLRHKEDERRVVADTLWRANAENRLALNDLGARAEDTLGDDGTAFDFSEWTQESAGSVVEVAGAYGDCCARVSAGFVLSLLHTHGCEHIRDFPRYVTEEWPLNSQCSGAALKAFRKGFWEDGGRDCAKTSLRENLERIAKEEEAAAVHAGGDPGSTELAGEDNRGQDHPKV

SEQ ID NO: 135358 - protein, 77 aa, Oryza sativa
  Clone ID: PAT_MRT4530_37042C.1.pep
IASPLRRGEARAKGERSGRRFGLIGWTPAAQIPNSISSSSIFILPCLPVPGNSIHPSVFPNSPHLLPSPPPNHLITA

SEQ ID NO: 135359 - protein, 81 aa, Oryza sativa
  unsure (1)..(81): unsure at all Xaa locations
  Clone ID: PAT_MRT4530_37043C.1.pep
FVSRPXALRRXPCCXPLPGXXPPCXCGPRCPXLXXLXRVXCAXLGPPPXXXXAXPXPSLCXXAPVXFXLSSCGCCVGSVLV

SEQ ID NO: 135360 - protein, 104 aa, Oryza sativa
  unsure (1)..(104): unsure at all Xaa locations
  Clone ID: PAT_MRT4530_37044C.1.pep
RVEEKXFSSPSQGPVVPNIKSKIHHVIPFCSQGNAFSPPLGLLPLLDPHLGPQKNYCSPYMFYATSTGPVNTPSLDWTGPDQTITCCNVTVCYNKMRAGTPCGR

SEQ ID NO: 135361 - protein, 52 aa, Oryza sativa
  Clone ID: PAT_MRT4530_37045C.1.pep
LAGGLPFFFFFFFLLLRRNLIKQLITQDLSHQACNSTSFLIGKMFETFRVLV

SEQ ID NO: 135362 - protein, 73 aa, Oryza sativa
  Clone ID: PAT_MRT4530_37046C.1.pep
AAPAAFNTPPPPQPPIRLCCGGDGRGAVYGIIPPRSYLTQIAGANRAMLRYPVQIYGLRQGGSSRVDLQACKL

SEQ ID NO: 135363 - protein, 52 aa, Oryza sativa
  unsure (1)..(52): unsure at all Xaa locations
  Clone ID: PAT_MRT4530_37047C.1.pep
GPRPMARPEAHSFGLAQARHGPPGVVPVPAXSNSRAVPGLHPRHGAIGQRQP

SEQ ID NO: 135364 - protein, 124 aa, Oryza sativa
  unsure (1)..(124): unsure at all Xaa locations
  Clone ID: PAT_MRT4530_37048C.1.pep
YSNRDDTHEQYSACVEKRGTCVKRSHASGRRIKKTMHENTTHMNCQAKVLRMERTTDACGHALLDXCIRRVKRKQKGILYRTGSSMEHLHXSPVLERLTKNNYEAMYXTDHVHKDWMHYLMDYH

SEQ ID NO: 135365 - protein, 95 aa, Oryza sativa
  Clone ID: PAT_MRT4530_37049C.1.pep
MATAKADDLLAPAEETSSVGGWIGSPPRGVLPTPTTVQRRRNIARSGHLPATATSDDLPEPAEETSGVGGWIGNPNPKCTSNRGDERRAPSTRRL

SEQ ID NO: 135366 - protein, 62 aa, Oryza sativa
  Clone ID: PAT_MRT4530_3704C.1.pep
LCFKSDKHMSWYSWILSSLTRSVYMCGGIIICPQLFINYKLKSVAHMPWRHMTYKLLNTIID

SEQ ID NO: 135367 - protein, 126 aa, Oryza sativa
  Clone ID: PAT_MRT4530_37050C.1.pep
HINELGSRRHGSLRHAITMIAHLLRLLRSLPHLSALPLQPPHALLLPLGPHGRLLVGFFFFFGGGGGGGSAHLPSALLRSLPHLSALPLQPPHALLLPLGPHGRLLVGFFFFFGGGGGGAVPSFCP

SEQ ID NO: 135368 - protein, 53 aa, Oryza sativa
  Clone ID: PAT_MRT4530_37051C.1.pep
LNSLLLCRVRPVRPAKIWRPRITEPQECPHPAAAAAVAAGGGGHREHKTGIRH

SEQ ID NO: 135369 - protein, 50 aa, Oryza sativa
  Clone ID: PAT_MRT4530_37052C.1.pep
RIENFGSPPPSPHFEKAPPRLFVVRTKKSCALPWPHNLDVFVQMHPESLC

SEQ ID NO: 135370 - protein, 125 aa, Oryza sativa
  Clone ID: PAT_MRT4530_37053C.1.pep
MRQARPYSAMFAGGVSARTGPHALPLARIKKIMKRSAGDSSVVDGGGGGGGGARMISGEAPVVFSKACELFIAELTRRAWAATLEGKRRTVHKEDVAAAVQNTDLFDFLVDVVTADLGDDHTDYK

SEQ ID NO: 135371 - protein, 282 aa, Oryza sativa
  unsure (1)..(282): unsure at all Xaa locations
  Clone ID: PAT_MRT4530_37054C.1.pep
LAGPPQALSPLAVCSSPSPPVFGSRLSSPASPVAFPINPAQGMDSXGSLDALAPLNPTLAVSSPFPSSLAASCPRRNPPPSIIPRRIRAVGSSPLNPCYLPVAPPFAAAVRPATXAPRRCHLGRDRVKLTPVRRSPPPRSGAWSTASPRXAACSLCTMNRVTDKRVPLGATRDQKSNNLRNSITSQPYVRLTPFNFQKSSNLEIYLMAHLEYGLGPNLVLVXDPSRWHMVNLCRLSKCLVMKVSRSPDVAVLHGLGDPVAEEDEVDPADEEFFQEQVDYDEF

SEQ ID NO: 135372 - protein, 44 aa, Oryza sativa
  Clone ID: PAT_MRT4530_37055C.1.pep
MKGIISGGVEALAGLPSASIPTAATCEKLKFLEGEATATCEAMG

SEQ ID NO: 135373 - protein, 106 aa, Oryza sativa
  Clone ID: PAT_MRT4530_37056C.1.pep
SLSAPPLCLTPSASSSSSVIPSTAKFLPVVVGELELVPSTAKLLPVVVGELELISSAVKLLPVVAGAGEVELLPCLRGRRLPPKLTSLTSWLELSNEPSRAGFLAR

SEQ ID NO: 135374 - protein, 244 aa, Oryza sativa
  Clone ID: PAT_MRT4530_37057C.1.pep
KATIQKVVLQLCSSDSSSIRNVTLRVRTYVRASAAQIRTTYVVRRTAFLLCIPGDDARTQRTCRATVTVHVALPVQDQRTRTPAGARKLAVLGQYRHIAIYTVAQPDRPPSPIASSSRAPLASHAESTDPGESNAAAIASVIALPSSRRCHLPPPSASRVPPPLSPATEAAATSASTSLLFILSRSQHRHLPSLPPQQPPLTPSSLSLRTARDGVRASLRGGANVGFFISAELLVQVKQRCHCR

SEQ ID NO: 135375 - protein, 55 aa, Oryza sativa
  Clone ID: PAT_MRT4530_37058C.1.pep
LNVPANMKTLLMKAAPPLAYHGHCARVVETRTVGICPMLRTNSPTVDSTLLRRHV

SEQ ID NO: 135376 - protein, 157 aa, Oryza sativa
  Clone ID: PAT_MRT4530_37059C.1.pep
CPRRRGQRPVPRSIPIFTIATRCSTQNHLSTRVLMTLRVARPQVIRFIGNSTAAKRAPLSSVVASSPKSSRSPSGASTSTTTTLSSARPTRESLSFAERLARLKEPAVLYRAPPHRFYRFSCYSSGLFCIMYVGYHYTTSVLYAPPDVTWWLPHAFA

SEQ ID NO: 135377 - protein, 28 aa, Oryza sativa
  Clone ID: PAT_MRT4530_3705C.1.pep
KSYGVSRPHINSLNPPLGGRYCIIALSH

SEQ ID NO: 135378 - protein, 52 aa, Oryza sativa
  Clone ID: PAT_MRT4530_37060C.1.pep
AAFQCLACPLIKEAPPISPYTSTEKGEKGFCAGWETPFGAGFSNRHKGGGTD

SEQ ID NO: 135379 - protein, 48 aa, Oryza sativa
  Clone ID: PAT_MRT4530_37061C.1.pep
MGTYFARGGERTNPHKGQSTPTQDKETIWRRNPQPVERDQATWDEGPD

SEQ ID NO: 135380 - protein, 169 aa, Oryza sativa
  unsure (1)..(169): unsure at all Xaa locations
  Clone ID: PAT_MRT4530_37062C.1.pep
MIRSATATASMASRMGGRSARTIRRSRPKPTPSKWDDAQKWLVSLSNGGGGGVDGIHSGKVRPRNSNADDRRLLSSSSQNGRVSCSSVDGTLEYNLVAAPPDATAAGXKPPPTTLSETKKIDYCMVQPQHGSPAAVLRSVCLRDMGTEMTPIASKEPSRSATPLRASTP

SEQ ID NO: 135381 - protein, 136 aa, Oryza sativa
  Clone ID: PAT_MRT4530_37063C.1.pep
MHEGSGSSARLLVAVEAEKARGSAQRASEEYHNLKTRINSEVDLTLRMTNYALPLSVGAPDLIPLSLTSSLFSLPSHGKWQPHHRSYLPPCQLDRFHQPYNLVGLHMPNKCGVGKAKRMGHAISVRDDGGRSSGEG

SEQ ID NO: 135382 - protein, 203 aa, Oryza sativa
  Clone ID: PAT_MRT4530_37064C.1.pep
MGASAATGMQMVAARPCISASQGMLTSRAAVSRIGRALSTTTGFATCPRICYSSPLGSSKRSGVAIRAMSSESGPQGLPIDLRGKRAFIAGVADDNGYGWAIAKALAAAGAEILVGTWVPALNIFETSLRRGKFDESRKLPDGSLMEIVKVYPLDAVYDSPEDVPEDVKGNKRYAGSSNWTVKEVAESVKNDFGSIDILVHSL

SEQ ID NO: 135383 - protein, 111 aa, Oryza sativa
  Clone ID: PAT_MRT4530_37065C.1.pep
SHFGPNTKDGPSGFANMGVGPFGPLVGGDATPRIRAFDGGPWFPWKLIQGSTNSFSSILKQPGSSPGSCQACARIAFFKTSINPGSQGLILGVGLFVRKNPFSCFPQGIIL

SEQ ID NO: 135384 - protein, 864 aa, Oryza sativa
  Clone ID: PAT_MRT4530_37066C.1.pep
MEGRWVVVFWVLVVMCRGACGLNADGVLLLSFKYAVTADPLGALAGWGYADESPCAWNGVVCNGFPQADAAAAWTANVTGVAAAEGGNSSAAVPVPSNGTAAAAAGLGVNASLAAAATVSRVISLVLPNAQLSGSLPPELGRVEHLRHLDLSGNSLNGSLPPTLLNATELRVLSLADNDISGVLPDGGSVPYSRSLQELNLSNNALAGRLPPALCRLPSLAVLGLANNYLAGELPIGGLAALEVVDLSANYFNGSLPSDFGGSRLRFLNISSNKLTGALPTELSAVVPANSTVDLSHNNFTGTVPQAGPFAVQPAAAYEGNPELCGPPLKKMCSIPSSLSNPPNATDSPPAFAAIPKNPTRPSPGAQAQAPRGQEKLRPAAILAIVAGDLAGVGLLFMLFLYIYHIRKKRRQRRHHHHQQQQDSPLQHKSNRAIGDVKTLDIAGAREEKASTSDESSDCSASSGAETSDDDDDGDLKKRSMSFIGRSTPQHHSKKHDHPHHQAAAAPPAPATLVTVDGDGELEMETLLKASAYILGATGSSIVYKAVLADGTALAVRRIGESGGADKLKDFEAQVRAVARFRHPNILRLRGFYWGADEKLLIHDYATNGSLANIAFSRRFGASSPLQLSLEARLRIARGVARGLAFIHEKKGVHGNVKPSNILLGADMEPWIGDFGLDRLLSGEAVHRSTGASARLFGSKRSMHSTSSLPDLSQMPGAGASPCGSSSAATSAAAAAAPPPYQAPECLKNLRPNTKWDVYSFGMVLLELLSGRVYSEVELCQWHAGFVVEERSRLLRMADPTLRGEADGREDALLACFKLAFACCAMAPGKRPAMRDAVLVLDRIPCSSSSASTTTTTTAAAAIP

SEQ ID NO: 135385 - protein, 246 aa, Oryza sativa
  unsure (1)..(246): unsure at all Xaa locations
  Clone ID: PAT_MRT4530_37067C.1.pep
FKICCKKFITLDSVWLQGWDVTRWDEPTFRGVWLRDEWDGLVPGEEYSSQTRDQPIXENLAGELIPPGTSERRDDALPVAYGLGDGGGRGLGDGGSSGGEGGSGRSSGGEGGGGRSGDGEDCGGGSGGRGLLRRRSGGGVRGGTREGXGAAACHGHVGGEQAMVLFLLLLLAAGFLVHTPARRPSLSLARRRHARPHARPIVDGGCKQRPSHLSLVPLIKQKIGIIPSYKPNIIIKQTIIIYNSFY

SEQ ID NO: 135386 - protein, 139 aa, Oryza sativa
  unsure (1)..(139): unsure at all Xaa locations
  Clone ID: PAT_MRT4530_37068C.1.pep
LQGWDVTRWDEPTFRGVWLRDEWDGLVPGEEYSSQTRDQPIXENLAGELIPPGTSERRDDALLARSPCSPSGAVAYGLGDGGGRGLGDGGSSGGEGGSGRSSGGEGGGGRSGDGEDCGGGSGGRGSPLAFSSTRPLGDH

SEQ ID NO: 135387 - protein, 58 aa, Oryza sativa
  Clone ID: PAT_MRT4530_37069C.1.pep
MEPQRAFGRSLQCPNDIPAIRIGVHKKTDTAGDGNMENQTTPSDANVVVITRCYGTSR

SEQ ID NO: 135388 - protein, 77 aa, Oryza sativa
  Clone ID: PAT_MRT4530_3706C.1.pep
PGVQDISCPSFLLFFIILVSTLVPRRICIPFCSSDPLLSSVEAGGLELGEKVKISHHPDQAESWPSSSVLLIASYTA

SEQ ID NO: 135389 - protein, 764 aa, Oryza sativa
  Clone ID: PAT_MRT4530_37070C.1.pep
MEVADLENPTSRSSSQKSSRRSGSRRSQKSAGQQSSPTVFPEKKGKSKSSRQKHLVFDNKDSKKAKNNEQKNDVVDEKSNFSGYEIYSGKLFFDKKNRITGDQISANGKADISDVRLTSKALIWGSSLLSLEDVISVSYSSGVQHFIVHAYPSKKYLFGKTHRVRKDLRFIAPTVEEAISWVTCFAEQNIYVNMLPLPPTSSTEQDLDGPLSGALFDHPPIKCRTPPRILVILNPRSGHGRSCKVFHDKAEPIFKVPSDTLIMQASTYCSALAGFHMEVVKTTHAGHAKSLASTFDFSAFPDGIVCVGGDGIVNEVFNGLLSRSDRAEAVSIPVGIIPAGSDNSLVWTVLGVKDPISASLLIVKGGFTALDILSVEWIQSGLIHFGTTVSYYGFISDVLELSEKYQKKFGPLRYFVAGILKFFCLPSYFYELEYLPSSKEMTGHGKGIGQENFVSDVYTNVMRSRSKREGIPRASSLSSIDSIMTPSRMSLGDVDTSGSTAASTEPSEYVRGLDPKAKRLSLGRSNIVSEPEEVLHPQPHHSSFWPRTRSKTRTERNSVGVTTNDTRLSWAAPSIHDKEDISSTISDPGPIWDSEPKWDNGPKWDTELTWESDHPIELPGPPEDNEIGPSVELVPNLDDKWVVRKGHFLGVLVCNHSCKTVQSLSSQVIAPKANHDDNTLDLLLVGGKGRWKLLKFFILLQFGRHLSLPYVEYVKVKSVKLKPGANTHSGCGIYGELCRVKGHVLCSLLQEQCMLIGRQSRQST

SEQ ID NO: 135390 - protein, 140 aa, Oryza sativa
  Clone ID: PAT_MRT4530_37071C.1.pep
CGTQSLFQKEQVDENALRKVDPSTFQLSNRKLHMSRNPIYYRTSIDGAEDDEVKEERLRGPSASEVSMGNLSRATTATQQEGSTSRQDLLHEEPPKHVIQPMNAMDEEEDEHRARPLASDESKQDFELQHFKPAAISRRK

SEQ ID NO: 135391 - protein, 216 aa, Oryza sativa
  unsure (1)..(216): unsure at all Xaa locations
  Clone ID: PAT_MRT4530_37072C.1.pep
AHLEKQFHSYFYSGTHEMKLSDLTSIQRHDETVQDYIXRFRDMRNRCYXLADLAFQGLITPIKEFSSQDFESLSHLAQKVTLHEQRFAEAKKNFKKVNQAYPYMYDSEEEDDFEVAAAEWVRSKKVVPCQWVKNSGKEERYDFDITKVDKIFDLLLLEKQIQLPASHIIPSAEELGKKKYYKWHNSSSHATNGCKVFRQHIQLAIEGGKICRIESQ

SEQ ID NO: 135392 - protein, 105 aa, Oryza sativa
  Clone ID: PAT_MRT4530_37073C.1.pep
PISMTHRLTIVLLLGIIVTRLIQWLRRTNLTRFRGFIWVVNEASQYAVVIIHCWCLIHAFSFHSGPYNLGFQHLLCMALLASFKNPHLLSARIVCMPAMMCKPYL

SEQ ID NO: 135393 - protein, 290 aa, Oryza sativa
  Clone ID: PAT_MRT4530_37074C.1.pep
MQMSTNPNHYPVFPHSFRNQHVVSFQTSTIANGSGAIPVCPASSGGMNSDMTLLNTTPSTIVSTSSPNMLADSNQSLKYAAPMAVDWSYPELQLLNDGLLKYANEPGIMKYIKIAAMLPEKTVRDVAMRCQWMAAKKENTRRRKTDEHYLGKKTRDRKDKMVESSWATNRQVQTTDIRSPSTLACNTVRDNQFQSGASEIDRAMLNILEENARVLKQIGENIMTSQVQNNIDLFHHARRNISDLLQSMSQMPGIMSKMPPLPVSIDDRLASYILPGVNLAQVFGSSHLRS

SEQ ID NO: 135394 - protein, 105 aa, Oryza sativa
  Clone ID: PAT_MRT4530_37075C.1.pep
NNLATTRQLPPHRGFPSASRRPLPPRPPHPPPRPANPVANPGPRVDDRHHNSDPGEPSTGGRRLRAAKNRRPRAAKNRRPRAAKNWRRRRRLPHSPRRRCRVAPP

SEQ ID NO: 135395 - protein, 774 aa, Oryza sativa
  Clone ID: PAT_MRT4530_37076C.1.pep
MESVVVTAAEGAVKTLLGKLGSFLSQEPRLLGGVRGELQYIKDELESMNAFLQNLAATSSHSVQVKIWMKQVREMAYDAEDCIDEFQHHFGGYCGNGIVGFIYRMKHLMYTLKVRHRIVMQVQELKVRARDVSDRYARYSGANAIVDASDSKNTTTSISTCLSLDPRQVIGFIQDDLLVGINNRRDRVLTYLRVDSDQELRVISIFGFGGLGKTTLAKAIYDSPQVKNGQFHCQAFVTVSQKIDLKALLRDMLGQLIPPASDQHVSSDIEDEHLKAIEVWDVKRLGDKLRSLFLMIFESKELFLRRLFGQLHECPQNIQKVSESVLKKCGGMPLAINSIAGLLACRPVKSLEEMQNLQNSLGSEMDSFSTMEKIKQILLLSYNDLPYHLKTCFLYFSIFPEDYKIKRKNVVRQWVAEGFVSDKRGQSAEQVAESYFAEFINRSIVQPLDISDSGKVKTCRIHDIMLEVIVEMSVEQNFISLMGDQHTMISYDKVRRLSLHGHGAYNLSTSLELSHIRSLSSFGDMPRALRFDRARLLRVLDLESCEFLRNRQHHHICALFHLKYLSLRRAHNIDRLPRKIKKLQSLETLDLRGKGIDKLPASFIELENLVHFRSGSTYLPHGFGRMKSILTLGLIEISDDTSWRIQEIGCLMQLEKLCIWSRDGMNKENWESLLTVIENLSRRLLSLSIETDRRTCSLPLDFSSSPPLLLRSLLLYGSLEALPSWMASLDNLVKLTLGGTKLEEDDIQILQKLPRLFSLRLWFAFAVEKFVVAP

SEQ ID NO: 135396 - protein, 462 aa, Oryza sativa
  Clone ID: PAT_MRT4530_37077C.1.pep
MAFLKTLNPLLRRSPTPIPNPRSLLSLDAFLAASSPTAASHATAPAPFAAAAHHHVPIRSGGPLFLSSPPWMLSQSATPLTAAAAALRARLRRARALAGGGAQAVADAVGWEPRRISRDESEVAEAVTGGRERFLNLPNLVSIGRMASGPVIGWMIVNEWYLPAFGTLALSGASDWLDGFLARKMGINSVFGSYLDPLADKWNSWSDFVNLDAIHREKVKPLFISKVNTVFQLMLVAAALLQPEFGTEETQNYITVLRALWLFYGLQTATGNVFPKWILYAVKHNVKVLDVELDMYDKTALPSRIFTCRSVEELSLQMGEAPDEDLEHELPACPVFERLTTLEIARKGAETDAMPIDGMTFQCPFLETVIIQCSKGDDGINKLVNVLAANGINPKKIQVNFYEDIEEMERAENRRIIEEREKELCNFEKMAKKNPEWVDESRYADSNPETDSDEYDDDYDDF

SEQ ID NO: 135397 - protein, 157 aa, Oryza sativa
  Clone ID: PAT_MRT4530_37078C.1.pep
LDGFLARKMGINSVFGSYLDPLADKVLIGCVAIAMVEKDLLHPGLVGLVVVRDLLLVGGAVYKRASSLGWKWNSWSDFVNLDAIHREKVKPLFISKVNTVFQLMLVAAALLQPEFGTEETQNYITVLSWLVASTTIASTLFVKHLEQDTEGRGQTSE

SEQ ID NO: 135398 - protein, 338 aa, Oryza sativa
  Clone ID: PAT_MRT4530_37079C.1.pep
MAMARCSLLPILAAVLLAASLSLPPRAAAYAAMVDSLLPASATALSFEEGYTQLFGDSNLMLHGDGKRVHISLDERTGAGFASQGAYHHGFFSASIKLPADHTAGVVVAFYMSNGDVYERTHDELDFEFLGNVRGREWRVQTNVYGNGSTAAGREERYGLWFDPTQDFHRYAIRWSHDTIIFYVDETPIREVVRTASMGAQFPSKPMSLYATIWDGSSWATSGGRYKVNYKYAPYVAEFTDLLLHGCPAGSPPPCEGAAASATMPPGQRSAMERFRARHMTYGYCYDRVRYHAPLPECSVGAEAEAFLPSGEARSTDRRGGRHGKRHRRAGGGVDSAL

SEQ ID NO: 135399 - protein, 56 aa, Oryza sativa
  Clone ID: PAT_MRT4530_3707C.1.pep
LAELPVRGATIHEANQTPAPRARAVSSYKAQDRAPTLPRAGPTHSTTRARTLCHGR

SEQ ID NO: 135400 - protein, 66 aa, Oryza sativa
  Clone ID: PAT_MRT4530_37080C.1.pep
MVKEPIDNHCGCAKVDGYISHQRNLKSIMYFPHWLPMRFPMNYFGLAILALFADPDEESTKEMRPP

SEQ ID NO: 135401 - protein, 71 aa, Oryza sativa
  Clone ID: PAT_MRT4530_37081C.1.pep
VIAIISQGRGTGGGHAIRHRMLHLPFTDGSSPNTMTMGAVNRNRMSRRRMSTTSCRPPAPELLNGAALPAI

SEQ ID NO: 135402 - protein, 216 aa, Oryza sativa
  Clone ID: PAT_MRT4530_37082C.1.pep
MATTALPLLHLLPRIVCAAFFACLPGLVAGIRKDIGLAAPIMCRSTVQGRHLISDDNGRTPCPSHFAHIYCLTKETDVLKLKVARPVTSGTYRNVFDFCMGRCRHSSASVVHENAYASDFHHCFLLQQNSSGSADSGSGPRLDGINISIGRRGESCSSVCRAKGQSCVPSRLSVLNKCEILQKYMRCKSGCFSNLGPDQPAQVVDEAPSNLVVVVL

SEQ ID NO: 135403 - protein, 767 aa, Oryza sativa
  Clone ID: PAT_MRT4530_37083C.1.pep
MAGNVIRLELSEASLGGQVLQGRMSPSLASLEHLEYLDLSALVLPGINSSSPKFLGSMTNLRYLDLSGCFLSGSVSPWLGNLSKLEYLDLSFSTLSGRVPPELGNLTRLKHLDLGNMQHMYSADISWITHLRSLEYLDMSLVNLLNTIPSLEVLNLVKFTLPSTPQALAQLNLTKLVQLDLSSNRLGHPIQSCWFWNLTSIESLELSETFLHGPFPTALGSFTALQWLGFSDNGNAATLLADMRSLCSMKSLGLGGSLSHGNIEDLVDRLPHGITRDKPAQEGNFTSLSYLDLSDNHLAGIIPSDIAYTIPSLCHLDLSRNNLTGPIPIIENSSLSELILRSNQLTGQIPKLDRKIEVMDISINLLSGPLPIDIGSPNLLALILSSNYLIGRIPESVCESQSMIIVDLSNNFLEGAFPKCFQMQRLIFLLLSHNSFSAKLPSFLRNSNLLSYVDLSWNKFSGTLPQWIGHMVNLHFLHLSHNMFYGHIPIKITNLKNLHYFSLAANNISGAIPRCLSKLTMMIGKQSTIIEIDWFHAYFDVVDGSLGRIFSVVMKHQEQQYGDSILDVVGIDLSLNSLTGGIPDEITSLKRLLSLNLSWNQLSGEIVEKIGAMNSLESLDLSRNKFSGEIPPSLANLAYLSYLDLSYNNLTGRIPRGSQLDTLYAENPHIYDGNNGLYGPPLQRNCLGSELPKNSSQIMSKNVSDELMFYFGLGSGFTVGLWVVFCVVLFKKTWRIALFRLFDRIHDKVYVFVAITWASIGREATTD

SEQ ID NO: 135404 - protein, 105 aa, Oryza sativa
  Clone ID: PAT_MRT4530_37084C.1.pep
REIRLGLKSGLHTGWPSSNKIPQWHTQNKLIYKWDPDRAPIFLVRLITGTIGNLHPNRGQSRIRTSLQHLAKYGKYQIPNSNHFCDRAPTSTGNAQPPTPIGGRL

SEQ ID NO: 135405 - protein, 99 aa, Oryza sativa
  Clone ID: PAT_MRT4530_37085C.1.pep
TLGLPWARGYTSNWNSFTLCHSNALADGDWFYRGNGTHALSSYPYRFRGRRPMGARGGSFALPGSKSDRHHHPVTESGSMGSKSVPTRSNRVYPPNWWE

SEQ ID NO: 135406 - protein, 591 aa, Oryza sativa
  unsure (1)..(591): unsure at all Xaa locations
  Clone ID: PAT_MRT4530_37086C.1.pep
MHDLLSNRSVTRPAISICNSYFALDLMTSYYLILKNADGNCARNIYLQKHLNKQVNNRNVHVWRLQQLASMDLGTVLACILSFLAAAFSSAGGVGGGSLYVPILNIVAGLSLKTATAFSTFMVTGGTLSNVLYTLIVLRGHEKGGHQPLIDYDIAVVSQPCLLLGVSVGVICNVMFPEWLITALFAVFLASATFKTYGTGMKRWRAETAAARRMLEGGSSLGDGAGEALLGQKDGDGHRRQCVDLMVLVTIWLCFFVIHLFIGGEGAKGVFDIEPCGVTYWLITIAQIPIAVAFTACIVHQKRKSHAQNSQEFDQAISVKSKLESLPVYVFPVAALLTGVMSGLFGIGGGLLLNPVLLQIGVPPKTASSTTMFMVLFCASMSMVQFIILGVDGIVTALVYAITCFVASIVGLVVIQGTIRKSGRVSLIVFMVAAILALSVVVIACSGAVRFHLVNVCPLLHLVPGTRYLIPGIWYLVPVWYWLHAEFMKHQALQLFVTNCTKANSSRNGSKRVSAARGGAGIVVGVASELNCAPLPRLDARGTAEGHAQPTLEWIGSIAAISNMRDAVPAXGPLMRSSDRDTEISPSQNYP

SEQ ID NO: 135407 - protein, 69 aa, Oryza sativa
  Clone ID: PAT_MRT4530_37087C.1.pep
SFSCRILLIIMNKISTIFSIVSPCYMEPEMGLDHCDKSYFYHHHTRIPIVIYHSSTDPVDSPYWSSLLL

SEQ ID NO: 135408 - protein, 213 aa, Oryza sativa
  unsure (1)..(213): unsure at all Xaa locations
  Clone ID: PAT_MRT4530_37088C.1.pep
GLFGRXXSVLANWRARTIGWLEKFGFLSLXLRFGWPSKNPGTGMKRGFRNSDQVTPGPAAATAREARVFHPGGKPDCPWSNPFSQLPTTGHPIQFGSSVEGGPSVGRYLKXPFAWRPMVEGRGLKAEVSTASSALPFTDTRRXYDVXAARQTGVLNRLSAEPLLLSACSIFEPPRPPRAKPGXRVPEGGLCALFGLNXSRRALPLEXXKGHKG

SEQ ID NO: 135409 - protein, 82 aa, Oryza sativa
  Clone ID: PAT_MRT4530_37089C.1.pep
IRADPALGASSAGLLAGDLAPATTEGGGGGRSTHVAHRSRSSSPLPSSPLPLPPAVAHHAAAAARRAMPRDGNGDPITDSPR

SEQ ID NO: 135410 - protein, 102 aa, Oryza sativa
  Clone ID: PAT_MRT4530_3708C.1.pep
MVCLRICGRFRHRLGKSITEFTNVRSPTQIELGRHCIVSGPMSPSPTWRPVNLWYKRDPPGGPKRSNLRANASTTAYEVGAYRSQVAGISSRIDSTMISSVS

SEQ ID NO: 135411 - protein, 357 aa, Oryza sativa
  Clone ID: PAT_MRT4530_37090C.1.pep
MDSKLSMLFLLLGFVACSATASHHDPSVVGYSQEDLALPNKLVGLFTSWSVKHSKIYASPKEKVKRYEIFKRNLRHIVETNRRNGSYWLGLNHFADIAHEEFKASYLGLKPGLARRDAQPHGSTTFRYANAVNLPWAVDWRKKGAVTPVKNQGECGSCWAFSTVAAVEGINQIVTGKLVSLSEQELMDCDNTFNHGCRGGLMDFAFAYIMGNQGIYTEEDYPYLMEEGYCREKQPHSKVITITGYEDVPANSETSLLKALAHQPVSVGIAAGSRDFQFYKGGIFDGECGIQPDHALTAVGYGSYYGQDYIIMKNSWGKNWGEQGYFRIRRGTGKPEGVCDIYKIASYPTKNVTGWGS

SEQ ID NO: 135412 - protein, 67 aa, Oryza sativa
  Clone ID: PAT_MRT4530_37091C.1.pep
MAAKLDSQFSMGRASNVAVHVDLTNKVTGRVSIKANTSEQLKIALLGVCSMTMYLWNRMHPFIDRNY

SEQ ID NO: 135413 - protein, 315 aa, Oryza sativa
  Clone ID: PAT_MRT4530_37092C.1.pep
MFMCSIRGVESRPPGGFVNFINTPSNHVHHVAEGSPSQPINVVNGHVARTDKRLSWMKDEDLRLISAWLNNSNDPIESNFKKNDKYWGDVAAAYNSTTPKNRARLVKQVKDRFGKIRKKVGNFCCSWKEVNSLYASGESNEDLMNKAQKIYENDFKDGPFLFMHCWNELKKQPKWHAYLEQLDKSNKRKADYNDVIPLDDEEDIPRPIGAKASKAQRSCKEKSKVQVCTTELEDDIRKFMDAHAATKEGQNEVLETQIRVSIDNHAAKKLSRQTAMIETYRDLMNKDTRKMPDDMRSELVHMLKCMREEIFNKNQ

SEQ ID NO: 135414 - protein, 127 aa, Oryza sativa
  unsure (1)..(127): unsure at all Xaa locations
  Clone ID: PAT_MRT4530_37093C.1.pep
MELRWISASGKWRTIFFSSSRTQRWQRRPKATIDDDERRGCRSEHDGNPXFIARTASGEVSAQGERRPGWSLXCGAERGGGAGERRPRRRQTAAGIGGGGGERRXARGERFRRRRRTGLEGMGRGRL

SEQ ID NO: 135415 - protein, 91 aa, Oryza sativa
  Clone ID: PAT_MRT4530_37094C.1.pep
MAFPVICFVKSNMFTQMVKLCEQENLYTERSSINVGEINYSFCKAVAVGRLAAFCPDMHVLLPASVSITRLLSGMLHAEFSLRHFTGFLLQ

SEQ ID NO: 135416 - protein, 67 aa, Oryza sativa
  Clone ID: PAT_MRT4530_37095C.1.pep
SIRFARAKLIKAIKAIYIMHALLLIAPAGNRTMLVFASGSCIYAGFQCLILPVDQSTVNSLISTPVN

SEQ ID NO: 135417 - protein, 82 aa, Oryza sativa
  Clone ID: PAT_MRT4530_37096C.1.pep
INIYVGNAKMTYIVKQREYTIKMTCMYVVTSSWYSICVMNVCVCRPGAVCVCGEWRQMRHALYTYVCKSLTCCLNYTCHVNK

SEQ ID NO: 135418 - protein, 89 aa, Oryza sativa
  Clone ID: PAT_MRT4530_37097C.1.pep
SVLDLFRCCSSSQAKWTWKFSWPFFTQIVRIHYILSIWPASAVYENDHPIRHFQIYVMQYFFVFLKFATLCSITSSFRSSNCPAFIRIL

SEQ ID NO: 135419 - protein, 52 aa, Oryza sativa
  Clone ID: PAT_MRT4530_37098C.1.pep
GHGHGSEWPLPGQATMGSQQQQRHRARIHASGSGARTSSHPAGADHGHSPRR

SEQ ID NO: 135420 - protein, 207 aa, Oryza sativa
  Clone ID: PAT_MRT4530_37099C.1.pep
MRREGPQNCRLSPRRNRPHDVAVSSKIRIGARRPADDDIEASPRPAFPGMSTTGRGGRRRILVGARRRSVVSPRAVLARRIHVGEAARYPRQRGGEARRICVDAATRRGESASVRGAADARRVPLAIWSASWTATSWKTSAAPQRRSPAGRTRWSRGGGGRAARPPPLPTAVPTTVHRSRPPPPPLPTTAPSKVKKETRLVPNSCSP

SEQ ID NO: 135421 - protein, 54 aa, Oryza sativa
  Clone ID: PAT_MRT4530_3709C.1.pep
CGKEREEEKRRASPTMTATDAERTTTKAARGMQSSPANRGRTVPAVEDDRGTTA

SEQ ID NO: 135422 - protein, 35 aa, Oryza sativa
  Clone ID: PAT_MRT4530_370C.1.pep
MGRNVGDGLAGSNELSCVMRSNNGDVGSGVSRGGQ

SEQ ID NO: 135423 - protein, 36 aa, Oryza sativa
  Clone ID: PAT_MRT4530_37100C.1.pep
MANNIRHWLPNNITGHRKPANSGEGSFPALVLFLGP

SEQ ID NO: 135424 - protein, 90 aa, Oryza sativa
  Clone ID: PAT_MRT4530_37101C.1.pep
MARLPGIVVEKKKKKKKKRLGSYAQAAIRKLNWLVFSIIVLLAERYGTDFGHSPQWRDGQGQESLVTSGGQLSSSASSEHGDTPREENPE

SEQ ID NO: 135425 - protein, 272 aa, Oryza sativa
  unsure (1)..(272): unsure at all Xaa locations
  Clone ID: PAT_MRT4530_37102C.1.pep
WRRRPRGGRCAAVRRPWTTSTTLSSRASSSASRRRTGSSARPPPASGGAASSAPAAAPPAVRSSSTAAAATPSSATTTTPDAAAAAQSSFRRPLPPSSPASTAATSPSASSRTAIHGGSSTAAAASSSSPRGSPAGCAIASRTSSSASXDAAVPADPSPGGDXNTTAASARSCAATTTTTGTPACPPTSAPPRRSSSAPRGGPGPATAPGAAGVSRAGPPACTSPARSPSTSWGVHRAASTGGWTTTATACLFIVVTLTVTARSRGWRFRRR

SEQ ID NO: 135426 - protein, 173 aa, Oryza sativa
  Clone ID: PAT_MRT4530_37103C.1.pep
MLEGGNFSNQETLYEVLSVRKDATYDEIRAAYKSAVLNTHPDKAQMALNPLVSSSERNEFLSVQKAWEILRYPKSRAEYDKQLQSSRQNLEIVATEIEIDDMIVESTADSVELLYPCRCGDYFSITSRELGQIGISVREDGEMELHTSDSVPSSVVLGCGSCSLKARLVTNKT

SEQ ID NO: 135427 - protein, 107 aa, Oryza sativa
  Clone ID: PAT_MRT4530_37104C.1.pep
MYLHLAVYASVALATDGVASSHHGDAQAQLGDVVAALAASRAARSAAATSVSRRTRLRPAALVEEPHGPSTILTTSSPRTTGAGLLEFAADWTEEETDAAGEFWTCG

SEQ ID NO: 135428 - protein, 60 aa, Oryza sativa
  Clone ID: PAT_MRT4530_37105C.1.pep
TVLEGGIVKTGGTVGCSLYAWAVKRFGPFPDFDLNPPQKEFWDSFFASELYSQGFCILSP

SEQ ID NO: 135429 - protein, 117 aa, Oryza sativa
  Clone ID: PAT_MRT4530_37106C.1.pep
MEGDSFSGMANGGQVDNKLIQTFHKSFVQVQSILDQNRMLINEINQNHESRAPDNLTRNVGLIRELNNNIRRVVGLYADLSASFARTMDASSEGDSSGTLRSSDGAGRTGQKRVRPG

SEQ ID NO: 135430 - protein, 126 aa, Oryza sativa
  Clone ID: PAT_MRT4530_37107C.1.pep
MECCSRSVIHVTTRPSIMGGDVGGNGSGDLGVEEDNDGPDEPRDAEQRNKIWSTANRFNKLSDNIFDGISPIRDNNDAGALEEMGMAMGGAVDPAPPLPSLAFPSPASLLRLGRVDPLPLKPLLLS

SEQ ID NO: 135431 - protein, 77 aa, Oryza sativa
  Clone ID: PAT_MRT4530_37108C.1.pep
EGENERRPALENTSFLPRRRSRIASAVIIDYRCPGEPLFDSSRRHHLLDLTTLVHAVTPRTTAAHTTVTIDSGHLRP

SEQ ID NO: 135432 - protein, 496 aa, Oryza sativa
  Clone ID: PAT_MRT4530_37109C.1.pep
MVSLAGSQIPSPGQSPCAAARSQRRGAGYSMRTIRSALLQPDSCPGSPHVAAAYDAAGADSDMENLTDSVIDFHLSELAATAGPAHPAAVAKSSSANAAATEMLELSRDFSDYSSFNSDISGELERLAAAAAAVVTPRSDAPQVGAVDLNELESMDLSVEAAPLERVEPFVLACVRALGPDAAPDARRTAAARIRLLAKHRSDIRELIGVSGAIPALVPLLRSTDPVAQESAVTALLNLSLEERNRSAITAAGAIKPLVYALRTGTASAKQNAACALLSLSGIEENRATIGACGAIPPLVALLSAGSTRGKKDALTTLYRLCSARRNKERAVSAGAVVPLIHLVGERGSGTSEKAMVVLASLAGIVEGRDAVVEAGGIPALVETIEDGPAREREFAVVALLQLCSECPRNRALLVREGAIPPLVALSQSGSARAKHKAETLLGYLREQRQGGGGCRVEPVAASSLARFIVLRCVTFSLTPTSGSAAPSIWVTYSYT

SEQ ID NO: 135433 - protein, 37 aa, Oryza sativa
  Clone ID: PAT_MRT4530_3710C.1.pep
DLIGEFHILGMLMILIRTKILTLMGRLISCPGSAIPH

SEQ ID NO: 135434 - protein, 63 aa, Oryza sativa
  Clone ID: PAT_MRT4530_37110C.1.pep
WKTSRCRMNGHPKTDREAASHHRRIIWLNNHNHMNHGLFNTSLKSIDKKPRFARIMRCKNVSF

SEQ ID NO: 135435 - protein, 100 aa, Oryza sativa
  Clone ID: PAT_MRT4530_37111C.1.pep
MTLIQWMLEEQSANRGRRSQMPRRHRSSMGVDSCCRESRGKVALLPTTAGAPPHPTAVPPPHHPSPNPTVVPQQRVEFGDGFGDGSLLNRRRCAVGQFGG

SEQ ID NO: 135436 - protein, 102 aa, Oryza sativa
  Clone ID: PAT_MRT4530_37112C.1.pep
MEMTPTRTRTETALTRTRMEPAPMGWGSCAAQGKRLWEEERLGWGEKSWRRDLACGGGGGTPEWLAPSFNGTAPASLAPSSCHRGAREPTWQEEAPAMLALP

SEQ ID NO: 135437 - protein, 65 aa, Oryza sativa
  Clone ID: PAT_MRT4530_37113C.1.pep
FFFFFFLEQVVLVILLADVTVKSALLCHSAYHHLQVLGHITGHPHCTSHSTTGHPIRATTRSGRR

SEQ ID NO: 135438 - protein, 291 aa, Oryza sativa
  unsure (1)..(291): unsure at all Xaa locations
  Clone ID: PAT_MRT4530_37114C.1.pep
MARGLDTGQGEAAVVAAVEGSGFGHRALHMAASGGSVDVLRYLVEDLCLGVNQSCFSXAGQTPLFLSSIHGRAAATRYLLDHGSNPAIDKIVLPLHGAAVKGHCEIVELFLSKGVDVDLYSIAGTPLLAAAISGQHSTMKILLEHHADPNRVFNLDGTPLIMSIVSGSLECVKLLIKVGADMNFRDSNGVTCVMVAANHGSSVIMKCLLDAGANPNIPDEQFNTTPIEVAANHGRRDIVEMLFPLTSPISTLSDWSIDGIISHVENFGLKPRVFVPLSAHLQLHIIVYHHY

SEQ ID NO: 135439 - protein, 59 aa, Oryza sativa
  Clone ID: PAT_MRT4530_37115C.1.pep
GRRKCRTSNKVCHNCVCVPGSKPDLQFSQLVYTKAPLERATDNLYTEFHYDIFSIQNEL

SEQ ID NO: 135440 - protein, 72 aa, Oryza sativa
  Clone ID: PAT_MRT4530_37116C.1.pep
YAIYFNFTGWICTICMTSALNIYEIISSHPLWIGFIVLDIQISFGEDMSIYSAGYIYTIYVSKAYFMYVSTI

SEQ ID NO: 135441 - protein, 54 aa, Oryza sativa
  Clone ID: PAT_MRT4530_37117C.1.pep
AYNPTGRSSRWTLAQISLRGNVLIVDMAIFTRSLQCWIFFCHYGRAWAQDPLNR

SEQ ID NO: 135442 - protein, 104 aa, Oryza sativa
  Clone ID: PAT_MRT4530_37118C.1.pep
MGTRVRRRWRDGTLRPPSCRAISRRYRSPRPRSREDDTDRVDEQRLRVLAAGASPGDDWSVEGLRHTASKIATLRMKLEEDDHDGAGDDDEEFVRRQQAGLVQG

SEQ ID NO: 135443 - protein, 587 aa, Oryza sativa
  Clone ID: PAT_MRT4530_37119C.1.pep
MDGTSEPLSTLVENEVEPICVVPPDNSAPIIGSEQPAPNVEGVEKPAIEEEPVREPDIFDNEEEYVGVDDEHLYVPSQPKKPPQFAEPDGNTGTGQSSQPPVAGVRAPEEKAIRHYAVKKGFVFAGLKTDPTRFLAHCAAEGCPWRVHASKLPGTKVIQIKVLPFEHTCASTKLQENKMATQGWVADRIGDWVKKNPKKGASDARHKLEEDFQIKLKYSKAWSGFKPYVGVDSTRLTGKYTGQLAAATSVDGHNWLFYVSYSIFDSETDENWLWFMRHLNKAIDNPEGLVISTDACKGLEKAVDAAFEKVEHRECMRHLYANFMKKFQGPAFTDHLYPTARSYTEDGFRWYMQQIYQVRSDAIEYLEKHHSRIWYRCGFSESSKCDYLTNNVSESFNNQIKKLKGLLLHELVDGIREMIMEKMALRREVGKKLVDGILPNVMKELNDATVCLRVVKVVRSDEGFAEVTLVESDNNTRRHTVDLQNQNCSCRICKLAEPVHQDEQTIQPTTKKRKRQVAEAAGQAEAAPVKKKNPPKKKGVPGAAAEASSSAPVKKKNTPKKKKTPQKRKNLVASTAPPARVVRKLSD

SEQ ID NO: 135444 - protein, 99 aa, Oryza sativa
  unsure (1)..(99): unsure at all Xaa locations
  Clone ID: PAT_MRT4530_3711C.1.pep
RQQYGIRASPFLQXGGFQLKNNQVWQQLGLVGQQFPYQGINIVQGIGQQVQLQQVGGLYFDRNLGQGQALLGFNGPFKYGIYPREYGGPRTISPLGGVL

SEQ ID NO: 135445 - protein, 66 aa, Oryza sativa
  Clone ID: PAT_MRT4530_37120C.1.pep
WPSQRSRLLVGFVVVLLPVSSTPPRRGSAPPPPATAPPSSSPSTTSSSSSPPTSDPPSRRRLPCGR

SEQ ID NO: 135446 - protein, 269 aa, Oryza sativa
  Clone ID: PAT_MRT4530_37121C.1.pep
MVSLHRVGSPRKREHVHGTSTAKGRHTHTLLPSTRPTTTTTHDAARAWGRRFKSNQRRRRRHHHHRLTSPRLHPDRYDMIHRTVRTSPYYVSPDLTVQRRTSPPQNTYTTRATTVSRTGISPARSIATHPLPPRVRVPSRRRVFVLHERAGYYGDCVPVGCESARNNAFVACARAGAPTRHDDPNTGVRSAWRPSGPVVRLPSSCPMATRRDRTRGGRLVSRLLTNSARPPRDRILFRPPVSRDCLCRAKRMAIGKNGGGDDHDDGDDE

SEQ ID NO: 135447 - protein, 84 aa, Oryza sativa
  Clone ID: PAT_MRT4530_37122C.1.pep
YLLEYEFSQVLSRRNYCSEMFVRFQGWTLEQTNELAAACTPKVTTIRTVVHFTQLFTHVYMLWKCRSIRLFLIVRTSWTDCIHY

SEQ ID NO: 135448 - protein, 116 aa, Oryza sativa
  Clone ID: PAT_MRT4530_37123C.1.pep
MAKNYPFTDHEMALFPIEYQTMIEGISIDREVIHEDFHNVLDHVRENSHHTPLKRCRSVAQSEGYPTISIGTVWTCERSLTLVLWMDGNLMIPGIPIKEIEKRMICQPFQNFINEG

SEQ ID NO: 135449 - protein, 60 aa, Oryza sativa
  Clone ID: PAT_MRT4530_37124C.1.pep
HIMLSIKPPYLASSPPESYVRSERADLVGGRRRRRRRLARAHGHGAAHCALAVRDGAPSC

SEQ ID NO: 135450 - protein, 186 aa, Oryza sativa
  Clone ID: PAT_MRT4530_37125C.1.pep
MATGGDAHGRRRRQSAAREATADGVQDGGVDRFNAETEGEDLDNEVDDGVDDEDGEVANVIGAGSVKIIKFSVLETPHTGVVIFNAVLKCIQEWNLENKLFAITLDNVSNYGSMAKFHFGPAFGKRAKPRLERLKTTLEGMFNEYAQQTINLGSAQQWGGNVEIGSCDELAYWDQHVKLITNGRQQ

SEQ ID NO: 135451 - protein, 79 aa, Oryza sativa
  unsure (1)..(79): unsure at all Xaa locations
  Clone ID: PAT_MRT4530_37126C.1.pep
LVVLLLCSSGNDNSREGRKEKFSQIIFXRKNSSLKFDHLAYPTVEMALIPTCHARKFTSNFRTYLCIKSSSRNQPRYTN

SEQ ID NO: 135452 - protein, 2295 aa, Oryza sativa
  Clone ID: PAT_MRT4530_37127C.1.pep
MQASMLNIVIGSHVWVEDKDSAWVDGEVFRIDGKNAHVRTTKGKTVIANVSDIHPKDTEAPPDGVDDMTRLSYLHEPGVLDNLAVRYARNLIYTYTGNILIAINPFQRLPNLVDVRTMEKYKGANLGDLDPHVFAIADVSYRQMMNEGRNNSILVSGESGAGKTETTKLLMRYLAYLGGRSGTGGRTVEQQVLESNPVLEAFGNAKTVRNNNSSRFGKFVEIQFDKSGKISGAAIRTYLLERSRVCQINSPERNYHCFYFLCAAPPEDIKRYKLGDPSSFHYLNQSSCIRVDGINDAEEYLVTRNAMDTVGIIEQEQEAIFRVVAAVLHLGNINFAKGSEVDSSVIKDDKSRFHLNTAAELLMCDCKKLENALIKREINTPEGVITTTVGPSSATVSRDGLAKQIYSRLFDWLVNRINASIGQDPNSDKLIGVLDIYGFESFKTNSFEQLCINFTNEKLQQHFNQNVFKMEQEEYTREQINWSYIEFVDNQDVLDLIEKKPGGIIALLDEACMFPKSTHETFSQKLYEKFKNHKRFTKPKLSRTAFTIQHYAGDVIYQSDHFLDKNKDYVVAEHQELLNASRCSFVSALFPPASEENTKSSKSSIATRFKVQLHELMETLSSTEPHYIRCVKPNSVLKPAIFENTNVLQQLRCSGVLEAIRISCAGYPTRKLFHDFLHRFRILASEIVKEKNDEKVTCQKVLDKMGLQGYQIGRTKVFLRAGQMAELDARRTEVRNNAARGVQGQFRTHVAREQFLILRNASVCLQSFVRARLACKLHECLRREAAAIKIQKNIRCYFAWRTYSQLRLSAITLQTGLRTMAALKEFMFRKQNKATTHIQMDIKLLVTQWRCHRDNSNYLKLKRAALTYQCAWRRRVARRELRQLRMTDLEKSKVAEVSKLQAALNEMEQRMQDVTAMQERESAKKAVEEALEQEREKISSLTSEIEGLKALLVAEQEENDLTKKAHANAQERNEELSKEVEDADGKIKQLSDTVQRLEETIQEREALLLAERQEKEEASAVIAESQARNEAFASKLEDAEKQIDLLQETVQRFEEAITKLQSSVTIEKQQHEETVVQLAEAQAKIDELLREAGDTDEKSTQLETTIQRLEESLTEKDALLTTERQETEATKKLLSEAQYKNEELLKKIEDADKSIAHYHDTTQRLEENVTAVENSLKAERQHNGAIMKQLADAQVEIGELQRNLEDADRRNNQLQDSLQRLVEDATTSEALLVAERQENEVTKKTLTEALDQIEELVKEVECAKNSVYQLQDNIQRLEQNASAREADLLTERQEKETTSKALAEAQAKIEGLLEEISSANKKTDLLQKTIERLEEGATTTDALYLTERQEHDQTKKAFSEAQEINQQLYRKIEEAEKNIEQLRENVERLEERIAYIDSLLAIERRENNETKKELADAQKEIEELLDEMQDNVASIAEHEDTIRRLEENVGAKESLLLTEREQNASTLKLLAEAHLEIDELIRKLEDSDRKSDSLQSTIKRLEEDGIAKEALLLTEKQAHEATRMTLTEALEKNEELLKKIHDDDKHILELQFTIQRLEENTAAKENLLLREREQNDATTKAQIESQERNEQLLKRFVDVDRKIDLLQDTIERIGENSTIKDALLLSERQEKDAIKKELVEAGERNEELIMKIEDTDKKIEHLQNAIIKLEGDIEAKDISLEAAREENDTIRKSLAEAQEKNEELLRKISDNEYRIHLLQDTAQKLQVDAISRLSSFVMEKQESDAAKRALTEARERNEDLLKRNEDLLKRNDDLIKKIEESSKTITQLQETLQRLEGKSTNLEAENQVLRQQATATPPSTAKSSASRSKITRIHRSPENGHILNGDTRQAEIKPSTGTSETIPSIGNPPDLNNEKHVEQGEKLQKVLNQKYQSQQPQDDQQWLLTCISQYLGFFGSKPVAALLIYQCLSHWRSFEAMKTGVFDSILQAINSATESTSCNVLMVAFPPLKAQNDTRALAYWLSNLSTLTVLLQRSFKTTRTAISTPQRRRFSSERIFHASQTSNAGLAYLSGQPVVGAAGLPQVEAKYPALLFKQQLVDLIEKVYGMISDSVKKELNPLLELCIQDPRTSHSPAKGHANGLGQKNQLGHWLAIVKVLTNYLDVLRANHVPSILVHKLFTQIFSLIDVQLFNSYRLMRFCLIQFAGSAWDALKHIRQAVDFLVISLKPMRTLKEIRTDVCPALSIQQLERIVSMYWDDINGSNAISAEFTSSLKSAVREESNTVTTFSILLDDDSCIPFSLDDIAKTMPIIEVAEDDLLPFVRENPSFAFLLQRGNS

SEQ ID NO: 135453 - protein, 78 aa, Oryza sativa
  Clone ID: PAT_MRT4530_37128C.1.pep
SAANPSALAPKRKAKKKKSKPTDDLHHRLHANRLLQLLLLQLTSQGEITHLDHLTCLFFSLLLLLRLLCSRRPVIVLH

SEQ ID NO: 135454 - protein, 181 aa, Oryza sativa
  Clone ID: PAT_MRT4530_37129C.1.pep
MAPAAAAAAALVRLPLRPARATLPNQGFGRRRAGASSLAVRAKDSDDLRVLISEKPAEPAPAKREGWEGFGREVGDGDGEVQVQGESTSWNVLNQIGVELDSENSYTALVYGTSALVTIWISSIVVSALDSVPLVPQVMEVVGLGFTVWFTSRYLIFKENRDELITRIGSIKKQILGSRGD

SEQ ID NO: 135455 - protein, 112 aa, Oryza sativa
  Clone ID: PAT_MRT4530_3712C.1.pep
MDYWLGFFRGAGDNIFDAIAVAASDHPAALRSRRDAFAQRLYMLLHPEGAASIPSICSSDRADVIADDGGVPCREDPVAAETERIKDVLLNDQERQSLPLPDTLTRLEVHTR

SEQ ID NO: 135456 - protein, 270 aa, Oryza sativa
  Clone ID: PAT_MRT4530_37130C.1.pep
MAPAAAAAAALVRLPLRPARATLPNQGTHARTHARRDTVHSPRIFRCMGDGRAKTLVLFTPQGFGRRRAGASSLAVRAKDSDDLRVLISEKPAEPAPAKREGWEGFGREVGDGDGEVQVQGESTSWNVLNQIGVERAQAHKVYTRFLFILYLPNAMHNMQFPESISSNVSSINDALYCGSPLQTTLMQLDSENSYTALVYGTSALVTIWISSIVVSALDSVPLVPQVMEVVGLGFTVWFTSRYLIFKENRDELITRIGSIKKQILGSRGD

SEQ ID NO: 135457 - protein, 39 aa, Oryza sativa
  Clone ID: PAT_MRT4530_37131C.1.pep
MSKSKFCVLEQFWVSELTSLFFVTISWKALFQEQLYFTN

SEQ ID NO: 135458 - protein, 70 aa, Oryza sativa
  unsure (1)..(70): unsure at all Xaa locations
  Clone ID: PAT_MRT4530_37132C.1.pep
NHEYHWTNHRCYGIFLTLTPQKISPWFIDNRSSHFLSCMAASSSQHEIFPVPERLSRNEIARCSXXQXTI

SEQ ID NO: 135459 - protein, 38 aa, Oryza sativa
  Clone ID: PAT_MRT4530_37133C.1.pep
TRATRVSSLLWPLRWIFYPLNAEVFSVTFFTEPLLLLL

SEQ ID NO: 135460 - protein, 59 aa, Oryza sativa
  unsure (1)..(59): unsure at all Xaa locations
  Clone ID: PAT_MRT4530_37134C.1.pep
KLKKIYQECSLKLHACKNTKSFIKKKKKSINKHNQFLNKEMGKLXHSVRVHGVSPLSLA

SEQ ID NO: 135461 - protein, 389 aa, Oryza sativa
  unsure (1)..(389): unsure at all Xaa locations
  Clone ID: PAT_MRT4530_37135C.1.pep
ASAPRPWKAEAAAAAAAADGPSGREAAGGEAAGGGAEGDGRVRQGGRRLRGRLPXQGFQGENKGFLVCKKKMATSPESLCGIGPPPFRQFVEYVVNLKFDEEPNYAKCIALFDGIVGPNPDGRPLNTDGAQKLVYQVDQKRGRLTGAXEDEEQPKKKIRMGMPATQWISVYNARRAMKQRYHYHVAEDRIAPNIQXGSEDALNMDAGTGFTAQVHELSHYFLHKEWIMEQWERNYYITSLAGSNNGSSVVIMSTGTPYAQQSYKVSDSFPFKWINKKWKEGFYVTALATAGSRWAVVMSRNAGFTHQVVELDFLYPSEGIHQRWDSGYRITATAATCDQVALILSIPRRKPNDETQETLRTSAFPGQHVKEKWAKNLYLGSICYGRSVS

SEQ ID NO: 135462 - protein, 53 aa, Oryza sativa
  Clone ID: PAT_MRT4530_37136C.1.pep
YYKPPPCKSPSTTNPAPLIYVAINKWITPPKSIPPQLDRYHKTKQRARTHTHA

SEQ ID NO: 135463 - protein, 631 aa, Oryza sativa
  Clone ID: PAT_MRT4530_37137C.1.pep
MRRRGGGEEGGGVVGAGAVVRRLDRIRKRGALSSSGGSGAARKLRFRAPAVLLRRRSGAAAMSEASSRTRGRHCRAQAAAAADGARPARRLVGAFWQMDKERLFGEDAAAAAPPPRRSGLLPRSRAPTEASVQGVKKEQEQDLGGRREGELARRRPWPLALLYRCDEQRHSNGALRSEIDLARSHVRKLIKEQKSEGIESLKKQLVQEMESWKSKQKEKVANALQYIVSELDSEKKSRRRAERINKKLGMALANTEASLQAATKELERERKSKGRVEKICTELIRGIGEDKAEVEALKKETEKAQEELQKEREMLQLADEWREQRVQMKLLEARLQFEEKNAAINQLHDELQAYLDTKKEHGQSNDQMTLLRASENGREIADNIQKNSGECDDEDEDDDDDDSASEGSDMHSIELNVDGNSKSYTWSYTPTSKDRKRNASFSQRGMDSGSSCGFDRKFQETGEELLEGDWAEGCSNGMLNFEHDEERYLAIKNLREQMLAGSGFIVSQGREHAETATTLLVPAASAAKLVAGKDAATATAAEAALGSTVAPWVEADAGGVVGGMMMVAAAAGSVEYGHGGVHHRRVLQARGGGNVNPSLVADRQRCIGSCPARGGSYTGRGNQCIYHNRSC

SEQ ID NO: 135464 - protein, 87 aa, Oryza sativa
  Clone ID: PAT_MRT4530_37138C.1.pep
MQASDRFNINSQLEHLQAKYVGTGHADLNRFEWAVNIQRDSYASYIGHYPMLAYFSIAENESIGRERYNFMQKMLLPCGLPPERDED

SEQ ID NO: 135465 - protein, 103 aa, Oryza sativa
  unsure (1)..(103): unsure at all Xaa locations
  Clone ID: PAT_MRT4530_37139C.1.pep
YLSKEGRYKGGGLNSARHPFASQARGTDPSNYACDYANXFGRPSLHMIAPGXTGYMATVAKLKDPANKWRXVAATFTQLMRVKRHSLGPGXFTIGKPAIHPST

SEQ ID NO: 135466 - protein, 464 aa, Oryza sativa
  Clone ID: PAT_MRT4530_3713C.1.pep
MAGAPTLAFSVRRRERELVAPAKPTPYEFKMLSDIDDQDILRFNRSGILFYRHSPSKDGLDPVKVIKAAISETLVHFYPVAGRFRELRPTRKLVVECTGEGVVFVEADANFRMDELGTSLAPPVPCYDMLLCEPESPTADVVDRPLLFIQVTRLACGGFVFGMHICHCMADGSGIVQFLTALTEFARGVHGAPTVRPVWEREVLTARWPPTVTRDHVEYTPLPNPGKDVLSPTDAYAHHVFFFGASEIAALRSQAPPDLRAVSSRFDLVGAFMWRCRTAALRYDPGDVVRLHMFVNARVRNRSKRPVPRGYYGNAIVFAAASVPAGELWRRPFGYALRLLMQAKARASEEGYVQSVANFNAAHRRPPFPKARTYLISDMTQAGLMAIDFGWGKPVYGGPATTMLATFHLEGRNEVGEAGVIVPIRLPNPVIERLIQEVNKGLTAGAVADAKANVVPDDCVLAKL

SEQ ID NO: 135467 - protein, 76 aa, Oryza sativa
  Clone ID: PAT_MRT4530_37140C.1.pep
RKFVQPLLQIFVLLFSNETRNVAYLILYCEYLYVGDFLLKYSLTLKKKKILINNLLGIVLIIGYDFLQIILTTYKC

SEQ ID NO: 135468 - protein, 47 aa, Oryza sativa
  Clone ID: PAT_MRT4530_37141C.1.pep
MGWVGQPMGLAEPLVAPIMQGLDGRRGLIPNDVSGGFSKYQEGIGKR

SEQ ID NO: 135469 - protein, 122 aa, Oryza sativa
  Clone ID: PAT_MRT4530_37142C.1.pep
LVPAVDGPPRVNLASILFSHTHNSACRKNSTSTIFRFSHNRTGSPSCPYLATDVCGAPSDCMHASFTACRRLRHRGTAPPTPPPFTHPGRSGGHMHCTSNPTSAPAAPSRIFNATPSLTTEC

SEQ ID NO: 135470 - protein, 75 aa, Oryza sativa
  Clone ID: PAT_MRT4530_37143C.1.pep
MAAKDKGLYRFRPLLRQHVRLASDFGGSPCAWIAPSSVLMGQGIPAPTPPDTGRNVGALPPVPSPVTGHRPVKLD

SEQ ID NO: 135471 - protein, 69 aa, Oryza sativa
  Clone ID: PAT_MRT4530_37144C.1.pep
PAWALLRPCLVGKKFGFGCHIRYTDTHLSIKRSLITKQITDFAEMNLLSLINPSLANIYCNTIVKSWCN

SEQ ID NO: 135472 - protein, 350 aa, Oryza sativa
  Clone ID: PAT_MRT4530_37145C.1.pep
MSSQSISGQSMQDNGLTRRQRRQQEVPGLSAVQVDVADEGGGEAGDEHHGYIPPREWPQLATTTRLSSSPPLPLPPSSPSPLPRQARAPVTDVAPCHFATSSPSSAAPTASAAAVAPAILAISSATMSETVRLACAATRGSRVRKGARRPRRSRSEKVGRGKRTTRAALPKLCRLDLDRCCHRRSLSSSSALPGDWGVEEKEEFRGHGELRRGAPTRWHALRRWKERIPVGRHGMARSADRVVPARSPWAVPRPCLGQAVPGRLGGRDAVPGLRPSRLCPPSQFESNRRVRAASDRRLDALPIDLEVGFPDYTTGNLVHGALTSLRLFTKQHRQPLLKVIDVSLSYDVSR

SEQ ID NO: 135473 - protein, 334 aa, Oryza sativa
  Clone ID: PAT_MRT4530_37146C.1.pep
MAVQYHQWSSSADGDDDEVLEAFNRDCCTDAGAGVLDDSASTAYVEKLCTSGNLPDAVQILRHLHDRKIHVGLGTFNLVLEQTGEVNNFVLFAKVFRYLLLSKIAPDLTSYTNVAKALQKLDDYELILKFVRQVMEITHDRDPTVMNRIVFTTAKYGQIDKCLIIFEELKKDQRGLDVVTFNTILDMLGKAGRVDQMLQEVKLMDELGHSPDIVTYNTVINCLRRLGRLDQCKIFAREMVERGIDPDLRTYTALIDIFGRAGHITEALEMFDQMKRSHQPSIYVYRALISDLKKAGQFELAQKLSEEMKTSASELLGPEDFKHKFKGRKINKNN

SEQ ID NO: 135474 - protein, 105 aa, Oryza sativa
  Clone ID: PAT_MRT4530_37147C.1.pep
RGKLVYPCQGYPVPEFPGVSTHRRSLVNQWLSWTWAWTEAPGFKQAPDLYGFGWTTCCGFASCHLSGVRRAFVHSWTLVAPRLFSTTGTSHRPWSKHCLKTWLNH

SEQ ID NO: 135475 - protein, 90 aa, Oryza sativa
  Clone ID: PAT_MRT4530_37148C.1.pep
MVVAQGGNEEVPILKGKPSGTKGAHVREVIHVRGHTRYYMMVEVGGGDDQRWEAAKQADGGGAAGGRCGRLAVDGWRTSTTGGGSSAQKG

SEQ ID NO: 135476 - protein, 125 aa, Oryza sativa
  unsure (1)..(125): unsure at all Xaa locations
  Clone ID: PAT_MRT4530_37149C.1.pep
CKKVMVCYNCKEPRHYSRDCPXPRKKNRPPHFRQFTRSRHANRQVFTGANAVPVSLKGSRPKDLIAXRSTHNIRSEEYLVEKVDTKGMNYEKSXTETPSSSTAPQSKSAQGATKDKSGEKKIPSA

SEQ ID NO: 135477 - protein, 112 aa, Oryza sativa
  Clone ID: PAT_MRT4530_3714C.1.pep
FSTIITCITVTKRESLGLGFATSMLYYSSGSSTSMTIASWKGPHCRPPQQSNFVPGSQKNACLLAANMKLPLCMLASFTKNTITLLSSWDSTCYFNLSSFIRGTSEKGRKFL

SEQ ID NO: 135478 - protein, 1134 aa, Oryza sativa
  unsure (1)..(1134): unsure at all Xaa locations
  Clone ID: PAT_MRT4530_37150C.1.pep
MAHSPLCSRSRPVLVVRPATAATGFAQPIIRCRRFTRTRLLRCLVASADYSKRNPRRASTPKPKGAASRTYAPRPTVESSMKKIGQSGTDEGDLGTSNGKLSSEATEQTSNVEESSEVDFSGNVSSSVFLEGMDDAFEAETEEEVEQNQSPELSSESMDDDAIDRKLDEYRGKISALISSKPEPTSVSSTHVQDRSIVGFHEQEKSVVSFHEQDRSIVSVPEQSQPSSGVSGQNPTEEKTIISGQDVTEEAPEEITGKSIEREPLSRETEKVLFADDDPRIIKDEQYEPDIAPVQDDVDPQVLRRRLEELAEKNYLAGNKCFVFPEVVQADSVIDLYLNHSMSALASEPDILIKGAFNGWRWKKFTQKMHKSELTGDWWCCKLHIPKQAYRLDFVFFNGDTIYENNNHNDFVLQIESEINEHSFEDFLVEEKQRELERLAAEEAERKRQAEEERRKEEERAAMEADRAQAKAEVEMNKNKLQNLLNSASRYADNLWXGDWWYADVTLPEGAXVLDWXFADGPPGNARNYDNNGRQDFHAVVPNNISEDLFXSEITAKMKAEMKEKTMRDFLLSQKHIVYTEPLEVRAGTTVDVLYNPSNTVLNGKPEVWFRCSFNRWTHPSGPLPPQKMVNAENGSHLRATVRVPLDAYMMDFVFSESEEGGIYDNRNGMDYHSPVTDSVAKEPPMHIVHIAVEMAPIAKVGGLGDVVTSLSRAVQDLGHNVEVILPKYDCLNLSNVKDLHYRQSFTWGNTEIKVWFGKVEDVPVYFLEPQNGMFWVGCVYGRNDESRFGFFCHSALEFLRQNGSSPDIIHCHDCSSAPVAWLFKEQYAQNGLSNGRVVFTIHNLEFGAHHIGKAMARCDKATTVSYTYSREVSGHGAIAPHFSKFHGIRNGIDPDIWDPYSDNFIPVHYTSENVVEGKSAAKKALQQRLGLQQTDTPVVGIISRLTVQKGIHLIKHAIYRTLERNGQVVLLGSAPDHRIQGDFTNLASKLHGEYHGRVKLCLTYDEPLSHLIYAGADFILVPSMFEPCGLTQLTAMRYGSIPIVRKTGGLYDTVFDVDDDKDRAREQGLEPNGFSFEGADSNGVDYALDRAITTWYDARDWFHSLCKRVMEQDWTWNRPALDYMELYHSARKN

SEQ ID NO: 135479 - protein, 1214 aa, Oryza sativa
  Clone ID: PAT_MRT4530_37151C.1.pep
MAHSPLCSRSRPVLVVRPATAATGFAQPIIRCRRFTRTRLLRCLVASADYSKRNPRRASTPKPKGAASRTYAPRPTVESSMKKIGQSGTDEGDLGTSNGKLSSEATEQTSNVEESSEVDFSGNVSSSVFLEGMDDAFEAETEEEVEQNQSPELSSESMDDDAIDRKLDEYRGKISALISSKPEPTSVSSTHVQDRSIVGFHEQEKSVVSFHEQDRSIVSVPEQSQPSSGVSGQNPTEEKTIISGQDVTEEAPEEITGKSIEREPLSRETEKVLFADDDPRIIKDEQYEPDIAPVQDDVDPQVLVRRLEELAEKNYLAGNKCFVFPEVVQADSVIDLYLNHSMSALASEPDILIKGAFNGWRWKKFTQKMHKSELTGDWWCCKLHIPKQAYRLDFVFFNGDTIYENNNHNDFVLQIESEINEHSFEDFLVEEKQRELERLAAEEAERKRQAEEERRKEEERAAMEADRAQAKAEVEMNKNKLQNLLNSASRYADNLWYIEPHTYKAGDRVKLFYNRSSRPLMHNTEIWMHGGYNNWSDGLSIAEKLIKSYEKDGDWWYADVTLPEGALVLDWVFADGPPGNARNYDNNGRQDFHAVVPNNISEDLFWVEEEHMIFKRLQKERKEREDADRRKSEITAKMKAEMKEKTMRDFLLSQKHIVYTEPLEVRAGTTVDVLYNPSNTVLNGKPEVWFRCSFNRWTHPSGPLPPQKMVNAENGSHLRATVRVPLDAYMMDFVFSESEEGGIYDNRNGMDYHSPVTDSVAKEPPMHIVHIAVEMAPIAKVGGLGDVVTSLSRAVQDLGHNVEVILPKYDCLNLSNVKDLHYRQSFTWGNTEIKVWFGKVEDVPVYFLEPQNGMFWVGCVYGRNDESRFGFFCHSALEFLRQNGSSPDIIHCHDWSSAPVAWLFKEQYAQNGLSNGRVVFTIHNLEFGAHHIGKAMARCDKATTVSYTYSREVSGHGAIAPHFSKFHGIRNGIDPDIWDPYSDNFIPVHYTSENVVEGKSAAKKALQQRLGLQQTDTPVVGIISRLTVQKGIHLIKHAIYRTLERNGQVVLLGSAPDHRIQGDFTNLASKLHGEYHGRVKLCLTYDEPLSHLIYAGADFILVPSMFEPCGLTQLTAMRYGSIPIVRKTGGLYDTVFDVDDDKDRAREQGLEPNGFSFEGADSNGVDYALDRAITTWYDARDWFHSLCKRVMEQDWTWNRPALDYMELYHSARKN

SEQ ID NO: 135480 - protein, 962 aa, Oryza sativa
  Clone ID: PAT_MRT4530_37152C.1.pep
MATILDSLVGSCANKLKEIITEEVILILGIQEELAELQRKTELIHCCISDAEERRMEESAVDNWLARHEVAVKIRSLNRKIENISKDRVFLTLKSTVPTGSSSVLRVRKSSHLLEPNIVGKEIIHACRKMVDLVLEHKGRKLYKLAIVGTGGVGKTTLAQKIYNDRKIKGSFNKKAWVCVSKVYSKASLLRELLRIMEVHHDQDESIGELQSKLEIAIKETSFFLVLDDMWQSDAWTNLLRIPLHAAEMGAILITTRNNIVALEIGVDHTYRVDLMSTDVGWELLCKSMNISESIELQTLQDVGIEIVRKCGCLPLAIKVIARVLASKEQTENEWKKILSKNAWFMNNLPNDLRGALYLSYDELPRHLKQCFLYCSVYPEDANIYHDDLTRMWIAEGFIEDHGGQLLEETADEYYYELIHRNLLQPDGLYYDHSSCKMHDLLRQLACYLSREECFVGNPESLVGNTVSKLRRVSVVTDKNMVMLPSMDEVQYKVRTWKTSYEKTLRVDNSFFKRFPYLRVLDLTDSFVPSIPGCIGNLIHLRLLDLDGTNVSCLPESIGNLKNLQILNLERSVALHSLPSAITQLCNLRRLGLNYSPIYQVPKGIGKLEFLNDVEGFPVYGGSSNTKMQDGWNLEELAYLYQLRRLHMIKLERAAYRTTYPLLTDKGFLKFLYLWCTERTDEPYTEKDFSNIEKIFEQLIPPCNLEDLAIVKFFGRQYPFWIDSTHLAYVKSLHLFNCKFCMHLPPVGQLPNLKYLKIEGAAAVTIIGPEFAGHRASNLGRTVAFPKLEELLIRDMPNWEEWFFIDEATSTAKERVDDGDSAIPKEKALPPRMQILSRLRRLELSGCPKLKALPQQLAQINSLKEIELRWASSLKVVENFPLLSEMLLIATCQALEKVSNLPQVRELRVQDCPNLRLVEDLSTLEQLWLYEDMHEVSTLWVPGLQQQCRQHHGEDLEVYNWT

SEQ ID NO: 135481 - protein, 71 aa, Oryza sativa
  Clone ID: PAT_MRT4530_37153C.1.pep
KNGPEIDFNRCFGNFASGSILFHACHNTIVRSASHNRIRVQYDPCIPKFMGNLLVSMKSQPGTWQVQRAWH

SEQ ID NO: 135482 - protein, 211 aa, Oryza sativa
  unsure (1)..(211): unsure at all Xaa locations
  Clone ID: PAT_MRT4530_37154C.1.pep
MATILDSLVGSCANKLKEIITEEVILILGIQEELAELQRKTELIHCCISDGCDAEARRMEESAVDNWLGQLREVLYDIMXVDDIIDLARFKGSILLTDHPSSSSRKSIACTGLSISTCFSNVQARHEVAVKIRSLNRKIENISKDRVFLTLKSTVPTGSSSVLRVRKSSHLLEPNIVGKEIIHACRKMVDLVLEHKGRKLYKLALTARFPV

SEQ ID NO: 135483 - protein, 93 aa, Oryza sativa
  Clone ID: PAT_MRT4530_37155C.1.pep
MRIPESARLSVGGVSPDMGDTELRDHFGRYGDVADIWLRRDRLTGLPRRFAFADYKESNRTDNADEIIVEGFDEISRRVGSVDSGFRPFRRGA

SEQ ID NO: 135484 - protein, 36 aa, Oryza sativa
  Clone ID: PAT_MRT4530_37156C.1.pep
MDKDVMNVQVKKEVKLISSSSSSGASGAIHTKFAVQ

SEQ ID NO: 135485 - protein, 73 aa, Oryza sativa
  Clone ID: PAT_MRT4530_37157C.1.pep
MGGKGGEAPPGLCAADQEVVLMLPEAKELLPLEMEVLPPKLEDMLESRVIILLLEILNLHKDLLLERKVNFFY

SEQ ID NO: 135486 - protein, 180 aa, Oryza sativa
  Clone ID: PAT_MRT4530_37158C.1.pep
MHHKSIPNGGRITRHIIPTHCDGLVAFATYGRAMLVCNPATQELVVLPPGNGSGPCPRSTESTAAVGFDPWRNSGPVTQPVGRGGGGNGQRWFHNFGTTVAGDDGVEEEATLVAMLYKELWWHRERSKPVVKDVNMQGSRCSYICKGKNVSVRKKNVIERHGGRGLFLQIQNKFDQTRNL

SEQ ID NO: 135487 - protein, 57 aa, Oryza sativa
  Clone ID: PAT_MRT4530_37159C.1.pep
MVSIGSPRAGSSWCMRGQAELGLEWSWPVGWGGVVVAGGGSGVGRFGALARLRLGGA

SEQ ID NO: 135488 - protein, 121 aa, Oryza sativa
  unsure (1)..(121): unsure at all Xaa locations
  Clone ID: PAT_MRT4530_3715C.1.pep
ELPPSSARRVFYDSPPIVVADWPAMDYWLFFFRGAGDNIFDAIAVAASDHPAALRSRRDAIAQRLYTAXPSAVPPTGGTDTEAPLPQLXLHPEGADSIPSICSSDRADVIADDGGVPCRED

SEQ ID NO: 135489 - protein, 253 aa, Oryza sativa
  unsure (1)..(253): unsure at all Xaa locations
  Clone ID: PAT_MRT4530_37160C.1.pep
MASAPLPQAAQLGYKPNVFSFWIFFLQLRLIDYCKXEYMKYSASHTINMQVHKDTKGWHNIGSFAKAAFSKHLRRRTHEPSQRRKRQTNTQNEKKEAAKPRVPEERARXGNSLRGGTTKDDDXKTAGDKIXGGGEIGXRRRRRYGGLRLRPSGGWCAAPPREPDGGDSDAEITFSHFRPIPFSLLPLTQPAQCHRRCRSFERSRPQLYAAAVVLPSPPRNHRRRLYLRNWVPHRAKCVGGTVVLVGPETTSPL

SEQ ID NO: 135490 - protein, 452 aa, Oryza sativa
  unsure (1)..(452): unsure at all Xaa locations
  Clone ID: PAT_MRT4530_37161C.1.pep
CFFFAKHDLGQRHARPHRGAVLGNAGHHHGRHDRDDPDNVARVKLSVPKFTXKEDPDAYLDWEEQCDQIFRVHNLSSQRRVKLASVEFSGYAFTLWNQMQESQHVLGRDPIETWDEMKRVMRRCFVPSRYRCDLHNRLQVLSQGTRTVDEYYKEMELLLIRAQIREDDESKMTRFLHGLNAEISDFVEMFPYNTLQDLLDQARRTERSIRQEWRNQSSSGRSNAAPWHRMQQTTTXQPSSATSPAACTNSHWPAAPIASSSSRSRDIVCHKCQGRGHIAAECPSRRTMLVNETGEWESASETXDDSLREEVLINEQVDNDNGDNNCFISHRVLSVQVAKEEHGQRXNIFHTDDIINSTVCRIIFVSGSCNNIASLELVKRLDLKQRRHPTPYKMXRLNNCGALRVKTIVTVHFSVGKYEDHVECDVVPMQACQLLLGRPWLYDRDDPTDATN

SEQ ID NO: 135491 - protein, 112 aa, Oryza sativa
  Clone ID: PAT_MRT4530_37162C.1.pep
MDPLYLSQIIPDVLDPFISTISLRVTYNSRLLLAGAALKPSAVVSKPQVDVGGNDMRVSYTLVLVDPDAPSPSDPSLREYLHWMVTDIPETTSISFGYVPQRLKHVITTKSY

SEQ ID NO: 135492 - protein, 79 aa, Oryza sativa
  Clone ID: PAT_MRT4530_37163C.1.pep
YAYRIHFEATIVESATWFAHIGKFMTETVARNYSIQDKKEQADPGFKGNQDMVSSSHNLTLTEFYQNIDTISHVSTKLD

SEQ ID NO: 135493 - protein, 209 aa, Oryza sativa
  Clone ID: PAT_MRT4530_37164C.1.pep
TSGSPGCRLYGLDLSNNRFSGTIPSDLGSRQFVTIVLASNSFSGEFPLTFCQLDSLEILDLSNNHLHGEIPSCLWHLQDLVFMDLSYNSFSGEVSPMSAYPNSSLESVHLANNNLTGGYPMVLKGCKWLIILDLGGNHFAGTIPSWIGTCNPLLRFLILRSNVFNGSIPKELSQLSHLQLLDLAMNNLVGSIPRSFGNFTSMIQTKTEL

SEQ ID NO: 135494 - protein, 234 aa, Oryza sativa
  Clone ID: PAT_MRT4530_37165C.1.pep
APAVLLRLAPSPSYPQNPPPRRRSPASACGASRRDFAIHTAIASASAGVRKRRRPPGEPSQNKKGSPLLGGIANTKWWSQYYGSGFSIRVPPSFDDILEPEEFNVGMTYYGDKAKPRTYAARFASPDRSELVSVVIKPSNQLKITFLEAKDITDLGTLKEASKIFVPGGAKLYSARTIKVKDEDDIRYYMTFSIYFEAKKKSYPSSISVPIWTELFLYFDFGHERLVLQDILLL

SEQ ID NO: 135495 - protein, 149 aa, Oryza sativa
  Clone ID: PAT_MRT4530_37166C.1.pep
MAKLMVVVSLAAVVGVSDGGSASGGCSGDGKKRHGNGVDPLPDSGLPRREVERLNDNLRMLHERGTAPKLTRERGTDDVGRRPDLRKKERISLLAALQRDSLRRPYPRTLATLMAQRLGRRCTGSSGTAKRPTAALWTPRTPTSSTECV

SEQ ID NO: 135496 - protein, 292 aa, Oryza sativa
  unsure (1)..(292): unsure at all Xaa locations
  Clone ID: PAT_MRT4530_37167C.1.pep
MAPAVLLRLAPSPPYPQNPPPRRRSPASACGASRRDFAIHTAIASASAAVAVSVRPATAAAADEEAPPGEPSQNKKGSPLLGGIANTKSWSQYYGSGFSIRVPPSFDDILEPEVSRLLPMYYCAFGFLRPYSRARPRAQHFGFNLGILSTNQEFNVGMTYYGDKAKPRTYAARFASPDRSELVSVVIKPSNQLKITFLEHLFCXKKNNLKEASKIFVPGGAKLYSARTIKVKDEDDIRTYYFYEFGVDKEHVAVMATVNSGKTYIAGATAPETKWDDDGVKLRSAAVSLSVL

SEQ ID NO: 135497 - protein, 67 aa, Oryza sativa
  Clone ID: PAT_MRT4530_37168C.1.pep
SLFWEFSYTSINLACICLFLWRIRGPSHVDIISCFTGYDNVCQIRMQKGSSAYPLKLKFQEVKNKFH

SEQ ID NO: 135498 - protein, 79 aa, Oryza sativa
  Clone ID: PAT_MRT4530_37169C.1.pep
FFFFFFFFFFFFFFFFFFFFFFFFWGAKKTPFKWPLNKKKRGKGGEPKQNKGGSFLLTKPPRLFSFQRTQNLTPWAGQN

SEQ ID NO: 135499 - protein, 425 aa, Oryza sativa
  Clone ID: PAT_MRT4530_3716C.1.pep
MDSLLANYASSDDEADETLPTPPAAAAARPKPPSGGGIFSSLPQPKSALLFSSLPAPKSGPVFSAIPPPKSSSGNPKRVVQFRPPPIRQPTGESSDEEDDDAEKRRPSEAEPRPPVSAGTGPVSSFLPPPKRSLGLGGGGAARRSAIDTAAPERSNVVAAGPSSSAVNAIAPERPDTTSADDEDDESNGSSDDDEMPVPEEQQEQLAVDSEAGQQQQNQQQSYDAGVGSSNGQEGYAWDPNYYANYGANYGWDPSGNVNYGTEAQYAAYGGEHGGVYGNTYGVEHGDGYGHSTEMAYGGGYAGGYEHNAAAATAPPIQQPILPPEVGRIGGKRGRSDMPAEILEVNQAELMKNRPREDKSKLTGMAFGPSYQPAPSAKGKPSKLHKRKHQIGSLFYDMKQKEMELAERRSKGFLTKAETQAKYGW

SEQ ID NO: 135500 - protein, 454 aa, Oryza sativa
  Clone ID: PAT_MRT4530_37170C.1.pep
MAGPTPPPPEEEPSSPSLRLRCAVQHYEWGRRGEASLVARLSDANADDHGPDPARPYAELWMGTHPSAPSSLLADGLLRDWLARHPAALGPAVAARWGGDLPFLFKVLSVAKALSIQAHPDKDLAEVLHALRPATYKDGNHKPEMAIAVTEFRVLCGFAGIQACQSSCGSRLAREKSSNSYGGGQQLQELKDVLRTVPEVEDLVGPEDAAKLLSVKEYHGVNEVKSCLRSAFTKLMTASKEAVSEAITKLIFRLNAESKVRTLTEKENLVLSLEKQYPEDVGVLSAFFFNYIKLSPGEALYIGANEPHAYLSGECIECMATSDNVVRAGLTPKYRDVQTLCSMLTYKQVFPEILRGVPVQPYVRRYTPPFDEFEVDCCSLPPGELVVISPVSGPSVYLVMAGEGEIQVDSMPNGEKSKQGDVFFVPAYTEVKFSASGPECMQLYRAGVNSRFFN

SEQ ID NO: 135501 - protein, 180 aa, Oryza sativa
  Clone ID: PAT_MRT4530_37171C.1.pep
AVGSAPSALALRLAVSAPTGLALTLCHRGGRADPLADVAATSAPTASALRCPTSAPTARLGFGRHRVLLAQSPPKTSLIEGDLCGIEFGIGREVFLFHATAINERTKHMHAKAKGGKDLQIADRADVEREAISSRCAEHPRCPARGGHRGADLRICDASASPYHYQCKLPRNAKTQKASG

SEQ ID NO: 135502 - protein, 130 aa, Oryza sativa
  unsure (1)..(130): unsure at all Xaa locations
  Clone ID: PAT_MRT4530_37172C.1.pep
AVASAPSALALRLAVSAPMGLALTLCHRGGRADPLADVAATSAPTGLALRCPTSAPSKLALTLATXSPAEAAPASSSSVFSPAARLGFGRHRVLLAQSPPKTSLIEGDLCGIEFGIGREDESTHGSQGVQ

SEQ ID NO: 135503 - protein, 318 aa, Oryza sativa
  unsure (1)..(318): unsure at all Xaa locations
  Clone ID: PAT_MRT4530_37173C.1.pep
MAFHYQDHALAMDAAAAAAXTGGHHHPGFVGAGGVVGGGGGGGWEREKAAIAAHPLYERLLEAHVACLRVATPVDQLPRIDAQIAARPPPLAAASAAAAPPGPSAREELDLFMTHYVLLLCSFKEQLQQHVRVHAMEAVMGCWELEQSLQSLTGASPGEGTGATMSDDEDNQVDSEANMFDGNDGSDGMGFGPLMLTEGERSLVERVRHELKNELKQGYKEKLVDIREEILRKRRAGKLPGDTASILKAWWQAHSKWPYPTEDDKARLVQETGLQLKQINNWFINQRKRNWHSNPASSGEKTKKKRNVTGDGGAEQSW

SEQ ID NO: 135504 - protein, 281 aa, Oryza sativa
  unsure (1)..(281): unsure at all Xaa locations
  Clone ID: PAT_MRT4530_37174C.1.pep
MLITGPINDDIRHFKREMMKHFRMSDLGLLTYYLGMEKNGMKNCNPCCVPMEPKLKLVKTSTSPPLXHNLLQYCGCTAVSCQYQAGPGIFCELFKHILRYIAGTLEYGVQYTRGEAGKLRLCGYNDSDMVGDADDRKSTTGGIYFLAQSPIIXQSQKHKVVALSSCXEYVAATSTTCQGVWLAGLLEEIMGAPPATAMLKVDNKSAIALSKNPIHHDGSKHIQICHHYIRECVEVGKIDIDNVSSSLQLGDLLTKPLSRARFQELRKLIGVINAKHEHHKN

SEQ ID NO: 135505 - protein, 154 aa, Oryza sativa
  unsure (1)..(154): unsure at all Xaa locations
  Clone ID: PAT_MRT4530_37175C.1.pep
PRVRPRVRRSFALGLRMQCXQQLQDVSRECRCAAIRRMVMSYEESMPMPLEQGWSTASSEYYGGEGFPQEHAYYLQGSSEEGYYREQQQHPGMTRVRLTRARQNAGQLPSXCRVEPQHCNIFSDWQLLRLAGLPHTCVITPFVCCMQRDTDQNK

SEQ ID NO: 135506 - protein, 53 aa, Oryza sativa
  Clone ID: PAT_MRT4530_37176C.1.pep
MASATLLKSSFLPKKSEWGATRQAAAPKPDTASMGGRSAPYYEELDKTRKPIG

SEQ ID NO: 135507 - protein, 84 aa, Oryza sativa
  Clone ID: PAT_MRT4530_37177C.1.pep
VKGKTLSIASGTSPPLVCQAESSLRLYDVPEHGGIQRMDKAITTFRLPHFLWSTQQKKNPSTRALNNSTKRRTRNDGNICHSSN

SEQ ID NO: 135508 - protein, 159 aa, Oryza sativa
  Clone ID: PAT_MRT4530_37178C.1.pep
MASYRLLVILVFSALVALAAGDTYPADCPYPCLLPPPTPVTTDCPPPPSTPSSGYSYPPPSSSSSNTPPSSSSYWNYPPPQGGGGGYIPYYQPPAGGGGGGGGFNYPAPPPPNPIVPWYPWYYRSPPSSPATAVTARGRSLLASVAVVTAAAAALITVF

SEQ ID NO: 135509 - protein, 538 aa, Oryza sativa
  Clone ID: PAT_MRT4530_37179C.1.pep
MAAALLLVMAALAGVAAGGDIVHQDDEAPKIPGCSNDFVLVKVQTWVNNREDGEFVGVGARFGPTIESKEKHANRTGLLLADPIDCCDPPTQKVAGDVLLVQRGNCKFTKKAKNAEAAGASAIIIINHVHELYKMVCDRNETDLDINIPAVLLPKDAGNDLQKLLTRGKVSVQLYSPDRPLVDTAEVFLWLMAVGTILCASYWSAWSAREAVIEQEKLLKDGHESSLNLEAGGSSGMVDINMTSAILFVVIASCFLIMLYKLMSHWFVELLVVIFCIGGVEGLQTCLVALLSRWFKPAAESFVKVPFFGAVSYLTIAVCPFCIVFAVIWAVYRRMTYAWIGQDILGIALIVTVIQIVRIPNLKVGSVLLSCSFLYDIFWVFISKMWFHESVMIVVARGDKTDEDGVPMLLKIPRMFDPWGGFSIIGFGDILLPGLLIAFALRYDWAAKKTLQSGYFLWSMVAYGSGLMITYVALNLMDGHGQPALLYIVPFTLGTFIALGRKRGELRNLWTRGQPERVCTHMHMQPLPKDINCDAVSS

SEQ ID NO: 135510 - protein, 62 aa, Oryza sativa
  Clone ID: PAT_MRT4530_3717C.1.pep
GSGFSLLIGLLAGRNLGRFQVPSRARPLFLWAGPFPFPLPEVLPPSLSPSGADRWGPPAGRL

SEQ ID NO: 135511 - protein, 218 aa, Oryza sativa
  unsure (1)..(218): unsure at all Xaa locations
  Clone ID: PAT_MRT4530_37180C.1.pep
SRRPRAHDAAMLALCGASASLDFANSAWLLHVPLAPVVSXSRLRPPAARRAARRQQGHRRGSXTATATATSGDAASTAPPWLHRHPFSSHASLSSMLATSVWPLNRLATSSHLSHPSXERRMRPSGAESSAPLLPIRSRARPSTPPRPAAXPPLRHRTRPPTPPRPAAALSFSRVSAAASLPPHRWQAVEPPRPNDSLLLSRRHRDASGEDPGRSGAA

SEQ ID NO: 135512 - protein, 72 aa, Oryza sativa
  Clone ID: PAT_MRT4530_37181C.1.pep
MGEEVAPACTYGDDAVAEEMLKNLYHLLLWPLCNTIARCHAEQGHIRVAAAVLSLATSLPPPLPWLCSFANP

SEQ ID NO: 135513 - protein, 104 aa, Oryza sativa
  Clone ID: PAT_MRT4530_37182C.1.pep
MWGGWGTGQEKARTAAVRWLDAGKTAPPPPLGRTCTRRDVIADVAVAGKTPSLQGRCSRCCHREHTAASEKLPPLLLPGTSRDPVAARKMRSLPPQGRLRHYKI

SEQ ID NO: 135514 - protein, 555 aa, Oryza sativa
  Clone ID: PAT_MRT4530_37183C.1.pep
MDPAGLRVASDPAGSGASSPPPPPTTTTKELGRAVAAEASCGSRAAVGLGDMRVGISDSSDRAKSCLHPCDKKDTPQVTAEVATRSEDGEPSLLETGSFLQPEAACLTLGRSSDAAEVNNLCDKENIRTDLQPKPDVRHVENRMNGAPLGLDLNIVDSSNAAELNPFFPYKKLGQTKVSDPSECGSTTGAVGESESHRKWREMKQNGFLSSSQGTAVGPRPRGRPIKRKRDDESKRNTFAQKEQTNKFMKVAAPSGLLSGLNPGIINHVRNSKQVYSIIKAMVHSENLEKENQAVHASQTGERGREFSEKAQDQRYGGNMMNCHFLMKGSNMPFHQGLPTASQFLPEDGDDLKLQLSSAVTMASDRTCSTSADDFASNHDYMTVLSVKAANVASQWLELLQQDIRGRLAALKRSKKRVRNALQTELPYLISTEFSYNQENEPSVVHSSDGGSTGKTVPEAHVARWRSLFLQMDRTLQEEGMHLENRLKEVQEMQMNCEKGLRYMACEAPLVGPMAELWKLKNSETPESEWAVQAAAASIYSTCNLVMRTENVSCF

SEQ ID NO: 135515 - protein, 91 aa, Oryza sativa
  Clone ID: PAT_MRT4530_37184C.1.pep
MPLPAMDSLNTKLYLQNCYMLKENERLRKAAVLLNQENQALLSELKHRLARSPSPAAAAPGVANDSKNAAAAAGRHAGPPPVQDKSASKSK

SEQ ID NO: 135516 - protein, 145 aa, Oryza sativa
  Clone ID: PAT_MRT4530_37185C.1.pep
MPKIKTSRVKYPEGWELIEPTLRDLEAKMREAENDPHDGKRKCEALWPIFRISHQKSRYIYDLYYRRKEISKELYEFCLDQGHADKNLIAKWKKPGYERLCCLRCIQTRDHNFATTCVCRVPKHLREEKVIECVHCGCRGCASGD

SEQ ID NO: 135517 - protein, 103 aa, Oryza sativa
  unsure (1)..(103): unsure at all Xaa locations
  Clone ID: PAT_MRT4530_37186C.1.pep
MAAKAQAVLLLSLVASLAAALGAQAICNMSNGDFRLCQPAAAVSDPTDGPSAECCAALGEADLACICRXKGVAGFWMRIYHIDAARAMALPGKCGLTMPTNCS

SEQ ID NO: 135518 - protein, 297 aa, Oryza sativa
  Clone ID: PAT_MRT4530_37187C.1.pep
MAAGLAEREPAWLRSLLGARFFEACAAHRGMSRNECNQYCLTCAAAADDAGGAAAVGCQWCVVAAHGGGAGRDRGHRHRVVQVRRSSYHNVVRVSELERTLDLTRVQTYVINRDRVVFLNERPQAPRNGRCAAAAAVACAACEACGRGLLDVAFRFCSLGCKLKCMESDPTLTFTIDPNNIPEPQISGPQEDEEEDDDEEDEPFYPTKANAAQSKAAGGGGCRPPPPPSASSSRPRRGGRRVARGDKEEDQEAAANILAFAAAAARSVPAASAADPNSYRRRARKGAHRAPERSPFF

SEQ ID NO: 135519 - protein, 93 aa, Oryza sativa
  Clone ID: PAT_MRT4530_37188C.1.pep
MAVHHSARRSSVFGLPYPKNSRTCWAPLKQVFAVIDQGTDAEEEARLWMSWLWIPLLLGQGDIYGYKCGFDEEDYPVIDYVLVIHAAKSTTAR

SEQ ID NO: 135520 - protein, 383 aa, Oryza sativa
  Clone ID: PAT_MRT4530_37189C.1.pep
MAAMTATMIHVESMQTAVPTRITGAGRTLPVAVSGGEAPPPLTAASLQRRFRAVLYYRGIEQLQAEEEEEERAVWVKESLSASLADHPEMAGRLRRRDDDDGGVRGPWEVRLNDNGVRLVQASVDMPMSAFLEAKDLARREAALTLWTDVDVHEPEFCAPFFMQLTRFQDGGYAIGASCSLLLADPLSLVDFLKAWARTHAEMRARGKPVAPPAVIQYARYLQSPGAAAAAVVRRLKSVPLDSCSAAAATTVLFRAAAGAQVDRHALAAACVDQAVETLGGNARKPPRLTVLAAGGSGELRVEACGCGDGEETTTPPPPSRGHHALRAAYWGDLGLGEIALDGSEPVHVSCTVVSPCADEGLVVVMAPAGGAELLISVTVPNY

SEQ ID NO: 135521 - protein, 100 aa, Oryza sativa
  unsure (1)..(100): unsure at all Xaa locations
  Clone ID: PAT_MRT4530_3718C.1.pep
TPPQDHATHQHANARTGNARHRRAPQPVQELPRGXAEPPPPRRRRPPRDVVGTMGPGRDTASPPAVLATSPYRVARRRCRDGRTASTDGGRTVGGRWATG

SEQ ID NO: 135522 - protein, 655 aa, Oryza sativa
  Clone ID: PAT_MRT4530_37190C.1.pep
MNNGFPEIIRRGNPHLMDNSAVVIMGHSVASYTMDSHGRSSSCLDHLGSSMENSSIHGKRGNNRRSGHGVSAQDDGCGLVLGLGPSPEMGSSAARRSKAPAPATLFSQRSFSFTEPGVLSLGLHRGDHGGATIQHLEEAPAGNIISFAAAVDEGSTSARRSSGGYMPSLLFAPRPNASAPEEARHDVVADHTDNTVSGGGARHGHARRRVVRQLSPEPEPEPSATMTETSFGVSSDVVTTVTNPVTTQPAAAAAQSQRRHPKKCRFKGCSKGARGASGLCIAHGGGQRCQKPGCHKGAESRTAYCKAHGGGRRCMQLGCTKSAEGKTDHCIAHGGGRRCGHQGCPKAARGKSGRCIKHGGGKRCSVEGCIRSAEGRVGLCISHGGGRRCQYPDCRKGAQGSTLYCKAHGGGKRCVFDGCLKGAEGSTPLCKAHGGGKRCMFEGGGLCPKSVHGGTSFCVAHGGGKRCTVPGCGKSARGRTDCCVKHGGGKRCRVDGCAKSAQGSTEFCKAHGGGKRCTWATGCEKFARGRSGLCAAHGTLMASQQRRAGGGGSMIGPGLFHGLVGAMNNGYSSSGVSTASEYSDACDGAARRQELIPPQVLVPNSMKSSCSSAPPPSMGRGREGGGFVVPEGRVHGGGLLSLLGGSFRNVDVDEL

SEQ ID NO: 135523 - protein, 110 aa, Oryza sativa
  Clone ID: PAT_MRT4530_37191C.1.pep
MSPNVVTYSSIVATLSKAQAMEKAREVLTRMVKNGVMPDCITDGVEPNVVTYNMLMDYLCKNGRSMEARKIFDSMVKRGHKPNSATYGTLLHGYASEGSLVEMHQLLDVM

SEQ ID NO: 135524 - protein, 57 aa, Oryza sativa
  Clone ID: PAT_MRT4530_37192C.1.pep
RVRHTLPPTRPLTRTDSGTANPELGPIGTWPRRSSSSSRCSPAVGCYFHLVHLPAQT

SEQ ID NO: 135525 - protein, 51 aa, Oryza sativa
  Clone ID: PAT_MRT4530_37193C.1.pep
MDGQTACREISESAKLVTGVGDLAEIYSIVSDLVGHELKKEDYPVVDYGMA

SEQ ID NO: 135526 - protein, 74 aa, Oryza sativa
  Clone ID: PAT_MRT4530_37194C.1.pep
HPVAAALFFINCIFHHNVLMNFADSFYLCRHLLLILMQLVGRFFWPTRQKKGLIYPLIKNIHNTESGASRKKVM

SEQ ID NO: 135527 - protein, 80 aa, Oryza sativa
  Clone ID: PAT_MRT4530_37195C.1.pep
SALLNPTAVRLIYVTLGLPGEKYEKIHPKKKKKGRPPFFFFFWVYLFVFFSRLAFILNSSLYSRCIQFGVIIMFVVVGLC

SEQ ID NO: 135528 - protein, 137 aa, Oryza sativa
  Clone ID: PAT_MRT4530_37196C.1.pep
APPPLVPSNPFVLFDPLIQSHRLFPPQWLVQPQLLFLPPFFFLVSLQNTLLPPPFWPPFSLQIIFTQILRYQCCPPLRVVSPQSHFFSISFFPPFLLLFPFLQFNFFFFFQNQAPPPPFLSFTLPSIFFIYPIFLYK

SEQ ID NO: 135529 - protein, 162 aa, Oryza sativa
  Clone ID: PAT_MRT4530_37197C.1.pep
VEQILGYIGRSTELMDRSPSILSGVLDLLKALWESGAQFIYILEKLRSSRTFWENLSCCIRAAFASYPIDSVETVDEKKIFEEQKEPSVAPCPSDIVLKWFDSTTMEDLVNHLSSNGYQNDLLHRAKVASCLCIIRLLTKLSSGDTGSLSFSLVKKIQLISS

SEQ ID NO: 135530 - protein, 2026 aa, Oryza sativa
  unsure (1)..(2026): unsure at all Xaa locations
  Clone ID: PAT_MRT4530_37198C.1.pep
MASGGASSAPATASTPAAAAATTTTSKTASASLWWDPFIDLSDDLDRAAAASPSVPDALAERIKAHHAWLRGSVSMFVKPSDASRGALDASEVVVGEHRLAVKPELKAAALRLSKCMNLDEVQSYILVKRTSENTPTALVADTEEFLRLVSVQYYLERQCLLKCIRRIFVHANDCSDSIDAVREEASVLVREEVEQRLLSIVRDSLASAFSVKGGAELTISWLEETLIEINLIFDILFLFFYDNLSRCNGGLWIMLCSIFKDMLSGSYDVGKFAVSVEAKNSFHYAKAQLLFILIQTLDFESLLRMVRDEVPFSGGYSTFSVVDILEMDVEVSKLPEFAAVESGPLILAWAVFLCLVMSLPGSNTNLGPVSGFRGILRTFISAFVASYEISYQTEDSSLGMILNILCEVYDGEESLCMQFWDKDSFIDGPIRFNYLERMNGVTTLYAVPRSDTDNVNYHDQIEIHSPISIFGIEGTTIPGGSHGYILKVLEDDVALVRWEDLCLALLHADKSLAVQASQNLGYIDKHVRIDIAKIFCTSIFKYVEDFNNACVMSKTLGMLAEMLSCVPYHVFNVALDCGFFITQSGVASSDWLLSGALARMLFATSEDSGDCSSLTTTVLDFAIQVLRKGAAADDIISSFIIFSVQYIMVNHMNWKYKSYSRWKITLKVFDLVKSCIQVKSFSSKLGGIIWEILLYDSSIHSVLLHILSMSTQLLEHSHGSYCHDLKDIEDIQLVLCCGFDIVFYMLSNLPEREKKSKRMLRRVGSKSAFRYYGFVVLVKTIAFRHSCNIIDVLSEFSQPSIEMRTCIIFHLQLAFIKILSQSHYACSNSEDNNRTSNKPWDTDNTDIFLKAIQVAAARVFSMLCFTAYKAQPQLMENAYFVVNGSEIWRLQTSISCILDEVDKVNEVVAIFNLLSSAARYQAQRADVALVWLRVHLPGEQSTRAQADSDNSAHEQSSKYFVLNPSGSNPRLVEQILGYIGRSTELMDRSPSILSGVLDLLKALWESGAQFIYILEKLRSSRTFWENLSCCIRAAFASYPIDSVETVDEKKSLRYCCLGTIFEIMSYELFLQGKLLTETKTSDPAPVGSKEQKEPSVAPCPSDIVLKWFDSTTMEDLVNHLSSNGYQNDLLHRAKAASCRCIIRLLTKLSSGDTGSLSFSLVKKIQLISSKLTHMCAGARTLLCGGPRIASTGNQVHWTHRRHGDRAQSTDANAFFGLGQVVTTPCICSSTVTICPSWLQMLIFMDEPNFLHDIWLLKLHIAPELEGRPITPGPFQELLCFLLEFKVFEHNPSEQLQKSFPAANGVSLFDVPHIRDELGLELWNHSDWKTYKEVAEKMLDIMHKANLMKCQVDAKLCALRSFITFLSVCTGTSSYKKFGLPGGGISITTTQSAVRCACKSLQSAVDSLPPEVDNSGVLFPPLSGQVELLLTITRILLDHAKQSKSSRHLYPVIVLLMKTSGASTSFLFNLMPSSPALKQPVKSLLVLLLSLFEFIYKKVDMKDGSEDVNIFGELSLLSMSLLPVLCKLAESREYFDLAIASMDIILKGFLPSNVWVPILQKHFRLQVILQKCQSGALLCTQVILNFLLTMGRTKDGAKILQSANIFAFIKVLLSQMSLDDSCLRNSLSTQTKDVKIWGLGLAIVSSLNHCMDDDISRNSVANSTISFLSGQVPLMSSYLSAQSVNTHQSKKRTLLQKSQTSLSALSLTENILTLLCILAKYHFPRDTGMKEVDSELREIIIHLLAFISRGSERTGDSPNWNLSFGCPPIIKEEMKLNEEPPLIRSKYGWFRFAASCTLSTPSVSGPPNAGLSLVIRDKNPADSDSMKQTRFTEMLAVQIYRIAFLIMKFLCSQAKEAVRRAEELEFLDLAHFPELPMPDILHGLQDQVVSIVTEVLEANVSTALNTETERVCQLLLVILETSLYMELCVSQSCGIRPVMGRFEDFSKGIKAMVHASEKHSSFKPLVRWNGSSHIIVDVAPDWXTHIAEALGKAATPRTPLFVNFCANLFAKSVVPGMGIRKTGSSS

SEQ ID NO: 135531 - protein, 73 aa, Oryza sativa
  Clone ID: PAT_MRT4530_37199C.1.pep
VHASEKHSSFKPLVRWNGSSHIIVDVAPDWVHIAEALGKAATPRTPLFVNFCANLFAKSVVPGMGIRKTGSSS

SEQ ID NO: 135532 - protein, 51 aa, Oryza sativa
  unsure (1)..(51): unsure at all Xaa locations
  Clone ID: PAT_MRT4530_3719C.1.pep
PRQIQSSACGGRQEGXSSTIYDLDAFVLEEEDYPVIDYVLVIHVAKSTTAR

SEQ ID NO: 135533 - protein, 500 aa, Oryza sativa
  Clone ID: PAT_MRT4530_371C.1.pep
MGGGGGGGRKPRNFATFRLFPRAGAADPNDRVFVRVDSNDYTVPGFGDDDAFDSSSLSLTGDAAAGDHFSSASGPLPDHVRREILELGLPDDGYNYLHHLRELRPSAAAAASSFAPNQTAPPLPLDVKAYDASRVRIASGNVEDEMDEGRTMCKVAAKTAPVRRIERAVDPDIARLLDETDVSHGGSEDEGLEEDFVIMANRAEGDEEEDDDDEEEEVMDGVFLSDVEEEEEFEDDEGEPKPRVRRLLDEQFDLLALEEYGDSDDDDDDPGVRNGECELPTEVIDELKLFHSQNVSVTEEYRTPADFVRRKLDSSTAEEVDESANVIQKCAEYAERYLNETAEEEEVVLVSESSDESEVWDCETIVSTYSNLDNHPGKIQTPGNPKNRLPKVFPGETATTKDIIRLQGKERLPVEYLPQRKRNGEKEKKAKPTETPSAESFKKGAQKETKEEKKARKAAVKEEKREARKAKKELKGLYKFETQKAQKVAAVTGPASIRLM

SEQ ID NO: 135534 - protein, 327 aa, Oryza sativa
  unsure (1)..(327): unsure at all Xaa locations
  Clone ID: PAT_MRT4530_37200C.1.pep
RRRRRSGGAGRGKGSFRGGGTAAAAAAAAGSGELLSIPGVGPRNQRKLVDNGFEGVAQLKQLYAEPHRYAYTFQNYVFVTRVMQERESSGGKKTLRLMERSVFSDRMVFVRAXVMKPNWMNEMEISIYDSWFDPVVSSLPVLXPDGFIYLRASPDTCHKRMMLRKRAEEGGVTLDYLQGLHEKHESWLLPSKGGGTGVLSVSQLPTHLEGSLPPAIRDRVFYLEGDHMHSSIQKVPALVLDCEPDIDFNKDIEAKRQYAQQVAEFFQFVKKKKEAPSEQTSTDKNRINPQIMLPHKGGLWVPDGRNPFSGSAMNLNFRRAMSSYLST

SEQ ID NO: 135535 - protein, 154 aa, Oryza sativa
  Clone ID: PAT_MRT4530_37201C.1.pep
MSPTATPSPAPAAGAEAPKPPSSGTVAKRSLMSTLMEATALFRTSTIKEDSYVASALPAADLRALGDLRALLSTHPYPISIWSVPLNPAPPQGGEGAPGPVVVVDERADCQLLMFLRARYLRVQDAHAMLLRCAAWWDQYRADDQLDEDLCFMD

SEQ ID NO: 135536 - protein, 261 aa, Oryza sativa
  Clone ID: PAT_MRT4530_37202C.1.pep
MHRLSFLQATIIDAPLLLSSASMATVPARRGMACSVEALARRGGGGESESENEEEEEKRKGRAAERRLIGGGSAAAAAAAAGSGELLFIPGVGARNQRKLVDNGFEGVSQLKQVYRDKVFGKYSEKMVEFLQSSVGIIHKNHAESITSFIKESVDEELKDADSSKASQKKRLTFCVEGNISVGKSTFLQRIANETIELRDLVEIVPEPVAKWQDIGPDHFNILDAFYAEPHRYAYTFQNYVFVTRVMHERESSGGIKPLTL

SEQ ID NO: 135537 - protein, 394 aa, Oryza sativa
  Clone ID: PAT_MRT4530_37203C.1.pep
MAMDHRGGGGGGGRSSSRLRDRLARMFRPGALLRSTCNNHATASTSSSSSSAAAAAGGVVTASACSSSRALLAADAAAAVDYCGRESFLASSRRDYSDAAATALVGRTESFSTALDRLHRRGGGTPLPPSRFSVDASPKKEDAAAAAAAAKEKEMTTAAARDVQGFHYHHHRRHGSLGGGGGCGKSDKARRLLSNPYGFTTSDDADTDGDDVFSSDADDRGGRVVAGGGGGAKKGETEAFFSSSRSFSSDSSEFYTKKKKRNKPKKKSPSTASSKAAPPPPPPPPPTTRHQIRRKRRAARASSCVDTCGVRDGFRPVVSAAEEQVRRGFAVVKRSRDPYADFRSSMVEMVVGRQLFGAAELERLLRSYLSLNAPRHHPVILQAFSDIWVVLHGG

SEQ ID NO: 135538 - protein, 158 aa, Oryza sativa
  Clone ID: PAT_MRT4530_37204C.1.pep
MAALGRGKRRERRRLARKIPTNPDSAGDELELVVASRRDEEDNEEAEEVEDAAGADRPHILSRCPPRDRVTERRSGGERGGGGGAPAAWTPTVRRPYIRHLNEYWKEQQEWVKAELAAHGYVECEIDDNGDNPCTCGCAHAGRGEDEEEGYGQRLWMR

SEQ ID NO: 135539 - protein, 62 aa, Oryza sativa
  unsure (1)..(62): unsure at all Xaa locations
  Clone ID: PAT_MRT4530_37205C.1.pep
RRYAVPTDDIGDVVVATSLSACRGPDAPPLTAYRRCRRARRGVASTASRRXRTRGRPGSRTV

SEQ ID NO: 135540 - protein, 435 aa, Oryza sativa
  Clone ID: PAT_MRT4530_37206C.1.pep
MHFQAAFFLYFLLDLGGYRSDVLSVSDLEPPSDGLFVVGLTGGLDADELAAVALQGHDLSLAGFANRTRHWHAFRGREGLVPSAASVLPFGGDTYRDLIGGIQNLPGVPLGRDAMVRAARVLSSYDPAAFAAEGNEVEELGRALAAVTVMISEAARVKPINETVSSGGPIPHVTSQPTRPNTSSREQQPPSPCSRSHDLILCNSQSRCPTVQHRPTPPDGGAPPKKVVRLWRSLPNPTHSSPVAQLHPGGRWWKRPRWRRTPARRGHVELSPTSLRGKLSMVDLLDFGSGAGALAVRVDTMFVAGFANRSGHWHALRGSDHLFHRGDHHHQRARPLLLRPIARAVLEASRMGRAPAGEQARIADEHLPYIEHWDAMWHELGRWRRRGEWGGPFTGVLRERANIGSAEEALAVVGWTFRQSAKAARRRLGGGDVPH

SEQ ID NO: 135541 - protein, 69 aa, Oryza sativa
  Clone ID: PAT_MRT4530_37207C.1.pep
INNNSNKHSHLPPTQGSTSKQSQLQPSNQSNQKKLKEEAIAHTIGGEEEGDEEQRQHTVASRVVQQWMQ

SEQ ID NO: 135542 - protein, 390 aa, Oryza sativa
  unsure (1)..(390): unsure at all Xaa locations
  Clone ID: PAT_MRT4530_37208C.1.pep
MAMGWLPRSATAVLVLFLVLWRDWGVEAATFTFVNRCTDTVWPGVLSNAGSARLATTGFELPPGVARAVPAPAGWSGRMWARTGCAVVQDGGAGGGRMVCATGDCGSGGAECNGAGAAPPATLAEFTLDGSGGLDFYDVSLVDGYNLPVLVEPSSSGGGGGGGGSLTSAATCAAAGCAADLNAMCPAELRAGGGAACRSACDAFGRPEFCCSGAFANPSTCRPTAYSQVFKSACPRSYSYAFDDPTSTFTCSGGPDYTLTFCPASSPSGSQKSTTATPTPAAMMPGTGTPTTPTTATAMPGATMPGTATATTMPGTTFTDAVPDTSMPMPMGGDAGGGGEEGVVLSGSETWIANMATGELTAXAASLSRPSPAAALALFLVHALRLLVLR

SEQ ID NO: 135543 - protein, 54 aa, Oryza sativa
  Clone ID: PAT_MRT4530_37209C.1.pep
SDIWEQRVASAEAKIADLEYKVSSYELSMQEEVARKVDERMAVHRSQDPQTYIP

SEQ ID NO: 135544 - protein, 183 aa, Oryza sativa
  unsure (1)..(183): unsure at all Xaa locations
  Clone ID: PAT_MRT4530_3720C.1.pep
LARGARFVGRASPCCCCCCCWDSDDLDALASGRSTGTIWGYLSSAIPTNGSPTMVAGLSHNGKFTYEYASSPGKRTSMEHCCQTIIDSVDGQSIDLFGGFDGHDGXARVAENVTNNHVINLLRCPEIVDDTIMCRDDAYQSTDRAILESDSRRNSETYPRDEPVALVXDRIYVAHDEHARAIV

SEQ ID NO: 135545 - protein, 104 aa, Oryza sativa
  unsure (1)..(104): unsure at all Xaa locations
  Clone ID: PAT_MRT4530_37210C.1.pep
PYTVVQDNRVASHSKXWGIDGTXQXTTMTQXHSTVSTPMCPTHTRCQQLSGCTAVTSWHTSSIVPSNLAHNLWTIFPSSVPGHKNSQPSHRVPPRSPCGIFQFP

SEQ ID NO: 135546 - protein, 133 aa, Oryza sativa
  Clone ID: PAT_MRT4530_37211C.1.pep
YVEVGVEVVIALEITKVIPVRVRSRATSGNSGLPVPERKVLHRYIRALADFICNRIIYQHTYMSRRRSKRDTEAKIADLEYKVSSYELSMQEEVARKVDERMAVHRSQDPQTYIPSVMVRPSGNRSSCTLTGQ

SEQ ID NO: 135547 - protein, 155 aa, Oryza sativa
  Clone ID: PAT_MRT4530_37212C.1.pep
MPTGRAGYRSATKSRHLSPLTAWISSHVAYCGSHREHDDHDGVVVRCRGAWAAVWWPPAGAEAAAAAEASWSGFWSTAGMVDGGGARSSSPGSTATDLGATKRRSPPSDGGGGPRSGGVDDGKANTRRDGVGVVEEVDQGGSHLALSMAEDRGGG

SEQ ID NO: 135548 - protein, 65 aa, Oryza sativa
  Clone ID: PAT_MRT4530_37213C.1.pep
TDPGFSPSLLSPDPELVVAGVELYTGGRDGYLAAGEEVTTEPVCTAHPAEQLLHHHPIHDRHDHV

SEQ ID NO: 135549 - protein, 52 aa, Oryza sativa
  Clone ID: PAT_MRT4530_37214C.1.pep
MGSGSQRRSRGRRTKTCLAEPAPGRRNIAGTGDLELFRGPSGTVKFFRIELG

SEQ ID NO: 135550 - protein, 121 aa, Oryza sativa
  Clone ID: PAT_MRT4530_37215C.1.pep
MAGGGRDCDDDDENGEVAVATAHARGGAEEESVAARRGRRASARARGSKQGLYDDGGGDSGSGFSPSAAEHKRHEQIGNLAVELKHPRLASEPSAMVPSRAQATHEQIGVLAGKLEHHAVH

SEQ ID NO: 135551 - protein, 229 aa, Oryza sativa
  unsure (1)..(229): unsure at all Xaa locations
  Clone ID: PAT_MRT4530_37216C.1.pep
NXGRSTGIKIFSKEXGGVXDQPVTGGXSSFSKXRFLXIRXGVXRXXXGREXXXGKXTWEAGCXLKEVVFXLVFGXXGPXXXKMXGFSTXRPRVKXNXVGKXAIFSISMVXRKTRGXQKSRGDPQKAXVVXXXLSPNXXXXXSXTXXFLXXEHRLDXFAGDSPWXXKQPEHGAIRIXRNTTGXPRASEEEQVXPHRTGSARSLSLSLSLSNDQIRLXRLSLHCRQRLGRS

SEQ ID NO: 135552 - protein, 77 aa, Oryza sativa
  Clone ID: PAT_MRT4530_37217C.1.pep
MVRGKTVISRIENTTSRQVTFSKRRSGLFKKAKELAILCDAQVGVLVFSSTGRLYDYSNSSNSRNLTYDQLLGDTVC

SEQ ID NO: 135553 - protein, 105 aa, Oryza sativa
  Clone ID: PAT_MRT4530_37218C.1.pep
MRTHRRRRRRRAPYSRRRRCRSPPPRRRGRRPSPARRRAHAGARPQPRAQPRLCPPPGAELSPALDAERRRRRRRRLQPAPPRSGRRRRVCRETPPHRARTRPPP

SEQ ID NO: 135554 - protein, 38 aa, Oryza sativa
  Clone ID: PAT_MRT4530_37219C.1.pep
GTPEKFCHLVALLYWRDLAGGEVSGMRSLFYAVFSEIT

SEQ ID NO: 135555 - protein, 86 aa, Oryza sativa
  Clone ID: PAT_MRT4530_3721C.1.pep
VLFLIISLHLRHIFKSKVHHRSLNLYCCVIPVPKLANRPFRSLNLFDCVIPVPKLADHSFRSSNLFSCITPVPKQVFELKLFRVLK

SEQ ID NO: 135556 - protein, 196 aa, Oryza sativa
  unsure (1)..(196): unsure at all Xaa locations
  Clone ID: PAT_MRT4530_37220C.1.pep
APPPQPPPPAAPXPPPPPPPPPLCTSPTAFSPPPQDPPSPSSTTSSPPAASPPLRRAGRPRSSPVSTPPPTPTPCSPSSPPPPPASTPSPSPARTSPPSSPPSRGCSARGPAPSPAASPPSAAAPTCLRPRSAASSCPAARRTSPRPTSPRSSRSGSPSSAPSTCSSRSSGGATRSSPPTSTGWSGPTSRCSGSAG

SEQ ID NO: 135557 - protein, 652 aa, Oryza sativa
  Clone ID: PAT_MRT4530_37221C.1.pep
MAELRESFESQWAPSDVMEENLKKMVAHGVLPAKEIIGWRPAFGEAFPTPDTHEIVPHFALFRRIFFLKPQPNKNKPCVVGGAGFQLRGTLSQKYFSMPFKTSNKGWHANWFYVQNPEPTLPEYCCLPPVYQDTWNSLPMGNEASQAVELMDRMIKLKEQGLQGEQITRHFIKSRLAPIKERSRTTFEFDGKHDPNREDPESLDFKVMKERMYKIFSNAIVVSYSHLLLVVPYNAFNPPPPEFALMKSEPPIAQHRSPHGKTSQVSGGPKIWSVDQSDISKPTSQSDFRKRKLALSDDEGDDAKKTGGEETAGKQPRQANPKKKTSSRPMPKIRKSSRKPSDIDPSKKDPKPTGMERSSSKETRSTAGDRPSDEQPVTDNVDPSNEPPIGSQWAEAGIGANQEPPTGNQSDMEQNKDIPEVEARADNPPKKDANVDPGSSSPAKVQGPARPRPEIIIGPMVGDEEEILRIQSAEDSHPPTLIKWWDDDKQPQGIIINRQKEDEEVCLLKKALSQATRIVNRLEGVRDEVANTAAPLVQAMFYNNNGPSSFDATEIFDKLRIAPNTYFKNIKEAGSMGASLALAMTKSLYPKIDIDAVDGFADRTSEEAALDLINDAQKAADKIAGDIVRRFQDNDLRPAGSNNSDDEKTDTD

SEQ ID NO: 135558 - protein, 657 aa, Oryza sativa
  Clone ID: PAT_MRT4530_37222C.1.pep
MAEERESFESQWAPSDVTEENLKEMVAHGVLPAKEIIGWRPAFGEAIPTPDTHEIVVFSHFFYGGFSLPTSRFFRGILNFYGISLHHLNPNSIVHISNFIHACEAFLGIRPHFALFRRIFFLKPQPNKSKPCVVGGAGFQLRGTLSQKYFSMPLKTSNKGWHANWFYVQNPEPALPEYSCLPTVYQDTWNSLPTGDEAAQAVELMERMIKLKEQDPDSLDFKVMKERMYKIFSNAIIVSYSHLLPVVPFNAFNPPPPEFALMKSDPPITQRRSPHHQTGQGSEGPKIRSEARPNTSDPAGQPDSRKRKLVSSDDEGDTARKPGDRETTKKLPKQATPRKKTSSHPVPKIRKSSRKPSDIDPSGKDSDPTSTGTNLKETEPTAEDHPSDNQPATDNVGSGDQPPTGNESAEARAGVNQEPPIENQSGTRPSQEIPEVGAQADNPHKQDTSSDPTPESPVKTQESTRPRSEIITVQAARISDLEKQVKALEKDKAELAKQRDSALKDDEDRKIKSQAQFDVLVDKINRLEGARDKVANAATPLIQAMFFNNTGPSTLDASEIFDKLRVALDTYFKNIREAGSMGASMALAMTKSLYPKIDTDAIDGFADGTSEETALDLINDAQKAADKIAADVVERFQDADLRPTGSDNSDDERTDTD

SEQ ID NO: 135559 - protein, 330 aa, Oryza sativa
  unsure (1)..(330): unsure at all Xaa locations
  Clone ID: PAT_MRT4530_37223C.1.pep
VGKRRPGRCGGARHDVARRLARWRLARRHRGRQWRMGEXRGPAATEAIGAKEAATRVSDVDCFSLLMPNGLLLLLLARPSRLSSSEFCWKFXRKLPIKNGYRQNGRKKPHIISATISEKRLPFPFPIPTETVGANRKRXPEFSEISVPFSPLLATLFCRHRGGGGKEVARLVTRTMVARTEAAVATDWTLARRSDGAAEMEMGLEEEEEGWKGRCCPRRSPPSPLPQHVVPTAAEADRYGRAPRPHRPPPPPPSRSLVPSSLPRPPRPTATPYPRHVVPTADAAGSYDRAPPSPPPGARHPRPRRSLPPPPSRSLVPSSPPRPPRPTASP

SEQ ID NO: 135560 - protein, 607 aa, Oryza sativa
  Clone ID: PAT_MRT4530_37224C.1.pep
MAEERESFESQWAPSDVTEDNLKEMVAHGVLPAKEIIRWRPPFGEAFPTPDTLEIVDTWNSLPMGDEAAQAVELMERMIKLKEQGLQGEQITRHFIKCRLAPIKERSRTAFEFDGKHDPNRENPDSLDFKVMKERMYKIFSNAIVVGYSHLLPVVPFNAFNPPPPEFALMKSDPPIAQHRSPRHQTGQGSGGPRIRSETQPSAPDPVGQPNSRKRKLVLSDDEGDTARKLGDREATKKLPKQATPRKKTYSRPVRKIRKSTRKPSDIDPSGKDSDPTNMDTSSSKETGPTVEDHPSDNQPATDNVESGDQPPTGNQSAEAEAGVNQEPPTGNQSDAGPSQEIPEVETQANNPCGQDTSNDRRSESPLKASESTYPRPEIIKVDTLGPMISDEEEIPRIQAAEDSCPPILFKWWDDNLQPQGIVINRQKEDEEEQIQTLENDKAELARQRNSALKEVEDRKIKSQAQFDVLVDKINKLEGARDKVANAATPLIQAMFFNNAGSSTLDAAEIFDKLRVAPDTYFKNIKEAGSMGASLALAMTKSLYPRVDMDAIDGFANGTSEEAALDLINDAQKAADKIAADVVERFQDVDLRPTGSDNSDDEKTDTD

SEQ ID NO: 135561 - protein, 118 aa, Oryza sativa
  Clone ID: PAT_MRT4530_37225C.1.pep
MDIIKVANKSAISNDIFDLATQPDKLICVIELATILNIKEDSKIVGAAYVKKWERCIASGRIATEILVSTQRPRHCSSEWATRELLCVIAVTDEASSGGFFGRRMGRPGQRGGRCRYR

SEQ ID NO: 135562 - protein, 243 aa, Oryza sativa
  Clone ID: PAT_MRT4530_37226C.1.pep
PAGKSTFPPLLPFRFTGTQPISVPPLYCSPHRIESNRIESPHDSTNPPPPEEEARESPPPMSLPVAKLGTLALRTLSKPIASRLKNQAAVHPKFRNFIICIAQINHRVTTRIQRRIYGHATDVEITPLNEEKAVQAATDLIGEGFIFSVAVAALIFEVQRNARSEARKEEARKQELEVSFSAVAATAAAAELKQREESLSKDLEDLKLRLAEIEHLAKGRGLSGILNFKGVHGAESSKAATPA

SEQ ID NO: 135563 - protein, 671 aa, Oryza sativa
  Clone ID: PAT_MRT4530_37227C.1.pep
MAEERESFESQWAPSDVTEDNLKEMVAHGVLPAKEIIGWRPAFGEAFPTPDTHEIVVFAHFFYGAFLGIRPHFALFRRIFFLKPQPNKSKPCVVGGAGFQLRGTLSQKYFSMPLKTSNKGWHANWFYVQNPEPALPEYSCLPPVYQDTWNSLPTGDEAAQAVELMERMIKLKEQGLQGEQITRHFIKSRLAPIKERSRTAFEFDGKHDPNREDPDSLDFKVMKERMYKIFSNAIVVSYSHLLLVVLFNVFSPPPPEVALMKSDPPIAQHQSPRRQTGQRSGEPRIRSKTQPSASDPVGQSDSRKRKLVLSDDEGDDTGELRDKGATGRPPKPTNPIKKTSKEENLQSSYTKNQKVFQSDAGPSQKIPEVEAQINSPPGKDAGNDSETRSPVKTQESSRPRPGIITGPMIGDEEEILRIQAAEDSHPPILVKWWDDNMPPQGIVINKQKEDEEVCLLKKALSQATCIVNRIHLRNEAKTATLERVNVVQAAKISQLEKQIQTLENDKAELARQRDSALKEVEDRKIKSQAQFDVLVDKINRLEGAREKVANAATPLIQAMFFNNAGPSTLDAAEIFNKLRVAPDTYFKNIKEAGSMGASLALAMTKSLYPRVNIDAIDGFVNGTSEEAALDLINDAQKAADKIAADVVERFQDVDLRPTGSNNSDDEKTDTD

SEQ ID NO: 135564 - protein, 77 aa, Oryza sativa
  unsure (1)..(77): unsure at all Xaa locations
  Clone ID: PAT_MRT4530_37228C.1.pep
MGRRAIIGPIALRLDGLEXLLRSLRGRTCYGEVVSLRHILFALHPSPKSLLAWQSTRTILRLSPSLFHSLRFGGTSP

SEQ ID NO: 135565 - protein, 747 aa, Oryza sativa
  Clone ID: PAT_MRT4530_37229C.1.pep
MAEERESFESQWAPSDVTEDNLKEMIIGWRPAFGEAFPTPDTHEIVVFAHFFYGGFSLPTSRFFRGILNFYGISLHHLNPNSIVHIANFIHACEAFLGIRPHFALFRRIFFLKPQPNKNKSCVVGGAGFQLRGTLSQKYFSMPFKTSNKGWHANWFYVQNPEPALPEYCCLPPVYQDTWNSLPMGDEAAQAVELMERMIKLKEQGLQGEQITRHFIKCRLAPIKERSRTAFEFDGKHDPNREDPDSLDFKVMKERMYKIFSNAIVVSYSHLLPVVPFNAFNPPPPEFALMKSDPPIAQRRSPRHQTGQGSGGPRIRSEPQPSASDPVGQSDSRKRKLVLSNDEADDTTRRPRDRETTKKLPKQATLRKKTTSRPAPKIRKSSRKPSDIDLSGKDSDPTSVDASSSKETGPTAEDRPSDNQTATDNVGSVDTLGPMISDEEEVPRIQAAEGSRPPILVKWWDDNMQPHGIVINKQKEDEELCLLKKALGQATRMENRIHLRNEAKTATLERLVPHLGTLEATRSLLHETKELARKNEHDLRNRIAELQESNFELSGLSKVINVVQAAKISQFEKQIQTLENDKAELARQKDLALKEVEDRKIKSQAQFDVLVGKIKKLEGARDEVANAAAPIVQAMFLNNNGPSALDASEIFDKLRVAPDIYFKNIKEAGSMGASMALAMTKSLYPRVDIDAIDGFADGTSEEAALDLISNAQKAADKIAADVVERFQDTDLRPTGLDISDDEKTDTD

SEQ ID NO: 135566 - protein, 69 aa, Oryza sativa
  Clone ID: PAT_MRT4530_3722C.1.pep
QVSFHHKCSIKYAAQAATTTGSPRASPSRPWRRRRKLAATSRRRCRGHWIRTGTPRTGTLTRAAPAPGW

SEQ ID NO: 135567 - protein, 67 aa, Oryza sativa
  Clone ID: PAT_MRT4530_37230C.1.pep
MEEPRRGEIGDRQIGDRRREGVAGDRGIEWCVMREDKWRPEIPAGADWATDSGAHGPRAPVRRARPG

SEQ ID NO: 135568 - protein, 715 aa, Oryza sativa
  Clone ID: PAT_MRT4530_37231C.1.pep
MAEERESFESQWAPSDVTEDNLKEMVAHDVLPAKEIIGWRPAFGEAFPTLDTHEIVVFAHFFYGGFSLPTSRFFRGILNFYGISLHHLNPNSIVHIANFVHACEAFLGIRPHFALFRRIFFLKPQHNKSKPCVVGGAGFQLRGTLSQKYFSMPFKTSNKGWHANWFYVQNPEPALPEYSCLPPVYQDTWNSLPMGDEAAQAVELMERMLKLKEQGLQGEQITRHFIKSRLAPIKERSRTAFEFDGKHEPNREDPDSLDFKVMKERMYKIFSNAIVVSYSHLLPVVPFNAFNPPPPKPSNIDPFGKDSDPTNVDTGSSKETESTAEDHPSDNQPATNNAESGDQPPTRIQSAEAEAGVNQEPPTGNQSDAGPSQDIPEVETQADNPRGQDASNDRRSGSPLKASKSTRPRPEIITGPMIGDEEEIPRIQAAEDSCPPILVKWWDDNLQPQGIVINRQKEDEEVCLLKKALNQATRIVNRIHLRDEVKTATLERLVPHLGTLEATRSQLYEARELAKKNEHDLRDRIAELQESNFELSGSSKVQAAKISQLEKQIQTLENDKAELARQRDSALKEVEDRKIKSQAQFDVLVGKINKLEGARDKAMFFNNAGSSTLDAAEIFDKLRVAPYTYFKNIKEAESMGASLALAMTKSLYPRVDIDAIDGFADGTSEEAALDLISDVQKAADKIAADVVERFQDVDLRPTGSDKSDDEKTDTD

SEQ ID NO: 135569 - protein, 180 aa, Oryza sativa
  Clone ID: PAT_MRT4530_37232C.1.pep
MREKGERHRACDLGVGPSKRPGRWRRRRHGRRGGRCHTGELEDEDPSRSEVSDLNRIAPAVDDPRKHALVLAVLELRHPAAAHDSRARLLPARAVPTLMLPPRRSQASDGDGDGEVARGHHDDEQRGRGERGRYRRRVARRHGRRPSPLFPHLIPAAAGGARPRDEDAGAATATSSGDGE

SEQ ID NO: 135570 - protein, 516 aa, Oryza sativa
  Clone ID: PAT_MRT4530_37233C.1.pep
MAEERESFESQWAPSDVTEDNLKEMVAHSVLPAKEIIGWRPAFGEAFPTPDTHEIVVFTHFFYGGFSLPTSRFFRGILNFYGISLHHLNPNSIVHIANFIYACEAFLGIRPHFALFRRIFFLKPQPNKIKPKPSAIDPSGKDSDPTSVDASSSKETRPTAEDRPSDNQPTIDNVETGDQPPTGNQSAEAEAGVNQEPPTENQSDAGPSQEIPEVRAQADSLRGQDASNNQRSRSPLKASEPTRPRPKIITVDTLGPMIGDEEEIPRIQAAEDSHPPILVKWWDDNMQPQGIMINKQKEDEELCLLKKALGQATRIVNESNFELSGSSKVNIVQAAKISQLEKQIQILENDKAELARQRDLASKEVEDRKIKSQAQFDVLVGKIKKLKGARDEVPNAAAPIVQAMFLNNNGPSALDASEIFDKLRVASDIYFKNIKEAGSMGASMALAMTKSLYPRVDIDAIDGFADGTSEEAALDLISDAKKAADKIAADVVERFQDNDLRPTGPENSDDEKTDTD

SEQ ID NO: 135571 - protein, 133 aa, Oryza sativa
  Clone ID: PAT_MRT4530_37234C.1.pep
VGGHRCVPITAVKKFHRPRPRQPRRGYIFSSPDHHAVIFSRGAEAEAMVGRRRMACWRWTTCGRVTTEGAGGRRWRWRLPVTTAAGAVPDCAWTEAPGGCRRRVDGGSRRCIDGCPRHAREGSERRCAWLSAD

SEQ ID NO: 135572 - protein, 584 aa, Oryza sativa
  Clone ID: PAT_MRT4530_37235C.1.pep
MAEERESFESQWAPSDVTEDNLKEMVAHGVLPAKEIIGWRPAFGEAFPTPDTHEIVVFAHFFYGGFSLPTSRFFRGILNFYGISLHHLNPNSIVHIANFIHACEAFLDSDSLDFKVMKERMYKIFSNAIVVSYSHLLPVVPFNAFNPPPPEFALLKSDPPIAQHQSPRRQTGQGSGGPRIRSETQPNASDPVGQSDSRKRKLVPSDDEGDDTGKLRDKGATGRPPKPTNLKKKTSSRPEPKIRKSSRNESAEAGAGVNQEPSTENQSGTGSSQEIPEVGAQADNPRKQDTSSDPTPGSPVKTQESTRPRPEIITVDSLGPMIGDEEEIPRIQVAEDSRPPILVKWWDDDRQPQGIVINKQKEDEEVCLLKKALSQATRIVNRIHLRNKAKTATLERVNVVQAAKISQLEKQIQTLENDKAELARQRDSALKEVEDRKIKSQAQFDVLVNKINRLEGARDKVANAATPLIQAMFFNNAGPSTLDASEIFDKLRVAPDTYFKNIREAGSMGASMALAMTKSLYPKIDIDAVDGFADGTSEETALNLINDAQKAADTIAADVVERFQDVDLRPTGSDNSDDEKTDTD

SEQ ID NO: 135573 - protein, 612 aa, Oryza sativa
  Clone ID: PAT_MRT4530_37236C.1.pep
MAEERESFESQWAPSDVTEDNLKEMVAHGVLPTKEIIGWRPAFGEAFPTPDTHEIVNPEPALPEYCCLPPVYQDTWNSLPMGDEAAQAVELMERMIKLKEQGLQGEQITRHFIKCRLAPIKERSRTAFEFDGKHDPNREDPDSLDFKVMKERMYNIFSNAIVVSYSHLLPVVPFNAFNPPPPEFALMKSNPPIAPRRSPRHQTGQGSGGPRIRKPSDIDPSGKDSDPTNMDTSSSKETGPTAEDHPSENQPATYNVEPSNEPPTGNQSVEAEVGANQEPPTGNQSDAGPSQKIPEVEAQTNRPIIGDEEEILRIQAAEDSRPPILVKWWDDNMQPQGIVINKQKEDEELCLLKKALGQATRIVNRIHLRNEAKTVTLERLVPHLGTLKATRNQLHEAKELARKNEHDLRDRIADLQESNFELSGSSKVQAAKISQLEKQIQILENDKAELAKQRDLALKEVEDRKIKSQAQFDVLVGKIKKLEGARDEVANAAAPIVQAMFFNNNGPSALDASKIFDKLRVAPDTYFKNIKEAGSMGASLALAKTKSLYPRVDIDTIDGFADGTSEEAALDLISDAQKVADKIAADVVERFQDTDLRPTGPDNSDDEKTNTD

SEQ ID NO: 135574 - protein, 86 aa, Oryza sativa
  unsure (1)..(86): unsure at all Xaa locations
  Clone ID: PAT_MRT4530_37237C.1.pep
MAYVERGVVKDKRTIWRLSIISDFFRAIVNFIRIFFDTLFSVDKTDSYKKGYGAGKKWDGGPGGGRCGGAXYGGGGGGGPVGGRKS

SEQ ID NO: 135575 - protein, 121 aa, Oryza sativa
  Clone ID: PAT_MRT4530_37238C.1.pep
MPSSPRFSFGQKWRGGRLVVERRSPGPALRGGGSMKSANEGASVRCGGCCVLPFVCVGVLSWWTAICSQGCRVPEDMDPSQVQISSWTALPMGEIAGGRLGTQHDTGFSLSLKKRFFGSMV

SEQ ID NO: 135576 - protein, 696 aa, Oryza sativa
  Clone ID: PAT_MRT4530_37239C.1.pep
MAGERESFESQWAPSDVTEDNLKEMVAHGVLPAKEIIGWRPAFGEAFPTPDTHEIVVFAHFFYGGFSLPTSRFFRGILNFYGISLHHLNPNSIVHIANFIHACEAFLGIRPHFALFRRIFFLKPQPNKSKPCIVGGAGFQLRGTLSQKYFSMPFKTSNKGWHANWFYVQNPEPALPEYCCLPPVYQDTWNSLPMGDEAAQAVELMERMLKLKEQGLQGEQITRHFIKCRLAPIKERSRTAFEFDGKHDPNREDLDSLDFKVMKERMYKIFSNAIGVSYSHLLLVVPFNAFNPPPPEFALMKSDPPIAQRRSPRQQTGQASGGPKIRSDARPSAPDPVSQSDTRKRKLVLSDDEADDTTRRPEDRETTKKLPKQATPRKKTSSRPVPKIRKSSRKLSDIDPSGKDSDPTNMDTSSSKETGPTVGDHPSDNQPATDNVESSDQPPTGTQSVEAEAGVNQEPPTGNQSDARSSQETPEVETQADSPHGQNASNNQRSGSPLKASESTRPRPEIITANTLGPMISDEEEIPRIQAAEDSCPPILVKWWDDNLQPQGIVINRQKEDEEVCQLKKALNQATRIVNRIHLRKEAKTATLEKLVPHLGTLEATRNQLHEAKELARKNEHDLRDRIAELQESNFELSGTSKVQAAKISQLEKQIQILENDKAELARQRDLALKEVEGINNQYLKSHYPPYADLLM

SEQ ID NO: 135577 - protein, 275 aa, Oryza sativa
  Clone ID: PAT_MRT4530_3723C.1.pep
MAMAMAMAMEAAPAPVPLPLVLRFRNGEDRFALTDQPRQLPLGYAIDAPSIRSARTFGLLDEYARVHAQHARGGPGAVPDIAAWDRAFMEREVTDTDELHDLFMEYKIVDMSNLFVMVGGQGDGRGTCMLWLNVVSATQPYRIMFILQLAAIDNVGFHVLCFGRLVVVYNVSLFVEMLQHRHLSNLFHRKMLHIILVMADVPIEYFLAWNHACSQAASTLEMDGLSVLCAQKTADVVKKRTVEEVKALLGIADVGMTPEEELKLQHDNDAILCLR

SEQ ID NO: 135578 - protein, 196 aa, Oryza sativa
  unsure (1)..(196): unsure at all Xaa locations
  Clone ID: PAT_MRT4530_37240C.1.pep
TRGRTSQARPLRAASSSTRRVAGGDRAEGRRREEGRQQRGRRPGWWAATSARWGGGGGERGEVDGDSRREEGERAGDXQRNSASGSVVKDDDDEDIGSLEGRVGGEDGRHHGQPLACGAGVVVVVLRRLAPRLCRGRRLLEXRVERRLAPRLLRPTPLCRPALAAACPAHCRASARTPDWPGTHSTLQPSTWTAGA

SEQ ID NO: 135579 - protein, 120 aa, Oryza sativa
  unsure (1)..(120): unsure at all Xaa locations
  Clone ID: PAT_MRT4530_37241C.1.pep
PPRPFPPGPVFGPGGAGFLGVGKKPGPKGWAGXXGPGLGAKPGXPGPGPPAPXKTKXVSPGGXKKNLGPLAPGGRKXPLPPRGAGFSFGPKPGLGETNFPPPIWGGNKGGWGLGFLGPLT

SEQ ID NO: 135580 - protein, 327 aa, Oryza sativa
  Clone ID: PAT_MRT4530_37242C.1.pep
MAQTERPASATRCAMARPAGPPPTTRWATRPTPRRARPRDASASALRWGIAEKKVRDGDAPRAGVGTGLQRASAVVEGEQLRARRRGQRAQRLTRRSGAVAREGEGACRRGGHGGGGRWWPWRRGGCSQLRNFLILGGERWRHLLPRLQRRPNRVVERRRRRRTALHGARAAHGRSRQRRPRRQHGGHAQLDKSVPRRRRRRCSHRRVFHGRRRQADGPGAASLDRRQIKSTGTLIYLKASFWTCTGVKHISQASCFYINMLPDVGAARPPPPSVPYSRIWTRGGHPAICRLPLHRCPQPHVWPRPAVRGGGRGRRGGWAGGRGGEN

SEQ ID NO: 135581 - protein, 407 aa, Oryza sativa
  Clone ID: PAT_MRT4530_37243C.1.pep
MQGGAAMVVTVNGGNGKDSFGNMARPPSRSLLPLKLLKPFLIFAVLATGFLAAAAAALLLLGGGAGASYVPNVLSATAWQQQPRCAQQQEDGGRAALERWTRLPAASAWHNMSDEELLWAASMEPRVRRYPYRRVPKVAFMFLTRGPLPLAPLWERFFNGSGGRELFSIYVHSTPGYNPDFPTTSVFYRRQVPSQVAQWGQTNMFDAERRLLANALLDGGNERFVLVSESCVPLHGFPAVYGYLTASRHSFVGAFDDPGPHGRGRYRAGLAPEVSPEQWRKGAQWFEVDRSLAVFVVGDERYYPRFRELCRPPCYVDEHYLPTVLSIEAAGRIANRSVTWVDWSRGGAHPATFGGADVGEAWVRKAAAGQRCLYNGQPSEVCFLFARKLAPSALQPLLALPPTLLGY

SEQ ID NO: 135582 - protein, 183 aa, Oryza sativa
  Clone ID: PAT_MRT4530_37244C.1.pep
ELPHNVTVQTVEEEFKKFGAIKPGGIQVRNNKIDRFCFGFIEFESQQSMQAAIEASPIHMGGKEVFVEEKRTTTRVVNGVVITRGDNGNAGGGGRYQSGRGGYRGDNFRGRGGGYANSGNYRGGDNFSRRNDLRNRNEFSGRGRGPPPGNGYQNNGFHPARPFQNGNGRFTRVNGPRQTPVAA

SEQ ID NO: 135583 - protein, 50 aa, Oryza sativa
  Clone ID: PAT_MRT4530_37245C.1.pep
LPILALVFVLMVIYSSVESVNRAFVHMSKAFYRVEYACLSILFVECAQTR

SEQ ID NO: 135584 - protein, 62 aa, Oryza sativa
  unsure (1)..(62): unsure at all Xaa locations
  Clone ID: PAT_MRT4530_37246C.1.pep
MLNTFNFAKEKRSVKNAWMIKEVDWGPNQDLLQVHFHFTTSLLIHRRXEIKFYTFWIRIRAS

SEQ ID NO: 135585 - protein, 56 aa, Oryza sativa
  Clone ID: PAT_MRT4530_37247C.1.pep
MSRRYSYVVSKAGLRIKNKMSPELPQINLSVHRYSDTGFQVSTVIPVAFIRCLETQ

SEQ ID NO: 135586 - protein, 112 aa, Oryza sativa
  unsure (1)..(112): unsure at all Xaa locations
  Clone ID: PAT_MRT4530_37248C.1.pep
SSDIKHLFDAKIRPNPEGRFIRPCLFCTTSNKAPVPVSRVGTGRSASPDRLRASTVLRYSEPSCRIPAAGGDPPSSXAAXXXXWELQXLXPLXXGVXFRAXGESXXXXXXPW

SEQ ID NO: 135587 - protein, 55 aa, Oryza sativa
  Clone ID: PAT_MRT4530_37249C.1.pep
MGQPTPTSTSAGGERVVGTWLYTPYARLEQMTKGFLLPDGAGVCKTPIAPNPDYR

SEQ ID NO: 135588 - protein, 79 aa, Oryza sativa
  Clone ID: PAT_MRT4530_3724C.1.pep
DYPTKKSWLLPAPAHASTSEAPTQRSVTGTRTQVSESDSDSSVRLGKLKKKRIRGLAPYIYIYIFSENIIYIIKYNILL

SEQ ID NO: 135589 - protein, 92 aa, Oryza sativa
  Clone ID: PAT_MRT4530_37250C.1.pep
MAHLKKDARVLLLTAIAVMAMIFSPCNAEVADKCYTVYRCTLPACNDYCIKLGVHNPQVTCKLSFPPSDYYDTCCCGTWDDKSVGARRLLSR

SEQ ID NO: 135590 - protein, 91 aa, Oryza sativa
  unsure (1)..(91): unsure at all Xaa locations
  Clone ID: PAT_MRT4530_37251C.1.pep
LNLNFLYPNKKIHHGWEIGFRKKAKTPIFFQVPLVLSIPKKKPNNXTQKTFKTFAFPGQHLKEKWAKNLFLGPLFYEKSGLLNAFSQTGPF

SEQ ID NO: 135591 - protein, 372 aa, Oryza sativa
  unsure (1)..(372): unsure at all Xaa locations
  Clone ID: PAT_MRT4530_37252C.1.pep
NAGGGVGKGSGPVPSRRRAQPQPPPSRKAAHDAPVQLILSLNASCSSDASVDSLRGRESSGGWLERIWCGVAPAVPRRGKTPVKAAAAAAAAEKVAADAEVVAPATPEAGKRRCAWVTPTSGGSIILPTLDXNPCYVIFHDEEWGVPVHDDRNXSLRMSNHDRFHRRLFELLVLSGALAELTWPEILKRRQLFREIFVDFDPVAISKINEKKLVAPGSVANSLLSEQKLRAVVENARQILKIVDEFGSFDRYCWGFLNHKPIVSKFRYPRQVPVKSPKADMISKDMVRRGFRGVGPTIIYSFMQAAGLTNDHLVSCFRFKECNEAPTLCTSDTSNANSEADLSADELRTKICSKEMAAKAELLRTIGTLIIS

SEQ ID NO: 135592 - protein, 708 aa, Oryza sativa
  Clone ID: PAT_MRT4530_37253C.1.pep
MAEERENFESQWAPSDVTEDNLKEKVAHDVLPAKEIIRPHFALFRRIFFLKPQPNKSKPCVVGGAGFQLRGTLSQKYFSMPFKTSNKGWHANWFYVQNPKPALPEYSCLPPVYQDTWNSLPTGDEAAQAVELMERMIKLKEQGLQGEQITRHFIKIRLAPIKERSRTTFEFDGKHDTNREDPDSLNFKVMKERMYKIFSNAIVVSYSHLLPVVPFNAFNPPPPEFALVKSDPPVVQRRSPHRQTCQGSGGPKIHSEARPDTSNPAGQPDPRKRKLVSSDDESDTARKPGDREATKKLPKQATPRKKTSSRPVPKIRKSSRKPSNIDPSRKDSDPTIRETNLKGIDPTDEDQPSDSQPTTDNVGSGDQPTTRNESAEAGAGVNQETSTENQSGTGPSQEIPEVGAQADSPRIQDTCDDPTPGSPVKTQGSTRPHPEIITVDSLGPIIGDEEEIPRIQAAEDSHPPILVKWWDDDRQPQGIVINKQKEDEEVCLLKKALSQATRIVNRIHLRNEAKTATLERVNVVQAAKISQLEKQIQTLENNKAELARQRDSALKEVEDRKIKSQAQFDVLVDKINRLEGAREKVANAATLLIQAMFFNNAGLSTLDASEIFDKLRVAPNTYFKNIREAGSMGASMALAMTKSLYPKIDVDAIDGFADGTSEESALDLINDAQKAADKIAADVVERFQDVDLRPTGFDNSDDEKTDTD

SEQ ID NO: 135593 - protein, 431 aa, Oryza sativa
  Clone ID: PAT_MRT4530_37254C.1.pep
MAEERESFESQWAPSDVTEDNLKEMVAHGVLPAKEIIGWRPAFGEAFPTPDTHEIVVFAHFFYGGFSLLTSRFFRGILNFYGISLHHLNPNSIVHIAKFIHAYEAFLGIRPHFALFRRIFFLKPQPNKSTPCVVGGAGFQLRGTLSQKYFSMPFKTSNKGWHANWFYVQNPERALPEYCCLPPVYQDTWNSLPMGDEAAQAVELMERMLKLNYSHLLPVVPFNAFNPPPPEFALMKSDLPIAQRRSPRHQTGQGSGGPRIRSETQPSASDPVGQSDSRKSKLVLSDDEADDTTRRPGDRETTKKLPKQATPRKKASSRPAPKIRKSSRKPSDIDPSGKDSNPTNVDASSSKETGPTAEDHPSDNQPATDNVEPGDQPLTGNQSDTGASEEIPEVKTHADNPRGQDASNDRRSGSPLKASESTHCLKPCRPK

SEQ ID NO: 135594 - protein, 55 aa, Oryza sativa
  Clone ID: PAT_MRT4530_37255C.1.pep
VRFSNNNFEKSILRNTFDEYFQWQILNFIFTPLKQFLVFHMCTSLQQNYAYHTEI

SEQ ID NO: 135595 - protein, 796 aa, Oryza sativa
  unsure (1)..(796): unsure at all Xaa locations
  Clone ID: PAT_MRT4530_37256C.1.pep
MAGERESFESQWAPSDVTEDNLKEMVAHGVLPAKEIIGWXPAFGEAFPTPDTHEIVVFAHFFYGGFSLPTSRFFRGILNFYGISLHHLNPNSIVHIANFIHACEAFLGIRPHFALFRRIFFLKPQPNKSKPCVVGGAGFQLRGTLSQKYFSMPFKTSNKGWHANWFYVQXNPEPVLPEYSCLPPVYQDTWNSLPTGDEAAQAVELMERMIKLKEQGLQGEQITRHFIKSRLAPIKERSRIAFEFDGKHDPNCEDPDSLNFRVMKKRMYMIFSNAIVASYSHLLPVVPFNAFNPPPPGSGGPRIRSETQPSASDPVGQSDSRKRKLVLSDDEGDNTGXGATGRPPKPTNTKKKNTSRPVPKIRKSSRKPSDIDPSEKDSDPTNMEADSSKETGPTAKDTPSNNPLASDNVKPSNEHTTASQSAEARVGVNQEPPTGNQSDAGPSQKIPEVEAQTNSPHGKDAGNDSETRSPVKTQESTRPRPGIITGPMIGDEEEILRIQAAEDSRPPILVKWWDDNMQPQGIVINKQKEDEEVCLLKKALSQATRIINRIHLRNEAKTATLERLVPHLGTLEATRNQLHETKELARKNEHDLRDRIAELQESNFELSPTNLLQAAKISQLEKQIQTLENDKAELAKQRDSSLKEVEDRKIKSQAQFDVLVDKINRLEGARDKVANAATPLIQAMFFNNAGPSTLDVAEIFDKLRVAPDTYFKNIKEVGSMGASLALAMTKSLYPRVDIDAIDGFADGMSEEAALDLINDAQKAADKIAADVVERFQDVDLRPTGSDNSDDEKTDTD

SEQ ID NO: 135596 - protein, 65 aa, Oryza sativa
  unsure (1)..(65): unsure at all Xaa locations
  Clone ID: PAT_MRT4530_37257C.1.pep
NHSPVQMYEAGWEPTGDAPGWTQAPCHSIGGSGWESASESRWRAPHDIQWGGLNNXSPRSSGMPP

SEQ ID NO: 135597 - protein, 764 aa, Oryza sativa
  Clone ID: PAT_MRT4530_37258C.1.pep
MAEERESFESQWAPSDVTEDNLKEMVAHGVLPAMEIIGWQPAFGEAFRTPDTHEIVVFAHFFYGGFSLPTSRFFRGILNFYGISLHHLNPNSIVHIANFIHACEAFLGIRLHFTLFRRIFFLKPQPNKSKPCVVGGAGFQLRGTLSQKYFSMPFKTSNKGWHVNWFYVQNPEPALPEYCCLPPEQGLQGEQITPHFIKSRLAPIKERSRIAFEFDGKHDPNREDPDSLDFKVMKERMYKIFSNAIVVSYSHLLPVVPFNAFNPPPPTGQASGGPKIRSDARPSASDPVGQSNARKRKLVLSDEEGDDTGRLEDKGATGKSPKPTNPKKKTSSHPLPKIRKSSSITQTRRKPSDIDPSEKDPEPADIKANPSKETGPTAEDCPSDKQPTTDNVEPSNEPPTGNQSAESEVGANQEPPTGNQSDAGPNQKIPEVEAQTNSPLGKDADSESETKSPVKTPKSTHPRPGIITAEDSCPPILVKWWDDNMQPQGIVINKQKEDEELCLLKKALGQATRIVNRIHLRNEAKTVTLERLVPHLGTLEATRNQLHEAKELARKNEHYLKDRIAELQESNFELSGSSKVQAAKISQLGKQIQILENDKAELARQRDLALKEVEDRKIKSQAQFDVLVGKIKKLEGARDEVANAAAPIVQAMFFNNNGLSALDASKIFDKLRVALDTYFKSIKEAGSMRASLALAMTKSLYPRVDVDAIDGFADGTSEGAALDLISDAQKSADKIAADVVERFQDTDLRPTGPDNSDDEKTDTD

SEQ ID NO: 135598 - protein, 74 aa, Oryza sativa
  Clone ID: PAT_MRT4530_37259C.1.pep
LRVVVLERDLELDGLVEVTLLALDLLAVDRDLFAGREGQHIVHGLGQDVAVQLAQPWCITLSRRGQVADGSAPR

SEQ ID NO: 135599 - protein, 234 aa, Oryza sativa
  Clone ID: PAT_MRT4530_3725C.1.pep
MVPVGISHVGRPPSFHDKAFPKPTQRLGSPCGGSTRRGARVWSGARCMRVVRGGPRPRAGPEGAADRGRLDPVLAELAPTWRLRGSHAGRREVEEDAGRNGRRTAVASGGAKHGDLGESEHTGKLHGTRGVEPTARICRGMLDGGGLRRWQPAAEEGGNGDEVTRGRFPAARASTRLRESDASVGLGGAAPSEAGDERRFRARATTVASTRRATATVGAAPASYGEATHATTRV

SEQ ID NO: 135600 - protein, 677 aa, Oryza sativa
  Clone ID: PAT_MRT4530_37260C.1.pep
MAEERESFESQWAPSDVTEDNLKEMVAHGVLPAKEIIGWRPAFGEAFPTPDTHEIVVFAHFFYGGFSLPTSRFFRGILNFYGISLHHLNPNSIVHIANFIHACEAFLGIRPHFALFRRIFFLKPQLNKSKPCVVGGAGFQLRGTLSQKYFSMPFKTSNKGWHANWFYVQNPEPVLPEYSCLPPVYRDTWNSLPMGDEAAQAVELMERMIKLKEQGLQGEQITRHFIKCQLAPIKERSRTAFEFDGKHDPNREDPDSLDFKVMKERMYKIFSNAIVVSYSHLLPVVPFNAFNPPPPEFALMKSDPPIAQRRSPRHQTGQGSGGPRIRQPDSRKRKLVLSDDEADDTARRPGDRETTKKLSKQATPRKKTSSRPVPKIRKSSRKPSDIDPSGKDSDPTNMDTSSSKETGPTAEDHPSDNQPATDNVESGDQPPTGNQSAEAEAGVNQEPPTGNQSDAGPSQEVPEVETQADNPHGQDASNDQRSGSPLKASESTRPRPEIITGPMIGDEEEIPRIQAAEDSCPPILVKWWDDNLQPQGIVINRQKEDEEVCLLKKALNQATRIVNAMFFNNAGSSTLDAAEIFDKLRVAPDTYFKNIKEAGSMGASLALAMTKSLYPRVDIDAIDGFADGTSEEAALDLINDEQKAADKIAADVVERFQDFDLRPTGSDKSDDEKTDTD

SEQ ID NO: 135601 - protein, 263 aa, Oryza sativa
  unsure (1)..(263): unsure at all Xaa locations
  Clone ID: PAT_MRT4530_37261C.1.pep
WLGAATTSSGALARARDAVVVVATGEGTAACCLLPLGRAPPMPAASPRVQPPTTASSPSRSGISSNTWLTSPCHGRHRSARASSPPPPVSPRAXPPPPNTHHPAVAAAATARPLPPVRRRRDASRPLPPVPHRGRRRMARVPPVRRLPPPAXTAARVPTPPVHLPMPPPLVALARRAVPPPLAAARRCCREEYGEGREWEEMGSVNSTPKNRGSELYGTALAPGDEHPPPSKAIAGAKNAIPQCFLPTPSPHPWHGAPTDGGH

SEQ ID NO: 135602 - protein, 46 aa, Oryza sativa
  Clone ID: PAT_MRT4530_37262C.1.pep
MNWHGVVGLGAWVECHRPPRGELRVGCLREEQKAEHVDGRIGSRNK

SEQ ID NO: 135603 - protein, 842 aa, Oryza sativa
  Clone ID: PAT_MRT4530_37263C.1.pep
MAEERESFESQWAPSDVTEDNLKEMVAHDVLPAKEIIGWRPAFGEAFPTPDTHEIVVFAHFFYGGFSLPTSRFFRGILNFYGISLHHLNPNSIVHIANFIHACEAFLGIRPHFALFRRIFFLKPQPNKSKPCVVGGAGFQLRGTLSQKYFSMPFKTSNKGWHANWFYVQNPEPVLPEYSCLPPVYRDTWNSLLMGDEAAQAVELMERMIKLKEQGLQGEQITRHFIKCRLAPIKERSRTAFEFDGKHDPNREDPDSLDFKVMKERMYKLFSNAIVVSYSHLLPVVPFNAFNPPPPVPNNEGYYIQEFALMQSDPPIAQRRSPHHQTGQGSGGPRIRSETQPSASDPVGQSDYRKRKLVLSDDEADDTTRRPEDRETTKKLPKQATPRKKTSSRHVPKIRKSSRKPSDIDPSGKDSDPTNMGTNSSKETGPTVGDHPSDNHPATDNVEFGDQPPTGNQSAEAEAGVNQEPPTGNQSDAGPSQEILEVETQADSPRRQNADNNQRSGSPLKASESARPRPEIITVNTLGPMIGDEEEIPRIQAAEDSCPPILVKWWDDNMQPQGIVINKQKEDEELCLLKKALGQATRIVNRIHLRNEAKTVTLERLVPHLGTLEATRNQLHEVKELARKNEHDLRDRIAELQESNFELSGSSKVQAAKISQLENQIQILESDKAELARQRDLALKEVEDQSQAQFDVLVGKIKKLEGTRDEVANAAAPIVQAMFFNNNGPSVLDASEIFDKLRVAPDTYFKNIKEAGSMGASLALAMTKSLYSRVDVDAIDGFADGTSEEAALDLISNAQKAADKIAADVVERFQDTDLRPTGPDNSDDEKTDTDYCTNDFDD

SEQ ID NO: 135604 - protein, 737 aa, Oryza sativa
  unsure (1)..(737): unsure at all Xaa locations
  Clone ID: PAT_MRT4530_37264C.1.pep
MAEERESFESQWAPSDVTEGNLKEMVAHGVLPAKEIIGWRPAFGEAFPTPDTHEVVPNKSKPCVVGGTGFQLRGTLSQKYFSMPFKTSNKGWHANWFYVQNPEPALPEYSCLPPVYQDTWNSLPIGDEAAQAVELMERMIKLKEQGLQGEQITRHFIKSRLAPIKERSRTAFEFDGKHDPNRADPDSLDFKVMKKRMYKIFSNAIVVSYSHLLPVVPFNAFNPPPPEFALMKLDPPITQRRSPHHQTGQGSGGPKIRSEARPNTSNPAGQPDSRKRKLVSSDDEGDTARKPGDRETTKKLPKQATTRKKASSRPVPKIRKSSRKPSDIDPSGKDSNPTSTGTNLKETEPTAEDHPSDNQPATDNVGSGDQPPTGNESAETGAGVNQEPPTKNQAXGPSQEIPEVGAQADSPRKEDTSSDPTPGSPVKTQESTHPRPEIITGXEDSRPPILVKWWDDDMQPQGIVISKQKEDEEVCLLKKALSQATRIVNRIHLRNEAKTTTLEKLVPHLGTLEATKNQLHEVKELARKTEHDLRNRISELQESNYELNGSSKVQAARISDLEKQVEALEKDKAELAKQRDSTLKDVEDRKIKSQAQFDVLVDKINRLEGARDKVANAATPLIQAMFFNNTGPSALDTSEIFDKLRVAPDTYFKNIREAGSMGASLVLAMTKSLYPKIDIDAIDGFADGTSEETALDLINDAQKAADKIAADVVERFQDVDLRPTGSDNSDDERTDTD

SEQ ID NO: 135605 - protein, 72 aa, Oryza sativa
  Clone ID: PAT_MRT4530_37265C.1.pep
KIQMILNLKYTTKAIYFYSRSLPSTSVGSSLRNNFHAKILILRGILPFHILFTDRSTTRYKIVEGLLHVHVI

SEQ ID NO: 135606 - protein, 725 aa, Oryza sativa
  Clone ID: PAT_MRT4530_37266C.1.pep
MAEERESFESQWAPSDVTEDNLKEMVAHSVLPAKEIIGWRPAFGEAFPTPDTHEIVVFAHFFYDGFSLPTSRFFRGILNFYGISLHHLNPNSIVHIANFVHACEAFLGIRPHFALFRRIFFLKPQPNKSKPCVVGGAGFQLRGTLSQKYFSMPFKTSHKGWHANWFYVQNPEPALPEYSCLPPVYQDTWNSLPMGDEAAQAVELMERMLKLKEQGLQGEQITRHFIKSRLAPIKERSRTAFEFDGKHDPNQEDPDSLDFKEFALMKSDPPIAQRRSPCQQTGQASGGPKIRSDAQPSASDPVGQSDSCKRKLVLSDDEGDDTGRLGDKGATGKPPKPTNPKKKTSSRPLPKIRKSSRKPSDIDPSEKDPEPADIEANPSKETGPTAEDCPSDKQPATDNVEPSNEPPTANQSAEAEVGANQEPPTGNQSDVGSSQKIPEVEAQTNRPLGKDADSESETRSPVKTPKSTRPRPGIITGPIIGDEEEILRIQAAEDSRPPILVKWWDDNMQPQGIVINKQKEDEELCLLKEALGQATCIVNRIHLRNEAKTVTLERLVPHLGTLEATRNQLHEAKELARKNEHDLRDRIAELQESNFELSGSSKDRNIKSQAQFDVLVGKIKKLEGARDEVANAAAPIVQAMFFNNNGPSALDASEIFDKLRVAPDTYFKSIKEVRNGTSEEAALDLISDAQKSADKIAVDVVERFQDTDLRPTGPDNSDNEKTDID

SEQ ID NO: 135607 - protein, 201 aa, Oryza sativa
  Clone ID: PAT_MRT4530_37267C.1.pep
MRSKASMFLKQMVSTIVAVVKAKSTAVRAKTSAMKTRLLIFGVLRNRKLLATAINHKIHAIMGGAAAQDTTNDGGVAGVEDDDGGGSKKAVVLYNTAPSFLTERGYYDHAGEEEEEEEDSDEYLTHSLFQEEDDEDDELVNAPGSVIDLVRDAKEGEGGEFRLEDEIDHVADVFIRRIHKQLKLQKLDSFKRFCEMLERSA

SEQ ID NO: 135608 - protein, 730 aa, Oryza sativa
  Clone ID: PAT_MRT4530_37268C.1.pep
MAEERESFESQWAPSDVTEDNLKEMVAHVVLPAKEIIGWRPAFGEAFPTPDTHEIVVFAHFFYGRFSLPTSRFFRGILNFYGISLHHLNSNSIVHIANFIHACEAFLGIRPHFALFHRIFFLKPQPNKSKPCVVGGAVYQDTWNSLPMGDEAAQAVELMERMIKLKEQGLQGEQITRHFIKCRLAPIKERSRTAFEFDGKHDPNREDPDSLDFKVMKERMYKIFSNAIVVSYSHLLPVVPFNAFNPPPPEFALMKSDPPIAQRQSPRRQTGQGSGGPRIRSETQPSASDPVGQSDSRKRKLVLSDDEADDTTRKPGDRETTKKLPKQATPRKKTFSRPAPKIRKSSRKPSDIDPSGKDSNPTNVDTSSSKETGPTAEDHPSDNQPATDNVEPSNEPPIGNQSAEAEVGANQEPPTGNQSDAGANEEIPEVETQADNPQGQDASNDRRSGSPLKASESTHPRPEIITVNTLGPIIGDEEEIPRIQAAEDSCPPILVKWWDDNMQPQGIVISKKKEDEELCLLKKALGQATRIVNRIHLRNEAKTATLERLVPHLGTLEATRNQLHEVKELARKNEHDLRDRIAELQESNFELSGSSKVQAAKISQLEKQIQILENDKAELARQRNLALKEVEDRKIKSQAQFDVLVGKIKKLEGSRDELRVAPDTYFKNIKEARSMGASLALAMTKSLYPRVDVDAIDGFADGTSEEVALDLISDAQKAADKIAADVVERF

SEQ ID NO: 135609 - protein, 83 aa, Oryza sativa
  Clone ID: PAT_MRT4530_37269C.1.pep
SGPARLPSLSKPPFVNCGCILNANCFVLCLFFPRHSNFKLAMMVNLNSIDFAHIGHKLFHFLADKSSPFILIDNTCSVGIRMS

SEQ ID NO: 135610 - protein, 60 aa, Oryza sativa
  unsure (1)..(60): unsure at all Xaa locations
  Clone ID: PAT_MRT4530_3726C.1.pep
PATHRRSDRRVTCGQTGGDNRRDRDSKAVQPXDQHRSNQRLRFGQTGRSISVRPTSVDFE

SEQ ID NO: 135611 - protein, 823 aa, Oryza sativa
  unsure (1)..(823): unsure at all Xaa locations
  Clone ID: PAT_MRT4530_37270C.1.pep
MAEERESFESQWAPSDVTEDNLKEMVVHGVLPAKEIIGWRPAFGEAFPTPDTHEIVVFAHFFYGGFSLPTSRFFRGILNFYGISLHHXNPNSIVHIANFIHACEAFLGIRPHFALFRRIFFPKPQPNKSKPCVVGGAGFQLRGTLSQKYFSMPFKTSNKGWHANWFYVQNPEPALPEYCCLPSVYQDTWNSLPIGDEAAQAVELMERMIKLKEQGLQGEQITRHFIKCRLAPIKERSRTAFEFDGKHDPNREDPDSLDFKVMKERMYKIFSNAIVVSYSHLLPVVPFNAFNPPPLEFALMKSDPPIAQRRSPRHQTGQGSGGPRIRSETQPSASDPVSHPDSRKRKLVLSDDEADDTIRRPGDRETTKKLPKQATPWKKTSSRPVPKIRKSSRKPSDIDPSGKDSDPTNMDTSSSKETGPSVEDHPSDNQPATDNVEPSNEPPTGNQSAEAEVGANQEPPTGNQSDAGPSQKVPEVEAQTNSPLGKDADSESETRSPVKTPKSTRPRPGIITGPIIGYEEEILRIQAAEDSRPPILVKWWDDNMQPQGIVINKQKEDEELCLLKKALGQATRIVNRIHLRNEAKTVTLERLVPHLGTLEATRNQLHEAKELARKNEHDLRDRIAELQESNFELSGSSKVQAAKISQLEKQVQILENDKAELARQRDLALKEVEDRKIKSQAQFDVLVGKIKKLEGTRDEVANAATPIVXAMFFNNAGSSTLDAAEIFDKLRVAPDTYFKNIKEAGSMGASLALAMTKSLYPRVDIDAIDGFADGTSEEAALDLISDAQKAADKIAADVVERFQDVDLRPTRSDKSDDEKTDTD

SEQ ID NO: 135612 - protein, 58 aa, Oryza sativa
  Clone ID: PAT_MRT4530_37271C.1.pep
FCFSRSRSRATSAPPESSSSCRREIRSTQGSRPWTLRPTRSHSPRYQSSVILHYQPLL

SEQ ID NO: 135613 - protein, 132 aa, Oryza sativa
  Clone ID: PAT_MRT4530_37272C.1.pep
MWQIGWWRDGWGNLERRSCGEDPRKILDVGSRGARLPPRRRRGRAQWTVDAATAAHAVACGKSGRGGGRAAARRLGCGPVEGGGQAVVGLRLWRSRRRRAEEAAAAAAGLRPGGGRRAGDGGSGGFVFFSDL

SEQ ID NO: 135614 - protein, 36 aa, Oryza sativa
  Clone ID: PAT_MRT4530_37273C.1.pep
LKYSLSLSVAQRPHSSDIGDHPPLRWKEVQNGCAVV

SEQ ID NO: 135615 - protein, 951 aa, Oryza sativa
  unsure (1)..(951): unsure at all Xaa locations
  Clone ID: PAT_MRT4530_37274C.1.pep
MEEMNEFRVDVASLKRDVADLKTLKTEMREIKGLLRELCKQKNVEEGEGGTEEAAATLPIQNATGQATRGARPSNPPTGEPSAPEVRFALETNTNAPNNELVNLWATSGGNTMGHGQGGLHTQQPPHGIHQRQNMNFGGSGPTVANQHGVGTQGGFQGRPGVHFIDRQGSIYGRMGAEGNHYAEAVIKGPRLEIPLFGGEDPIDWLKQCEKFYEITGTPMDQWVNLALAHLQGRALKLYRGIGIPWQMISWPQWCAMVHQGLLESYWYAKNYEKAANARKVALNWNKNKPLIHTGGNQSRANMTKAPPRGNGEKKCWFCKEAWFSGHQCKGTTRRDTFSVIILINGKRAVGLVDSGSTSTFMDQEYAIRNQCPLVNTESKKGYDVILGADWIYNYSPITLDLKKRELGITKGEKTIMIQDFTKLGKHMLVDSKRVDKILKKGGLGYLFQISQVTEERGEEGDPVPADIQEILLDFPSVLEEPKGSPPRRNCDHRITLKTGAEPPNLRPYRVPHHQKEAMEKIITELIDSKEIQVSDSPYSSPAVMAINCPNCEEQIPMPIIEDLLDELNGAKIFTKLDLRLGYHQIRMSDQDVPKTAFRTHMGHYEYQVMPFGLTNAPATFQSLMNQVLAPFLRKFVLVFFDDILIYSKTRNEHREHIKMVLEALKENNLVIRLKKCAFGLSNVAYLGHIISQAGVATDPRKVDKILTWPVPKNVTELRKFLGMMGIIKDSICRPLHDMLKKEGFQWGNLQTEAFDKLKQKMCISPVLSLPDFSMEFTIEADACGNRIGAVLMQAGKPIAFFSKALGPKAAAQSIYEKEAMAILEALKKWRHYVLGIKLIIKTDQQSLKYMMKQRLVEGIQHKLLLKLMEYDYKIEYKAGKENVVADALSRLPQTEHDNEDCQAITVVIPEWIQDIQNSYEGDIQAHKMLSMIGTDSDPDRSYSLXIWNTM

SEQ ID NO: 135616 - protein, 726 aa, Oryza sativa
  Clone ID: PAT_MRT4530_37275C.1.pep
MTSNITLVFLLMMCLAAAVAAAATPGVAGGNGLLHTIPSKNSLAHCPSTCGDIGFSYPFGIGHGCFRQGFELICDNTTHPPTLLLANTTTKVIGQSGRTLEVIEIPAIAFNIAMNNSSIIDYIRYWVSPANGFTIVNESTLFVIGCGIEACLFDLDTNETMGSCITMCSDNLGIMEMHDGDCTGIGCCHIIVRRELRRFWLKLDHPDDRTTPRSYRVLSRAQVFILPTINSYQFNTNDLVSSSWMNTSSIGGTLLRGAIMDQETCPGASASKATYACTTNTNCFNATNGGYYCSCRNDVTDGNPYVNLGCSDDPGITIGIGCGLGSIILALGAIVLINKWKRGVQKRIRRAHFKKNQGLLLEQLILDEKAQDKTKIFSLEELEKATNYFDATRVLGSGGHGTVYKGILSNQCIVAIKMSKIAEQTEIDQFINEVAILSQIIHRNVVKLFGCCLEAEVPLLVYEFISNGTLYDILHSDVSVKCLLSWDDRIRIAVEAAGALAYLHSAAAIPIYHRDVKSSNILLDDNFTTKVSDFGASRTMSLDQTHVMTNVQGTFGYLDPEYYYTGQLTAKSDVYSFGVILVELLVRKKSIFINDQGTKQSLAHYFVEGHQQGVVMEILDSQVMEEANREEIDEIVSIAESCLKTKGEERPTMKEVEMRLQFVRTIRQRKCQQFPVTEGEIEHFPFPNTSNSSDGRFSHSTGLTCDSVSGSYSLEQQFSSSINLPR

SEQ ID NO: 135617 - protein, 79 aa, Oryza sativa
  Clone ID: PAT_MRT4530_37276C.1.pep
MHRGWRSSTGAGKEVVLLIQATPARGGDGKGPTATECALAAADLTTGEWRRVEVSWEGEGEEEEARGGGMPFFARCAAA

SEQ ID NO: 135618 - protein, 88 aa, Oryza sativa
  unsure (1)..(88): unsure at all Xaa locations
  Clone ID: PAT_MRT4530_37277C.1.pep
WAWMQLACSXNVLLLLGLKSSSTTPLTWVPNMFFIHKSTCQQIIFTKIDLKIPKSLLLRRFSSFYLPNLSWKKKRAYDGLLLQGYCNH

SEQ ID NO: 135619 - protein, 97 aa, Oryza sativa
  Clone ID: PAT_MRT4530_37278C.1.pep
KIKTVIRIIIRSKIGPWSQVPEPEGYNQIEHRWAGTARAGLDEFVGGGAIKIGSWRRSRGGEALVASCSSSSTKKKEGDLPTRPPTRPPTRPPTRQR

SEQ ID NO: 135620 - protein, 102 aa, Oryza sativa
  Clone ID: PAT_MRT4530_37279C.1.pep
MANGTNQVAIIEEIPSSFSKSGHRLSSSIPHPQVSFGAILCTGQSPGDTIVVDLPLTPPPKHSSVPRSFPSIVGACVTSSWNPGNPKSHMHALEYTKGSFGS

SEQ ID NO: 135621 - protein, 490 aa, Oryza sativa
  unsure (1)..(490): unsure at all Xaa locations
  Clone ID: PAT_MRT4530_3727C.1.pep
GAGRGERGRRWTESISRGPGWDQLVSGLAHRAEGARGAALGCGXAGRGACAWFAVDRARERGXRRERLTGVGSTRSWPSWRRRGXLRGSHAGRREVEEDAGRNGRRTAVASGGAKHGDLGESEHTGKLHGTRGVEPTARICRGMLDGGGLRRWQPAAEEGGNGDESIYAATGIRCXRWIGRSGAERGRRRAALPSSGDDGGEHTASDGKGEEMERRGRTGRCATVRAGAVTRADGAKRDRFGLGPRKRKKRARPESPSASSLVPAPPTRATTNGDGVQSTGGGDNGVEAMGQREEKRGRAPGLYRMAMSRPNRRQGGGRMTPAGXKRGKGGRERGLPXCLFGKRRRGAGATRQREEELCLRPLEASAWSGGGRAMTTAMTAGTVWSKAATRATGAGRRGRAVGPGGADGAGAARAATTRARAREQRRAGSGSEGAEREGSARRGSRAHARGALTERRRGRERERERERERESRGGRGRWSYGPSNPREAK

SEQ ID NO: 135622 - protein, 720 aa, Oryza sativa
  Clone ID: PAT_MRT4530_37280C.1.pep
MDWEQKEEGVNLCFLARSGGGGMQYHQGGSRMPPFARGGAYSRGYKQLYAPPQQQPPPQDKHEVLMEAGRLAAEYLVAKGVLPPASLQRRGVGGGGWVQLPPPPPPPPPPQGTLAFYGAQNGRRRLDDDDDGNPNPRSRRNRGGENNNDDSSSSYNGRGKRKFGAYSRHSDWGRDKGRSRGNSDSRSYDDEDDDGPPGYRRERRGGGRFDDAGSSMSGVAASKTEAMGESELEDTGSKVGSSSNFRKDVDPPQEVEGVDKLNKINEESNPSNSEVVEQMTNGESTSNNASCIVIDEEQTKAKYLPVPSDDKVSDEKPDDSSVLNEKIEDDETLAEKAEDDKTSDERVPGVKNNLRDDCNNLLSYCSYPNVPTRRRSIVAHRNAAPAHREVAVAEQIDLVSSEDETHMATDVTGHGSSLTNTQEGNKDGLACLEHTDTSTTCNQMVEPVRFQTEETQIGTDDLRGQKNIEQHYAVHESREENMLPPKVGVQQQVEEGMQIYNVDTPPQDEDLIASADKEKVAGVALLPSIKAEAVVAKEEDKFGQSSSFKICDLNLVGSPEVAELRNDPGLGQFSTAGCSMEPQNQQQEFRNTGNSADDTNMHAQIPLHNKVVQVIDLEDDSPIEAGACDTSKAKEENMANPAVTTDVLPGIQDGYNFAISDYLGADIPCYQPMQTDLPNGMSLNDSEGITVMDDSIYGSLSDIGFMEVWDQQPQDYEKFF

SEQ ID NO: 135623 - protein, 244 aa, Oryza sativa
  Clone ID: PAT_MRT4530_37281C.1.pep
NVKEVQENILQEIEKLAAEAYSIFRSTTPAFSEEGVLEAEADKPDIKISSGTGSGFEILCQGFNWESNKSGRWYLELQEKADELASLGFTVLWLPPPTESVSPEGYMPKDLYNLNSRYGTIDELKDTVKKFHKVGIKVLGDAVLNHRCAHFKNQNGVWNLFGGRLNWDDRAVVADDPHFQGRGNKSSGDNFHAAPNIDHSQDFVRKDIKEWLCWMMEEVGYDGWRLDFVRGFWGGYVKDYMDAS

SEQ ID NO: 135624 - protein, 95 aa, Oryza sativa
  Clone ID: PAT_MRT4530_37282C.1.pep
MEADAVKSAKRWLLFKRERATVLSTIHCVPKDSFPPLVVMVFWGLPLLASREVVPPEQNHRAASHPISTRPTRSYQWLPYRRPCLTHNKKTTTAW

SEQ ID NO: 135625 - protein, 317 aa, Oryza sativa
  Clone ID: PAT_MRT4530_37283C.1.pep
MASATNSSLSLMLLVAAAMASVASAQLSATFYDTSCPNALSTIKSVITAAVNSEARMGASLLRLHFHDCFVQGCDASVLLSGQEQNAGPNVGSLRGFSVIDNAKARVEAICNQTVSCADILAVAARDSVVALGGPSWTVLLGRRDSTTASEALANTDLPAPSSSLAELIGNFSRKGLDATDMVALSGAHTIGQAQCQNFRDRIYNETNIDSAFATQRQANCPRPTGSGDSNLAPLDTTTPNAFDNAYYSNLLSNKGLLHSDQVLFNGGSADNTVRNFASNAAAFSSAFTTAMVKMGNISPLTGTQGQIRLSCSKVNS

SEQ ID NO: 135626 - protein, 52 aa, Oryza sativa
  unsure (1)..(52): unsure at all Xaa locations
  Clone ID: PAT_MRT4530_37284C.1.pep
FFFFFFFFFFFFXLLKHTRIYKVASXLIHSTEGLHSRQLVKEAHSSFPTITH

SEQ ID NO: 135627 - protein, 59 aa, Oryza sativa
  Clone ID: PAT_MRT4530_37285C.1.pep
FRSHRIIYSSLSQVMLHMTHTMIPVLYMITIWLHATQNRGDDTGYEASDLSRTLGARED

SEQ ID NO: 135628 - protein, 646 aa, Oryza sativa
  Clone ID: PAT_MRT4530_37286C.1.pep
MDTKSSKPLFSNGRAAGAHVLVGSIRRFLVKIYNTTTTPCQSQKTQNASSYRGFVVQGLPFLSVRPRPPGGLQNPYQEQKANSTSQPEADLAEEAAANNARTASTIEKAEEGEGGAGGRRVGGAAMASAAAVFPDGRRWCKGGSSSSSPVTTAIFLFFFVVVVGVLVSARWITTTSHLSITNLDEWRTKTAILTSTQATSIPGTPTAPPPPRRAYSISCSSPPLRRDPAVPKNISQTLYLALSSRPACARVPEPQPLPPTTTNSSCPAYFRFIHEDLHPWRAAGGITRRMLERARDTANFRLVVLRGRAYVERIAPAFQTRDLFTIWGILQLLRRYPGRVPDLDLMFDCVDWPVVQADRYQGENATAMPPLFRYCGDDETLDVVFPDWSFWGWPEINIKPWDALQKDLDIGNKRVKWVDREPYAYWKGNPDVATKRKELDWIKESKAGYKQSDLASQCTHRYKIYIEGSAWSVSEKYILACNSMTLVVTPKYYDFFSRVLMPTQHYWPVRDDNKCSSIKHAVDWGNSNKKKAQKIGKQASNFIQQELSMDYIYDYMFHLLTEYAKLLRFKPTKPPEAIEICPELLACQAIGRERKFMEDSMVKSANDAGPCDLPPPFSPEEFKELQQRKEKSMKQVETWQQKASQT

SEQ ID NO: 135629 - protein, 57 aa, Oryza sativa
  Clone ID: PAT_MRT4530_37287C.1.pep
HIVSTDDGEMLFRHIYMLIVIGKNKLRGLIDGGVKNVKKNKVECITIEEKTIKIRHF

SEQ ID NO: 135630 - protein, 82 aa, Oryza sativa
  Clone ID: PAT_MRT4530_37288C.1.pep
HRATVRGGGVAPPASRRSSTITDRTRGTRRPASSRRPEPARRHRGAAVAGCTTLRPRAPPRAPMSCSLLSMSSHAAPSPSQP

SEQ ID NO: 135631 - protein, 78 aa, Oryza sativa
  unsure (1)..(78): unsure at all Xaa locations
  Clone ID: PAT_MRT4530_37289C.1.pep
FLYALNKNEYGYLSDRIIPRXFGYEYEYFLMDTDTNMVSGFLSDTDNNSDIQKNYFRIRVRSYSILIHIQNYPYLFLY

SEQ ID NO: 135632 - protein, 552 aa, Oryza sativa
  unsure (1)..(552): unsure at all Xaa locations
  Clone ID: PAT_MRT4530_3728C.1.pep
LTSAEGVHFTHTTLLTRITQPVGINHVGRPPSFHDKAFRKPTQGAGRVERGRRWTESISRGPGWDPLVSGSAHRAEGARGAALGCGAGRGACAWFAVDADAAGLRAASRLAVDRARERGRRERLTGVGSTRSWPSWHRRXRLRGSHAGRREVEEDAGRNGRRTAVASGGAKHGDLGESEHTGKLHGTRGVEPTAWICRGMLDGGGLWRRQPAAEEGGNGDESIYAATGIRCXRWIGRSGVERGRRRAALPSSGGDGGEHTANDGKGEEMERRGRTGRCATVRAGAVTRADDAKRDRFGLGPRKRKKRARPESPSASSLVPAPPTRATTNGDGEQSTGGGDNGVEAMGQXREEKRGRALGLYRMAMSRPNRRQGGGRMTPAGGKXGKGGRERGLAPCLFGKRRRGAGATRXREEELCLRPLETSAWSGGGRAMTTAMTAGAVWSEAATRATGAGRRGRAAGPDDADGAGAARAATTRARXARTTARGGRFRGRGARQGWRRGGGXSDGREEALGVVRARAGRARXEREGEREREPGREMGREGFGPSNPGEAK

SEQ ID NO: 135633 - protein, 80 aa, Oryza sativa
  Clone ID: PAT_MRT4530_37290C.1.pep
CPEQTRFDLITNKCTHTSIQIKIAGQLKRTGNIVYFCIKKKKEGVITTNVALTPKVLPYHSLKKRTRTICLEIGQPLQKE

SEQ ID NO: 135634 - protein, 760 aa, Oryza sativa
  Clone ID: PAT_MRT4530_37291C.1.pep
MAEERESFESQWAPSDVTEDNLKEMVAHSVLPAKEIIGWRPAFGEAFPTPDTHEIVVFAHFFYDGFSLPTSRFFRGILNFYGISLHHLNPNSIVHIANFVHACEAFLGIRPHFALFRRIFFLKPQPNKSKPCVVGGAGFQLRGTLSQKYFSMPFKTSHKGWHANWFYVQNPEPALPEYSCLPPVYQDTWNSLPMGDEAAQAVELMERMLKLKEQGLQGEQITRHFIKSRLAPIKERSRTAFEFDGKHDPNQEDPDSLDFKVMKERMYKIFSNAIVVSYSHLLPIVPFNAFNPPPPEFALMKSDPPIAQRRSPCQQTGQASGGPKIRSDAQPSASDPVGQSDSCKRKLVLSDDEGDDTGRLGDKGATGKPPKPTNPKKKTSSRPLPKIRKSSRKPSDIDPSEKDPEPADIEANPSKETGPTAEDCPSDKQPATDNVEPSNEPPTANQSAEAEVGANQEPPTGNQSDVGSSQKIPEVEAQTNRPLGKDADSESETRSPVKTPKSTRPRPGIITGPIIGDEEEILRIQAAEDSRPPILVKWWDDNMQPQGIVINKQKEDEELCLLKEALGQATCIVNRIHLRNEAKTVTLERLVPHLGTLEATRNQLHEAKELARKNEHDLRDRIAELQESNFELSGSSKDRNIKSQAQFDVLVGKIKKLEGARDEVANAAAPIVQAMFFNNNGPSALDASEIFDKLRVAPDTYFKSIKEVRNGTSEEAALDLISDAQKSADKIAVDVVERFQDTDLRPTGPDNSDNEKTDID

SEQ ID NO: 135635 - protein, 89 aa, Oryza sativa
  Clone ID: PAT_MRT4530_37292C.1.pep
PRGSPRGSPPPKGPLLLRPSSSPRSPKKRSRPPGAPSPSPPRYSGARVLGFLLSIKCVTPPLPPLLCWKPNQRKPPFVLLPLFLCYGPN

SEQ ID NO: 135636 - protein, 791 aa, Oryza sativa
  Clone ID: PAT_MRT4530_37293C.1.pep
MAEERESFKSQWAPSDVTEDNLKEMVAHGVLPAKEIIGWQPAFGEAFPTPDTHEIVVFAHFFYGGFSLPTLRFFRGILNFYGISLHHLNPNSIVHIANFIHACEAFLGIRPHFALFRRIFFLKPQPNKSKPCVVGGAGFQLRGTLSQKYFSMPFKTSNKGWHANWFYVQNPEPVLPEYSCLPPVYRDTWNSLPMGDEAAQAVELIERMIKLKDQGLQGKQITRHFIKCRLALIKERSRTAFEFDGKHDPNREDPDSLDFKVMKERMYKIFSNAIVVSYSHLLPVIPFNAFNPPPLEFALMKSDPPIAQRRSPRHQTGQGSGGPRIRSETQPSASDPIGQSDSRKKKLVLSDDEADDTARRPGDRETTKKLPKQATPRKKTSSRPVPKIRKSSRKPSDIDPSGKDSDPTNVDTSSSKETEPTAEDHPSDNQPATDNVESSDQPPTGIQLAEAEAGVNQDPPTGNQSDAGPSQEIPEVETQANNPRGQDASNDRRSGSPLKVSESTRPRPEIITGIVINRQKEDEEVCLLKKGLNQATRIVNRIHLRNEAKTATLERLVPHLGTLEATRSQLHEARELAKKNEHDLRDRIAELQESNFELSGSSKVNVVQAAKISQLEKHIQTLENDKAELARQRDSALKEVEDRKIKSQAQFDVLVDKINKLEGARDKVANAATPLIQAMFFNNAGSSTLDAAEIFDKLRVAPDTYFKNIKEAGSMGASLALAMTKSLYPRVDIDAIDGFADGTSKEAALDLINDAQKAADKIAADVVERFQYVDLRPTGSNKSDDEKTDTD

SEQ ID NO: 135637 - protein, 72 aa, Oryza sativa
  Clone ID: PAT_MRT4530_37294C.1.pep
TRTPEWRSGQERTCSPSRLATPPAASAPPPAWARPPPPPCHPPRGAGTRAAPPRRAGDGLPRGRMPPPLRRP

SEQ ID NO: 135638 - protein, 769 aa, Oryza sativa
  Clone ID: PAT_MRT4530_37295C.1.pep
MAEERESFESQWAPSDVTEDSLKEMVAHGVLPAKEIIGWRPAFGEAFLTPDTHKIVVFAHFFYGGFSLPTSRFFRGILNFYGISLHHLNPNFIVHIANFIHACEAFLGIRPHFALFRRIFFLKPQPNKSKPCVVGGAGFQLRGTISQKYFSMPFKTSNKGWHANWFYVQNPEPVLPEYSCLPPVYRDTWNSLPMGDEAAQAVELMERMIKLKEQGLQGEQITRHFIKCRLALIKERSRTAFEFDGKHDPNREDPDSLDFKVMKERMYKIFSNTIVVSYSHLLPVVPFNAFNPPPPSDSRKRKLVLSDDEADDTARRPGDRETTKKLTKQATPRKKTSSRPVPKIRKSSRKPSDIDPSGKDSDPTNVDTSSSKETESTTEDHPSDNQPATDNLESGDQPPTGIQSAEAEAGVNQEPPIGNQSDAGPSQEIPEVETQADNPRGQDASNDRRSGSPLKASESTCPRPEIITGPMIGDEEEIPRIQAAEDSCPPILVKWWDDNLQPQGIVINRQKEDEEVCLLKKELNQATRIVNRIHLRNEAKTATLERLVPHLGTLKATRSQLHEARELAKKNEHDLRDRIAELQESNFELSGSSKVNVVQAAKISQLEKQIQTLENDKAELARQRDSTLKEVEVDNINKLEGARDKVANAATPLIQAMFFNNAGSSTLDAAEIFDKLRVAPDTYFKNIKEAGSMGASLALAMTKSLYPRVDIDAIDGFADGTSEEAALDLISDAQKAADKIAADVVERFQDVDLRPTGSDKSNDEKTDTD

SEQ ID NO: 135639 - protein, 765 aa, Oryza sativa
  Clone ID: PAT_MRT4530_37296C.1.pep
MAEERESFESQWAPSDVTEDNLKEMLAHGVLPAKEIIGWRPAFGEAFPTPDTHEIVVFAHFFYGGFSLPTSRFFRGILNFYGISLHHLNPNSIVHIANFIHACEAFLGIRPHFALLCRIFFLKPQPNKSKPCVVGGVGFQLRGTLSQKYFSMPFKTSNKGWHANWFYVQNPEPVLPEYSCLPPVYQDTWNSLPTGDEAAQAVELMERMIKLKEQGLQGEQITRHFIKSRLAPIKERSRTAFEFDGKHDPNREDPDSLNFKVMKERMYKIFSNAIVVSYSHLLLVVPFNAFNPPPPEFALMKSDPPIAQRQSPRCQTGQGSGEPRIRSETQPSASDPVGESDSRKRKLVLSDDEGDDTGKLRDKGATGRPPKPTNPKKKTSSHPVPKIRKSSRKPSDIDPSEKDSDPTNMETDTSKETGPTAKDHPSDNPQASDNSAEAGVRVNQESPTGNQSDAGPSQKIPEVEAQTNNPPGKDAGNDSETRSPVKTQESTRPRPGIITGPMIGDEEEILRIQAAEDSRPPILVKWWDDNMQPQGIVINKQKEDEEVCLLKKALSQATRIVNRIHLRNEAKTATLERVNVVQAAKISQLEKQIQTLENDKAELARQRDSALKEVEDHKIKSQAQFDVLVDKINRLEGARDKVANAATPLIQAMFFNNAGPSTLDAAEIFDKLRVAPDTYFKNIKEAGSMGASLVLAMTKSLYPRVDIDAIDGFADGTSEEAALDLINDAQKAADKIVADVVERFQDVDLRPTGSDNSDDEKTDTD

SEQ ID NO: 135640 - protein, 569 aa, Oryza sativa
  Clone ID: PAT_MRT4530_37297C.1.pep
MKERMYKIFSNAIVVSYSHLLPVVPFNAFNPPPPEFALMKSDPSIAQRRSPHHQTGQGSGGSRIRSETQPSASDPFSQSGSRKRELVLSDDEADDTTRRPGDRETTKKLPKQATPRKKTSRRPAPKIRKSSRKPSDIDPSGKDSDPTSVDASSSKETGPTAEDRPSDNQPATDNVESGDQPPTGNQSAEAEAGVNQEPPTGNQSDAGPSQEIPEVPTQADNPCGQDASNDRRSGSPLKASESTHPRPEIITVDTLGPMISDEEEIPRIQAAEDSCPPILVKWWDDNLQPQGIVINRQKDDEEVCLLKKVLNQATRIVNRIHLRNEAKTATLKKLVPHLGTLEATRSQLHEARELAKKNEHDLRDWIAELQESNFKLSGSSKVNVVQAAKISQLENQIQILENDKAELARQRDLALKEVEDRKIKSQAQFDDLVSKIKKLEGARDEVANAAAPIVQAMFFNNNGPSALDASEIFDKLRVAPDTYFKNIKEAGSMGASLALAMTKSLYPRVDIDAIDGFADGTSEEAALDLISDAQKAADKIAADVVERFQDTDLRPTGPDNSDDEKTDTD

SEQ ID NO: 135641 - protein, 1095 aa, Oryza sativa
  Clone ID: PAT_MRT4530_37298C.1.pep
MAAGKSSSASKEDQYAALRELYRPHIDSFDYFIDEGLDKMLQSIRPVEITSKLCHLRGADSEKLIFHGEEATEMGGYFICGGMERLVRILILQKRNYPMGLIRGSFVNRGAGYTDKAVIIRCVQDDQSSVTIKLYYLLNGSARLGFWLGGREFLLPVGIVLKALIDTSDREIFTSLTCCYSDHYERGKGVVSTQLIGERAQIILDEVRDLSLFTRTECLLHLGKYFRSVMEGFEKDDFETVAEAVLKDYIFVHLQNNHDKFNLLIFMLQKLYAIVDQTASPDKADALQYQEVLLPGHLITVFLKDRLQDWLRKSKRLIVEEATKNKSFDLNDFRDFILEGQVKGTSRVIETSSGKPCWLMRIGAQEVRKFLSKTSAYVGKAIQSMIKVGKVNSQSGLDLPQRDGMTIHAERLNFHRYISHFRSVHRGSSFAKMRTTSVRKLLPESWGFLCPVHTPDGEPCGLLNHMTSTCRISSFYNSEGATKDFQKIKMSLIARLVGAGMAQLLPRIERTGPPEVLHVHVDGCIVGSIASAKIEEVIPEDLEVGYVPLSHGGAYPGLYLFTNPARFLRPAFMEIRCPDGGDGGRNKLFPATHEEIHPTAILSVVANLTPWSDHNQSPRNMYQCQMAKQTMGFCGQALKFRTDVKAFHLQTPQTPIVRTATYSKYCMDEFPSGTNAIVAVLSYTGYDMEDAMILNKSAVDRGMFRGHIFQTECIDLSAKSRDNVTEFFCKSNLSRDTTAAIESDGLPRIGENIFPNEQYYSVCNNLTGTVRPIKLKGSEPAAIDYVAVNGTNFKDRLQKANIRLRRVRNPIIGDKFSSRHGQKGVCSQLWPDIDMPFSANTGMRPDLIINPHAFPSRMTIAMLLESIAAKAGSLKGKFIDATPFASSVKERSNSIVDELGPMLASYGFNYHGTEILYSGVFGTEMKCEIFLGPVYYQRLRHMVSDKFQVRTTGRIDQITRQPIGGRKYGGGIRFGEMERDALLAHGASYLLHDRLHSCSDYHIADVCSICGSLLTATVIKSESQKKAKRDMLGLPTVKPPKNFACQACKTSKGMETVAMPYVFRYLASELAAMNIKLELRLSNRTEHPTTTSEES

SEQ ID NO: 135642 - protein, 780 aa, Oryza sativa
  Clone ID: PAT_MRT4530_37299C.1.pep
MAEERESFESQWAPSDVMEDNLKEMVAHGVLPAKEIIGWRPAFGEAFPTPDTHEIVVFSHFFYGGFSLPTSRFFRGILNFYGISLHHLNPNSIIHIANFVHACEAFLGIRSHFALFRRIFFLKPQPNKSKQCVVGGAGFQLRGTLSQKYFSMPFKTSNKGWHANWFYVQNPKPALPEYSCLPPVYQDTWNSLTTGDEAAQAVELMEHMIKLKEQGLQGEQITRHFIKIRLAPIKERSRTAFEFDGKHDPNREDPDSLNFKVMKERMYKIISNAIVVSYSHFLPVVPFNAFNPPPPEFALMKSDPPVVQRRSPHRQTGQGSGGPKIHFEARPDTSNPAGQPDSRKRKLMSSDDESDTARKPGDREATKKLPKQATPRKKTSSRPVPKIRKSSRKPSDIDPSGKDSDPTSRETNLKETEPNAEDQPSDNQPATDNVGSGDQPPTGNESAKAGAGINQEPPTENQSDTRPSQEIPEVGARADSPCRQDASNDPIPRSPVKTQESTCPRSEIITVDTLGPMIGDEEEIPRIQAAEDSRPPILVTWWDDDRQPQGIVINKQNEDEEVCLLKKALSQTTRIVNRIHLRNEAKTATLERVNVVQAAKISQLEKQIQTLENDKAELARQKDSALKEVEDRKIKSQAQFDVLVDKINRLEGARDKVANAATPLIQAMFFNNAGPSTLDASEIFDKLRVAPDTYFKNIREAGSMGASMALAMTKSLYPKNDVDAVDGFADGTSEESALDLINDTQKAADKIAADVVERFQDVDLRPTGSDNSDDEKTNTD

SEQ ID NO: 135643 - protein, 931 aa, Oryza sativa
  Clone ID: PAT_MRT4530_3729C.1.pep
MDKSWMNINRTLPQYQDGVNQFIQFAFKDYDVDKLLRCPCRKCRNNHFANRNEICEHLMIHGVNKDYTTWVHHGETIPESDEDANCEMEDQAGFRMDEMTNDFWNAANANSDSSVNITTLDAQEDMGTNIIINEETTKFQKLIDDAEQELYPGCDSFSILSFIVQMLNIKCLYDLSGNAMNALFGTLCSAFPSNNKVPKSYDDAKKIMSNLGLDYIKIYACLNDCILFIGEYAKAETCPVCGISRWKEDGENSARKSRRRKARKVPQKVLWYFPLIPRLKRMYMCSKIAVHMRWHKEKLVDDGYMRHPADSNEWKNFDKNFESFALDARNVRLGLASDGFNPFGNMSSSYSIWPVIIAIYNLPPWMCMKDSYMIMSMLIPGPKAPGNDIDVYLQPLIDELIQLREGVPAYDAHAKSSFKLRGMLLWTINDFPAFGNLSGMSTKGKYACPSCHMDTWSHRLVNGHKYCYMGHLRFLPTRHSWRSNAKSSDGQKERRSAPKALSGDDIMRQYQNFNQVKFGKHNNKRKRSSTLYGVWKKKSIFFQLPYWSTLSIRHNLDVMHIEKNVCDSIVGTLLNLDGKTKDNIKSRFDLELMKIQPELHAPPTGDGKFLFHPACYTMTLAEKKAFCEFLREIKVPDGYSSKISHYVDATKAKISGIYLPLSIRGVLPADVCEAIIELCSFFREICSKKLDTEILKKLASSIAVTLSQEAITGGPVQYRWMYPIERFLRRLKSFVKNKARPEGSIAEAYILQECVNFCSMYLQGVETRINQPSRNEDVQSDNSSTKFQIFGTIGRPLLGNKYCQMDMNELEKARIYVLKNCEEISEYADIHKDQLSIQNSKGVEKCHDKEFFVWFKNHIFEKHSKGSPDTSEELFALARGPDARVTHYTSYMINGWRFNTRDRDKLVQSQNSGVFVKGDEASGSKDYFGVN

SEQ ID NO: 135644 - protein, 147 aa, Oryza sativa
  unsure (1)..(147): unsure at all Xaa locations
  Clone ID: PAT_MRT4530_372C.1.pep
EAEATPANSEKGGGLMKFTKARGVRXVAIAEVRVAWSGGAPCGRRRPNRAVAAGGDACDIPAMNWMGKERGKGVLVMENPILPSISEDLRLERRRKYGGGKLEVSWRHSFVVRPRARACGRVACAGWHELGASAHERSAGLPRGNTG

SEQ ID NO: 135645 - protein, 700 aa, Oryza sativa
  Clone ID: PAT_MRT4530_37300C.1.pep
MVEERESFESQWAPSDVTEDNLKEMVAHGVLPAKEIIGWRPAFGEAFPTPDTHEIVDTWNSLPMGDEAAQAVELMERMIKLKEQGLQGEQITQHFIKCRLAPIKERSRTAFEFDGKHDPNREDPDSLDFKVMKERMYKIFSNAIVVSYSHLLPVVPFNAFNPPPPEFALMKSDPPIAQRRSPRHQTGQGSGGPRIRSETQPSASDSVGQSDSRKRKLVLSDDEADDTTRRPGDRETTKKLSKQATPKKKTSSRPAPKIRKSSRKPSDIDPSGKDSDPTSVDANSSKEIGTTAEDRPSDNQPATDNVESGDQPPIGNQSAEAEAGVNQEPPTRNQSDARPSQEIPEVGAQADSLRSQDASNNQRSRSPLKASESTHPHPEIIMVDTLGPMISDEEEIPRIQAAEDSRPPILVKWWDDNMQPQGTVINKQKEDEELCLLKKALGQATHIVNRIHLRNEAKTETLERLVPHLGTLEATRSLLHETKELARKNEHDLRNRIAELQESNFELSGSSKVNVVQTAKISQLEKQIQILENDKAELARQRDLALKEVEDRKIKSQAQFDVLVSKIKKLEGARDEVDNAAAPIVQAMFLNNNGPSALDASEIFDKLRVAPDIYFKNIKEAGSMGVSMALAMTKSLYPRVDIDVIDGFADGTSEEAALDLISDAQKAADKIAADVVERFQDTDLRPTGPGNSDDEKTETD

SEQ ID NO: 135646 - protein, 684 aa, Oryza sativa
  Clone ID: PAT_MRT4530_37301C.1.pep
MAEERESFESQWVPSDVTEDNLKEMVAHGVLPAKEIIGWRPSFGEAFPTPDTREIVVFAHFFYGGFSLPTSRFFRGILNFYGISLHHLNPNSIVHIANFIHACEAFLGIRPHFTLFRRSFFLKPQPNKSKPCVVGGAGFQLRGTISQKYFSMPFKTSNKGWHANWFYVQNPEPALPEYSCLPPVYRDTWNSLSTGDEAAQAIELMERMIKLKEQVNNEGYYTQEFALMKSDPPIAQRRSPHHQTGQGSGRPRIRSETQPSTSDPIGQSDSRKRKLVLSDDEADDTARKPGDRETTKKLPKQATPRKKTSSRPVPKIRKSSRKPSDIDPSGKDSDPTNVDTSSSKETGPTAKDHPSDNQPATDNVDSVNTLGPMIGDEEEIPRIRAAKDSCPPILVKWWDDNLQPQGIVINRQKEDEEVCLLKKALNQATRIVNRIHLRNEAKTATLERLVPHLGTLEATRSQLHEARELAKNNEHDLRDRIAELQESNFELSGSSNVNVVQAAKISQLEKQIQTLENDKAELARQRDSALKEVEDRKIKSQAQFDVLVDKINKLEGARDKVANAATPLIQAMFFNNTGSSTLDATEIFDKLRVAPDTYFRNIKEAGSMGASLALAMTKSIYPRVDMDAIDGFVDGTSEEVALDLISDAQKAANKIAADVVERFQDVDLRPTGSDKSDDEKTDTD

SEQ ID NO: 135647 - protein, 599 aa, Oryza sativa
  unsure (1)..(599): unsure at all Xaa locations
  Clone ID: PAT_MRT4530_37302C.1.pep
SRFWYTSHDRFFASNHKAPNASESVPLPLLLLVLDRPTMASGSTDPLLPRAGAARRRPATGGWRSALFIIWVEVAERFAYYGVSSNLISYLTGPFGETTAAAAAAVNAWSGAASMLPLLGAAVADSWLGRYRTIVASSVLYITVRSHRVLQKIFMYLPIAIEXSSAQCLFGKRQGLGLLALSSTFSSPQSQQCSSSGDGRQVCRSSSVQRAFFYVSLYLVAIAQSGHKPCVQAFGADQFDATDPGESSSRSTFFNWWYLGLCASATVTAAVMSYVQDNVGWGLGFGVPGMVMLLGLLVFLLGTRTYRFYDGGGSGAFSGVGEAVRAWRKSRRRGEGGGGGGATVEAEHGELAEEVRGMARLFPIWATCLLYGVLFAQPPTLFTKQAATLDRRIGPSSSFQVPPAALQSFLGVSIIPCVLLYEHVLVPAARRATGVATGITMLQRIGAGIAMCAVTLLVAALVEMRRLSAARDADPGAAVPMSLWWMVPQYVLFGAADVFAMVGMQEFFYDQVPGALKSLGLALYLSVLGVGSFISSFLISAIDVVTRRDGGTSWFDDDLNRGHLDYFYLLLAALTVLDLLAYVYFSMSYIYRRKVVDVQ

SEQ ID NO: 135648 - protein, 1012 aa, Oryza sativa
  Clone ID: PAT_MRT4530_37303C.1.pep
MATASGWGWLSRMASAAALASSTASPPPLTSPRLPALTASAIAERRERLAGGCSWLLRASASDARLRPWPAGHYLIARRCPYRSAASRGVDVSCRAASQRGCRLSAPAIREPDGHTPLRVHSSCHQATAAPPLVLPDWGFDGSGGDGERNLGVGFDTQKPRLHKTSLMDFGLLPVFDGACNSSRPCTSLRSLWLSALPVENRVGGEFSRRHEAWSYFWKHKRSRLPAAWQLLFRISLPINCYCLCGICMLFITVYGMLFMKFTFMAEERESFESQWAPSDVTEDNLKEMVAHGVLPAKEIIGWRPAFGEVFPTPDTHEIVVFAHFFYGGFSLSTSRFFRGILNFYGISLHHLNPNSIVHIANFIHACEAFLGIRPHFALFRRIFFLKPQPNKNKPCVVGGAGFQLRGTLSQKYFSMPFKTSNKGWHANWFYVQNPEPALPEYCCLPPVYQDTWNSLPMGDEAAQAVELMERMIKLKEQGLQGEQITRHFIKCRLAPIKERSRTAFEFDGKHDPNREDPDSLDFKVMKERMYKIFSNAIVVSYSYLLPVVPFNAFNPPPPSDSRKRKLVLSDDEADDTARRPGDRETTKKLPKQATPRKKTTSRPAPKIRKSSRKPSDIDPSGKDSDPTSMDASSSKETGPTAEDRPSDNQPATDNVGSGDQPLTGNQSAEAEARVNQEPPTRNQSDAGPSQEIPEVGAQANSLRGQDASNNQRSGSPLKASESTRPRPEIITVDTLGPMISDEEEIPRIQAAEGSRPPILRIHLRNEVKTATLERLVPHLGTLEATRSLLHETKELARKNEHDLRNRIAELQESNFELSGSSKVINVVQAAKISQLEKQIQTLGNDKAELARQKDLALKEVEDCKIKSQAQFDVLVGKIKKLEGARDEVANAAAPIVQAMFLNNNGPSALDASEIFDKLRVAPDIYFKNIKEAGSMGASMALAMTKSLYPRVDIDAIDGFADGTSEQAALDLISNAQKAADKIAADVVERFQDTDLRPTSLDISDDEKTDTD

SEQ ID NO: 135649 - protein, 193 aa, Oryza sativa
  Clone ID: PAT_MRT4530_37304C.1.pep
MNPVFLEPGTASYLRQPEGSSSSQWSGRGQRWPVEMAAATAEEIGEAGVAVGVAAARWRGVGSDAGGGAGRKMAGRRRESRRRCALGGASAASESPPLHLYQRLPKCCITSHRCSTLRAGYPADLHGQKRRDGGGVPREEPAATRRNRRPVPESAMGLILLHLPIMGRLIYQVKTGQPFVEMNLAILVLPKVI

SEQ ID NO: 135650 - protein, 776 aa, Oryza sativa
  Clone ID: PAT_MRT4530_37305C.1.pep
MAEERESFESQWAPSDVTEDNLKEMVAHGVLPAKEIIGWRPAFCEAFPTPDTHEIVVFAHFFYGGFSLSTSRFFRGILNFYGISLHHLNPNSIVHIANFIHACEAFLGIRPHFALFRRIFFLKPQPNKSKPCVVGGAGFQLRGTLSQKYFSMPFKTSKKGWHANWFYVQNPEPALPEYCCLPPVYQDTWNSLPMGDEAAQAMELMERMLKLKEQGLQGEQITRHFIKSRLAPIKERSRTAFEFDGKHDPNRENPDSLDFKVMKERMYKIFSNAIVVSYSHLLPVVPFNAFNPPPPEFALMKSDPPIAQRRSPRQQTGQASGGPKIRSNARPSASDPVGQSDARKRKLVLSDEEGDDTGRLGEKGATGKSPKPTNPKKKTSSRPLPKIRKSSSITQTRRKPSDIDPSEKDPELADIEANPSKETGPTAEDRPSDKQPATDNVEPSNEPPTGNQSAEAEVGANQEPPTGNQSDAGPSQKIPEIEAQTNRPIIGDEEEILRIQAAEDSRLPILVKWWDDNMQPQGIVINKQKEDEELCLLKKALGQATRIVNRIHLRNEAKTVTLERLVPHLGTLEATRNQLHEAKELARKNEHDLRDRIANLQESNFELSGSSKVQAAKISPLEKQIQILENDKAELAKQRDLALKEVEDRKIKSQAQFDVLVGKIKKLEGARDEVANAAAPIVQAMFFNNNGLSALDASEIFDKLRVAPDTYFKNIKEAGSMGASLALVMTKSLYPRVDIDAIDGFADRTSEEAALDLISDAQKAADKIAADVVERF

SEQ ID NO: 135651 - protein, 59 aa, Oryza sativa
  Clone ID: PAT_MRT4530_37306C.1.pep
YISSPVVAAASKIPPREPRTSTTRAYSVASASRMITSPSSSSSSLSFLPAPFPGASAPP

SEQ ID NO: 135652 - protein, 95 aa, Oryza sativa
  Clone ID: PAT_MRT4530_37307C.1.pep
PPNNFFGGGNFFGGPSYNPPFRFFPRKGLGSFRDPLKKGTPPRGLPIRAPKQIYPPGRGLFGVGVTQIFFFSPGQIPPFVPLGAQGPLPFYPFPV

SEQ ID NO: 135653 - protein, 32 aa, Oryza sativa
  Clone ID: PAT_MRT4530_37308C.1.pep
LTTKGAKHFWYWSMFTATHYNQCLISKLLHPK

SEQ ID NO: 135654 - protein, 619 aa, Oryza sativa
  unsure (1)..(619): unsure at all Xaa locations
  Clone ID: PAT_MRT4530_37309C.1.pep
MGSGLFKPRVHPDLRDVFSKMSFFDKIGFLFIHAFDKRNLWHKVPVPMGLFXLNTRRALLEKXIPLADGRTSQCAIFDPKYDMYRTXDGMYYYFHYEDTFKIKHCNLGETLNRXEQQNCIVKSXPFIAPIKFLPRKENKDTGKQFNILAAAWIQFMVHDWMDHMEDTGQIGITAPKEVANECPLKSFKFHPTKELPTNSDGIKIGHYNIRTAWWDGSAVYGNNEERAEKLRTYVDGKLVIGDDGLLLHKENGVALSGDIRNSWAGVSILQALFVKEHNAVCDAIKEEHPNLSDEELYRYAKLVTSAVIAKVHTIDWTVELLKTKTMRAAMRANWYGLLGKKIKDTFGHIGGPILGGLVGLKKPNNHGVPYSLTEEFTSVYRMHSLIPSTLKLRDPTGQPDANNSPPCLEDIDIGEMIGLKGEEQLSKIGFEKQALSMGYQACGALELWNYPSFFRNLIPQNLDGTNRSDRIDLAALEVYRDRERSVPRYNEFRRRLFLIPIKSWEDLTSDKDAIETIRAIYGDDVEKLDLLVGLMAEKKIKGFAISETAFNIFILMASRRLEADRFFTSNFNEETYTKKGMQWVKTTEGLRDVINRHYPEISAKWMKSSSAFSVWDADY

SEQ ID NO: 135655 - protein, 79 aa, Oryza sativa
  Clone ID: PAT_MRT4530_3730C.1.pep
GCASLFCCARPCKGFCPTRLVFSPAASLGFAGLLGSSPFLGPIVLHARGYCSIQIINNKRNKNKINSDQKKKIKMRDMD

SEQ ID NO: 135656 - protein, 278 aa, Oryza sativa
  Clone ID: PAT_MRT4530_37310C.1.pep
MQCMSKGFIEERKVLQREMQLFYQNSQLQLNEQISEQQRRMEQIWGQFNTLISDTSTPGDHVKKHTNHRCCNDKFSRHVITADDGSPIKVAIYDHDNKIITNGPLSSMQVRIVVMNGEFNKDNKVQWNRDSFLQNIVYGRPGKLPLFANELYLRLENGVANLYGAKFQDNSSFLPSKQFRLGVMAADDSISEKILEGISESFAVKDGRGFCTSYYSIKVSRRRGIFYASSIKIPKNCVRDHAQCNQVQHQQIYQFLKITLNKLTSNYPSNMPADFFNK

SEQ ID NO: 135657 - protein, 117 aa, Oryza sativa
  Clone ID: PAT_MRT4530_37311C.1.pep
MAKGMACGETSSPAGLDAMPYWHFGERRGLAKPVRPQPLTPFLIGTMAKGVGGRNLFARKPLTPYLIGTMAQGVGVAKPVRPQPLTQYVIGTMAKAWVGETWSAAPLDAVPHWYYGG

SEQ ID NO: 135658 - protein, 202 aa, Oryza sativa
  Clone ID: PAT_MRT4530_37312C.1.pep
MAKGVGGRNLFARKPLTPYLIGTMAQGVGVAKPVRPHPLTPYLIGTMAKGMAWTKPVRPQPLTPCHIGTMAKGVGGRNLLMPYLIGTMAKGVGGRNLFARNQPLRPQPLTPCLIGTMAKGVGWRNFRPKPLSPYRAGTVAKGVGVVKGVPFRLFGGPKRPGAACWASLMPNSSWRSLCSSPEMPSPEMPLLSEYRRGFPAFA

SEQ ID NO: 135659 - protein, 179 aa, Oryza sativa
  Clone ID: PAT_MRT4530_37313C.1.pep
RRSLLALWRRAWVWRNLFARKPLTPYLIGTMAQGVGVAKPVRPHPLTPYLIGTMAKGMAWTKPVRPQPLTPCHIGTMAKGVGGRNLLMPYLIGTMAKGVGGRNLFARNQPLRPQPLTPCLIGTMAKGVGWRNGPKRPGAACWASLMPNSSWRSLCSSPKMPSPEMPLLSEYRRGFPAFA

SEQ ID NO: 135660 - protein, 42 aa, Oryza sativa
  Clone ID: PAT_MRT4530_37314C.1.pep
MGMASRLFLESINVLHKDCYDGDKALRKIKSTGTLKNLKARF

SEQ ID NO: 135661 - protein, 135 aa, Oryza sativa
  unsure (1)..(135): unsure at all Xaa locations
  Clone ID: PAT_MRT4530_37315C.1.pep
PLSPYLVGTVAKGVGVAKPVRPQPLAPYLIGTMAKGXGVWQKLAGTVAKGVGVAKGXSHFALSVWVPHGRCQIWAFNGLIGWAWSMANGPKRLGAACWASLMPNLSWRSLCSSPEMPSPEMPLLSEYRRGFPAFA

SEQ ID NO: 135662 - protein, 68 aa, Oryza sativa
  Clone ID: PAT_MRT4530_37316C.1.pep
AVKAASSSSSSSPAAEEEEEERRFIGGGGCDALYSCILSHLSLPVWGPILLIGTFWSLSLSSSITTFL

SEQ ID NO: 135663 - protein, 203 aa, Oryza sativa
  Clone ID: PAT_MRT4530_37317C.1.pep
MSLSPLTSGGKEVASHDSVRSRPTAWRERQREVLIGGLVPNADKAATIARSGHMKTRLRGARKGGKRGSSTRFVLALQVFDRRPKVFIRVSKGADAHRADEGALNAFNAIPVRRPKGDAEECRGGGGNGTASLCSRACGDAVRWRQAGEQMEGKGNESAGGIGAAAVREEHGGGAKALWVARPCRERGKGIEPHPCAMLARLG

SEQ ID NO: 135664 - protein, 147 aa, Oryza sativa
  Clone ID: PAT_MRT4530_37318C.1.pep
PPHPRPFRLFPPLGTLSLLPLFHPLAVKGYKPFPFCLFKWSYTLAPWRPYMPLPLPWPVLQFIYLASLPGFQAGNLSVAPTFFLLVFSLFQFSRFFPLAFLLFRFLCLLLFHPFIRLALITLIFPYGSPSAYLGRLYASGHRSRINQ

SEQ ID NO: 135665 - protein, 174 aa, Oryza sativa
  unsure (1)..(174): unsure at all Xaa locations
  Clone ID: PAT_MRT4530_37319C.1.pep
MLSRQTRSCTSLGMAEELLGLTMSSMRTIRTKTFMSVEAASSSSSATPPAVLRPPPHKLLCASSFAQAHTALDDGNTRLGARLDRAHASNLVWAATTPSAHSFPMASSTPSLAVAAAASGGGCARGGASGGSPPSSQIRWRRRXGWRRRGGWMRRRPSLPDLTRIVVPPPPPPP

SEQ ID NO: 135666 - protein, 140 aa, Oryza sativa
  Clone ID: PAT_MRT4530_3731C.1.pep
IEGRAAATSGPVVVAQELCDLDPTAGARRTRYGAAGSWRDPSCIRVASSSIQSFRGRLSSGSGTRHDRSTSGGRRRTPSLLTAEPAVIIFRMCYWFCFNGFTFDSIFTENRREVTIINCSVIQCSRDMLILLACFRTRLI

SEQ ID NO: 135667 - protein, 79 aa, Oryza sativa
  Clone ID: PAT_MRT4530_37320C.1.pep
KTWSRFLAPKSCSGFFHCTLLRICTTLEHFMALNSLLDLMQSSDYMYFHQHLVQNIPYCRLTCRLSYLISVQKSIVVLS

SEQ ID NO: 135668 - protein, 139 aa, Oryza sativa
  unsure (1)..(139): unsure at all Xaa locations
  Clone ID: PAT_MRT4530_37321C.1.pep
MVVPYLAHAVLATPARAFVPSCPGVWQTLYDVSSFTIRLHRLFGIIYLNXVTIVSPSSSPARPHAPWSTTPXPCIHDHSTAPHACPTARLPRHHRLLNFGYIDHVNFTHGFIYHGSLAPFALATSTTTQRAIIRIEHSC

SEQ ID NO: 135669 - protein, 84 aa, Oryza sativa
  Clone ID: PAT_MRT4530_37322C.1.pep
IFDHDPITCGNCDCADKNQCVKKGTSYGVVIHEADKSHFQEAAAGEDNGDCKCGTSCSCTRLLLRASEVTNEPNTRRRRVTYLN

SEQ ID NO: 135670 - protein, 863 aa, Oryza sativa
  Clone ID: PAT_MRT4530_37323C.1.pep
MFWRMTGLSAASPVDTILDKENFTLEELLDEDEIIQECKALNTRLINFLRDRAQVEQLLRYVVEEVPDDAEKKRSFKFPFIACEIFTCEIDVILRTLVEDEQLMELLFSFVKSDHPHSTLLSGYFSKVVICLMLRKTAPLMAYVQLTRSDIQIFDASVLSSVHFSCVVLPIICCLVNWNKLIIHTEPFSLRYLLKINCYALTLGHPEIVVQLVDLIGITSIMEVLIRLIGADETIYSNYGDTLQWLENTDVLEMIADKFSSSDSPEVHANAAEILCAVTRCAPPSLAAKICSPSFVGRLFRHALEESRPKSVLVHSLSVCISLLDPKRLASASYQAFRSNLSHGALVTASPETVDGMLESLGNLLKLLDISDAESVWPSIYGCLRPALGKHHLMSTVLNQMEYRNAGTEDLCQSGPPHWIVSNKPNRIGAAIGLPETAGRETAEKELIRQSAIKRSVDLFFEYPYNNFLHHHVENIIVSCLEGKRTELVEHVLNDCDIVGKILAAEKLSSLSTESTGPTIPSDGKSIPKIGNIGHMTRIANKLIQLGSSNGTIQIHLQENSEWVDWQTDVLVKRNEVENVYHWACGRPTSLHDRGRDSDDDDFRDRDYDVAALANNLSQAFRYGIYSNDDMEENQGTLERDDEDVYFDDESAEVVISSLRLGDDQDGSLFTNSNWFTFDGERGITDRLAAVPSSSPNSEEISPDTEETDDGEVVIGTEDHMDTVNLGNGPIEEAEDAAEFTKHPATSTEDEQLQNAEGIERHLDVSNGDAEASTEAAEAAPVSSAPSSDEVQTERTADEPTGSSDSGNSVSEVLPDPEDSSIDPANTAVSSEQTVDNEDVELPTKEVPSVDVETKTDEIKANE

SEQ ID NO: 135671 - protein, 63 aa, Oryza sativa
  Clone ID: PAT_MRT4530_37324C.1.pep
NFLLSCFRGFPMYAAVVRPYLDTIIDIRGFRLVYTRTKLSIYLQFCVLYFSVIFYFLFMTEVQ

SEQ ID NO: 135672 - protein, 87 aa, Oryza sativa
  Clone ID: PAT_MRT4530_37325C.1.pep
PPPPGGRHWERGPMSGPPILIHRKGKKGGAPNEIKWGNNGGFPPTRVKKGAPRFLLPGPKKKTARRGNGGGTQGILKTRPPEEVSKF

SEQ ID NO: 135673 - protein, 540 aa, Oryza sativa
  Clone ID: PAT_MRT4530_37326C.1.pep
MAEERESFESQWAPSDVTEDNLKEMVAHGVLPAKEIIGWRPVFGEAFPTPDTHEIVVFAHFFYGGFSLPTSRFFRGILNFYGISLHHLNPDYIVHIANFIHHDPNREDPDSLDFKVMKERMYKIFSNAIVVSYSHLLPVVPFNAFNPPPPEFALMKSDPPIAQRRSPRHQTGQGSGGPRIRSETQPSASDPVGQSDSRKRKLVLSDDEADDTTRRPEDRETTKKLPKQATPRKKTSSRPAPKIRKSSRKPSDIDPSGKDSDPTNMDTSSSKETGPTVGDHPSDNQPATDHVESANTLGPMIGDEEEIPRIQAAEDSCPPILVKWWDDNLQPQGIVINRQKEDEEVCLPKKALNQATRIVNISQLEKQIQILENDKAELARQRDLALKEVEDRKIKSQAQFDILVGKIKKLEGARDEVANAATPIVQAMFFNNNGPSALDASEIFDKLRVAPNTYFKNIKEAGSMGASLALAMTKSLYPRVDIDAIDGFADGTSEEAALDLISDAQKSADKIAADVVERFQDTDLRPTGPDNSDDEKTDTD

SEQ ID NO: 135674 - protein, 784 aa, Oryza sativa
  unsure (1)..(784): unsure at all Xaa locations
  Clone ID: PAT_MRT4530_37327C.1.pep
MVAHGVLPAKEIIGWRPAFGEAFPTPDTHEIMVFAHFFYGGFSLPTSRFFRGILNFYGISLHHLNLNSIVHIANFIHACEAFLGIRPHFALFRRIFFLKPQPNKSKPCVVGGAGFQLRGTLSQKYFSMPFKTSNKGWHANWFYVQNPEPALPEYCCLPPVYQDTWNSLPIGDEAAQAVELMERMIKLKEQGLQGEQITRHFIKCRLAPIKERSRTAFEFDGKHDSNREDPDSLDFKVMKERMYKIFSNAIVVSYSHLLPVVPFNAFNPPPLEFALMKSDPPIAQRRSPRHQTGQGSGGPRIRSETQPSTSDPVGQLDSRKRKLVLSDDETDDTTRRPGDRETTKKLPKQATPRKKTSSRPAPKIRKSSRKPSDIDPSGKDSDPTSVDASSSRETGPTAEDRPSDNQPATDNVESGDQPPTRNQSAEAEAEAGVNQEPPTGNQSDAGPSQEIPEVGAQAGSLRGQDASNNQRSGSPLKASESTRPRPEIITVDTLGPMISDEEEIPHIQAAEDSRPPILVKWWDDNMQPQGIVINKQKEDEELCLLKKALGQATRIVNRIHLRNEAKTATLERLVPHLGTLEATRSLLHETKELARKNEHDLRNQIAELQESNFELSGSSKVINVVQAAKISQLEKQIQTLENDKAELARQRDLALKEVEDRKIKSQTQFDVLVGKIKKLEGARDKVANAAVPIVQAMFLNNNGPSALDASEIFDKLRVAPDIYFKNIKEAGSMGASMALAMTKSLYPRVDIDAIDGFADGTXEEAALDLISNAQKAADKIAADV

SEQ ID NO: 135675 - protein, 806 aa, Oryza sativa
  unsure (1)..(806): unsure at all Xaa locations
  Clone ID: PAT_MRT4530_37328C.1.pep
MAEERESFESQWAPSDVTEDNLKEMVAHGVLPAKEIIGWRPAFGEAFPTPDTHEIVVFAHFFYGGFSLLTSRFFRGILNFYGISLHHLNPNSIVHIAKFIHAYEAFLGIRPHFALFRRIFFLKPQPNKSTPCVVGGAGFQLRGTLSQKYFSMPFKTSNKGWHANWFYVQNPERALPEYCCLPPVYQDTWNSLPMGDEAAQAVELMERMLKLKXQGLQGEQITRHFIKSRLAPIKERSRTAFEFDGKHDPNREDPDSLDFKVMKEMMYKIISNAIVVSYSHLLPVVPFNAFNPPPPEFALMKSDLPIAQRRSPRHQTGQGSGGPRIRSETQPSASDPVGQSDSRKSKLVLSDDEADDTTRRPGDRETTKKLPKQATPRKKASSRPAPKIRKSSRKPSDIDPSGKDSNPTNVDASSSKETGPTAEDHPSDNQPATDNVEPGDQPLTGNQSDTGASEEIPEVKTHADNPRGQDASNDRRSGSPLKASESTQPLLVDTLGPMISDEEEIPRIQAAEGSCPPILVKWWDDNLQPQGIVINRQKEDEEVCLLKKALNQATRIVNRIHLRNEAKTATLEKLVPYLGTFEATRSQLHEARELAKKNEHDLRDRIAELQESNFELSGSSKVQAAKISXLEKQIHTLENDKAELARQRDSAIKEVEDRKIKSQAQFDVLVDKINNLEGARDKVANAATPLIQAMFFNNAGSSTLDATEIFDKLRVTPDTYFKNIKEAGSMGASLALAMTKSLYPRVDMDAIDGFADGTSEEAALDLISDAQKAANKIAADVVERFQDVDLRPTWSDKSDDEKTDTD

SEQ ID NO: 135676 - protein, 196 aa, Oryza sativa
  unsure (1)..(196): unsure at all Xaa locations
  Clone ID: PAT_MRT4530_37329C.1.pep
TGRPARRRTQRRRRHGSARRLXGGRSGGGGGGEEGDGARVVEGTGAGGCKTKKREEETGXLYIDQRGLIVVGMATIPPAEWGEVGRRERRDSKFESRPSRARARAGERRSGRGEGGGEAVTWATWPRRCGSERCGGCGMRWRRLEVGDGPDREGGGGRLXWALAFGRPSGEGEGKRMGRRPIQKGKGGKRKTKRRK

SEQ ID NO: 135677 - protein, 796 aa, Oryza sativa
  Clone ID: PAT_MRT4530_3732C.1.pep
MEKIVLASQGGEKLGKFRRRFYAVHMRWHKEKLVDDGYMRHPVDSNEWKNFDKNFESFALDARNVRLGLASDGFNPFGNMSSSYSIWPVVIAIYNLPTWMCMKDSYMIMSMLIPGPKAPGNDIDVYLQPLIDELIQLWEGVPAYDAHAKSSFKLRGMLLWTINDFPAYGNLSGMSTKGKYACPSCHMDTWSHRLVNGHKYCYMGHRRFLPTRHSWRSNAKSFDGQKERRSAPKALSGDDIMRQYQNFNQVKFGKHNNKRKRSSTLYGVWKKKSIFFQLPYWCTLSIRHNLDVMHIEKNVCDSIVGTLLNLDGKKKDNIKSRFDLELMKIRPELHAPPTGDGKILFRPACYTMTLAEKKAFCEFLREIKVPDGYSSKISHYVDATKAKISGMKCHDCHVFLHRYLPFSIRGVLPADVCEAIIELCSFFREICSKKLDTEILKKLASSIAVTLSQEAIAGGPVQYRWMYPIERPLLGNKYCQMDMNELEKARIYVLKNYEEISEYANIYKDQLSIQNSKGVEKRHDKEFFVWFKNHIFEKHSKGSPDISEELFALARGPDARVTHYTSYMINGWRFNTRDRDKLVQSQNSVVFVKGDEASGSKDYFGVLTDIIKLTYGTFSVILFKCEWWDVHTKRGVKEDKHRFTLINTSRTVPIDEPYILATQAEQVYYVKDTRDPKWFVVVKTKPRDLYDFPPTEEEEENDPTLSNKSSSEACQENEHITAALNYTTIDDGDFPTVLSKDGVECEPIEAEPVTHSEDDLFEEEEEEEEDSESDGAEYTDTDDESDIQTEEDVDDS

SEQ ID NO: 135678 - protein, 124 aa, Oryza sativa
  Clone ID: PAT_MRT4530_37330C.1.pep
MDAGKPSTSDSLVLATAASKQSPPSLVAPPPAAAMTRPFLIVPTGGRDTLAVVVKGINGRGASPPWRPASPGGQRLRGTSDRGAEGEAQRDERHGGRRSVVAATRVEDGAVAGDLAGGADDDTV

SEQ ID NO: 135679 - protein, 798 aa, Oryza sativa
  Clone ID: PAT_MRT4530_37331C.1.pep
MVEERESFESQWVPSDLTEDNLKEMVAHGVLPAKEIIWWRPAFGEAFLTPDTHEVVVFAHFFYGGFSLPTSRFFRGILSFYGISLHHLNPNFIVHIANFIHACEDFLGIRPHFALFRRIFFLKPQPNKSKPCVVGGAGFQLRGTLSQKYFSMPFKTSNKGWHANWFYVQNPEPALPEYSCLPPVYRDTWNSLPMGDEAAQAVELMERMIKLKEQGLQGEQITRHFIKCRLAPIKERSRTAFEFDGKHDPNCEDPDSLDFKVMKERMYKIFSNAIVVSYSHLLPVIPFNAFNPSPGSGGPRIRSETQPSASDPVGQSDSRKRKLVLSDDEGDDTGKLRNKGAAGRPSKPTNPKKKTSSRPVPKIRKSSRKPSDIDPSEKDSDPTNTEADSSKETGPTAKDHPNDNPQASDNVEPSDEPTTASQSAEAGVGINQGPPTGNQSDTGPSQKIPEVEAQTNSPPGKDAGHDSETRSPAKTQESTRPRPGIITGPIIGDEEEILWIQAAEDSCPPILVKWWDDNMQPQGIVINKQKEDEELCVLKEALAQATRIVNRIHLSNEAKTATLERLVPHLRTLEATRNQLRETKELARKNEHDLRDRIAELQESNFELSGSSKVQAAKISQLEKQIQTLENDKAELARQRDSALKEVEDRKIKSQAQFDVLVEMINRLEGARDKVANAATPLIQAMFFNNAGPSTLDAAEIFDKLRVAPDTYFKNIKEAGSMRASLALAMTKSLYPRVDMDAIDGFADGTGKEAALDLINDAQKAADKIAADVVERFQDVDLRPTGSDNSDDEKTDTD

SEQ ID NO: 135680 - protein, 54 aa, Oryza sativa
  Clone ID: PAT_MRT4530_37332C.1.pep
LALLLRDEEELRLVFQKSHPPVKMLVPVWKALCKFLNSGCQTSSAVSEPNRSET

SEQ ID NO: 135681 - protein, 68 aa, Oryza sativa
  Clone ID: PAT_MRT4530_37333C.1.pep
SDYKRVTVKCMLDKLHKEGNAGIPGWTMTKAHEGQKTTEQGWSSTIPPSPEVVAFGHTTDTNRDLRRC

SEQ ID NO: 135682 - protein, 823 aa, Oryza sativa
  Clone ID: PAT_MRT4530_37334C.1.pep
MAEERESFESQWAPSDVTEDNLKEMVAHGVLPAKEIIGWRPAFGEAFPTPDTHEIVVFAHFFYGGFSLPTSRFFRGILNFYGISLHHLNPNSIVHIANFIHACEAFLGIRPHFALFRRIFFLKPQPNKSKPCVVGGAGFQLRGTLSQKYFSMPFKTSNKGWHASWFYVQNPEPALPEYCYLPPVYQDTWNSLPMGDEATQAVELMERMIKLKEQGLQGEQITRHFIKCRLAPIKERSRTAFEFDGKHDPNREDPDSLDFKVMKERMYKIFSNAIVVSYSHVLPVVPFNAFNPPPPEFALMKSDPPIAQRRSPRHQTGQGSGGPRIRSKTQPSASDPVGHPDSRKRKLVLSDDEADDTTRRPGDRETTKKLPKQATPRKKTSSRPVPKIRKSSRKPSDIDPSGKDSDPTNIDTSSSKETGPSVEDHPSDKQSATNNVEPSNEPPTGNQSAEAEVGANQEPPTGNQSDAGPSQKVPEVEAQTNSPLGKDADSESEPRSPVKTPKSTRPRPGIITGPIIGDEEEILRIQAAEDSRPPILVKWWDDNMQPQGIVINKQKEDEELCLLKKALGQATRIVNRIHLRNEAKTVTLERLVPHLGTLEATRNQLHEAKELARKNEHDLRDRIAELQESNFELSGSSKVQAAKISQLEKQIQILENDKAELARQRDLALKEVEDRKIKSQAQFDILVGKIKKLEGARDEVANAVAPIVQAMFFNNAGSSTLDAAEIFDKLRVTPDTYFKNIKEAGSMGASLALAMTKSLYPRVDIDAIDGFADGTSEDAALDLISDAQKAADKIAADVVERFQDVDLRPTGSDKSDDEKTYTD

SEQ ID NO: 135683 - protein, 741 aa, Oryza sativa
  Clone ID: PAT_MRT4530_37335C.1.pep
MAEERESFESQWAPSDVTEDNLKEMVAHGVLPAKEIIGWRPAFGEAFPTPDTHEIVVFAHFFYGGFSLPTSRFFRGILNFYGISLHHLNPNSIVHIANFIHACEAFLGIRPHFALFRRIFFLKPQPNKSKPCVVGGAGFQLRGTLSQKYFSMPFKTSNKGWHANWFYVQNPEPALPEYCCLPPVYQDTWNSLPMGDEAAQAMELMERMLKLKEQGLQGEQITQHFIKSRLAPIKERSRTTFEFDGKHDPNQEDPDSLDFKVMKERMYKIFSNAIVVSYSHLLPVVPFNAFNPPPPEFALMKSDPPIAQRRSPRQQTDPSEKDPEPTDIEANLSKETGPAAEDRPSDKQPATDNVEASNEPPTGNQSAETEVGANQEPPTRNQSDAGSSQKIPEVEAQTNSPLGKDADNESETRSPVKAPKSTRPRPGIITGPIIGDEEEILRIQAAEDSHPPILVKWWDDNMQPQGIVINKQKEDEELCLLKKALGQATRIVNRIYLRNEAKTVTLERLVPHLGTLEATRNRLHEAKQLARKNEHDLRDRIADLQESNFELSGSSKVQAAKISQLEKQIQILENDKAELAKQRDLALKEVEDRKIKSQAQFDVLVGKIKKLEGARDEVANAAAPIVQPMFFNNNGPSALDASEIFDKLRVAPDTYFKNIKEAGSMGASLALAMTKSLYPRVDIDAIDGFADGMSEEAALDLISDAQKAADKIAADVVERFQDVDLRPTGSDKSDDEKTDTD

SEQ ID NO: 135684 - protein, 77 aa, Oryza sativa
  unsure (1)..(77): unsure at all Xaa locations
  Clone ID: PAT_MRT4530_37336C.1.pep
KLLAAKEHKISKEKLQFVQTQVCCLGRLISEQGLHLDPDRLHGIRNLQKLNTXTTSEVFLXLAGYCQNWTLNLNLIA

SEQ ID NO: 135685 - protein, 762 aa, Oryza sativa
  Clone ID: PAT_MRT4530_37337C.1.pep
MAEERESFESQWAPSDVTEDNLKEMVAHGVLPAKEIIGWRPAFGEAFPTPDTHEIVVFAHFFYGGFSLPTSRFFRGILNFYGISLHHLNPNSIVHIANFIHACEAFLGIRPHFALFRRIFFLKPQPNKSKPCVVGGAGFQLRGTLSQKYFSMPFKTSNKGWHANWFYVQNPEPALPEYCRLPPEQGLQGEQIARHFIKSRLAPIKERSRTAFEFDGKHDPNREDPDSLDFKEFALMKSDPPIAQLRSPRHQTGQGSGGPRIRSKTQPSASDPVGQLDSRKRKLVLSDDEADDTIRRPEDRETTKKLPKQATPRKKTSSRPAPKIRKSSRKPSDIDPSGKDSDPTNMDTNSSKETGPTAENRPSDKQPATDNVEPSNEPPTGNQSAEAEVGANQEPPTGNQSDAGPSQKIPEVEAQTNSSLGKDADIESETRSLVKTPKSTRPRPGIITGPMIGDEEEILRIEAAEDSRPPILVKWWDDNMHPQGNVINKQKEDEEVCLLKKALSQATRIVNRIHLRNEAKTATLERLVPHLGTLEATRSQLHETKELARKNEHDLRDRIAELQESNFKLSGSSKVNVVQAAKISQLEKQIQTLENDKAELERQRDSALKEVEDRKIKSQAQFDVLVDKIKKLEGARDEVANAAALIVQAMFFNNNGPSALDASEIFDKLRVAPDTYFKNIKEAGSMGASLALAMTKSLYPRVDIDAIDGFADGTSEEAALDLISDAQKAADKIAADVVERFQDVDLRPTGSDKSDDEKTDTD

SEQ ID NO: 135686 - protein, 189 aa, Oryza sativa
  Clone ID: PAT_MRT4530_37338C.1.pep
MEPTLSSVEGEEKVTGTTTEAPGPLAAAAVGERAGGRRPEKGPDLRRQRTEAGAAVASAYSNPIHNLLRPSRGVVVGAGVSDPISLPLIPSPHGTATRSGHAYSLELCCRRSGPSLPTANVLPSPLRHRRRRHLPPHAADVSLWSKPPSPTNHKPQPAPSSSFSRRRHQDQLHLLLYNRPSKPTSDAYK

SEQ ID NO: 135687 - protein, 100 aa, Oryza sativa
  unsure (1)..(100): unsure at all Xaa locations
  Clone ID: PAT_MRT4530_37339C.1.pep
MAVGMATMAGAAGVESVDPAATRQDLVAARQTACPTAGVAGGGGEEDVLATATPSGVVHLLEGIAIGAHIQHHFXGVSPGENLRFVRIGRCRHSVGVPFL

SEQ ID NO: 135688 - protein, 178 aa, Oryza sativa
  Clone ID: PAT_MRT4530_3733C.1.pep
MGPDRTEKVGRKFRSLDLELLDPASGSTAAAPGGRRHEPWHDGRIAGQDAEAAIEGRAAATSGPVVVATGALRPRSDGRCTANSIRAITFRIFLFFFFLFKQIIFRMCYWFCFNGFTFDSIFTENRGKSYKSRGFVLTTTNHLGASFVFYKRLQPSQKPFNGIHPPILDRSTSNSFLG

SEQ ID NO: 135689 - protein, 821 aa, Oryza sativa
  unsure (1)..(821): unsure at all Xaa locations
  Clone ID: PAT_MRT4530_37340C.1.pep
MAEERESFESQWAPSDVTEDNLKEMVAHGVLPAKEIIGWRPASGEAFPTPDTHEIMVFAHFFYGGFSLPTLRFFRGILNFYRISLHHLNPNSIVHIANFIHACEAFLGIRPHFALFRRIFFLKPQPNKSKPCVVAGAGFQLRGTLSQKYFSMPFKTSNKGWHANWFYVQNPEPAVPEYCCLPPVYQDTWNSLPMGDEAAQAVELMERMIKLKEXGLQGEQITRHFTKCRLAPIKERSRTAFEFDGKHDPNREDPDSLDFKVMKERMYKIFSNAIVVSYSHLLPVVPFNAFNPPPPEFALMKSDPPIAQRRSPRHQTGQGSGRPRIRYETQPSASDPVGQSDSRKRKLVLSDDEADDTTRRPVDRETTKKLPKQATPRKKTSSRPVPKIRKSSRKPSDIDPSGKDSDPTNMDTSFSKETGPTAENRPSDKQPATDNVEPSNEPPTGNQSTEAEVGANQEPPTGNQSDAGPSQKIPEVEAQTNSPLGKDADNESETRSPVKTPKSTRPRPGIITGPIIGDEEEILRIQAAEDSLPPILVKWWDDNMQPQGIVINKQKEDEELCLLKKALGQATRIVNRIHLRNEAKTTTLERLVPHLGTLETTRNQLHEAKELARKNEHDLRDRIAELKESNFELSGSSKVQAAKISQLEKQIQILENDKAELARQRDLALKEVEDRKIKSQAQFDVLVGKIKKLEGARDEVANAAAPIVQAMFFNNNGPSALDASEIFDKLRVAPDTYFKNIKXAGSMGASLALAMTKSLYPRVDIDAIDGFADGTSEEAALDLISDAQKAADKIAADVVERFQDTDLRPTGPDNSDDEKTD

SEQ ID NO: 135690 - protein, 741 aa, Oryza sativa
  unsure (1)..(741): unsure at all Xaa locations
  Clone ID: PAT_MRT4530_37341C.1.pep
MAEERESFESQWAPSNVTEDNLKEMVAHGVLPAKEIIGWRPAFGEAFPTPDTHEIVVFAHFFYGGFSLPTSRFFRGILNFYGISLHHLNPNFIVHIANFIHACEAFLGIRPHFALFRRIFFLKPQPNKSKPCVVGGAGFQLRGTLSQKYFSMPFKTSNKGWHANWFYVQNPEPVLPEYSCLPPVYRDTWNSLPTGDEAAQALLTLAASRTVQCIQSSSTVNNEGYYTQEFALMKLDPPIAQRRSPRHQTGQGSGGPRIRSETQPSASDPVGQSDSRKRKLVLSDDEADDTTRRPGDRETTKKLPKQATPRKKTSSRPVPKIRKSSRKPSNIDPSGKDSDPTNTDTSSSKETGPTAGDHPSDNQPATDNVESGDQPPTGNQSAEAEAGFNQEPPTGNQSDAGPSQEIPEVETQADSPRGQNASNNQRSGSPLKASESTHPRPEINTVNTLGPMIGDEEEIPRIRATEDSCPPILVKWWDDNLQPQGIVINRQKEDEEVCLLKKALNQATRIVNXEAKTATLERIXPHLGTLEATRSQLHEARELAKKNEHDLRDLNVVQAAKISQLEKQIQTLENDKAELARQRDSALKEVEDRKIKSQAQFDVLVDKINKLEGARDKVANAATPLIQAMFFNNAGSSTLDATEIFDKLRVAPDTYFKNIKEAGSMGASLALVITKSLYPRVDMDAIDGFADRTSEEAALDLISNAQKAADKIAADVVERFQDVDLQPTGFDKSNDEKTDTD

SEQ ID NO: 135691 - protein, 651 aa, Oryza sativa
  Clone ID: PAT_MRT4530_37342C.1.pep
MAEERESFESQWAPSDVTEDNLKEMVAHGVLPAKEIIGWRPAFGEAFPTPDTHEIVVFAHFFYGVYRDTWNSLPMGNEAAEAVELMERMIKLKEQGLQGEQITRHFIKCRLAPIKERSRTAFEFDGKHDPNCEDPDSLDFKVMKERMYKIFSNAIVVNYSHLLPVVPFNAFNPPPPEFALMKSDPPIAQHQSPRCQTGQGSGGPRIRSKTQPSASDLVGQSDSRKRKLVLSDDEGDVTGKLRDKGATGRPPKPTNPKKKTSSRPVPKIRRKPSDIDPSEKDSDPTNMEADSSKETGPTAKDHPSDNPQASDNVEPSDEPTTASQSAEAGVGVNQEPPTGNQSDTGPSQKIPEVEAQTNSPPGKDAGNDSETRSPVKTQESTRPRPGIITGPMIGDEEEILQIRAAKDSRPPILVKWWDDNMQPQGIVINKQKEDEELCLLKKALGQATRIVNESNFELSGSSKVNVVQAAKISQLEKQIQALENDKAELARQRDSALKEVEDRKIKSQAQFDVLVEKVNRLEGARDKVANAATPLIQAMFFNNTGPSTLDASEIFDKLRVAPDTYFKNIREAGSMGASMALAMTKSLYSKIDVDAIDGFADGTSEEAALDLINDAQKAADKIAADVVERFQDVDLRPTGSDNSDDEKTDTD

SEQ ID NO: 135692 - protein, 51 aa, Oryza sativa
  Clone ID: PAT_MRT4530_37343C.1.pep
KPLFITTVELIEYECYASILTMLHLACCGCYDYTYVLLVCPDHYSCTLDCC

SEQ ID NO: 135693 - protein, 59 aa, Oryza sativa
  Clone ID: PAT_MRT4530_37344C.1.pep
AYQIKARMIFFDHLFLARGDKATDAYMVYGLAVNTDDLHLACVQDQMSTRHDSTPVLDA

SEQ ID NO: 135694 - protein, 130 aa, Oryza sativa
  unsure (1)..(130): unsure at all Xaa locations
  Clone ID: PAT_MRT4530_37345C.1.pep
DNVCLPSCSPPPSSASSSTSPSAPTTCPPGPSGIPVLDALPLVGPAPHADLASLERKYGPVMYLKMGTCGVVVASXAVRGEGVLAGAPRRGCPAAARQGGGVSRRPSRRHPAAADHSYQYQKNATTASWS

SEQ ID NO: 135695 - protein, 116 aa, Oryza sativa
  unsure (1)..(116): unsure at all Xaa locations
  Clone ID: PAT_MRT4530_37346C.1.pep
IQPIQQQGLMNASAGFATPGNQPGQHAANQVVPEHLVHNVQPYQTVIPQVVPKHLVCNIXPDFQNYQGGNLNYQYQPPSPQVQYQQGGLAQPXFVPQYNQFEPMPQQPQGAPQQRP

SEQ ID NO: 135696 - protein, 490 aa, Oryza sativa
  Clone ID: PAT_MRT4530_37347C.1.pep
MASNFSFPPLAPEQIAEALHTYGLAPTANLRAEDIANPQPDLLPAVISNFLATVVDPTGADDLDGQLGFDALASLDNPEHYREGIRVLRLHKRASAFLESIQFPGFTLRDLLRPDPRRLVQVLSALINFLYYRDDKLALLQPIIHEFPNLDERCMELNAKIAEHQKAIADQELAAQMEVPMVQQLEAEVNSLKQKLVEYNKKQLALRANATAINDKKEETHRKIAKSDFELVKLAQENSKLLSKIVQSPEKLQRALEEKKTARAELKNAEKIAMQSVQEKTATLEIYSKGYEKLSKHSSKIQALQEQFTATKALEKEVKARKAKISDESVEIMALDTKTIEWDGKVHEMEERVKAKEKERDQIVADENQKLAALRSEVEWKLKCLEPRERKVEETIAKATKLCAEVDSTRTDAAEELRLIYAKFQQIGHAFTCYKDNFKTFLEQVDEVSKETLESLGRQAVEPLDTSATLSIEKGCQVKTLDYLSYYLSS

SEQ ID NO: 135697 - protein, 215 aa, Oryza sativa
  Clone ID: PAT_MRT4530_37348C.1.pep
MDAASCVGVAPAALLSRSFSDAAAIARALHFSLCDSSPLPEPTTHQYVAATDVDLGACGVAVAAPTPAVSSENAVVLKTRASLSPSARCRLGPAGGGRAGKRRPRPSKRAPTTYISTDAATFRIMVQQVTGAQVEPQDDACLGLLMPPPPFDVVDPAALLPADTAACAGAAHVATCVPHPLHAAAAAAAAVAAPEQPCFPTLDSWNVMYGKDEVV

SEQ ID NO: 135698 - protein, 99 aa, Oryza sativa
  Clone ID: PAT_MRT4530_37349C.1.pep
VPPVVVVELHDQVEWCMVRVRAHVLRLDRFIPDGVGRDLQVPQHADPAIVVADASVVLTVAKSGLDELDAVLQLGPDHRSAQATARAVGSACLAHGGRA

SEQ ID NO: 135699 - protein, 484 aa, Oryza sativa
  Clone ID: PAT_MRT4530_3734C.1.pep
MEEVYWLDDLELIMGYTVKLARTGEAHHAANLFAVSDSTLSSFRGKSLSAACINHVLLHSPSSSSLLPTRKFPVSLSVSATPVISQLSIDPIMGGGGGENRVDNHDDDDDDWELAAGAALADVTLVLVGKVGSGKSATANSILGDEAFESKCSYAGVTQTCQKKSTTVQDGCLIRTINVIDTPGLFDMDIKAEDVRREIVKCMDMAKDGIHAMLMVFSATSRFSCEDEKTIETLKSFFGDKILDHMILVFTRGDEVGGETSWKNMLSDSAPTYLQDILKLFENRVVLFENKTSSTQDRQAQRKKMLDAVDFVVSSNHGKPFSNQLFTQIQEVHHRQKDANSEVYSSMQETDSYISLITKMVEEKLNGTILRMEQQLLKEQEARLDIQNEMTKAILRSEEDIRRLRLSLEKAEQESNNAREENKRFRESEKASKEQEKQTEAEIQKLKEKMEKDREEREEEIRRLRDDLEKEREERQKQSGCIIL

SEQ ID NO: 135700 - protein, 339 aa, Oryza sativa
  unsure (1)..(339): unsure at all Xaa locations
  Clone ID: PAT_MRT4530_37350C.1.pep
SSPIIEGYGVIPRVPIQHNKILNFHKFEVYEFKLHVGHPIEKFFFNVXRTGVLDIKLGKMVFFVQISRXKNSLXNPIPKFETIVEVLAVSPFESPESLLEDDFXAFVEKEDDLGEVIELPKTDPYSRPXIVVLKPLPSGLRHAFLHGDSESPVDISDKLSDDLTSRLIAMLAKHCSILGYFLQVLKGISPALYTHHIPLDPSCALSWEPQQRLNNTMREVVKXEVYPMSYSEWVNPVQVVPKKGGMTVVENLKNELIPEXAVIRWRMCIDYRKLNKAIKKDHFLLPYIDEMLERQTNHSFFCFLDGYSGYHIIPIYSYDQSKTTFTYPXGMYAYYRMSF

SEQ ID NO: 135701 - protein, 126 aa, Oryza sativa
  Clone ID: PAT_MRT4530_37351C.1.pep
VVGETGKGARRSLPAKSLCMSGGAPTAPREGRAAVSRGGIYRRRRRRRQQQAARGSRARRGLRWRRRSTGGGTIGFGFEGWESAAQRRGGIDWTATAAAFRVGRAGRKESNLERERERAFPPPPPK

SEQ ID NO: 135702 - protein, 98 aa, Oryza sativa
  Clone ID: PAT_MRT4530_37352C.1.pep
DGEGVDTGDWKIHESIQSRIGFSLFPSLLILFQTIQFLLRFCCLGGGGAMEGFLHRRKPTTTMTTTRRRRKMPLLPASLPSSGGRSRGSKHVRVHATS

SEQ ID NO: 135703 - protein, 71 aa, Oryza sativa
  Clone ID: PAT_MRT4530_37353C.1.pep
MARELCPRRCGNKRMRFCPPKAHVYRNNNIFVNDDTNDARVQWIKNTNSQCVPQTSSSLHLADSTKHHLML

SEQ ID NO: 135704 - protein, 61 aa, Oryza sativa
  Clone ID: PAT_MRT4530_37354C.1.pep
PRACVRLVSGSRLLWADLANVSSPRSSCSGRWFGFRVCGRFRSSRFPTDTQGEHLSAPRGR

SEQ ID NO: 135705 - protein, 728 aa, Oryza sativa
  Clone ID: PAT_MRT4530_37355C.1.pep
MKSLTSSRKKRNPKRLSIFQSWNRHLDLRLSLNLYLKAYVRQSVEMEPANAEDSVAKALRYRDQLVRNRTQSRGIHGVVEEDEGDGHHCLPELHGSNSFQVVEDASSAARRGRRGGHDGGRGKRPTTQSISSAPSSAARGGRPRKAPYKQPRPSSSGAATGVTASADNLCAEGFVDSETCNGSGMKEFDKAEWSTTNTRIFCELCVEQIEAGNRPIGIMTTRGYQNIAVKYLQKTGLRHSKMQLKNRWDILKALYSFWLGLLKDTGLGWDSTQGTVSASDKYWKQVTKGHSEWKKLQHGPPDCEDLLSQMFAEVAVDGSSACAPGEDVGGAGVQSLDDTPVDISLHRYTTNNKSVKRGCITTENSPLKKVKNPMVKVMKNIQSTLDTNCSIANKIGMYASDDEDEDETFVVASRQLDMMRKVGPVLTAFGMLYAETYLNKSKYREATLAGYDWVMRNLNFPQDCYDMFRMSRPLFERLHNLLVTSYGLKSTSKMDSIEALGMFLWTIGAPQSFVQVKNRFERSKGTISVKFEEVLQSVYLLSKDLVKPRDPHFTTIHPRLHGDRFQPHFNNCIGAIDGTHILVVVPASKVVQHVGRNKYPTQNVLAVCDFDMRFTFIVAGWPGSAHDMRVFNDALCKYATIFPHPPPGKFYLVDSGYPNRMGFLAPYKGTKYHLPEFRAGPRPSGKKEVFNHLHSSLRNVIERSFGVLKMKWRILLDLRVIRCSSKQK

SEQ ID NO: 135706 - protein, 259 aa, Oryza sativa
  Clone ID: PAT_MRT4530_37356C.1.pep
MATDAHITHFAHPQHRLLKTPYSSASRHVCDICEAKLSGLVGYRCNACDFDIHEACADYFKETISFFAHPWHTLTLCRMPPENKGWVCDLCMEHCPPGNFVYRCIQCKFDVHPLCTLLPQTIRSPLHPHHDLNMVPSSGHCNACPERLPVWHYICGPCTSPSYRLHIGCVSGAPSGVGQGSGSTTNQNNSSSRGQGTGNTSSGANQTTSDARNTTAVVERSRSTSVSKFLLKKSFMIAIDLATGGLASPVLDVLQAVLD

SEQ ID NO: 135707 - protein, 94 aa, Oryza sativa
  unsure (1)..(94): unsure at all Xaa locations
  Clone ID: PAT_MRT4530_37357C.1.pep
MKSLTSSRKKRNPKRLSIFQSWNRHLDLRLSLNLXLLSQSRRLLHPRRASSLLHPRPRRRVPNSMSRLLPQSRGIHGVVEEDEGDGHHCLPELH

SEQ ID NO: 135708 - protein, 54 aa, Oryza sativa
  Clone ID: PAT_MRT4530_37358C.1.pep
CYVRQPDARIVRELYRSFAHSNRPAAMDKGMLYQIPCIGRIHEYPFYFFCHFQG

SEQ ID NO: 135709 - protein, 777 aa, Oryza sativa
  Clone ID: PAT_MRT4530_37359C.1.pep
MAEERESFESQWAPSDVTEDNLKEMVAHGVLPTKEIIGWRPAFGEAFPTPNTHEIVVFAHFFCGGFSLLTSRFFRGILNFYGINLHHLNPNSIVHIANFIHACEAFLGIRPHFALFRRIFFLKPQPNKSKPCVVGGAGFQLRGTLSQKYFSMPFKTSNKGWHTNWFYVQNPEPALPEYSCLPTVYRDTWNSLPMGDEAAQAVELMERMIKLKEQGLQGEQITQHFIKCRLAPIKERSRTAFEFDGKHDPNREDPDSLDFKVMKEKMYKIFSNAIVVSYSHLLPVVPFNAFNPPPPEFALMKSDPPIAQHQSPRRQTGQGRGGPKIRSETQPSASDPIGQSDSRKRKLVLSDDEGDDTGKLRDKGATGRPPKPTNLKKKTSSRPVPKIRKSSRKPSDIDPSKKDSDPTNMEADSSKETEPTAKDHPSDNPQASDNVKPSNEPTTASQSAEAGVGVNQEPPTGNQSDAGPSQKIPEVEAQTNSPPGKDAGNDSETRSPVKTQESTRPRPGIIIGPMIGDEEEILRIQAAEDSRPPILVKWWDDNMQPQGIVINKQKEDEEVCLLKKAISQATRIVNRIHLRNEAKTATLERVNVVQAAKISQLEKQIQTLENDKAELARQRDSALKEVEDRKIKSQAQFDVLVDKINRLEGARDKVTNAATPLIQAMFFNNAGPSTLDAAEIFNKLRVAPDTYFKNIKEAGSMGASLALAMTKSLYPRVDIDAIDGFANGTSEEAALDLINDAIKAADKIAADVVERFQDVDLRPTGSDNSDDEKTDTD

SEQ ID NO: 135710 - protein, 102 aa, Oryza sativa
  unsure (1)..(102): unsure at all Xaa locations
  Clone ID: PAT_MRT4530_3735C.1.pep
MKRSCCGGYCGCGSCXHCGGGCCGCTMFLDVEATATTKTYVLAGPCNKASSGGMEMAVESAXNGGCRCNTCKSGTSCRGLCCCSCNWNLSTLSPGCMRIYRM

SEQ ID NO: 135711 - protein, 685 aa, Oryza sativa
  Clone ID: PAT_MRT4530_37360C.1.pep
MAEERESFESQWAPSDVTEDNLKEMVAHGVLPAKEIIGWRPAFGEAFPTPDTHEIVDTWNSLPMGDEAAQAVELMERMIKLKEQGLQGEQITRHFIKCRLAPIKERSRTAFEFDGKHDPNREDPDSLDFKVMKERMYKIFSNAIVVSYSHLLPVVPFNAFNPPPPEFALLKSDPPIAQRRSPRHQTGQGNGGPRFWSETQPSASDPVGQSDSRKRKLVLSDDEADDTTRRPGDRETTKKLPKQATPRKKTSSRPAPKIRKSSSVDASSSKETGPTAEDRPSDNQPATDNVESGDQPLTGNQSAEAEAGVNQEPPTGNQSDAGLSQEIPEVGAQADSLRGQDASNNQRSGSPLKASKSTRPRLEIITVDTLGPMISDEEEIPRIQAAEDSRPPILVKWWDDNMQPQGIVINKQKEDEELCLLKKALGQATRIVNRIHLRNEAKTATLERLVPHLGTLETTRSLLHETKELARKNEHDLRNRIAELQESNFELSGSSKVINVVQATKISQLEKQIQTLENDKAELARQRDLALKEVEDRKIKSQAQFDVLVGKIKKLEGAQDEVANAAAPIVQAMFLNNNGPSALDASEIFDKLRVAPDIYFKNIKEAGSMGASMALAMTKSLYPRVDIDAIDGFADGTSEEAALDLISNAQKAADKIAADVVERFQDTDLRPTGPDISDDEKTDTD

SEQ ID NO: 135712 - protein, 78 aa, Oryza sativa
  unsure (1)..(78): unsure at all Xaa locations
  Clone ID: PAT_MRT4530_37361C.1.pep
APXRGQXSWVAGSXTFLDXPXMQCDWRIXXLXTLRXTXFWEDEXXRRSHPSXHXXGDLRGIXDFXTCEXRQXCNFNEV

SEQ ID NO: 135713 - protein, 711 aa, Oryza sativa
  Clone ID: PAT_MRT4530_37362C.1.pep
MVAHGVLPAKEIIGWRPAFGEAFPTPDTHEIVVFAHFFYGGFSLPISRFFQGILNFYGISLHHLNPNSIVHIANFIHACEAFLGIRPYFALFRRIFFLKPQPNKSKPCVVGGAGFQLRGTLSQKYFSMPFKTSNKGWHANWFYVQNPEPALPEYCCLPPEQGLQGEQITRHFIKCRLAPIKERSRTAFEFDGKHDPNREDPDSLDFKVMKERMYKIFSNAIVVSYSHLLPVVPFNAFNPPPPEFALMKSNPPIAQRRSPHHQTGQGSRGPRIRSETQPSTSDPVSQSDSRKRKLALSNDEADDTARRPGDRETTKKLPKQVTPRKKTSSRPVPKIRKSSRKPSDIDPSGKDSDLAGREADPSKETGPTAKDHLSDNPQASNNVEPSDEPPTEPPTENQSDTGPSQKTPEVEAQTNSPPGKEAGNDSETRSPVRTQESTRSRPGIITGLMIGDEEEILRIQAAENSRPPILVKWWDDNMQPQGIVINKQKEDEERIHLRNEAKTATLERLVRHLGTLEATRSQLDNVVQAAKISQLEKQIRDLENDKIELARQRDSALKEVEDRKIKSQAQFDVLVGKIKKLEGAWDEVTNAAAPIVQAMFFNNHGPSALDASEIFDKLRVAPDTYFKNIKEAGSMGASLALAMTKSLYPRVNIDAIDGFADGTSEEAALDHISDAQKVADKIATDVVERFQDTDLRLTGPDNSDDEKTDTD

SEQ ID NO: 135714 - protein, 727 aa, Oryza sativa
  Clone ID: PAT_MRT4530_37363C.1.pep
MAEKRESFESQWAPSDVTEDNLKEMLAHGVLLAKEIIGWRPAFGEAFPTPDTHEIVVFAHFFYGGFSLPTSRFFRGILNFYGISLHHLNPNSIVHIANFIHVCEAFLGIRPHFALFRRIFFLKPQPNKSKPCVVGGAGFQLRGTLSQKYFSMPFKTSNKGWHVNWFYCQNPEPALPEYSCLPPVYQDTWNSLPTGDEAAQAVELMERMIKLKEQGLQGEQITRHFIKCRLAPIKERSRTAFEFDGKHDPNREDPDSLNFKVMKERIYKIFSNAIVASYSHLLPVLPFNAFNPPPPKFALMKSNPPISQHQSPRRQSGQGSGGPRIRSETQLSASDPIGQPDSRKRKLVLSDDEGDTARKLRDREATKKLLKQPTSRETNLKGTEPTAEDQLSDNQPATDNVESGDQPPTGNESAEAGAGINQEPPTENQSDTKPSQEIPEVGAQADSPRGQDASHDRRSGSPSKASESTRPHPEIITGPMIGDEEEILRIQAAEDSRPPILVKWWDDNMQPQGIVINKQKEDEERIHLRNEAKTATLERVNVVQTAKISQLEKQIQTLENGKAELARQRDSALKEVEDRKIKSQAQFDVLVDKINRLEGARDKVANAATPLIQAMFFNNAGPSTLDAAEIFDKLRVTPDTYFKNIKEAGSMGASLALAMTKSLYPRVDIDAIDGFADGTSEEVALDLINDAQKAADKIAADVVERFQDVDLRPTGSDNSDDEKTDID

SEQ ID NO: 135715 - protein, 776 aa, Oryza sativa
  Clone ID: PAT_MRT4530_37364C.1.pep
MAKERESFESQWAPSDVTEDNLKEMVAHGVLPAKEIIGWRPAFGEAFPTPDTHEIVVFAHFFYGGFSLPTSRFFRGILNFYGISLHHLNPNSIVHITNFIHACEAFLGIRPHFALFRRIFFLKPQPNKSKPCVVGGAGFQLRGTLSQKYFSMPFKTSNKGWHANWFYVQNPEPALPEYSCLPPVYRDTWNSLPMGDETAQVVELMERMIKLKEQGLQGEQITRHFIKCQLAPIKERSRTAFEFDGKHDPNREDPDSLDFKVMKERMYKIFSNAIVVSYSHLLPVVPFNAFNPPPPEFALMKLDPPISQHQSPRRQTGQGSGGPRIRSETQPSASDPVGQSDSRKRKLVLSDDESDDTGKLRDKGVTRRPPKSTNPKKKTSRRLVPKIRKSSRKPSDIDPSEKDSDPTNMEADSSKETGLTAKDHPSDNPQASDYVKPSDKPTTASQSAEAGVGVNQEPPTANQSDTRPSQKIPEDAGNDSETRSPVKTQESTRPRPGIITGPMIGDEEEILRIRAAEDSRPPILVKWWDDNMQPQGIVINKQKEDEELCLLKKALGQATRIVNRIHLRNEAKTTTLERLVPHLGTLKASRNQLHETKELARKNEHDLRDRIAELQESNFELSGSSKDRKIKSQAQFDVLVEKLNRLEGARDKVANAATPLIQAMFFNNASPSTLDASEIFDKLRVAPDTYFKNIREAGSMGASMALAMTKSLYPKIDVDTIDGFADGTSEESALDLINDAQKAADKIAADVVERFQDVDFRPTGSDNSDDEKTDTD

SEQ ID NO: 135716 - protein, 137 aa, Oryza sativa
  Clone ID: PAT_MRT4530_37365C.1.pep
NSCSPASHVATLPTVAPLRLLALPAGFMRRRSAYSAPLWSAAPMGESGQIQRREGMREERIEEERLKGEGKKRLTCGGREGLLATLLMGSWIWADDGRIRHPASSHGVIRDDGDGGGGAKQSSMLATKRSIIDTGYE

SEQ ID NO: 135717 - protein, 686 aa, Oryza sativa
  Clone ID: PAT_MRT4530_37366C.1.pep
MAEERESFESQWAPSDVTEDNLKEMVAHGVLPAKEIIGWRPAFGEAFPTPDTHEIVDTWNSLPMGNEATQAVELMDRMIKLKEQGLQGEQITRHFIKSRLPPIKERSRTAFEFDGKHDPNREDPKYLDFKVMKERMYKIFSNAIVVSYSHLLPVVPYDAFNPPPPEFALMRSDPLIAQHRLPRGKTSQVSGGPKIRSADQSDTSKPTSQSDFRKRKLALSDDEGDDAKKTGGEETTGKQPRQANPKKKTSSRPMPKIRKSSRSFWKDPKPTDMETSSLKETGPTAGDHSSDKQPVTDNIEPSNEPPTESQSAEAGVGSNQEPPTGNQSDTEQNKDIPEAETRADNPPKKDANTDPGSSSPSKIQGPTRPRPEIITGPMIGDEEEILRIRSPEDSHPPTLIKWWDDDKQPQGIIINRQKEDEEVCLLKKALSQATHIVNRIHLRNEAKTATLEKLVRHLGTLEATRNQLHEVKELGRKTEHDLRDRVAELQESNFELLSSSKVQAARISELEKQVEALEKDKAELAKQRDLALKDVEDRKIKSQAQFDVLVNKIKRLKGARDEVANAAAPLVQAMFYNNSSPSTLDASEIFDKLRVAPDTYFKNIREAGSMGASMALAMTKSLYPKIDIDAVDGFADGTSEETALNHINDAQKATDKIAADVVERFQDVDLRPTGSDNSDDEKTDTD

SEQ ID NO: 135718 - protein, 68 aa, Oryza sativa
  Clone ID: PAT_MRT4530_37367C.1.pep
SILHLHTGITIFKNMIKHIFLQCYIYIYTSTPESIPREHLPRGALTKKGKLTQGVLLEHKKAPNKSLL

SEQ ID NO: 135719 - protein, 783 aa, Oryza sativa
  Clone ID: PAT_MRT4530_37368C.1.pep
MAEERESFESQWAPSDVTEENLKEMVAHGVLPTKEIIGWRLAFGEAFPTPDTHEVVVFSHFFYGGFSLPTSRFFRGILNFYGISLHHLNPNSLVHIANFIHACEAFLGIRPHFALFRRIFFLKPQPNKSRPCVVGGAGFQLRGTLSQKYFSMPFKTLNKGWHANWFYVQNPESALPEYSCLPPVYQDTWNSLPTGDEAAQVVELMERMIKLKEQDPDSLNFKVMKERMYKIFSNAIVVSYSHLLPVVPFNVFNPPPLEFALMKSDPPVVQRRSPHHQTSQGSGGPKIRSEDWPNTSNPAGQPYSRKRKLVSSDDESDTARKPGDREATKKLPKQATPRKKTSSRPVPKIRKSSRKPSDIDPSGKDSNLTSREMNLKETKPTAEDQPSDNQPATDNVGSGDQPPTRNESAEAGAGINQEPPTENQSDTRPSQEIPEVGARADSPRRQDASNDPMPGSPVKAQESTRPRPEILTGPMTGDEEEIPRIQAAEDSCPPILVKWWDDDRQPQGIVINKQKEDEEVCLLKKALSEATRIVNRIHLRNEAKTATLEKLVPHLGTLEATRSQLYEVRELARKTEHDLRNRISELQESNYELSGSSKVQAARISDLEKQVEALEKDKAELAKQRDLALKDVEDRKIKSQAQFDVLVNKINRLEGARDKVVNAATPLIQAMFFNNAGPSTLDTSKIFDKLRVAPDTYFKNIREAGSMGASMALAMTKSLYPKIDIDVVDGFADGTSEETALNLINDAQKAADKIAADVVERFQDVDLRSTGSDNSDDEKTDTD

SEQ ID NO: 135720 - protein, 720 aa, Oryza sativa
  Clone ID: PAT_MRT4530_37369C.1.pep
MAEERESFESQWAPSDVTEDNLKKMVAHGVLPAKEIIGWRPAFGEAFPTPDTHEIVVFAHFFYGGFSLPTSRFFRGILNFYGISLHHLNPNSIVHIANFIHACEVFLGIRPHFALFRCIFFLKPQPNKRKPCVVGGAGFQLRGTLSQKYFSMPFKTSNKGWHANWFYVQNPEPALPEYYCLPPEQGLQGEQITRHFIKSRLAPIKERSRTAFEFDGKHDPNREDPDSLDFKVMKERMYKIFSNAIVVSYSHLLPVVPFNAFNPPPPEFALMKSDPPIAQRRSPHHQTGQGSGGPRIRSETQPSAPDPVGQPNSHKRKLVLSDDEGDTARKLGDREATKKLPKKPSDIDPSRKDSDPAGREADPSKETGPTAKDHPSDNPQASDNVEPSDEPPTVSQSAGVGVGVHQEPPTENQSDTGPSQKTPEVEAQTNSPPGKEAGNDSETRSPVRTQESTRSRPGIITGPMIGDEEEILRIQAAEDSRPPILVKWWDDNMQPQGIVINKQKEDEEVCLLKKALNQATRIVNESNFELSGSSKVQAAKISQLEKQIRDLENDKTKLARQRDSALKEVENRKIKSQAQFDVLVGKIKKLEGARDEVANAAAPIVQAMFFNNHGPSALDASEIFDKLRVAPDTYFKNIKEAGSMGASLALAMTKSLYPRVDIDAIDGFADGTSEEAALDLISDAQKAADKIAADVVERFQDTDLRPTGPDNSDDEKTDTD

SEQ ID NO: 135721 - protein, 208 aa, Oryza sativa
  Clone ID: PAT_MRT4530_3736C.1.pep
MRKEKIPHQAPFAIQAAQLLGRAIGAGLFAITPAGERGMCCKAIKLGNARIFEKHSKGSPDISEELFALARGPDARVTHYTSYMINGWRFNTRDRDMLVQSQNSGVFVKEEEENDPTLSNKSSSEACQENEHITAALNYTTIDDGDFPTVLSKDGVECEPIEAEPVTHSEDDMFEEEEEEEDSESDGAEYTDTDDESDIQSEEDVDDS

SEQ ID NO: 135722 - protein, 633 aa, Oryza sativa
  Clone ID: PAT_MRT4530_37370C.1.pep
MANYFDPESSGRREEYRRYRKRLSSSNASPLLGTAVSKFSEARLFCDGNSIQRRPNAGLLLEDIKQEAADISDFDSLDESKLFGSGKKRASLDASDAGFSSGRQAVRSALKSVKLEEDMPHEGETTSTIFASLLDSAIQGLMPFSDVILQFERTCRNASESIRSAGTGKLRMVEDRLMQQKAQLLLDEAASWSLLWYLYGKGNEELPGELFVAPTTSHQEACRFVVTDLTAQLCLRIVLWLEGLASEALDLEKKVRGSHVGSYLPSSGVWHRTQRYIKRKNNDTTIVKHVDFDAPTREGAQLLPDDKKQDELLLEDIWTLLRAGRLEEASELCRSAGQSWRAATLCPFGGIDLFPSLEAMLKNGKSRTLQAIELESGVGRQLCLWKWASYCASEKIAEQDGGRYEMAVYALQCSNLKRILPICTDWESACWAMTKSWLGVQVDLVLSQYQTSRPEEKQFDDEMNGTQPMLNSAGPESWPHSVLDQQPRDISALLQKLHSSDLVHETVSRACREQHRQIEMNLMSGNIAHLLDLLWSWVSPSEDDQNILRPRDDPDMIRFGAHIVLVLRYLFSDEMEDEFEEKLVAVGDLIINMYVRYLFSEQQEELVGVYASQLERDLCIELFVEMMELRLNS

SEQ ID NO: 135723 - protein, 667 aa, Oryza sativa
  Clone ID: PAT_MRT4530_37371C.1.pep
MAEERESFESQWAPSDVTEDNLKEMVAHGVLPAKEIIGWRPAFGEAFPTPDTHEIVNPKPALPEYCCLPPVYQDTWNSLPMGDEAAQAVELMERMLKLKEQGLQGEQITRHFIKSRLAPIKERSRTAFEFDGKHDPNREDPDSLDFKVMKERMYKIFSNAIVVSYSHLLPVVPFNAFNPPPPEFALMKSDPPIAQHRSPYHQTGQGSGGPRIRSETQPSAPDPVGQPNSRKRKVVLSDDEGDTARKLGDREATKKLPKKPSDIDPSGKDSDLAGREADPSKETRPTAKDHLSDNPQASDNVEPSDEPPTVSQSAGAGVGVHQEPPTENQSDTGPSQKTPEVEAQTNSPPGKEAGNDSETRSPVRTQESTRSRPGIITGPMIGDEEEILRIQAVEDSRPPILVKWWDDNMQPQGIVINKQKEDEEVCLLKKALSQATRIVNRIHLRNEAKTATLERLVPHLGTLEATRSQLYETKELARKNEHDLRDRIAELQESNFELSGSSKVQAAKISQLEKQIQILENDKAELARQKDLALKEVEDRKIKSQAQFDVLVGKIKKLEGAWDEVANAAAPIVQAMFFNNNGPSALDASEIFDKLRVAPDIYFKNIKEAGSIGASLALAMTKSLYPRVDVDAIDGFADGTSEEAALDLISDAQKATDKIAADVVERF

SEQ ID NO: 135724 - protein, 49 aa, Oryza sativa
  Clone ID: PAT_MRT4530_37372C.1.pep
PKARFDSFLHHHTVVLRSLQLHHPVVCLIQNAYAYILVNHADCLRLNSI

SEQ ID NO: 135725 - protein, 68 aa, Oryza sativa
  Clone ID: PAT_MRT4530_37373C.1.pep
MEKKGGGAGMEGGGQIPNPFRSRAGSPKSEGPIPPAVVGAKEWWGEKGEAPQREGRLPGDDGSNERKN

SEQ ID NO: 135726 - protein, 686 aa, Oryza sativa
  Clone ID: PAT_MRT4530_37374C.1.pep
MVAHGVLPAKEIIGWRPAFGEAFPTPDTHEIVVFAHFFYGGFSLPTSRFFRGILNFYGISLHHLNPNSIVHIANFIHACEAFLGIRPHFTLFRRIFFLKPQPNKSKPCVVGCAGFQLRGTLSQKYFSMPFKTSNKGWHANWFYVQNPEPALPEYCCLPLVYQDTWNSLPMGDEAAQAVELMERMLKLKDQGLQGEQITRDFIKSRLAPIKERSRTAFEFDGKHDPNREDPDSLDFKVMKERMYKIFSNAIVVSYSHLLPVVPFNAFNPPPPEFALMKSDPPIAQRRSPRHQTTQGSGGPRIRSETQPSAFDPIGQSDSRKRKLVISDDKADDATRRPEDRETTKKLPKQTTPRKKTSSRSAPKIRKSSRKPSDIDPSGKDSDPTNMDTSSSKETGPTAKDHPSDNQPATDNVEPSNEPPTGNQPAEAEVGAGQEPPTGNQSDAGVNEEIPEVETQADNPHGQDASNDRRSRSPLKASESTHPRPEIITVDTLGPMISDEEEIPRIQAAEDSRPPILVKWWDDNMQPQGIVINKQKEDEEIKSQAQFDVLVGKIKKLEGARDEVANAAAPIVQAMFFNNNGPSALDAFEIFDKLRVASDTYFKNIKEAGSMGASMALAMTKSLYPRVDVDAIDGFADGTSEEAALDLISDAQKAADKIAADVVERFQDTDLRPTGPDNSDDEKTNTD

SEQ ID NO: 135727 - protein, 74 aa, Oryza sativa
  Clone ID: PAT_MRT4530_37375C.1.pep
FFFFFFSKTRAQAGTVILQTSQNKNPNTSLVFTSGPTERSELSADLTLFKQKWAIFLYLCETPIQVEAAVRTLQ

SEQ ID NO: 135728 - protein, 49 aa, Oryza sativa
  unsure (1)..(49): unsure at all Xaa locations
  Clone ID: PAT_MRT4530_37376C.1.pep
RAGALKGVGELTDGEAVSRRRLETVDGCCSXGECNXADSSPLNDKLSTA

SEQ ID NO: 135729 - protein, 609 aa, Oryza sativa
  Clone ID: PAT_MRT4530_37377C.1.pep
MDAAGVAEGERSNGAAEGASAAAGRAVEREQAVDRGNSIHVQMYRGAIEVLKPLIHEGKIYYIESFTVKDANRTYRPVSNDFMILFSKWTTLEECIDIPADFPTITFSLTHFQEIPSLVGKNIFYVDIMGVITEISSTSIVRPRSRDADSLKRTLQICDASYTNFTVNAKHSNSTLPVTLWGDRSTAFDAEKIYKDGQTKPQVVVFVGTLVRDYAGIGLTITGSSPCKWYINLDIPDVLKLKESFSVNFQPIKWVENAAPAFNQDTPEEKTIKEILKLNPHKYKRARFIVNVTIKSIHDENCWWYNSCDRCCRTSKPYGSTYRCSSCCYIGMPVPRYKVVLTTADNTSEAAFVLFGRIAHRLIHRPVESLIEENPPDFIPAEIQALVDQAFVWNVSFTEHTVKRNQESLQVNSIVSSGAPKQHFLPISPSASGRTSTIVPLSPGTSLQTPPAASESSIESQSSTRGKQSASLQPSLSTPTKYVVSAAADDTPTSKSNPSGSTKKKYVVLAYPMQSQTMQPSIDDKATKPKSGQKTLEHPSLPAAGPSESESEHKIKGTFVNTPDDPPISPSVPSKSASKKRTNTIASVPAPPAKKLFKEHSQHTKDQSE

SEQ ID NO: 135730 - protein, 282 aa, Oryza sativa
  Clone ID: PAT_MRT4530_37378C.1.pep
MDKTNSVPCLALYVKHGADSDKPALFSISEKKAINNNIPGLTNTNSWVTPQGWILVRDTVSTATFLQNPHDSTDKIQLPHLSQNVHSSSTCLLSCKPTMPGCVVLLVEPVGTIIWYCHIGDDDKWGKFYFNGDFESIGVLEFSPEPTFSSITITDPIIGGLGVVGMANVYLVESLDELYMVCQMYDSEMETIYDVTVYRMDFSKQQWCVAEDIGGRAFLTASCYFGASRSADEYGLEKDCVYAIFARDKYYEVSKVEDGETEEHELIEAPDSKGGTWILPVE

SEQ ID NO: 135731 - protein, 599 aa, Oryza sativa
  unsure (1)..(599): unsure at all Xaa locations
  Clone ID: PAT_MRT4530_37379C.1.pep
APPRSCRTLRIPKTRSISLIYQKACLPDXSCQLSGKPSLPGCIVLVVEPIATVIWYCRIGDDEWTRHEYDIGTLPFDPPIDGKDHDDVAICQIAACHGKFYFNGFFDTIGVLEFTPTPVFSSIEIVDPTPGGLGVTGAAHVYLVESEDELYMVCLRIDYEFTIYDMTVHKMDFLSRQWRRADEIGGRAFFLAPLYFGASCSADEYGLEKDSVYASYAVDKCFEVSKASFAXASASDCCDRLGICLYVLRLTXCMPGLYKRWLSTVAVDPTRGADVASPQFTMDKTNSVPCLALYVKHGADSDKPALFSISEKKAINNNIPGLTNTNSWVTPQGWILVRDTVSTATFLQNPHDSTDKIQLPHLSQNVHSSSTCLLSCKPTMPGCVVLLVEPVGTIIWYCHIGDDDKWVKHEYDIGTQPLDPPPPXLDGKDHEKVPICSIAAFQGKFYFNGDFESIGVLEFSPEPTFSSITITDPIIGGLGVVGMANVYLVESLDELYMVCQMYDSEMETIYDVTVYRMDFSKQQWCVAEDIGGRAFLTASCYFGASRSADEYGLEKDCVYAIFARDKYYEVSKVEDGETEEHELIEAPDSKGGTWILPVE

SEQ ID NO: 135732 - protein, 88 aa, Oryza sativa
  unsure (1)..(88): unsure at all Xaa locations
  Clone ID: PAT_MRT4530_3737C.1.pep
AAPQQHRRRRREPRHGGRIAGQDAEAAIGGXAAATSGPVMVATGALRPQSDGGCTANSIRRGGVAAGSILHSSCVELNPKLQREVEQW

SEQ ID NO: 135733 - protein, 106 aa, Oryza sativa
  unsure (1)..(106): unsure at all Xaa locations
  Clone ID: PAT_MRT4530_37380C.1.pep
TRTPAEPKKTVFGCVNFTLRPERSDAWPVPALMAKWDRNWMQKWFYVDNPYSTEDDKANWLRFRRLPVSIIAKPSVEIDGTLXRLILLHNITRRLSTRDLYEEWCR

SEQ ID NO: 135734 - protein, 105 aa, Oryza sativa
  Clone ID: PAT_MRT4530_37381C.1.pep
HGAPPQPPHARPPPGRAPRHRRGHRLPPARPPPARTPRHCCRSRARLPPACALAPPPPVPPRPHPPLCDLPLLAHGCRCQLPHRRKDKCSELLKLSTVSVDDDST

SEQ ID NO: 135735 - protein, 1874 aa, Oryza sativa
  Clone ID: PAT_MRT4530_37382C.1.pep
MLMLMDPPARSRRCTLLTRALLLAVAALALRLIYAAFLAGMALYPPLPAAAVLGSKTYLHSAVATPDAWRTRDWRKAVDYHATLLAPHLADGILSPTSRAVCLGAVQEALAMRELGVSTAVAVARKRSPPLAVAGNDRRLPFQDSSVDFVFAARALDSSKRPADLAAESARILKPDGHLVVLTTSAADAFSLRALQALLPSLRLLRSRQIKGPDDSTLRELVFQKIQDSTDDPVNKCTIGDHKLQLLTHAEPLIQEEPRKPWITLKRNIKNIKYLPTLADISFKRNYVYVDVGARSYGSSIGSWFRKHYPKQNHTFQVFAIEADPAFHSEYAAKKAVTLLPYAAWVKNETLNFEINADPGKEDEAKANGRGMGRIRPMAGKKMSGEVRSVPAFDFAEWLKRTVSEQDYVVMKMDVEGTEFDLIPRLFDTGAICLIDELFLECHYNRWQKCCPDRAEAFEMAKGVSCFYWSIQFPNFKDHLCFRNCSNASSTRHFSYRSLLIRTEKPVTTRNHAYAEVVVFVLDQNPMFFLFLRFFYPAIQRGPNCWSSANSTVMRQAFEVFYDGSWHGVNCIRIRNGNLFVKFIYSGSTVEHNVDGDCLRLRSRRATCSDCSNVLKPGVDVCVQSSHTPEASSQGGTNASVLLRHDARLITIKKNHQEDKCLCLFVVILYKNQCPGNAEKVITDRRAEVVTINDIFLLQKLQPEVHEGSMKWSFSKDRLSLNKGRLISARFSSEITHLIVLSILRGMEFNIKLVEGQIVYQIIKGDQAQWNLDSMAIPPGFGNTMEIISFQLRDEALRPTITNIPITHVKKNNITEDMRFTVKSEMDSELDRALDVEILYEHVDLRRSKRLKTQPDRFTSYDTPRFLSGYKKKEASSSPTKHVRGAVHCDSPVDDSKKEVESCCVEIPGNVTQKQTGVHSPMVDEKSNSPEGQHKNTTKRTTCSLVKEKASSPEGQHEKTTKRTTCALPVKEKASSPEGQHKNTIKRTTCSLPVKEEPSSVEIEEKSSKEQSAPEFHIPRTPAQNKEKHNRPPFSCKPKLFTSSGTLGVNCEPAFCQKVGGKRKRHMCEREYKQMIDQCIGNIESEMERDSMFNFDANMMNYVQHSYREEDFTWPPSADNQEVEEDELEELWKEMDYSLTTLALLEQKQVMAQSRINMLVDNFDGLRLDCLTLTDDYRCYYQKKEKFAESGSVNESTDYFGKVGGIPCHHECILDEELGLACRLCNVVCTEAKDIFPEMFNGNDYKDRPGCSNICLDDDILDPSLLANLAPELSELKNSGSVWSAISDLDPKLLPHQRKALDFLWKNLAGSIQVEGMDNSNVSTGGCVIAHTPGSGKTLLLISFLVSYMKAHPRSRPLVLTPKAAIHTWKREFEKWGISLPLHVFHHANRSGKPLGAMDSKLRSLLNNFHRPTWTNMRLMDSLDKLFKWHAHPSVLLMTYSSFLGMTKQDSKVRNRYREFIAEVLMNNPGLLILDEGHNPRSNKSKLRKLLMKVKTEFRILLSGTAFQNNFEEYFNTLCLARPRFIGDIMSELVPERKRETVGRRAKHQEAVARRAFVEKVGQKIESDNKHIRSDGISLLNKLTRGFIDSFEGAKLINLPGIHVYTVFMKPTDIQEEMLAKVTMPKLGSSRFPLEVELLITIGSIHPWLIKTTKAVSTFFSPAEVKKVERYKRDFAAGCKAKFVIDLLHKSSFRGERVLIFCHNVSPITFLVKLIEMVFGWRLGEEVLVLQGDQELPVRSDVMDKFNGDSAGKRKVLIASTTACAEGISLTGASRLVMLDSEWNHSKTRQAIARAFRRGQERTVYVYLLVASGTWEEEKYNSNRRKAWMSKMVFLGRYVDDSSQNRVTDIDDEVLKELADEDHTGTFHMIVKQD

SEQ ID NO: 135736 - protein, 57 aa, Oryza sativa
  Clone ID: PAT_MRT4530_37383C.1.pep
DHRCAPLSCSSSADGARRNTKSWRATFPEPEEFSMLISEYLIQQVCQSKGKYLYSLV

SEQ ID NO: 135737 - protein, 40 aa, Oryza sativa
  unsure (1)..(40): unsure at all Xaa locations
  Clone ID: PAT_MRT4530_37384C.1.pep
KKKKKKKKKKKKKKKKKKKXERYRGKKDKKQKNATPKMIK

SEQ ID NO: 135738 - protein, 75 aa, Oryza sativa
  Clone ID: PAT_MRT4530_37385C.1.pep
MAKIAFLLAAALLLGLVSVSQAIQGTATFYTTYNPSACYGNQDNGRMIAAASDGLWAGGKICGTMFTALDEEMII

SEQ ID NO: 135739 - protein, 41 aa, Oryza sativa
  unsure (1)..(41): unsure at all Xaa locations
  Clone ID: PAT_MRT4530_37386C.1.pep
RXKKKKKKKKKKKKKKKKKKKKKKKKKKGLLKRAVLKKYFS

SEQ ID NO: 135740 - protein, 68 aa, Oryza sativa
  Clone ID: PAT_MRT4530_37387C.1.pep
NPIQAQEERVPNINCTSIKYNRYLRFFSYGGLHLQTVQLLLCTTLINIIITTLERQDQRSHVTLFCTQ

SEQ ID NO: 135741 - protein, 68 aa, Oryza sativa
  Clone ID: PAT_MRT4530_37388C.1.pep
LYVTDVERRVGGRRWAWRGRRERDGEVGYLRRSADAVALAHHREIIELHAPSSSCSTRATGTVGREAA

SEQ ID NO: 135742 - protein, 870 aa, Oryza sativa
  unsure (1)..(870): unsure at all Xaa locations
  Clone ID: PAT_MRT4530_37389C.1.pep
MDNDSSTPEKDTTADSNLPVKSNEFGESSESVSVGSQNETLCLDHELQHLSLERKSQKSKANIKKPVSSSLYKPEPWMLQHEDEGIPRQLNLAIVGHVDSGKSTLCGRLLHALGRISKKQMHKYEKEAKEKGKGSFAYAWAMDESADERERGITMTVGVAYFDTKDYHVVLLDSPGHTDFVPNMISGATQSDAAILVIDASIGSFEAGMGINGIGQTKEHSQLVRSFGVDNLIVVVTKMDSVEYSKERFNFIKXQLGAFLRSCGYKDSAVAWVPISAMENENLMTTASDTRLSSWYDGNCLLKAIDTLPPPSRDVSKPLRLPICDVFSSHKLGQVAIGGKVEVGATRSGSKILAMPFGELAVVKTIERNSSSCNLARAGDNVAIGLQGIDPSHVMPGGVICHPDYPVSVASCLELKILVLDITVPILVGLQFELHIHHAKVSASMVKILSLLEQKTGKASKKIPRFLTSRQTAVIEVKLEKEYARMYGCGTHSGKRYREEVAATSKGSLGGGTRKEAGGHVLFVDLDDPTVLVHPKEFVAHSSNVNCLKIGRKTSRVLVTGGDDHKVNLWAIGKPNSILSLSGHTSAVESVNFDSTEVFVAAGAASGTIKLWDLEEAKIVRTLTGHRSNCMSVDFHPFGEFFASGSLDTNLKIWDIRRKGCIHTYKGHTRGVNAIRFTPDGRWVVSGGEDNVVKLWDLTAGKLLHDFKCHEGQIQCIDFHPHEFLLATGSSDKTVKFWDLETFELIGSTGPENFSKIDVVPVIIPRTSSGPELATDSRSDAADVGPVLSKSGRRIEIANDSRKESSDVAAAVVPRTNSRTEMASDSAPVVGPRANLRMEVSADSAPIVPKSDVSRMRKPRDNCYIEVSRA

SEQ ID NO: 135743 - protein, 842 aa, Oryza sativa
  unsure (1)..(842): unsure at all Xaa locations
  Clone ID: PAT_MRT4530_3738C.1.pep
VLDYIKIDTCLNDCILFRGEYAKAETCPVCGISRWKEDGENSARKSRRRKARKVPQKVLWYFPLIPRLKRMYMCSKIAVHMRWHKEKLVDDGYMRHPVDSNEWKNFDKNFESFALDARNVRLGLASDGFNPFGNMSSSYSIWPVVIAIYNLPTWMCMKDSYMIMSMLIPGPKAPGNDIDVYLQPLIDELIQLWEGVPAYDAHAKSSFKLRGMLLWTINDFPAYGNLSGMSTKGKYACPSCHMDTWSHRLVNGHKYCYMGHRRFLPTRHSWRSNAKSFDGQKERRSAPKALSGDDIMRQYQNFNQVLVKFGKHNNKRKRSSTLYGVWKKKSIFFQLPYWCTLSIRHNLDVMHIEKNVCDSIVGTLLNLDGKKKDNIKSRFDLELMKIRPELHAPPTGDGKILFRPACYTMTLAEKKAFCEFLREIKVPDGYSSKISHYVDATKAKISGMKCHDCHVFLHRYLPFSIRGVLPADVCEAIIELCSFFREICSKKLDTEILKKLASSIAVTLCKLEMIFPPSFFDVMLHLPIHLAQEAIAGGPVQYRWMYPIERFLRRLKSFVKNKARPEGSNKNPARSXNKNILQECVNFCSMYLQGVETRINRPSRIEDVQSDNSSTKFQIFGTVGRPLLGNKYCQMDMNELEKARIYVLKNYEEISEYANIYKDQLSIQNSKGVEKRHDKEFFVWFKNHIFEKHSKGSPDISEELFALARGPDARVTHYTSYMINGWRFNTRDRDKLVQSQNSVVFVKGDEASGSKDYFGVLTDIIKLTYGTFSVILFKCEWWDVHTKRGVKEDKHRFTLINTSRTVPIDEPYILATQAEQVYYVKDTRDPKWFVVVKTSNPL

SEQ ID NO: 135744 - protein, 654 aa, Oryza sativa
  Clone ID: PAT_MRT4530_37390C.1.pep
MELHIMVGLLLHNQAEFNMVDINPDSDDNRSDPQEPSRNPGIWQCTICEHGNDAKKKSCEQCGVLRYFSLYFNNALEVDGRAKRRDKHYAVSVLARTLFSPSSAKSKDVVLSGGFKASRNATGSTRATLDALHKTYMTRKERHINIVPFKFDTPSPDDVVATGLKSSRSFRKDAPHVTEKRVMDNDSSTPEKDTTADSNLPVKSNEFGESSESVSVGSQNETLCLDHELQHLSLERKSQKSKANIKKPVSSSLYKPEPWMLQHEDEGIPRQLNLAIGKGSFAYAWAMDESADERERGITMTVGVAYFDTKNYHVVLLDSPGHKDFVPNMISGATQSDAAILVIDASIGSFEAGMGINGIGQTKEHSQLVRSFGVDNLIVVVNKMDSVEYSKERFNFIKSQLGAFLRSCGYKDSAVAWVPISAMENENLMTTASDTRLSSWYDGNCLLKAIDTLPPPSRDVSKPLRLPICDVFSSHKLGQVAIGGKVEVGATRSGSKILVMPFGELAVVKTIERNSSSCNLARAGDNVAIGLQGIDPSHIMPGGVICHPDYPVSVASCLELKILVLDITVPILVGLQVSASMVKILSLLEQKTGKASKKIPRFLTSRQTAVIEVKLEKEVCVEEFSNLKALGRVFLRSQGNTIAVGIVSRVREQA

SEQ ID NO: 135745 - protein, 80 aa, Oryza sativa
  Clone ID: PAT_MRT4530_37391C.1.pep
MGSDVVDKEQVLYHPCPALEVITTVVSFVLRRYLIIHASHRRSSLAALLFEQVLLHTLPLAVASSSLSKSSSMARAGGRH

SEQ ID NO: 135746 - protein, 923 aa, Oryza sativa
  Clone ID: PAT_MRT4530_37392C.1.pep
MTTNTKRAYKLRILANSFPVFLTSIFCIFFREEFVAHSSNVNCLKIGRKTSRVLVTGGDDHKVNLWAIGKPNSILSLSGHTSAVESVNFDSTEVFVAAGAASGTIKLWDLEEAKIVRTLTGHRSNCMSVDFHPFGEFFASGSLDTNLKIWDIRRKGCIHTYKGHTRGVNAIRFTPDGRWVVSGGEDNVVKLWDLTAGKLLHDFKCHEGQIQCIDFHPHEFLLATGSSDKTVKFWDLETFELIGSTGPETTGVRSMTFNPDGRSLLCGLHESLKVFSWEPIRCHDTVDVGWSRLSDLNVHEGKLLGCSFNQSCVGIWVVDLTRLEPYATGTSTKLNGHSELKSSSSSTMPLQNDSGSRANIGRLSVLQNSENNIKSSTGRLSVSQNSDSALKETKSTTSSGLVPVTPQRAGNGSSTKTVGNSTFASSGTNLKRGSLKSNNSSSLQNFSKIDVVPVIIPRTSSGPELATDSRSDAADVGPVLSKSGRRIEIANDSRKESSDVAAAVVPRTNSRTEMASDSAPVVGPRANLRMEVSADSAPIVPKSGRRLESSVESRKESTDVASAAAPKTSSRMEVAPDSAPLLSKAGRRVESATDSRKESADVAPVVPRTTSRMEMAPDSRREISAGRMSPFRVQSRYSELRKLNNAKADADKVDAGSKNSETDDFTCQIYLPRRNGVVQSGISEETREDAKPGVIDRMGFPSSAEPNTHRNVSRMRKPRDNCYIEVSRAALAYTWKRGSSQAAETPTIASDEDVLSVLMEQHELFLSSTRSRLTKLQIVHQMWQRNDIRGIIAAMEKMSDHAVSADVASVLMEKSETITLDLCTVILPVLTDLLESKTDRHLGVSLELLVKLVRTFGSVIHSTVSAGPSSVGVDLQAEQRRERCNLCFIELEKVKNKLPFLSRRKGAVANTAQELSLVFQEVM

SEQ ID NO: 135747 - protein, 104 aa, Oryza sativa
  Clone ID: PAT_MRT4530_37393C.1.pep
AAVQRRRDGGGGATRRRWRRHGALLRPPYYLRLHVHLLLPGTLYPLLPRIVLCFRKMAKKKNPIVFMDISIGDEPEAIPNPMTRMVSIALNKLPPRMKNDVASE

SEQ ID NO: 135748 - protein, 822 aa, Oryza sativa
  unsure (1)..(822): unsure at all Xaa locations
  Clone ID: PAT_MRT4530_37394C.1.pep
MTKERESFESQWVPFDVTEDNLKEMVAHGVLLVKEIIGWRPAFGEAFPTPDTHEIVVFAHFFYGGFSLPTSRFFRGILKFYGISLHHLNPNSIVHIANFIHACEAFLGIRPHFALFRRIFFLKPQPNKNKPCVVGGADFQLRGTLSQKYFSMPFKTSNKGWHANWFYVQXPEPALPEYSCLPPVYQDTWNSLPMGDEAAQAVELMERMIKPKEQGLQGEQITRHFIKCRLAPIKERSRIAFEFDGKHDPNRENPDSLDFKVMKERMYKIFSNAIVVGYSHLLPVVPFNAFNPPPPEFALMKSDPPIAQRRSPRHQTGQGSGGPRIRSETQPSAPDPVGQPNSRKRKLVLSDDEGDTARKLGDREATKKXAKQATLRKKTSSRPVPKIRKSTRCNSDIDPSGKDSDPTNMDTSSSKETGPTVEDHPSDNQPATDNVESGDQPPTRNQSAEAEAGVNQEPLTGNQSDAGPSQEILEAKTQADNPCGQDASNDRRSGSPLKASESTHPRPEIITGPMISDEEEIPRIQAAEDSCPPILVNWWDDNLQPQGIVINRQKEDEEVCLLKKALNQAIRIVNRIHLRNEAKTATLEKLVPHLGTLEATRSQLHEARELAKKNEHDLRDQIAELQESNFELSGSSKVQATKISQLKEQIQTLENDKAKLARQRNSALKEVEDCKIKSQAQFDVLVDKINKLEGARDKVANAATPLIQAMFFNNAGSSTLDAAEIFDKLRVAPDTYFKNIKEAGSMGASLALAMTKSLYPRVDIDAIDGFADGTSEEAALDLINDAQKAADKIAADVVERFQDVDFRPTGSDNSDDEKTDTD

SEQ ID NO: 135749 - protein, 383 aa, Oryza sativa
  Clone ID: PAT_MRT4530_37395C.1.pep
MEAGSSKETGPTAKDLPSDNLQASDNVEPSDEPLTGNQSAEAEAGVNQEPPTGNLSDAGPSQEIPEVETQADNPRGQDASNDRRSGSTLKASESTRPRPEIITVDTLGPMIGDEEEIPRIQAAEDSCPPILVKWWDDNLQPQGIIINRQKEDEEVCLMKKALNQATRIVNRIHLRNEAKTATLEKLVPHLGTLETTRSQLHEARELARKNEHDLRDWIAELQESNYKLSGSSKDRKIKSQAQFDVLVDKINKLEGARDKVANDATPLIRAMFFNNAGSSTLDAAKIFDKLRVAPDTYFKNIKEAGSMGASLALAMTKSLYPRVDMDAIDGFADGTSEEAALDLINDAQKAADKIAADVVERFQEVDLRPTGSDKSDDEKTDTD

SEQ ID NO: 135750 - protein, 736 aa, Oryza sativa
  Clone ID: PAT_MRT4530_37396C.1.pep
MAEERESFESQWAPSDVTEDNLKEMVAHGVLPAKEIVGWRPAFGEAFPTPDTHEIVVFAHFFYGGFSLPTSRFFRGIVNFYGISLHHLNPNSIVHIANFIHACEAFLGIRPHFALFRRIFFLKPQPNKSKPCVVGGAGFQLRGTLSQKYFSMPFKTSNKGWHANWFYVQNPEPALPEYSCLPPVYRDTWNSLPMGDEAAQAVELMERMIKLKEQGLQAEQITRHFIKIRLAPIKERSRTAFEFDGKHDPNHEDPDSLNFKVMKERMYKIFSNAIVVSYSHLLPVVPFNAFNPPPPPDSRKRKLVSSDDESDTARKPGDREATKKLPKQATPRKKTTSRPVPKIRKSSRKPSDIDPSGKDSNPTSRETNLKGIEPTNEDQPSDSQPATDNVGSGDQPLTENESAEAVDGVNQEPPTENQSDSRPSQEIPEVGAWSDSPPRQDASNVPMPGSPIKAQESTRPRPEIITVDTLGPMIGVEEEILRIRAAEDSRPPILVKWWDDNMQPQGIVINKQKEDEELCLLRKALGQATRIVNRIHLRNEAKMATLERVNVVQAAKISQLEKQIQTLENDKAELERQRDSALKDVEDRKIKSQAQFDVLVDKINRLEGARDKVANAATPIIQAMFFNNADPSTLDAAEIFDKLRVAPDTYFKNIKEAGSMGASLALAITKSLYPRVDIDAIDGFADGTSEEAALDLINDAQKAADKIAADVVERFQDVDLRLTGSDNSDDEKTDTD

SEQ ID NO: 135751 - protein, 728 aa, Oryza sativa
  Clone ID: PAT_MRT4530_37397C.1.pep
MGGNVGLGTDLRGQRRELVLGGRGQSGDREDDTGEEEKGEKEGEKGGLPLCRFGKKEEVSGGDAAEGGGMLPPSLGGLRAEWRGQAMTTAMTAGRFGAERRHWRQARAEADSGGDRAAPRRNGRYRRPAFGEAFPTPDTHEIVVFAHFFYGGFSLPTSRFFRGILNFYGISLHHLNPNSIVHIANFIHACEAFLGIRPHFALFRCIFFLKPQPNKSKPCVVGGAGFQLRGTLSQKYFSMPFKTSNKGWHVNWFYVQNPEPALPEYCCLPPVYQDTWDSLPIGDEAAQAVELMERMIKLKEQGLQGKQITRHFIKCRLAPIKERSRTAFEFDGKHDPNREDPDSLDFKVMKERMYKIFSNAIVVSYSHLLPVVPFNAFNPPPPEFALMKSDPPIAQRRSPRHQTGQGSGGPRIRSETQPSAFDPVGQSDSRKRKLVLSDDEADDTTRRPGDRETTKKLPKQATPRKKTSSRPAPKIRKSSRKPSDIDPSGKDSDPTSVDASSSKETRPSAEDRPSDNQPATDNVESVDTLGPMIGDDEEIPRIQAAEDSRPPILVKWWDDNMQPQGIMINKQKEDEELRLLKKALGQATRIVNRIHLRNEAKTATLEKLVPHLGTLEATRSLLHETKELARKNEHDLRNRIAELQESNFELSGSSKDRKIKSQAQFDVLVGKIKKLEGARDEVANTAAPIVQAMFLNNNGPSALDVSEIFDKLRVARIYISRTSKKLEV

SEQ ID NO: 135752 - protein, 267 aa, Oryza sativa
  Clone ID: PAT_MRT4530_37398C.1.pep
MAIWAAWHGTAQARPCLGRGLSGRHGSTDAPGRAVPAHGWHTRPRHGPILLGVCRAGPKAGVPHVGHRHNRPHEPNRNGTVLLSGQERGGGVEVAEDGGSDGAAHGEEDEAITSEKAGSAGGRPERRVRWQRRCGGGQRRLWCRPWRRGRSHHRRGSRGCGRQARARWRCRGGGGGWSLLWRRLPPPPDRQANSWIHEPPEEPVANPVPTSFRHVHAMHAGHAERVAAVGRCVLHPLPADADVLLEHIMSRPSRHFAPLLADHRPPP

SEQ ID NO: 135753 - protein, 587 aa, Oryza sativa
  Clone ID: PAT_MRT4530_37399C.1.pep
MPPAASLRDSAPAPSRLAGSPAVRAGVAPSLPLLLRLHASAATAVPSPPREAATPRLRAGATAAVRTVPFSPASPPSTLTPHRAAVPSPPWLSPAFEFDGKHDPNREDPDSLDFKVMKERMYKIFSNAIVVSYSHLLPVVPFNAFNPPPPEFALMKSNPPIAQHQSPHRQTGQGSGGPRIRSETQPSASDPVGQSDSRKRKLVPSDDEGDDTGKLKDKGTTGKPPKPTNPKKKTSSRPFPKIRKSSRKPSDIDPSEKDSDPTNLEADSSKETGPSAKDHPSDNPQASDNVEPSDEPTTASQSAEAGVGVNQEPPTGNQSDTGPSQKIPEVEAQTNSPPGKGAGNDSEIRSPAKTQESTRPRPGIITGPIIGEEEEILRIRAAEDSRPPILVKWKNEHDLRDRIAELQESNFELSGSSKENDKAELARQRDLALKEVEDRKIKSRAQFDVLVGKIKKLEGARDEVANAATPLVQAMFFNNNGSSTLNASEIFDKLRVAPDTYFKNIKEAGSMGASLALAMTKSLYPRVDIDAIDGFADGTSEEAALDLISGAQKSADKIAIDVVERFQDIDLRPTGPGNSDDEKTDTG

SEQ ID NO: 135754 - protein, 751 aa, Oryza sativa
  unsure (1)..(751): unsure at all Xaa locations
  Clone ID: PAT_MRT4530_3739C.1.pep
SNAKSSDGQKERRSAPKALSGDDIMRQYQNFNQVLVKFGKHNNKRKRSSTLYGVWKKKSIFFQLPYWSTLSIRHNLDVMHIEKNVCDSIVGTLLNLDGKTKDNIKSRFDLELMKIRHELHAPPTGDGKFLFRPACYTMTLAEKKAFCEFLREIKVPDGYSSKISHYVDATKAKISGMKCHDCHVFLHRYLPLSIRGVLPANVCEAIIELCSFLEKFXSKKLDTVILKKLASSIAVXLCKLEMIPPPSFFDVMLHLPIHLAXEAIAGEPVQYRWMYPIERFLRRLKSFVKNKARPEGSIAEAYILQECVNFCSMYLQGVETRINRPNRNEDVQSDNSSTKFQIFGTVGRPLLGNKYCQMDMNELEKARIYVLKNCEEISEYAETFTKTNLASRTVKVWKSAMTKNFLXWFKNPIFEKHSKGSPDISEELFALARGPDARVTHYTSYMINGWRFNTRDRDMLVQSQNSGVFVKGDEASGSKDYFGVLTDVXSLXYLSRHQGTFSVILFKCEWWDVHTKRVVKEDKHRFTLINTSRTLPIDEPYILATQAEQVYYVKDTRDPKWFVVVKTKPRDLYDFPPTEEEEKNDPTLSNKSSSEACQENEHITATLNYTTIDDGDFPTVLSKDGVECEPIEAEPVTHSEDDMFEEEEEEEEDSESDGAEYIDTDDEIDIQTLLVLPSVSSGCACVRPPLVLRSCRVPLPLLNLPLKLWIELDATRMQDGSRRDPAAPYRVRRAPAVGLRSQSSCSHHYGA

SEQ ID NO: 135755 - protein, 57 aa, Oryza sativa
  Clone ID: PAT_MRT4530_373C.1.pep
SRLQCLAKFAKQGKQKWTVGLVMFSIFQCQTLRAPSNKQQWIYSSAEVFTVIYTALE

SEQ ID NO: 135756 - protein, 45 aa, Oryza sativa
  Clone ID: PAT_MRT4530_37400C.1.pep
QCFDYPRPSIVRLSEASKTEIIDQFLIALNVFPGKDISLSNTMTT

SEQ ID NO: 135757 - protein, 191 aa, Oryza sativa
  Clone ID: PAT_MRT4530_37401C.1.pep
MAAQGIAEAVQAYTGLSPAAAVTILALMLATYLLVSSLFVAPDAAPPKPPPQRKEEEQQQQQEEEEAGAFVPYPDPVQVGEITLEQLAAYDGKDPAKPILIAIRGQVYDVTRGRLFYGPQGPYSLFAGRDATRALALMSFDPIDLTGDLDGLGPDELEVLQDWEDKFKERYPTVGHLASENAADGNHGGAA

SEQ ID NO: 135758 - protein, 71 aa, Oryza sativa
  Clone ID: PAT_MRT4530_37402C.1.pep
MEAHGVLPAKEIIGWRPAFSEAFPTLDTHEIVVFAHFFYGGFSLPTSRFFRGIPDPQDSCRENRSLGTSSK

SEQ ID NO: 135759 - protein, 316 aa, Oryza sativa
  unsure (1)..(316): unsure at all Xaa locations
  Clone ID: PAT_MRT4530_37403C.1.pep
GFALRVRWLWLQCSLHPYWAGLKAPVERSVSDMFAAXTFFVSRDGESTLFWTDQWIDGRLVASLAQDLLVVVPSRLRGSRTIGSGVANNSWVSDIRGALIVLVISXFLLIWDAVLPTHLSPGVEPXGRLVWQWTSDQRYSVHSAYQAFFLGQHSFAYANLLWHVKGPAKCKFFLWFGFQXRCWMADLLQKRGINSHSACPFCPHDLETANHIPLDCVFARXVWHHVLLPAGXLPSFPHGSWLXDWWPSSRACLLEHXSASFDSLVLLVSWXCGSNXNSRVFDSTLSSVSVVLESILSEGHLXSSAGIAIFEGFLGV

SEQ ID NO: 135760 - protein, 687 aa, Oryza sativa
  unsure (1)..(687): unsure at all Xaa locations
  Clone ID: PAT_MRT4530_37404C.1.pep
MPPAASLRDSAPAPSRLAGSPAVRAGVAPSLPLLLRLHASAATAVPSPPREAATPRLRAGATAAVRTVPFSPASPPSTLTPHRAAVPSPPWLSPAFEFDGKHDPNREDPDSLDFKVMKERMYKIFSNAIVVSYSHLLPVVPFNAFNPPPPEFALMKSNPPIAQHQSPHRQTGQGSGGPRIRSETQPSASDPVGQSDSRKRKLVPSDDEGDDTGKLKDKGTTGKPPKPTNPKKKTSSRPFPKIRKSSRKPSDIDPSEKDSDPTNLEADSSKETGPSAKDHPSDNPQASDNVEPSDEPTTASQSAEAGVGVNQEPPTGNQSDTGPSQKIPEVEAQTNSPPGKGAGNDSEIRSPAKTQESTRPRPGIITDSSKETGPSAKDHPSDNPQASDNVEPSDEPTTASQSXEAGVGVNQEPPTGNQSDTGPSQKIPEVEAQTNSPPGKGAGNDSEIRSPAKTQESTRPRPGIITGPIIGEEEEILRIRAAEDSRPPILVKWKNEHDLRDRIAELQESNFELSGSSKENDKAELARQRDLALKEVEDRKIKSRAQFDVLVGKIKKLEGARDEVANAATPLVQAMFFNNNGSSTLNASEIFDKLRVAPDTYFKNIKEAGSMGASLALAMTKSLYPRVDIDAIDGFADGTSEEAALDLISGAQKSADKIAIDVVERFQDIDLRPTGPGNSDDEKTDTG

SEQ ID NO: 135761 - protein, 86 aa, Oryza sativa
  Clone ID: PAT_MRT4530_37405C.1.pep
DIAYTSLYGYLDTYCYTYDYILFSTESPTEPPPTVTSDSPRHRRHGRQMSHRFSIPFRVCICSRRFSPSSALTIRLSIRHRGPCRL

SEQ ID NO: 135762 - protein, 305 aa, Oryza sativa
  Clone ID: PAT_MRT4530_37406C.1.pep
MAQKFGQRSSGEGDLPVAGGGLHERPNRVASGEKEEWAVAYVRLSLSSDAISYSSSISTDMPLYEPPEVSFDEYLLDCARMFHAMFPDESRSQRPSDTKWELRGLERGYASASFDLGIRGSLYTDRRVAGRRWKRAALAASAEASASRRELSRLQTGGPRPAAGASDATGGRVRAYCLQSAADQQQAGGCNLPICKTTKQVQNRADEARPYLGPNLTIQFTFMAEERESFESQWAPSDVTEDNLKEMVAHGVLPAKEIIGWRPASGEAFPTPDTHEIMDTWNSLPMGDEAAQAVELMERMIKLKE

SEQ ID NO: 135763 - protein, 823 aa, Oryza sativa
  Clone ID: PAT_MRT4530_37407C.1.pep
MAEEGESFESQWAPSDLIEENLKEMVAHGVLPTKEIIGWRPAFGEAFPTPDTHEVVVFSHFFYGGFSLPTSRFFRGILNFYGMSLHHLNPNSIVHIANFIHVCEAFLGIRPHFALFRRIFFLKPQPNKSKPCVVGGAGFQLRGTLSQKYFSMPFKTSNKGWHANWFYVQNPEPALPEYSCLPPVYQDTWNSLPTGDEAAQAVELMERMIKLKEQGLQGEQITRHFIKSRLAPIKERSRTAFEFDSKHDPNREDPDSLNFKVMKERMYKIFSNATVVSYSHLLPVVPFNAFNPPPPEFALMKSDPPVVQRRSPHRQTGQGSGGPKIHSEARPNTSNPAGQPDSCKRKLVSSDDESDTARKPGDREATKKLPKQATPRKKTSSRPVPKIRKSSRKPSDIDPSGKDSDPTSRETNLKETEPIAEDQPSDNQPATDNVGSGDQPPTGNESAKAGAGINQEPPTENQSDTRPSQEIPEVGARADSPRRQDASNDPMPGSPVKTQESTHPRPEIITVDTLGPMIGDEEEIPRIQATEDSRPPILVKWWDDDRQPQGIVINKQKEDEEVCLLKKALIQATRIVNRIHLRNEAKTTTLEKLVPHLGTLEATRSQLHEVRELARKTEHDLRNRISELQESNYELSGSSKASRISDLEKQVEALEKDKAELAKQRDLALKDVEDRKIKSQAQFDILVNKINRLEGARDKVANAAAPLIQAMFFNNAGSSTLDASEIFDKLRVAPDTYFKNIREAGSMGASMALAMTKSLYPKIDIDAVDGFADGTSEETALNLINDAQKAADKIVADVVERFQDVDLRPTGSDNSDNEKTDTD

SEQ ID NO: 135764 - protein, 117 aa, Oryza sativa
  Clone ID: PAT_MRT4530_37408C.1.pep
MAWRPSPEWWRGDPSVRGGVVMHPGRRGRLVASGCLPLEGARSEGRRRWSFFGAREGGGGRLRRPWRASWSVQGARFREHTSRRPVAVVALKQRSSWNGGEGCFPPCAAATVFRPGD

SEQ ID NO: 135765 - protein, 45 aa, Oryza sativa
  Clone ID: PAT_MRT4530_37409C.1.pep
METGGWDVLGAVRGLWRVGPTGRDWMEEAALQCHVALPRGGSGPR

SEQ ID NO: 135766 - protein, 153 aa, Oryza sativa
  unsure (1)..(153): unsure at all Xaa locations
  Clone ID: PAT_MRT4530_3740C.1.pep
GQRKNVPPAGLSRRVAPEVWLIAALRPSVFVLITRLLLSLVVFSAPFLPFMCFHTHFYPLASRAVSPSLFRMSCAYRAPNNSCGSLALGPRFGFVARPVLCSIGCCVRWFEVWLFEEVARVGGVDSDSVRSCAFCXXSSSXEEPWRVXFSSLL

SEQ ID NO: 135767 - protein, 780 aa, Oryza sativa
  Clone ID: PAT_MRT4530_37410C.1.pep
MAEEGESFESQWAPSDLIEENLKEMVAHGVLPTKEIIGWRPAFGEAFPTPDTHEVVVFSHFFYGGFSLPTSRFFRGILNFYGMSLHHLNPNSIVHIANFIHVCEAFLGIRPHFALFRRIFFLKPQPTRANPLPEYSCLPPVYQDTWNSLPTGDEAAQAVELMERMIKLKEQGLQGEQITRHFIKSRLAPIKERSRTAFEFDSKHDPNREDPDSLNFKVMKERMYKIFSNATVVSYSHLLPVVPFNAFNPPPPEFALMKSDPPVVQRRSPHRQTGQGSGGPKIHSEARPNTSNPAGQPDSCKRKLVSSDDESDTARKPGDREATKKLPKQATPRKKTSSRPVPKIRKSSRKPSDIDPSGKDSDPTSRETNLKETEPIAEDQPSDNQPATDNVGSGDQPPTGNESAKAGAGINQEPPTENQSDTRPSQEIPEVGARADSPRRQDASNDPMPGSPVKTQESTHPRPEIITVDTLGPMIGDEEEIPRIQATEDSRPPILVKWWDDDRQPQGIVINKQKEDEEVCLLKKALIQATRIVNRIHLRNEAKTTTLEKLVPHLGTLEATRSQLHEVRELARKTEHDLRNRISELQESNYELSGSSKASRISDLEKQVEALEKDKAELAKQRDLALKDVEDRKIKSQAQFDILVNKINRLEGARDKVANAAAPLIQAMFFNNAGSSTLDASEIFDKLRVAPDTYFKNIREAGSMGASMALAMTKSLYPKIDIDAVDGFADGTSEETALNLINDAQKAADKIVADVVERFQDVDLRPTGSDNSDNEKTDTD

SEQ ID NO: 135768 - protein, 121 aa, Oryza sativa
  unsure (1)..(121): unsure at all Xaa locations
  Clone ID: PAT_MRT4530_37411C.1.pep
MAPAAASSSALLPEGTFYTGRPVAGRTVGQRLPTRVSXARAKTTTARSSADCLFVGGRRRXAEAFRTSAMGALVEKRDVVLLGDCNSLLVDTAQGRLCRFFQGRGRQTGSCDICDCKGNRK

SEQ ID NO: 135769 - protein, 352 aa, Oryza sativa
  Clone ID: PAT_MRT4530_37412C.1.pep
MSKRSRSAMSSAGEEVEASTLITLRVKDNEGVRITCTMRRTDKLRVLIGFYLDMVTPTDKGKGAAVAAAAGGGVFMHYGRCVTGNRTPADYDMEDGDEVSFFPDGTRTMPVTLTVKDNKGRRVTHTMRRLDVICTLFRLYFDMLPSTAPREGVFMYNGREISFYQTPEKCDMNDGDEITFHLFSKPSTFVTLTIKGSTDDGGRSGVVVTRPMRRTDELQRLIDYYFAMVPTDDQNGEWAVTYGGRQVGGEETPADYEMEDGDQLRLVPASKPSRFVTIDLLTMVKAKRTYTLRRTDKLQGLMDLCLSREPASMYRHGCVLIYEGRRVQDSQTPDDLKLEDGDTIHAIARQVG

SEQ ID NO: 135770 - protein, 138 aa, Oryza sativa
  unsure (1)..(138): unsure at all Xaa locations
  Clone ID: PAT_MRT4530_37413C.1.pep
RSPSIAPPPHIAPRRLCRHPSRRAASSLPSSAAAPTSTASSRAPPRPXRAPPPAGLRRGPNRRRRPPXPGSPRRRLQLAHLRRGPDERCLQPGSTAAPTSAAAATPPTLAAEPPNVSSKLGQVRSQAAGTIDRGSGRH

SEQ ID NO: 135771 - protein, 171 aa, Oryza sativa
  unsure (1)..(171): unsure at all Xaa locations
  Clone ID: PAT_MRT4530_37414C.1.pep
VVFLVAVLMAAMMAIFVAQLSESEMKFRDRQSHRQVQDRPLDTCLQVLDRELTRRVRFQPMFQPPGALGLPMQRCQQLXDVSQECRCACIRRMVRSYEESLPMPLEQGWSPASSEYYGGXXSSSEQGYYREGSVEEGYYGEQHQQPQMTRVMLTRARHYAGHLPSQFPVEP

SEQ ID NO: 135772 - protein, 77 aa, Oryza sativa
  Clone ID: PAT_MRT4530_37415C.1.pep
MAEKLGPEKRHAFVHNGQKVFEWDQTLEDVNMYIELPRGQDSTSPRLSSPEPALTQEPSWVEFALTEAWPNVMYLAK

SEQ ID NO: 135773 - protein, 75 aa, Oryza sativa
  Clone ID: PAT_MRT4530_37416C.1.pep
VIGQWREGGGMGFWIAEVLFAPVGGERIESGFVPWRSVSEQLSSERCAASGRFAPRTNNPRAKTGKKKKKKKKRT

SEQ ID NO: 135774 - protein, 291 aa, Oryza sativa
  Clone ID: PAT_MRT4530_37417C.1.pep
MSSSATRGEADSPSPEVEPSVLVTLRVKDSEGVRITRTMRRTDKLRDLTDFYLAMVVPAAVAQGHVCRPVGVFMHYGRRVTGYETPADYDMDDGDEVSFFPDRVMSLPVTLTVKDSKGRTVTRTMRRIEKLNVLFDLYHPMFRVPWPQASVTRTMHRTDKLQDLIDFYDAMVPADKYCDGECQVVYGGKTVEGEKTPADCEMEDGDQIKRMSSMFVTVTVGFVSLGKNIEHAHTLRRTDKLQGLMDLCSSMMPSRYKHGCRFLFDGRFVLGSQTPDDLAQEDVDMIDLTCY

SEQ ID NO: 135775 - protein, 87 aa, Oryza sativa
  Clone ID: PAT_MRT4530_37418C.1.pep
MENENEHEHEQRRPQPSESTRCRRLTAAGGGRARERRNGDGGRVVAILLKILNCIYFHLPHQRIKNGPKKTYGEDSVDQQTAYMKAT

SEQ ID NO: 135776 - protein, 57 aa, Oryza sativa
  Clone ID: PAT_MRT4530_37419C.1.pep
MYILQSIACILVVYQTVTSVFPSRRRKDHHRRGQFRVDSSAVDSQWCVCLSPPPPAE

SEQ ID NO: 135777 - protein, 104 aa, Oryza sativa
  unsure (1)..(104): unsure at all Xaa locations
  Clone ID: PAT_MRT4530_3741C.1.pep
DNTIFFNKDSSVDKVNDHAREKITIDIALRTPQTLXHYCTCINAPGNRKSMKNLSGVNSITXCAEVIIDSTNVGMEIGDCKYGQYSAHDHIALNRGVRLMSCCS

SEQ ID NO: 135778 - protein, 95 aa, Oryza sativa
  Clone ID: PAT_MRT4530_37420C.1.pep
SFYSRCPSKWPKLPEPSLSLPLLRKSGTDEPNNKSALVPTSASMPRRKQGRMLRAAVRRNEEWMMMSNRDEHQSCMPQASSFSRAFTVVTSIGIR

SEQ ID NO: 135779 - protein, 745 aa, Oryza sativa
  Clone ID: PAT_MRT4530_37421C.1.pep
MDLGKSTSTNASLKKLQEEGALPGRGVMEREVGGTEPQPVLGRMVAIEDNILCGFLPPPSEFLLLVLHFYGLSLLHLNPNSIAFLSIFAHLCEAYIGVEPFLDLFRFYYELRWMESNRVSGCVGFRLRDGLKSRYIPFQCTSSRSKWRARWFYLQIENSDPVFVVPEEQPDKISSWTAKPALTPSLQSFIDAIDDLRVRGLDSATVERRVGQLMISGPTTADDVPVPLCEKEATEREAAINALPLTDAIGPLVDHQAAALLKEGIAQEASDVAVAATTSGSRVPRIGRKFTSVLGSRRRASSPSAKAAQDRSGGNSSASPAVASTDVVVVPRSREATPSGPASDLGPTRGPSADVLTWGEFQAEMGRILEAGAHGISREIAEARAAAASSANERADKLEHDLAEGRMSELENNLSEIRGSLRVTYTGLHQLAGECGVTTTIPANPDEFSLTSSLAELATTMEAIPSKHAARIVEEASNGIYTGACHVLACVRLAHPELDLRQILDRGAANDARKGVMEEIGELGESVLPLFEEYVDVEDVQQRGQPELPVVVPAIALQPYVSQDDVGQSLPVNTDLESRLADQDRRIQYWKTKCEVAELERAMLEVRKDQAVEALRGREVWFDSYLKSCCTSMSRVCRELRVPRGDPEESAAGYISWLNGACAQLEGIGQRIDEALKQECRRSSRYAGGHVLACIRDHRPQLHLEVLREGFSRSRRTPTEIDGLAKSMVPLAEKVFQSMDWRWPS

SEQ ID NO: 135780 - protein, 678 aa, Oryza sativa
  Clone ID: PAT_MRT4530_37422C.1.pep
MEREVGVTEPQPVLGRMVAIEDYILCGFLPPPSEFLLLVLHFYSLSLLHLNSNSIAFLSIFAHLCEAYIGVEPFLDLFRFYYELRWMESTRVSGCVGFRLRDGLKSCYIPFQCPSSRSKWRARWFYLQIENSDPVFVIPEEQPDKISSWTAKPALTPSLQSFIDGIDDLRVRGLSGYEVATNFVGLDSATVERRVGQLMISGPTTANDVPVPLFEKEATEREAAINALPLTDAIGLLVDHQAAASLKEGVAQEASDVAVAATTSGSRVPRIGRKFTSVLGSCRIASSPSAVAASPPPSRWRKLVTLGEKSTQAKAAQDRSGGNSSASPAVASTDVVVVPRSREATPSRPASDLGPTRGPSADVLTWGEFQAEMGRILEAGVRGISREIAEARVAGASSANERADKLEHDLAELAEECGVTTTIPANSDEFSLTSSLAELATAMEAIPSKHAARIAEEVSNGIYTGACHVLACVRLAHPELDLRQILDWGAANDARKGVMEEIGELGESVLPLFEEDVDVEDVQQRGQPELPVVVPAIALQPYVSQDDVGHSLPVNTDLESRLADQNRCIQYWKTKCEVAELERAMLEVRKDQAVEALRGRECVRVPPQFPTLASRLSCTLSLDPSLVVGGFFSEDMALGPLTRPGLTWSFVSTESDKALSALGVPSRRSLRFLGGLVS

SEQ ID NO: 135781 - protein, 181 aa, Oryza sativa
  Clone ID: PAT_MRT4530_37423C.1.pep
MKRKSGGGGKRRKGAAAAAARGGRERRRGDPRRRPAVKGRSGGGGSRRKGVAAAGSAPAPGREGKERRRREAEEGGGGGSWRKGAAAAGSAPAPGRRGLRRRLAEEGSDGDAFLDLLRRKSTLPTSELFCRLRAAVAAESASGRGGSGHAPFLQETLGDDGSGVRYPDRCSRRRWLSSRLT

SEQ ID NO: 135782 - protein, 679 aa, Oryza sativa
  Clone ID: PAT_MRT4530_37424C.1.pep
MAEERESFESQWALSDVTEDNLKEMVAHGVLPAKEIIGWRPAFGEVFPTPDTHEIMDTWNSLPMGDEAAQAVELMERMLKLKEQGLQGEQITRHFIKSRLAPIKERSHTAFEFDGKHDPNREDPDSLDFKVMKERMYKIFSNAIVVSYSHLLPVVPLNAFNPPPPQTGQASGGPKIRSDARPSASDPVGQSDARKRKLVLSDEKGDDTGRLGDREATGKSPKPTNPKKKTSSRPLPKIRKSSSITQTRRKPSDIDPSEKDPEPADIEANRSKETGPTAEDRPSNKQPATNNVEPSNEPPTGNQSAEAEVGANQEPPTGNRSDAGPSQKIPEVEAQTNSPLGKDADSESETRSPVKTPKSTRPRPGIITGPIIGDEEEILRIQAAEDSCPPILVKWWDDNMQPQGIVINKQKEDEELCLLKKALGQATRIVNRIHLRNEAKTVTLERLVPHLGTLEATRNQLHEAKELARKNEHDLRDRIAELQESNFELSGSSKVQAAKISQLEKQIQILENDKAELARQRDLALKEVEDGKIKSQTQFDILVGKIKKLEGARDEVANAVAPFVQAMFFNNNGPSALDASEIFDKLRVAPDTYFKSIKEAGSMGASLALAMTKSLYPRVDVDAIDGFAYGTSEGAALDLISDAQKSADKIAVDVVERFQDTDLRPTGPDNSDDEKTDTD

SEQ ID NO: 135783 - protein, 187 aa, Oryza sativa
  Clone ID: PAT_MRT4530_37425C.1.pep
MVASCVGWRIGRGGRSSEPVPAVVPVAVAPPPRGSRRRREARRRVRTPAAEEDDDGAASARVALKLASLTALLWLPALVGLLIGCSTSTTIGFAAASSSTLCLADHRIRHRLLLLQATQVPGIMGTRYQVSRVPDANQSVISSLACFVNVADVEQSSVVALSTSLLVKVLTGVRLRGPKQRLRLNRR

SEQ ID NO: 135784 - protein, 802 aa, Oryza sativa
  Clone ID: PAT_MRT4530_37426C.1.pep
MAEEKESFESQWAPSDVTEDNLKEMVAHGVLPAKEIIGWRPTFGEAFPTPDTHEIVVFAHFFYGGFSLPTSRFFRGILNFYGISLHHLNPNSIVHIANFIHACEAFLGIRPHFALFRRIFFLKPQPNKSKPCVVGGAGFQLRGTLSQKYFSMPFKTSNKGWHANWFYVQNPEPVLPEYSCLPPVYRDTWNSLPMGDEAAQACRLAPIKERSRTAFEFDGKHDPNREDPDSLDFKVMKERMYKIFSNAIVVSYSHLLPVVPFNAFNPPPPEFALMKSDPPIAQCRSPRQQTGQASGGPKIRSDTRLSASDPVGQSDARKRKLVLSDEEGDDTGRLGDKGATGKSPKPTNPKKKTSSRPLPKIKKFSSITQTRRKPSDIDPSEKDPEPAGIEANPSKETGPTAEDRPSDKQPATDNVEPSNEPPTGNQSAEAEIGANQEPPTGNQSNAGPRQKIPEVEAQTNSPLGKDADNESETRSSVKTPKSTRPRQGIIIGPIIGDEEEILRIQVAEDSRPPILVKWWDDNMQPQGIVINKQKEDEELCLLKKALGQATRIVNRIHLRNEAKTVTLERLVPHLGTLEATRNQLHEAKELARKNEHDLRDRIAELQESNFELSGSSKVQAAKISQLEKQIQILENDKAELARQRDLALKEVEDRKIKSQAQFDVLVGKIKKLEGARDEVANAAAPIVQAMFFNNNGPSALDASEIFDKLRVAPDTYFKNIKEAGSMGASLALAMTKSLYPRVDVDAIDGFADGTSEEAALDLISDAQKSADKIAVDVVERFQDTDLRPTGPDNSDDEKTDTD

SEQ ID NO: 135785 - protein, 200 aa, Oryza sativa
  unsure (1)..(200): unsure at all Xaa locations
  Clone ID: PAT_MRT4530_37427C.1.pep
MMDINIQKTYTTGFRDNSTKMTMVASCAGWRVGRGGRSSEPVPAVVPVAVAPPPRGRGDDEELGDRCGEXRGRVGAGRGGRCWRRGRRCXGGSFSCRLKTSAAEEDDDGAAPARVALKLASLTALLWLPALVGLLIGCPTLTTIGFTAASSSTLRLADHRIRXPPPRPAPPRGCLLLSPSLSPPSPPGYQVSGTRYHGTR

SEQ ID NO: 135786 - protein, 162 aa, Oryza sativa
  Clone ID: PAT_MRT4530_37428C.1.pep
FFFFLSVLPRCGESFSPRRVTTVGTLWLCHFASGLGSCTYAPSALCWAASAATIVSHMSFLSTYLTLPRPLVTVICRAVRWNRSFSPRSMGPARASATPRPPAPRRTPSSAPSPPSSFCVWVATCSLRDLLPISCAARPPPPPCPYLMAPGRHTTDPLTCWS

SEQ ID NO: 135787 - protein, 798 aa, Oryza sativa
  Clone ID: PAT_MRT4530_37429C.1.pep
MAEERESFESQWAPSDVIEDNLKEMVAHDVLPAKEIIGWRPVFGEAFPTPDTHKIVVFAHFFYGGFSLPTSRFFRGILNFYGISLHHLNPNSIVHIANFIHGCEAFLGIRPHFALFCRIFFLKPQPNKSKPCVVGGAGFQLRGTLSQKYFSMPFKTSNKGWHANWFYVQNPEPILPEYSCLPPVYRDTWNSLPMGDEAAQAVELMERMIKLKEQGLQGEQITRHFIKCRLAPIKERSRTAFEFDGKHDPNREDPDSLDFKFMKERMYKIFSNAIVVSYSHLLPVIPFNAFNPPPPEFALMKSDPPIAQRRSPRHQTGQGSRGPRIRSETQPSASDPVSQSDSRKRKLVLSDDEADDTTRRPGDRETTKKLPKQATPRKKTSSRPVPKIRKKPSDIDPSGKDSDPTNTDTSSSKETGPTARNHPSDNQPATDNVESGDQPPTRNQSAEAKAGVNQEPPTRNQSDVGPSQEISEVETQADSPRGQNASNNQRSGSPLKASESTRPRPGIITAEDSCPPILVKWWDDNLQPQGIVINRQKEDEEVCLLKKALNQATRIVNRIHLRNEVKTATLERLVPHLGTLEATKSQLHEARELAKKNEHDLRDRIAELQESNFELSGSSKVNVVQAAKISQLEKQIQTLENDKVELARQRDSALKEVEDRKIKSQAQFDVLVDKINKLEGARDKAMFFNNAGSSTLDATEIFDKLRVAPDTYFKNIKDAGSMGASLALAMTKSLYPRVDMDAIDGFADGTSEEAALDLISDAQKAADKIAADVVERFQDVDLGPTGSDKSDDEKTDTD

SEQ ID NO: 135788 - protein, 75 aa, Oryza sativa
  Clone ID: PAT_MRT4530_3742C.1.pep
QHQLISSLKSHQTKLQAGEFFLNEEVLQQLLTATATRCSRSKAVVGSFSCFAAVRIKVRLSLAHHGDAAVDFRRA

SEQ ID NO: 135789 - protein, 169 aa, Oryza sativa
  unsure (1)..(169): unsure at all Xaa locations
  Clone ID: PAT_MRT4530_37430C.1.pep
MTPTKFAVSPPQVRHRDPPTLPSCAGWRVGRGGRSSEPVPAVVPVAVAPPXGARGDDEELGDWCGEQEGEXVAGHGGRPLPASPPPPRRPAPAPPPACWRRGRRXWRELLLSAQTPAAAEDDDGAASARVALKLASLTALLWLPALVGLLIGWSTSTTIGFCAASSSTL

SEQ ID NO: 135790 - protein, 735 aa, Oryza sativa
  Clone ID: PAT_MRT4530_37431C.1.pep
MAEERESYESQWAPSDVTEENLKEMVAHGLLPAKEIIGWRPAFGEAFPTPDTHEVVVFAHFFYGGFSLPTSRFFRGILNIYGISLHHLNPNSIVHIANFIHACEAFLGIRPHFALFRRIFFLKPQPNKNKLCVVGGANFQLRGTLSQKYFSMPFKTSNKGWHANWFYVQNPEPTLPEYSCLPPVYQDTWNSLPMGDEAAQAVELMERMIKLKEQGLQGEQITRHFIKSRLAPIKERSRTAFEFDGKHDPNREDPDSLDFKVMKESMYKIFSNAIVVSYSHLLPVVPFNAFNPPPPCGNNTDNQTCRKPSDIDPSGKDSDPTNIGTNLKETEPTAEDQPSDNQPVTDNVGSGDQPPTGNESAEAGAGINQEPLIENQSDTRPSQEIPEVGARADSPRRQDASNDPMPGSPVKAQESTRPRPEIITGLMISDEEEIPRIQAAEDSRPPILVKWWDNDRQPQGIVINKQKEDEEVCLLKKALSEATRIVNRIHLRNEAKTATLEKLVPHLGTLEATRSQLHEVRELARKTEHDLRNRISELQESNYELSGSSKVQAARISDLEKQVEALEKDKAELAKQRDLALKDVEDRKIKSQAQFDVLVNKINRLEGARDKVANAATPLIQAMFFNNAGPSTLDASEIFDKLRVAPDTYFKNIREARSMGASMTLAMTKSLYPKIDIVAVDGFADGTSEETTLNLINDAQKAADKIAADVVERFQDVDLRPTGSDNSDDEKTDTD

SEQ ID NO: 135791 - protein, 90 aa, Oryza sativa
  unsure (1)..(90): unsure at all Xaa locations
  Clone ID: PAT_MRT4530_37432C.1.pep
MEQLFIMIKPDGVQRGXLIGDIISRIEKKGFYLRGMKFMNVERTFAQQHYDDLTDKAFLPGIEEYIIYGPLDTMVWEGKDAVDTGRRIIG

SEQ ID NO: 135792 - protein, 762 aa, Oryza sativa
  Clone ID: PAT_MRT4530_37433C.1.pep
MAEERESFESQWAPSDVTEDNLKEMVAHGVLPAKEIIGWRPVFGEAFPTPDTHEIVVFAHFFYGGFSLPTSRFFRGILNFYGISLHHLNPDYIVHIANFIHHDPNREDPDSLDFKVMKERMYKIFSNAIVVSYSHLLPVVPFNAFNPPPPEFALMKSDPPIAQRRSPRHQTGQGSGGPRIRSETQPSASDPVGQSDSRKRKLVLSDDEADDTTRRPEDRETTKKLPKQATPRKKTSSRPAPKIRKSSRKPSDIDPSGKDSDPTNMDTSSSKETGPTVGDHPSDNQPATDHVESANTLGPMIGDEEEIPRIQAAEDSCPPILVKWWDDNLQPQGIVINRQKEDEEVCLPKKALNQATRIVNRIHLRNEAKTATLEKLVPHLGTLEATRSQLHEARELAKKNEHDLRDRIAELQESNFELSGSSKVQAAKIFQLEKQIQTLENDKAELARQRDLALKEVEDRKIKSQAQFDVLVDKINKLEGARDKVANAATPLIQAMFFNNAGSSTLDAAEIFDKLRVAPDTYFKNIKEVGSMGASLALAMTKSLYPRVDIDAIDGFADGTSEEAALDLISDAQKAADKIAADVVERFQDVDLRPTGLPPRRRLLRFRRTVAVLVHLSVSVTDRRNATVPVDPSRATASLRSGRLLRRRRCLGVSRGPPPRFPLSVPSLGRHSAVPMAAAGDHRGEGASSRRPCRPGHPRARRVAATWGPAVSRPCPQVRLTRGTHGAGRCEPGCTRSTVDRESAAWAPLPWTRSARPSPSAC

SEQ ID NO: 135793 - protein, 781 aa, Oryza sativa
  Clone ID: PAT_MRT4530_37434C.1.pep
MAEERESFESQWASSDVTEDNLKEMVAHGVLPAKEIIGWRPAFGEAFPTPDTHEIVVFAHFFYGGFSLPTSRFFRGIMNFYRISLHHLNPNSIVHIANFIHACEAFLGIRPHFALFCRIFFLKPQPNKSKPCVVGGAGFQLRGTLSQKYFSMPFKTSNKGWHANWFYVQNPEPALPEYSCLPPVYRDTWNSLPMGDEAAQAVELMERMIKLKEQGLQGEQITRHFIKCRLAPIKERSRTAFEFDGKHDPNREDPDSLDFKVMKERMYKIFSNAIVVSYSHLLPVVPFNAFNPPPPEFALMKSDPPIAQRQSPHRQTGQGSGGPRIRSETQPSAPDPVGQPNSRKRKLVLSDDEGDTARKLGDREATNKLPKQATPRKKTSSRLVPKIRKSSSNNVEPSDEPPTGNQSAEAEAGVNQEPPTGNQSDAGPSQEILEVETQADNPRGQDASNDWRSGSPLRASESTRPRPEIITVDTLGPMIGDEEEIHRGQVDTLCRRFVLSHSGIVINRQKEDEEVCLLKKALNQATCIVNRIHLRNEAKTATLEKLVPHLGTLETTRSQLHEARELARKNEHDLRDRIAKLQESNFELSGSSKVNVVQAAKISQLEKQIQTLENDKAELARQWDSALKEVEDRKIKSQAQFDVLVDKINKLEGARDKVANAATPLIQAMFFNNAGSSTLDTAEIFDKLRVAPDTYFKNIKEAGSMGASLALAMTKSLYPRVDMDAIDGFADGTSEEAALDLINDAQKAADKIAADVVERFQEVDLRPTGSDKSDDEKTDTD

SEQ ID NO: 135794 - protein, 725 aa, Oryza sativa
  Clone ID: PAT_MRT4530_37435C.1.pep
MAEERESFESQWAPSDVTEENLKEMVVHGVLPTKEIIGWRPAFGKAFPTPDTHEIVPNKSKLCVVGGAGFQLRGTLSQKYFSMPFKTSNKGWHANWFYVQNPKPALPEYSCLPPVYQDTWNSLPTGDEAAQAVELMERMIKLKEQGLQGEQITWHFIKSRLAPIKERSRTAFEFDGKHDPNREDPDSLNFKIMKERMYKIFSNAIVSSNADHPTAKPVKGAGVPRPVLKPGQILPIQPDLRKRKLVSSDDESDTARKPGDREATKKLPKQATPRKKTSSCPVPKIRKSSRNNTDQPDLRKRKLVSSDDESDTARKPGDREATKKLPKQATPRKKTSSCPVPKIRKSSRKPSDIDPSGKDSDPTSRETNLKGIEPTDEDQPSHSQPATDNVGSGDQPPTENESAEAGAGVNQEPPTKNQSDTRPSQEIPEVGARADSPRRQDASNDPMPGSPIKVQESTRSRPEIITVDTLGPMIGDEEEIPRIQAAEDSHPSILVKWWDDDRQPQGIIINKQKEDEEVCLLKKALSQATRIVNRIHLRNEAKTTTLEKLVPHLGTLEATKSQLHEVRELARKTEHDLRNRISELQKSNYELSGSSKGARDKVANAATLLIQAMFFNNAGSSTLDASEIFDKLRVAPDTYFKNIREVGCMGASMALAMTKSLYPKIDIDAVDGFADGTSEETALNLINDAQKAADKIAADIVERFQDGDLRPTGSDNSDDEKTDTD

SEQ ID NO: 135795 - protein, 114 aa, Oryza sativa
  Clone ID: PAT_MRT4530_37436C.1.pep
DAGVTFSATTDASRSTPGGKPCPGFPDDPLAGGVGGALFLPPLRPGSVRRRRRISGGRGPRRSAPRGDRATTGERGPGWWSYWARRHGSEQAQAWPNSHSIYNPPPGGEVADGR

SEQ ID NO: 135796 - protein, 774 aa, Oryza sativa
  Clone ID: PAT_MRT4530_37437C.1.pep
MAEERESFESQWAPSDVTEDNLKEMVAHGVLPAKEIIGWRPAFGEAFPTSDTHEIVVFAHFFYGGFSLPTSRFFRGILNFYGISLHHLNPNSIVHIANFIHACEAFLGIRPHFALFRCIFFLKPQPNKSKPCIVGGAGFQLRGTLSQKYFSMPFKTSNKGWHANWFYVQNPEPVLLEYSCLPPVYRDTWNSLPMGDEAAQAVELMERMIKLKEQGLQGEQITRHFIKCRLAPIKERSRTAFEFDGKHDPNREDPDSLDFKVMKERMYKIFSNAIVVSYLHLLPVVPFNAFNPPPPEFALMKSDPPIAQRRSPRHQTGQGSGGPRIRSETQPSASDPIGQSDSRKRKLVLSDDEADDTARRPGDRETTKKLPKQATPRKPSDIDPSGKDSDPTNVDTSSSKETEPTAEDHLSDNQPATDNVESGDQPPTGIQSAEAEAGVNQEPPTGNQSDAGPSQEIPEVETQADNPRGQDASNDRRSGSPLKVSESTRPRPEIITGPMIGDEEEIPRIQTAEDSCPPILVKWWDDNLQPQGIVINRQKEDEEVCLLKKALNQATRIVNRIHLRNEAKTATLERLVPHLGTLEATRSQLHEARELTKKNEHDLRDRIAELQESNFELSGSSKVNVVQAAKISQLEKQIQTLENDKAELARQRDSALKEVEDRKIKSQAQFDVLVDKINKLEGAKDKVANAATPLIQAMFFNNAGSSTLDAAEIFDKLRVATDTYFKNIKEAGSMGASLALAMTKSLYPRVDIDAIDGFVDGTSEEAALDLISDA

SEQ ID NO: 135797 - protein, 159 aa, Oryza sativa
  unsure (1)..(159): unsure at all Xaa locations
  Clone ID: PAT_MRT4530_37438C.1.pep
YLCLQSASTALLTKISTKLETLTKLATQLLSKAIPARFIFSRVFTWSLICDLAYFTEITARFNDFVGYLDLAAGKPFLLQXRLRQNXVWVELKKIWQTKKKWPNGFXIKKWKGGYSIAIVGFITFLPFKKLKXIVNYRFIVDSSDRTDIVIIAVDQTRT

SEQ ID NO: 135798 - protein, 66 aa, Oryza sativa
  unsure (1)..(66): unsure at all Xaa locations
  Clone ID: PAT_MRT4530_37439C.1.pep
XXRACLVREKKIFICHIRYFTGCRKRFSDTNEKTNFITRFREKKFFICHIRYFTGCRRGFRIRMKK

SEQ ID NO: 135799 - protein, 1544 aa, Oryza sativa
  Clone ID: PAT_MRT4530_3743C.1.pep
MATCINGGELQVRVVSRRLVQASDESLRPHVLAVSNLDLLPQSIQVSMICIYPNPPTSAGGFHDVVAAFAAGLPSLLNHFFPLADRIAVNPCSGLPEIHCYNQGAELVVGEADVALASLDYGRVGESIQKILLPYAGDVALSVQYWNDPAMSYTPPGRRGGGGGGGSGNGRGGASGSGGGNGADGALLPLVSQGRDASHTARLPVLSRTNYPDWALLMRVNLQAQGLWTAIDPGYAEFREDWAALSAILQAVPREMLRGLAKHDTAKAAWDAIKTMRVGVDRVREAKEQGFRRQFESMRFKERETPEEFAMRLTAVVADIRDMGGVMEDEHVNKKLLRVVPKKYKPVAISLEQLLDVKTMALEELVGRLSTVDSYSDDEEGSDGGKLYLTEEQWQARVKQREQEGSGNSGNKGRGAPGTQNHRGKPGGSPKGKEAATGANSSRDISRVKCFNCDEFGHYARQCRKPRRQRRGEANLVQAAEEEPTLLMAHVVGVSLAGEATLGRTPGGQEVHLTEKKVILDHEDGGEEEVTRDWFLDTGATNHMTGVRSAFAELDTGVVGTVKFGDGSVIEIQGRGTVVFRCKNGDHRSLDTVYYIPKLRKNIISVGRLDARGYDAHIWGGVCTLRDPDGLLLAKVKRDINYLYILKLHIANPVCMAASGGDTAWRWHARFGHLNFQSLRRLAQGNMVRGLPIIDHTDQLCDGCLAGKQRRLPFPEEAKFRAQEALELVHGDLCGPITPATPGGRKYFLLLVDDMSRHMWIRLLSGKHEAATAIKQFQVGVELESGRKLRALRTDRGGEFTSVEFMDYCADHGMRRELTAPYSPQQNGVVERRNQTVVAAARSMLKAAGMPACFWGEAVVAAVYVLNRSPTKALNGVTPHEAWHGRRPSVEHLRVFGCVGYVKTVKPNLRKLDDRGTRMVFIGYEQGSKAYRMYDPVVRRVCVSRDVVFDEAATWAWRDPETEATEEEEFTVDFFVNPVDSVVADLGEQASTPVQGGTYPASTATPPSPPEVPAGVEFCSPPNSVTPGTNEGPIRYRRVQDILSATEPVLDFDYSDQCLLASEEPMSLAEAEQQLCWRQAMQEELKSIEDNQTWSFAELPVGHKAIGLKWVYKVKKDPSGVVVKHKARLVAKGYVQQQGIDFEEVFAPVARMETVRLLIAVAANKGWEIHHMDVKSAFLNGDLEEEVYVVQPPGFIEKGKEGQVLRLKKALYGLKQAPRAWNAKLHNTLISLNFIKSETESAVYEEMKKKFRMSDLGLLSYYLGMEVVQKDDGVFLSQTAYAAKILEKTGMEGCNSTQVPMEARLKLKRESGGEGVDSTMYRSTVGSLRYLVNTRPDLAYSVGYVSRFMEKPTSEHWAAVKHILRYIAGTLDVGCWFGRREKGELRLIGFSDSDMAGDLDDRKSTTGVLYMLGDSLISWQSQKQKVVALSSCEAEYIAATTGACQGIWLNRLLAELLGEDPGQTVMKVDNKSAINLCKNPVLHDRSKHIDTRFHFIRECVEKKQIAVEYVRTEDQLADILTKPVGRVRFLELRKKMGLEQAHQD

SEQ ID NO: 135800 - protein, 66 aa, Oryza sativa
  unsure (1)..(66): unsure at all Xaa locations
  Clone ID: PAT_MRT4530_37440C.1.pep
QSLYLGIXVXRAIARPLDLRLFXDLCIDRDLAQAQALLAFNLPSTYGIXPWYYSAPGNIPPLGGIL

SEQ ID NO: 135801 - protein, 77 aa, Oryza sativa
  Clone ID: PAT_MRT4530_37441C.1.pep
ILFQRPRAAPMSIINNEFKSLPHPPKVEFTIIHVYGDLVEESELETDFSILSKIIKARLSSPLQDYKGYTWEPFHKQ

SEQ ID NO: 135802 - protein, 219 aa, Oryza sativa
  Clone ID: PAT_MRT4530_37442C.1.pep
MGCCRMGTTVGNGTVDAHGESWEAEQLYVCNDSVLPTAVGINPMITVQSVAYCVAKGIADSLSGGVDSWVVEDFGAGRWGRSSSLRETTSRSTFHSSPMLSKACHRQPSAKELRLHTAGLYRHPTVSPHLSRHREAVASPLCCRRRRIPLPRRPVMWRMAFSSTIAQPHPGGMPNSAPVKDSLWPTMLHHWCPGRLVFASIADRAQSPVPPGDHSPSSP

SEQ ID NO: 135803 - protein, 199 aa, Oryza sativa
  Clone ID: PAT_MRT4530_37443C.1.pep
MEAKTSRPGHQWWSMVGQRLSLTGALLGIPPGCGCAMVEEKAIRHITGRRGRGMRRRRQHKGEATASPDALCANPSVLLEVRPCWIDDRQRQIEERPPSWRFFPPRIHHPHRLQLLPYRRREARGGGRGVIELVVIAQSMRRQRWTRQGKYGGGRDGATRWGACRGRRCGDEAPWQMVGGDKPWTTSASCGTSTSRLFP

SEQ ID NO: 135804 - protein, 184 aa, Oryza sativa
  Clone ID: PAT_MRT4530_37444C.1.pep
MESTVANLNSALVADAGPPPPQDPLQNDEVLEDANAANGPMPTTKIEFSDIDYPSLTTTPGRYPIVVKPTIQNVLVARFLIDGGSSINLLFLSALDAMGIPRSELIPSEQPFHGITPESSSRITTLTKFMAASHYAYQLIKIPGPKRIITVPGNAKMAVQCDKMSLDIVEQTTAVPPQSSLLGK

SEQ ID NO: 135805 - protein, 208 aa, Oryza sativa
  unsure (1)..(208): unsure at all Xaa locations
  Clone ID: PAT_MRT4530_37445C.1.pep
MDAKEEAVEQEGGAAADKAKDIPVTSNGKTDAGGNEVAEMKVEKLENGDGHLKADGDSNGDNKGADGEKQLMLASAGEDVEDPVLSKLASNSFMFDYSCGGDDSGTEEEQAAFMKELERFYREKLMEFKPPKFYGEGLNCLKLWRQVTGLGGYDQVTSCXLWRQVGESFXPPKTCTTVSWTFRNFYEKALLXYEKHKIETGEFQVAAS

SEQ ID NO: 135806 - protein, 168 aa, Oryza sativa
  unsure (1)..(168): unsure at all Xaa locations
  Clone ID: PAT_MRT4530_37446C.1.pep
PGLTSARVARRRHAGPTGQRHGEGGLPWTGTTRVIHRRSTGPTARIALGPIGRTAAAAAXPGLGSASKPIGRPGASGGGACASRRWRRQPAAEATRKRRQRMAATTQSDGERGRRRRTGKRGRRGEEMPHRGWPARRKTMANGDGKPRGATATGGRAPACPKEGEGRD

SEQ ID NO: 135807 - protein, 59 aa, Oryza sativa
  Clone ID: PAT_MRT4530_37447C.1.pep
MPFLTSLGHSRRRQVTEDYCRHNTRYGCGGGSVAVHEERGDNGDTYIEAMTGVHVGSGA

SEQ ID NO: 135808 - protein, 473 aa, Oryza sativa
  unsure (1)..(473): unsure at all Xaa locations
  Clone ID: PAT_MRT4530_37448C.1.pep
MAQFRSAPVESEAEPGADGPVDEANAVEEEKSGKGEDGIEEAADTVDSVKDSAKPEGMDAKEEAVEQEGGAAADKAKDIPVTSNGKTDAGGNEVAEMKVEKLENGDGHLKADGDSNGDNKGADGEKQLMLASAGEDVEDPVLSKLASNSFMFDYSCGGDDSGTEEEQAAFMKELERFYREKLMEFKPPKFYGEGLNCLKLXKQVTGLFCRQVTRLGSXLGVHEQVTSCKLWRQVGESFKPPKTCTTVSWTFRNFYEKALLEYEKHKIETGEFQVAASNLTERITSESQVGIHASGSGRARRESATRAMQGWHSQRLLGNGEIADPIIKDKGTVSVLKKDKTPKSSGSAKRKRTPTLEDDRIVPYKPDKLQNDSMVLDLGPPADWVKINVRRTKDCYEVYALVPGLLREEVHVQSDPAGRLIVTGEPEQLDNPWGVTPFKKVISLPSRIDPHQTSAVVTLHGQLFVRAPFEQSK

SEQ ID NO: 135809 - protein, 197 aa, Oryza sativa
  Clone ID: PAT_MRT4530_37449C.1.pep
MGSSGEIGEMGKKRERGTAMLKKGEREPDVAGSGGIRRPTWGSGEEREAGFGFRIPAISGAGANGRERGKGAGDAAHARAWPTWPGRDGGVGAAAVSARRRAGDRREVGEGPDRWAPPVGDPERGGGRRLPDWALGLRPAQQGGGGGRRGMGRRPIRKEKRREKGREKKKKKKKRVFLGIKNCTLVIFNWLKLFLEL

SEQ ID NO: 135810 - protein, 1426 aa, Oryza sativa
  Clone ID: PAT_MRT4530_3744C.1.pep
MSYTPPGRRGGGGGGGSGNGRGGASGSGGGNGADGALLPLVSQGRDASHTARLPVLSRTNYPDWALLMRVNLQAQGLWTAIDPGYAEFREDRAALSAILQAVPREMLRGLAKHDTAKAAWDAIKTMRVGVDRVREAKEKGFRRQFESMRFKERETPEEFAMRLTAVVADIRDMGGVMEDEHVNKKLLRVVPKKYKPVAISLEQLLDVKTMALEELVGRLSTVDSYSDDEEGSDGGKLYLTEEQWQARVKQREQEGSGNSGNKGRGAPGTQNHRGKPGGSPKGKEAATGANSSRDISRVKCFNCDEFGHYARQCRKPRRQRRGEANLVQAAEEEPTLLMAHVVGVSLAGEATLGRTPGGQEVHLTEKKVILDHEDGGEEEVTRDWFLDTGATNHMTGVRSAFAELDTGVVGTVKFGDGSVIEIQGRGTVVFRCKNSDHRSLDTVYYIPKLRKNIISVGRLDARGYDAHIWGGVCTLRDPDGLLLAKVKRDINYLYILKLHIANPVCMAASGGDMAWRWHARFGHLNFQSLRRLAQGNMVRGLPIIDHTDQLCDGCLAGKQRRLPFPEEAKFRAQEALELVHGDLCGPITPATPGGRKYFLLLVDDMSRHMWIRLLSGKHEAATAIKQFQVGVELESGRKLRALRTDRGGEFTSVEFMDYCADHGMRRELTAPYSPQQNGVVERRNQTVVAAARSMLKAAGMPACFWGEAVVAAVYVLNRSPTKALNGVTPHEAWHGRRPSVEHLRVFGCVGYVKTVKPNLRKLDDRGTRMVFIGYEQGSKAYRMYDPVARRVCVSRDVVFDEAATWAWRDPETEATEEEEFTVDFFVNPVDSVVADLGEQASTPVQGGTYPASTATPPSPPEVPAGVEFCSPPNSVTPGTNEGPIRYRRVQDILSATEPVLDFDYSDQCLLASEEPMSLAEAEQQLCWRQAMQEELKSIEDNQTWSFAELPVGHKAIGLKWVYKVKKDPSGVVVKHKARLVAKGYVQQQGIDFEEVFAPVARMETVRLLIAVAANKGWEIHHMDVKSAFLNGDLEEEVYVVQPPGFIEKGKEGQVLRLKKALYGLKQAPRAWNAKLHNTLISLNFIKSETESAVYVRGTGSSRLIVGVYVDDLIISGAQASEIDFFKEEMKKKFRMSDLGLLSYYLGMEVVQKDDGVFLSQTAYAAKILEKTGMEGCNSTQVPMEARLKLKRESGGEGVDSTMYRSTVGSLRYLVNTRPDLAYSVGYVSRFMEKPTSEHWAAVKHILRYIAGTLDVGCWFGRREKGELRLIGFSDSDMAGDLDDRKSTTGVLYMLGDSLISWQSQKQKVVALSSCEAEYIAATTGACQGIWLNRLLAELLGEDPGQTVMKVDNKSAINLCKNPVLHDRSKHIDTRFHFIRECVEKKQIAVEYVRTEDQLADILTKPVGRVRFLELRKKMGLEQAHQD

SEQ ID NO: 135811 - protein, 370 aa, Oryza sativa
  unsure (1)..(370): unsure at all Xaa locations
  Clone ID: PAT_MRT4530_37450C.1.pep
QRRPGLTSARRGAAPTCGTHRSAAREREKGVAARGPTSQWHGRERKGRRRHVAAGPTAPIYPRVDRTAVGARGRGTRARRKPNRRPWRRRRSAHAAAARMQQRRKATADGERGRRRAAARGGAAATQLGGXRRLNGAGERKRGGGXTDNGRRRRATXGRWRRRNELRSLLTNKRRGVRERGKGARAQGRRPKAAAMASLTGARRGWVSGGEPQRRRGGEGTGRGRKRRESPADAGEWGGERGGIRFSNPGHLGRGREREREGNGRGERGARADVADVARGRRRRGRGGRYGCGGASGRGGRRETGPTGGPHLSATPREEAXGRPGWASACGRPRKEEGEGKREMGRRPIXTKRRKKRGKRKRKRKRIFPV

SEQ ID NO: 135812 - protein, 174 aa, Oryza sativa
  Clone ID: PAT_MRT4530_37451C.1.pep
KKKNKKKKKKKKKKKKKKKKKKKKKKKKKNKKKGTKHKKGGPALGVPLFLRRLAPVYPPFWGPLMTWQAPAFPTLVLGKPLRFPPFCLLDKWPFPPVGANRRGPPLAPFPHIVHAYWLRGPPLLPPLKPPRLGGSSPPVPLLSPLPYSPPFSFFPFLFCPGGRLFPGGFYMGGP

SEQ ID NO: 135813 - protein, 40 aa, Oryza sativa
  Clone ID: PAT_MRT4530_37452C.1.pep
NTFIQGIGAKRTPNNLYYRDQKHRCFIPQYHRLDNSCTQN

SEQ ID NO: 135814 - protein, 81 aa, Oryza sativa
  Clone ID: PAT_MRT4530_37453C.1.pep
GQSCTSCDASHLLEPCTVDFVINVIDFLPTPGGSFHHKTYVERDHLFVSDSGERLRPASRHDGPARGDSRMAGIGCLNKRT

SEQ ID NO: 135815 - protein, 45 aa, Oryza sativa
  Clone ID: PAT_MRT4530_37454C.1.pep
MAAAVAQRREEVRLLDVSRRRRGGGQQACDSLPTIFAVAAFDICG

SEQ ID NO: 135816 - protein, 360 aa, Oryza sativa
  Clone ID: PAT_MRT4530_37455C.1.pep
MEGNGCGGSGATPRGVVGMHWAPVVTSPPSPQPPFLPPAPCRPDVQMQQQGGLTCLKLGKRPCFWGGDGAGQVAQGSGGGGGGGGGGSADQGKRKEKAATAVPVVPRCQVEGCDITLQGVKEYHRRHKVCEVHAKAPRVVVHGTEQRFCQQCSRFHVLAEFDDAKKSCRRRLAGHNERRRRSNASEAMARGSAHPHGMPVLGHGFPPYGLPTSSAGALSLLSSARATGPWLMPTPDISARSSAALDELIAENRAALLSWQFFSDRQPPPAGRPTGRSPGSETAGGWHAHLQARPPPPGAGGQHENQSGHVTLDLMQATTAAGGSGAPFRPVPARPPKEGGDAGCTSDAWTPSPMEGARVV

SEQ ID NO: 135817 - protein, 475 aa, Oryza sativa
  unsure (1)..(475): unsure at all Xaa locations
  Clone ID: PAT_MRT4530_37456C.1.pep
MAKALLAVVVVAVAAVLELGLVGANFQDQCDITWEPQNAKMTEGGDHLTLSLVSNSSGCMLRTKKQFIYGSVSTRIQLVKGXLGRHRHHLLHIVXGDKHDEIDFEFLGNSSGLPYTFHTNVFADGVGSREMQFRPWFDPTDGYHNYTIFWNPCMIVWFVDSIPIRVFRNHEKEGVPFPTKRPMYAFSSIWAAEDWATQGGRVKTDWTKAPFVAEYRDIGLNICECPGSGSGSSSSFSSSSSSTSGDAEDPACAQRCATSDHWYAAEGLCQLSDKQLRQMKAVQLGYTIYDYCADAQAKGRPVPPECSMPHLHLRRGALGDGHGGARVEGRQWEVSGDGSDYGEARGQRIQQRGGSRLRVSRRKSDVPSGGWQSSGSCGEVRVCGLASGTQAQLRAGGDRKARGAWVMWKGNMSPAVEARSAAGCGDIGGGGCHGGDGSTRTPTAEAQSVAGYGHAAGGVAWEDDNDGGAKSSLRY

SEQ ID NO: 135818 - protein, 254 aa, Oryza sativa
  unsure (1)..(254): unsure at all Xaa locations
  Clone ID: PAT_MRT4530_37457C.1.pep
MSSSASPAAWWARSRVRILLPVIFLAPALYFLLSPPSSPPFFFTLPTSREESPSASGSRVIWAQRRVAEWRSCGWWRAAMPAPSRRNGYIRIDCYGGLNQLRRDLCDGIAVARLLNATMVLPKFEVAAYWNESSGFADVFDVDYFIEQTRGYVEVVKDMPEEIASKEPFKVDCSKRKGHFDYVETVLPALLEHQYISLTPAMSQRRDRNPSYAKASYCQGCYNALRLNKNVETKAIELLQAIPKPFLSLXLRFE

SEQ ID NO: 135819 - protein, 59 aa, Oryza sativa
  Clone ID: PAT_MRT4530_37458C.1.pep
RLHRIIPFTVPLSSITLIIQSGGTDLSHPIQLHATPNTSIYITPSYVTIFFGAHQLQRY

SEQ ID NO: 135820 - protein, 445 aa, Oryza sativa
  Clone ID: PAT_MRT4530_37459C.1.pep
MAGLTVKLAPRDQFALPSVHTFFSLSCRLPSIATKAVRNFEFLVSWRGQQKGREYGDGANSIAAPVFVRLVLGAIFVLVGQWEGYAFFFFFFFFFFFFFFFFFFFFFFSGDVYCGHRHFRRRRRRRQWDGRLVFGSSGASACCDRSAPPFPPRAGHRRRPRLHRHRHDLPFHALRLDTMAAISPEHRRQDAAKGIKLVPILSRFNSVKMSRKRLVGMFEYPSLEAATEKFSESNMLGVGGFGRVYKAAFDAGVTAAVKRLDGGGPDCEKEFENELDLLGRIRHPNIVSLLGFCIHEGNHYIVYELMEKGSLETQLHGSSHGSTLSWHIRMKIALDTASPPVIHRDLKSSNILLDSDFNAKIADFGLAVSSGSVNKGSVKLSGTLGYVAPEYLLDAAMSISGKLTEKSDVYAFGVVLLELLMGRKPVEKMSPSQCQSIVTWVQCNV

SEQ ID NO: 135821 - protein, 438 aa, Oryza sativa
  Clone ID: PAT_MRT4530_3745C.1.pep
MAATTTIPLLLLLLAATVAAAAAELSVYHNVHPSSPSPLESIIALARDDDARLLFLSSKAATAGVSSAPVASGQAPPSYVVRAGLGSPSQQLLLALDTSADATWAHCSPCGTCPSSSLFAPANSSSYASLPCSSSWCPLFQGQACPAPQGGGDAAPPPATLPTCAFSKPFADASFQAALASDTLRLGKDAIPNYTFGCVSSVTGPTTNMPRQGLLGLGRGPMALLSQAGSLYNGVFSYCLPSYRSYYFSGSLRLGAGGGQPRSVRYTPMLRNPHRSSLYYVNVTGLSVGHAWVKVPAGSFAFDAATGAGTVVDSGTVITRWTAPVYAALREEFRRQVAAPSGYTSLGAFDTCFNTDEVAAGGAPAVTVHMDGGVDLALPMENTLIHSSATPLACLAMAEAPQNVNSVVNVIANLQQQNIRVVFDVANSRVGFAKESCN

SEQ ID NO: 135822 - protein, 135 aa, Oryza sativa
  unsure (1)..(135): unsure at all Xaa locations
  Clone ID: PAT_MRT4530_37460C.1.pep
WLSSGSSHGGTLSWHIRMKIALDTARGLEYLHEHCSPXRVIHRDLKSSNILLDSDFNAKIADFGLAVSSGSVNKGSVKLAGTLGYVAPEYLLDGKLTEKSDVYAFGVVLLELLMGRKPVEKMSPSQCQSIVTWAM

SEQ ID NO: 135823 - protein, 121 aa, Oryza sativa
  unsure (1)..(121): unsure at all Xaa locations
  Clone ID: PAT_MRT4530_37461C.1.pep
SFPCWTDLEDALAGQDRRIQYWKTKFEVAELERAMLEVKKEQAVETLRGREVWFNSYLKSCCTSMARVCRELRVVCGEPEESAAGYISWLNGXGVGKRIDEALKQECRRSSRYAGGHVLAC

SEQ ID NO: 135824 - protein, 64 aa, Oryza sativa
  Clone ID: PAT_MRT4530_37462C.1.pep
KGADACCGRPQLRLRHGQHLAGSGGSGGGGKSDGMWSVAAAVARSSDTLALLQPPSSPSLCGAH

SEQ ID NO: 135825 - protein, 56 aa, Oryza sativa
  Clone ID: PAT_MRT4530_37463C.1.pep
INSKLSINGSGRINLMATDTNPPPKHSNPYITYSIEPPFQDSTTARANNHQIKTMN

SEQ ID NO: 135826 - protein, 133 aa, Oryza sativa
  Clone ID: PAT_MRT4530_37464C.1.pep
MKTRSQTAPKPLKTVRLPPVKPRPKPPPPQPQPPPSRKKGQPLVDRRRPKKPPTAFFYFMEDFRKTYKEENPSVKSMQEVGKACGEKWNTMTFEERVKYYDIATEKRAEYEKAVAEFDKKKESGELSEESDYD

SEQ ID NO: 135827 - protein, 193 aa, Oryza sativa
  Clone ID: PAT_MRT4530_37465C.1.pep
MDPSEETSAGKDDLLAIDDSNQDKAKQATVVSDESKAPIIEKKKKKKMVRYTQEQIEYCIANPEELWDIKVIKLTELLSKECLARMGQEQVDKLYAMERTEEEQIVRRKKLQEVLRNERENIYKIPDKPQDVLKQYYAKGYAEYEVVVDDGDVDVDEDDEVPARVAHPGRRRFRNGIVVKKNQSGGGSIRKIN

SEQ ID NO: 135828 - protein, 106 aa, Oryza sativa
  Clone ID: PAT_MRT4530_37466C.1.pep
NPSIRANCSPSTSSVDDGSSSEHGGGSWMTHPCPNPVLPPPMRLGGRDPQLLKLPAHAIHHPFSVLSFRIQNPNLIVLVADIALELPEFQSQLGGFGFLVAQSSHD

SEQ ID NO: 135829 - protein, 212 aa, Oryza sativa
  Clone ID: PAT_MRT4530_37467C.1.pep
MNSSRRQEGSPLDLNNLPDEFGKQTVESSTTTAASSAEASRVTKKKSNGGKDEAGKVYECRDVNMGGGGAAAPPPTMQMGGGGFRGGGVGGDPCIPLRPVQPRLSPPQPPPYHHYLYTTTAPPSALHPMSYPATYPAPPRHQQPAAVGDYVIGHAVSAGDALVAPPPPPHRASFSCFGAPLAAPPANVQPDNGNCNCSFGCGHSNRNVNAAS

SEQ ID NO: 135830 - protein, 177 aa, Oryza sativa
  unsure (1)..(177): unsure at all Xaa locations
  Clone ID: PAT_MRT4530_37468C.1.pep
SHSLSLLPSLTSSLATPKRSVGRLSSKRGAAAGRRGSTTIVRCWAVSHRRSPQQRKGGERGRAAVRALPAGRRRSLPRVALAFDGATAAXPPRDDDPAAGEEXDADADERRLRRKISNQESARKQRHLDELRTRAGQLXRCNRELAARGHATRDRVGLVRLANAQLRAEAAALSHAH

SEQ ID NO: 135831 - protein, 213 aa, Oryza sativa
  Clone ID: PAT_MRT4530_37469C.1.pep
MHIAAQAPVWHGVWMVEDAVTGDEFPAWHGYGRRRMQPPGQAPAWCRAWIAKDVVWGVAAEAATASNKSSVGRGSEGRGCRYHLIPHKYHPMRGRNHLIPDRYHMIPYEYHQIRSMNRLILDRYHLIPVMFQDMIPQSATYANDEEGCSGHVLRGDGHVGLMVAGHGEAVCRATLRRWLRQHRVAATDALERLQATAVGAKAMAPTVPLYQRS

SEQ ID NO: 135832 - protein, 133 aa, Oryza sativa
  Clone ID: PAT_MRT4530_3746C.1.pep
TTPGSKEDDEPPGPPANASKHTTFPSLVAHSAPLVPNSAPLAPRGQDHFRPRQTPPSAPQTASPLPTPPGPISRSFSIPSRGMRTSGISDGKETEDLQDKGPARMSLSSLPSAQTSLEDHRPLSGATESVSKT

SEQ ID NO: 135833 - protein, 37 aa, Oryza sativa
  Clone ID: PAT_MRT4530_37470C.1.pep
VVFNITLVRLRSSIPYLNTNVHVAGCSRCLCKDDFFV

SEQ ID NO: 135834 - protein, 249 aa, Oryza sativa
  unsure (1)..(249): unsure at all Xaa locations
  Clone ID: PAT_MRT4530_37471C.1.pep
REEKKEGEWGWXIADLVLGGPLNRTAYENKFIFACGPVRKLWERNCTRALEHISMGNNNNNNNNNNNNNNNNNNNNNNNNNNNNNNNNNNNNNNNNNVFKATNETSHVAVDPTAQSPFSSSAGPLRAPQLRLLPTLLHSTPLQLELALLLLLLPPLLLDFKKHLEVYQNYKPPHHHFTTQKNHKKITSSDFKNKIKNTTQSDHPTKTTVARNQSIRRDPNCFFHNQTTRTHFIDRSRTMSRKQSAWLMQ

SEQ ID NO: 135835 - protein, 183 aa, Oryza sativa
  unsure (1)..(183): unsure at all Xaa locations
  Clone ID: PAT_MRT4530_37472C.1.pep
ITQNHKGERNHTKPQRGITQKSIVPNPFRPPRRLFPPPSPPPPWEKADPSPAASIDNGPNCGGPGGVRISGAANRKEAAPRRRGRQEEGRPAFFTKPPPPGLFLGRETVAPGPSGXTPPPPGRCLKWLAVPPRANKRRVRKIRRRPSLPVPPNGGGGCSRSPSGRPPRGRRPWVEPPPPGQPP

SEQ ID NO: 135836 - protein, 147 aa, Oryza sativa
  unsure (1)..(147): unsure at all Xaa locations
  Clone ID: PAT_MRT4530_37473C.1.pep
GRDEVSPGHRPPPPPPWRSAASTSGRSRSSSSRGPSPRPPXPTLPSLLPRHRPTTATTPNQSPERGRHATPRTTLFHNYRERIMFTQWRWPSRAIRTGAAAATSENTEPADMIDAASPAAEIIHETNRVNEDLSCGILLLXIKACDQ

SEQ ID NO: 135837 - protein, 221 aa, Oryza sativa
  unsure (1)..(221): unsure at all Xaa locations
  Clone ID: PAT_MRT4530_37474C.1.pep
TVVQPLPQLSQRAPRRCLCHENPKATAADSRQCHRPATVLSPPTKXCCHRRHELHAVGVAPCSRAVAXCAVAADQAAAATVAMNSTPSTSPRAPVPLLPPTSPRAPRSAPPAQPSPPPPLPRHRLFPATSTPASPPPAVARRQPRKIRPKRRGSXSGFPPPPALSAATTHRQMPPPPLRPAANCVPAGSGRAGADPDVCHHRRRASSRATRVLNGRSPAAA

SEQ ID NO: 135838 - protein, 771 aa, Oryza sativa
  Clone ID: PAT_MRT4530_37475C.1.pep
MGLRLAGGEVVVGSSGCGGGGRWHGGLGGLAEGMADGCISPARESTVEGTETGLVQRGAADGSEGWLGARGAGGGDGGRLGARGTADGGRPNWRESCGSGWTTAMGLRLAGGEVVVGSSGCGGGGRWHGGLGGLAEGMADGCISPARESTVEGTETGLVQRGTTDGSEGWLGARGAGGGDGGRLGARGTADGGRPNWRERYRSIIENFILASEMVQAALKNRKPMLVLKLDFHKAFDIQAFNTGTLQHPLDIEGAPPTLQYADDTLILLKGEADQATALKEILDSFTRFSGWMPLSKGGRLTMINAVTSAIPTYYMSCCIWPEKSIEAIDKIRRAFFWKGEKTVRGGHCLVAWKTVLQKQQGGLGFKDLRAHNTALILKLGNKVLSGTGDPMAKWFRERYLQYIIQLHPRSNDTPTWKLILSHFQTLCSITRVKLGNGKTTLFWKDNWFHQRLEFAYPVLFSFAIHKECTVQSQFRQSSWQIQLHPNLSYQAETELHTLLQILQHVNPIPEEADTREFLYPAPQVSTKNAYQMLTYHGSLWKPADFIWIHTIPTNCKIFLWLAFRDRLNTKANMLANNSESSSAFLQAIIDSNRSSKGIEPIWFAACAYTLWKSRNNRVFEGQLDNLQHITQQVSDTLDLWSMRTNESNWQKIQSWLTITSNLLYPKNGPPLEFEAVLPPLVLTGASFSLYPVLPLSPVFDILVKILEVGLGSSPRCPKPASAPSCDRGQLSIGTQHIRDGNVMPDLPIGIENSQFGGNLTYMTRLPINMI

SEQ ID NO: 135839 - protein, 110 aa, Oryza sativa
  unsure (1)..(110): unsure at all Xaa locations
  Clone ID: PAT_MRT4530_37476C.1.pep
AYSLGDVGGGDDAFNTFFSETGAGKHVPRAVFVDLEPTVIDXVRTGDYHQFFYPGHFIIXNDAFAILSLSALHLFRXSVDLCLDRIRKLADNCTGLQGFLVFNAVWRRTG

SEQ ID NO: 135840 - protein, 112 aa, Oryza sativa
  Clone ID: PAT_MRT4530_37477C.1.pep
MIGGGGADDGGSDRRKKRRAELEVAIKGTLAVQAYIRITCTIMAYLAFTWSTVVLLGGYVSSLQRKDFQCLTVITVIEATSLSNIDMQERAYCLVPGCWVIELEDARDRDQA

SEQ ID NO: 135841 - protein, 117 aa, Oryza sativa
  Clone ID: PAT_MRT4530_37478C.1.pep
IHPKKQFKNSLRHNHNVKQEATKIGGGKPSSHRGQEKPKIKGDPILVKQMGENGGPPPKVTDKKLVDQKILTKKVGGPSSGSPPQRDPQPLKRFVGFPKQREPYLEPPWAPSRPQNN

SEQ ID NO: 135842 - protein, 487 aa, Oryza sativa
  Clone ID: PAT_MRT4530_37479C.1.pep
MGGGRSARGCLNDVSKERSDGKHHRCRPAEAGLGFHPPLTTCESTAGTPMLHHHPTSTDMRDHCIGTPRRPASVHRRPHRTHRQLLLLAPCMPPPLAAPHRARPASSTVGHASSHQVGLPSLATLPRAKSASTAAGYASSHHAGLAAIDRASTHRAGLRALLPPLPCRPNAAVCHTSAAGGAGRHARHAGNLLQLQPPATGFSQRRHVLRLDPARGRQIQAWDCRIQARRRRSVVTISAGIVVLAAIAVPVLPPIRHRAPVTSRLSNVQPCRRHSCHRRDSSMLSPSSSLLPFPLLVPERRGSSGHRRRRRRPCHRNDSPAAAVAIPAVVSAVNRHPARSGRAARIWRSPLPPSLSLPPQGLALVVAFAIPAAVPAISCRHPGHLPWPPVREVGKKPRHCCPCGHRSDGKEAEEEGGGERAAGSSPPKPLWGRATREKHYLRDMITSLLTTEVKPKRNTTSENIYLISKSVVHIDMDTAAAIKANKR

SEQ ID NO: 135843 - protein, 63 aa, Oryza sativa
  Clone ID: PAT_MRT4530_3747C.1.pep
HLTFKTYLKYNSLAYILLSTNHNLALFKFYTYLLLTDHNFAPLYPCTTLKLLIFWDRDSKSFP

SEQ ID NO: 135844 - protein, 154 aa, Oryza sativa
  Clone ID: PAT_MRT4530_37480C.1.pep
NPCSCWYGVPACRTSSTCHGAPCPPCKRGASPRAGRRARRRAWWRRRRSARRPARPRSPGASRTAPRPGPRRRAGASTRGRRTPCAPRRPRARPRRRRRAPRPPTPPWPCRGGRSPGRCGRRAPPGCGRGTPRRRAPTSSSPPRPRPRPRRLPP

SEQ ID NO: 135845 - protein, 431 aa, Oryza sativa
  unsure (1)..(431): unsure at all Xaa locations
  Clone ID: PAT_MRT4530_37481C.1.pep
MTICEVRSPQVRKTVFNFIHVSFQERQTEGISYIMYWRYXLSSYAASHFRHSLMSVVQXVAYATFQLYCVRNNEVQRLMLGPHLLGDAPRIYITPPGNEIAEEEDTSEYFPDIKIYDEDVNLKLLICGAHCTLDSSLLNSLEDGLNALLNIETMQHTHIEKLSSGGGDWWFRWCKLQDRVSAAPPLHVDSTLLDGMVTICCDITTSSSSHVSLLLSGSPQTCFDDKLLEKHIKKELIESRQLVRVVSVSEDGPSSAEPLTSMSVASGASTFEVLMTLPKWAAQVLKYLAQETSYKSLVPLGIASVNGTPVCSFDSQDVDWLLFFRTIQDEAIGTSLYPHPPRWSASLAKNRVKGSMVSKPARFDDALGASLYPHPPRWSASLAKGTGVGAVVSPPAGGPLPSLSLVVVAQRWCLCRMLRECAAHLHINNAP

SEQ ID NO: 135846 - protein, 284 aa, Oryza sativa
  unsure (1)..(284): unsure at all Xaa locations
  Clone ID: PAT_MRT4530_37482C.1.pep
MDITRSKTKNQKKAAAPAYAARQLQYPRASLQTRRLPVLPHISPDPTQPRLPQAPAHAGATPSVAAVAEVWLMGGAGQRSDVAWVDGRCGSGGGQLDDLGWLSTTTRRQPGALRPGVAAVGKGLLLHHRAGGVALTYLAPPLPPAWIRLLLRPYTLAAATSAAAGKGNGYEDFGGGGCDDLGGGGLSLRRLASVGPPLAKEWGVAGLGHGPRGIFLMLVANIKTRSSSMQVVKEEIEEEEXAGGRXRRRGGLRRSVSGRVREQRARLYIMRRCVSLLISSTFHD

SEQ ID NO: 135847 - protein, 453 aa, Oryza sativa
  Clone ID: PAT_MRT4530_37483C.1.pep
MVRLEEIQETPENASTSTQPQQAEQDVVQQVEQVVVEPAVEALASRRSKRIRRTPARKDELTTYEEAMVGPDSQKWLGAMKSEIESMHINQVWNLVDPPDGKSIYGLKQASRSWNIRFDEVGKALGFVKNEEEPCVYKKISGSALTSLKNSFSMENLGEAAYILGVRIYRDRSKRIIGLSQSTYIDKVLKRFNMQDSKKGFLPMSYGINLGKNQCPQTTDERNKMSVIPYESAIGSIMYAMLCTRPDVSYALSATSRYQSDPGESHWIAVKNILKYLSRTKDMFLVYGGQEELVVNGYTDASFQTDKDDFRSQSGFVFCLNGGAVSWKRSKQDTVVDSTTEAEYIAASEAAKEAVWIKKFVSQLGVMTSASSPMELYCDNSGAIAQAKEPRLHQKSKHILWRYLLIREIVGRGDVKICKIHTDLNVTDPLTKPLPQPKHEAHTRAMGIRYIRD

SEQ ID NO: 135848 - protein, 320 aa, Oryza sativa
  Clone ID: PAT_MRT4530_37484C.1.pep
MRNSRSYVIRAPFDLLWLEMQVHTLINPTVDQFLEAQRALQPRFMYFQGQQLDKEEEIGRLVWGDADVSDPQIFSSLICPPFPTIVYLEVPSGEKIAQSLQSKDSSILNSLEDGLNALLNIEFRWCKLQDRVSAAPPLHVDSTLLDGVVTICCDITTSSSSHVSLLHSGSPQTCFDDKLLEKHIKKELIESRRLVRVVSVSEDDRPSSAEPLTSMSVASGASTFEVLMTLPKWAAQVLKYLAQETSYKSLVPLGIASVNGTPVSSFDRQDVDRLLFFCTNQDEDEAIANGLYHHPPRWSASLAKDRVKGNMVSKPVYFLA

SEQ ID NO: 135849 - protein, 1222 aa, Oryza sativa
  Clone ID: PAT_MRT4530_37485C.1.pep
MARTTAGGVEQGIGYGVAELAAEAGGRARGGRRGGVGRVGDGGRSHGGWRGGAEWSGVGRTGDEAGGRGGIDVGHLYAEIIGLLDKIMAAPAASNFNLRSIIEKEKLTGTNFMDWEHEKRCNDYLDISCLMLATMSPKLQRQYEALDAHTIITGLRNMSEDQARAERSNTSKSLFACRLAEGNPVSPHVIKMIGYTESLDKLGFPLNRELVTDLILQSLPPSFEPFIMNFNMNNLNRTLAELHGMLKTAEESIKKNSNHVMVMHKRKPNNKKSGQKRKLNSDEITSTSNSKTKVQKTGPAKDAECFFCKETGHWKRNYKKYLEQLKQKQQDGKSSTSGINVIEINLATSSTDSWVFDTESVAHICKSLQGLKRSRSLARGEVDIRVGNGARVAAVAVGTMPLSLPSGIVLELNNCYCIRALCKNVISASCLQAEGYGFRSVDNGCSVYYNDIFYFHVPMMNGLYIVNLDGCSVYNINAKRQCPNYLNPTFIWHCRLGHINEKRMEKLHRDGLLHSFDFESFKTYESCLLGKMTKGPFTGQSERASELLGLVHTDVCGPMSSTARGGFGYFITFTDDFSKYGYVYLMRHKSESFEKFKEFQNEVQNHLGKTIKYLRSDRGGEYLSLEFGNHRKECGIVPQLTPPGTPQWNAVSERRNRTLLDMVRSMMSQTNLPLSFSGYALETTAFTLNWVPSKSVDKTPYEIWTGNRPSLSFLKIWGYEINASLWGYPKETKGYYFYNREEGKVFVARHGVFLEKEFISRKDSGSMVRLEEIQKTPENASTSIQPQQAEQDVVQQVEQVVVEPVVEAPASRRPERIRRTPARYTLLTIGQRDILLLDNDEPTTYEEAMKKTDVDGNVHIYKARLVAKGFRQIQGVDYDETFLPVAMLKSIRIVLAIAAYFDYEIWQMDVKTAFLNGNLDEDVYMTQPKGFVDPQSAKKICKLQKSIYGLKQASRSWNIRFDEVVKALGFVKNEEVPCVYKKISGSALVFLILYVDDILLIGNDIPMLESVNISLKNSFSMKDLGEAAYILGIRIYRDGSKRLIGLSESTYIDKVLKMFNMQDSKKGFLPMSHGINLNKNQCLQTTNEQNKMSVIPYASAIGSIMYAMLCTRPDVSYVLSATSRYQSDPSESHWIAVKNILKYLRRTKDMFLVYGGQEELVVNGYTDASFQTDKDDFRSQSGFVFCLNGSAVSWKSSKQDTAANSTTEAEYIAASKAAKEAV

SEQ ID NO: 135850 - protein, 738 aa, Oryza sativa
  Clone ID: PAT_MRT4530_37486C.1.pep
MSHFKSGSRVKCTMLAVLCGKVGKQRTPPGPVPESQRPRPSFPFLELISSGRLDVHTLINPTVDQFLEAQRALQPRFMYFQGQLLDKEEEIGALVWGDADVSDPQTFSSLICSPFPTIVYLEVPSGEKIAQSLQSKGISYIMYWRYSLSSYAASHFRHSLLSVVPSSCSHAWDAFQLAYASFEQYCVRNNDVQRLMLGPHLLGDAPRIYITPPGNKMAEEEDTSEYFPDIKIYDEDVHLKLLICGAHCTPDSSILNSLEDGLNALLNIEFRWCKLQDRVSAAPPLHVDSALLDGVVTICCDITTSSSSHVSLLLSGSPQTCFDDELLEKHIKKELIESRRLVRVVSVSEDDGPSSAEPLTSMSVASGASTFEVLMTLPKWAAQVLKYLAQETSYKSLVPLGIASVNDTPVSSFDKEDVDRLLFFCTNQDEDEAIGNGLYHHLPRWSASLAKDRVKRNFVSKPGCYVIRCGGSISIRSSCSNAFAGFNGCGSVVFFCSTMPHFLSSSRVKCTMLAVLCGKVGKQRTPPGPMPESQRLWPSFPFPELISSGSGGISIRGSYSYVIRAPFDLPWLESIRNSRSYVIRAPFDLLWLESTSIRYRGTRPKYIQKQNKSLIPLGIACVDGTLVCSFNRQGVGPLLFFCTNQDEDEDIENDLYSDLPRWSASLEKDRVKGSIGSKPARQIGYKGSDNVEWGKGGVDAKVGDYSLAHEQYVIAWARLIVWHNELHENLDAIFKESS

SEQ ID NO: 135851 - protein, 171 aa, Oryza sativa
  Clone ID: PAT_MRT4530_37487C.1.pep
PLPFFRLPGPVVASEGNHRPTPMRGPPLGQPVPLLPFKCEPPACSRLFLLLGQRFLPPPGRGGGGAFPRPKRMEVECCFPIFPLLLWYNVDGSSNLGRPLLLPVYYVESGMGWVVRVSSAGSYMDLCLLWGAMEPAAVCSPGPRFSLGWGFGALLAPCHFVQWMGLWRMVE

SEQ ID NO: 135852 - protein, 659 aa, Oryza sativa
  Clone ID: PAT_MRT4530_37488C.1.pep
MAPPVPSNFNLRSIFEKEKLTGTNFMDWYRNLRIVLRQEHKEFVLTQPFPADLPNNAPAAQRREHERRCNEYLDISCLMLATMSPELQRQYEALDAHTIITGLRNMFEDQARAERFAEGNPVSPHVIKMIGYTESLDKLGFPFSRELATDLILQSLPPSFELFIMNVNMNNLNRTLTELHGMLKTAEESIKKNSNHVMVMHKRKPNNKKSCQKRKLNSDEITSTSNSKTKVQKTGPAKDAECFFCKETGHWKRNCKKYLEQLKQKQQDGKSSILGINVIEISLATYSTDSWVFDTGYGYVYLMRHKSESFEKFKEFQNEVQNYLGKTIKYLRSDRGGEYLSLEFGNHLKECGIISQLTPPGTPQWNGVSERSNRTLLNMLWKHWLHEGPKGYGVHLRDKVEPTTYDEAMVGPDSEKWLEAMKSEIESMHVNQVWNLVNPPDGVKAIECKWVFKKKTDVDGNVHIYKTRLVVKGFRQIQDVSYALSATSRYQSDPGESHWIAVKNILKYLRRTNDTFLVYGGEEELVVNGAMSWKSSKQDTVADSTREAEYIVASEAAKEAVWIKKFVSQLGVMTSASGPMDLYCDNSGAIVQTKEPRSHQKSKHILQRYHLIREIVGRGDVKICKIHTDLNVADQLTKPLPQPKHEAHTRAMGIRYIHD

SEQ ID NO: 135853 - protein, 996 aa, Oryza sativa
  Clone ID: PAT_MRT4530_37489C.1.pep
MVTAGDHRRGGAAPERAEGRGKAKGRSSAHPGSTATTGTAAEAEEGGGAIRDGEGDGAPAVGERIGGADGVDDDAAKPKEVTPSGEEVRSDDGGEPELGGDGGEKVRRIDVGHLYAEIIGLLDKIMAAHAPSNFNLRSILEKEKLTGTNFMDWYRNLRIVLRQEHKEFLLIQPFPADLPNNAPAAQRRKHERRCNDYLDISCLMLATMSPELQSQYEALDAHTIITGLRNMFEDQARAERFNTSKFLFAYRLAQGNPVSPHVIKMIGYTESLDKLGFPLSRELATDLILQSLPPSFEPFIMNFNMNNLNRTLAELHGMLKTAEESIKKNSNYVMVMHKLKPNNKKSGQKRKLNSDEITSTSNCKTKVQKTGPAKDAECFFCKETGHWKRNCKKYLEQLKQKQQDGKSSTSALCKNVISASCLQAEGYGFRSVDNGCSVYYNDIFYFHAPMMNGLYIVNLDGCSVYNINAKRQRPNDLNPTFIWHCRLGHINEKRMEKLHRDGLLHSFDFESFETCESCLLGKMTKAPFTGQSERASELLALVHTDVCGPMSSTARSGFGYFITFTDDFSRYGYVYLMRHKSESFEKFKEFQNEVQNHLGKTIKYLRSDHGGEYLRLEFEFISRKDSGSMVRLEEIHETPENASTSTQPQQAEQDVVQQVEQVVVEPVVEAPASRRSERIRRTPARYALLTTGQRDILLLDNDEPTTYEEAMKSIHGLKQASRSWNIRFDEVVKVLGFFKNEQEPCVYKKISGSALVFLILYVDDILLIGNDIPILESVKTLLKNSFSMKDLGEAAYILGIRIYRDRSKRLIGLSQSTYIDKVLKRFNMQDSKKGFLPMSHDINLGKNQCPQTTDERNKMSVIPYASAIGSIMYAMLCTCPDVSYALSATNRYQSDPGESHWIAVKNILKYLRRTEDMFLVYGGQEELVVNGYTDASFQTDKDDFRSRSGFVFCLNGGVVSWKSSKQDTVADSTTEAEYIAASEAAKDAVWIKKFVS

SEQ ID NO: 135854 - protein, 446 aa, Oryza sativa
  Clone ID: PAT_MRT4530_3748C.1.pep
MSRRNAGAMQREGSVKDWEEFDPSPSPKLAYSQSYVAMRGLLTSVASLDLVLMSSSLKSAWAAISSHKHARSLERSRSKGMSLKRAMLQLLVCFMVGIFIGFTPPFSVDLPGKIASENGRLPFDGDAIDRRQMVERQGTKLEPFVAEAESEASSEPQVEEGPPVPAMLDDEADFVEASPIVHSVNDSGIVVRKHLIIITTTSVRPHQAYYLNRLAHVLKDVPPPLLWIVAEWPYQSRETAEILRSSGIMYRHLICNRNTTNIRKIVVCQKNNAIFHIKKHRLDGIVHFADEERAYSADLFEEMRKIRRFGTWPVAIHVGTKYRVVLEGPVCKGNQVTGWHTNQRRGVSRRFPIGFSGFAFNSTILWDPQRWNSPTLESIIVHSGGRGGLQESRFIEKLVEDESQMEGLGDNCTRVMVWNFELEPPQVNYPIGWLLQRNLDAVVPIT

SEQ ID NO: 135855 - protein, 72 aa, Oryza sativa
  Clone ID: PAT_MRT4530_37490C.1.pep
GSTMSSPVRNLKGVLHPLFGSTQGLVGRSFNHQPVVQLIAFFPFMGEVLIHRSIGFVPLKFPYSTAMSSRPP

SEQ ID NO: 135856 - protein, 325 aa, Oryza sativa
  Clone ID: PAT_MRT4530_37491C.1.pep
MDRTLAELYGMLKTAEESIKKNSNHVMVMHKRKPNNKKTGQKRKLNSDEITSTGNSKTKVQKTGPAKDTECFFCKETGHWKRNCRKYLEHLKQMQQDGKSSTLGINVIEINLATSSTDSWVFDSSFSMKDLGEAVYILGIRIYRDRSNRLIGLSQSTYIDKVLKRLNIRTKVMFLVYGGQEELVVNGYTDASFQTDKDDFRSQSGFVFCLNGGAVSWKSSKQDIVADSTTKPEYIAASEAAKEAVWINKFVSQLGVMASASSPMDLYCDNSGAIAQAKEPRSHQKSKHILRRYHLIHEIVGRGDVKICKIHMDLNVADPLTKPLP

SEQ ID NO: 135857 - protein, 266 aa, Oryza sativa
  unsure (1)..(266): unsure at all Xaa locations
  Clone ID: PAT_MRT4530_37492C.1.pep
MAGRRGLASAHTRLAAAAAGTKATAAHGLGGHRWRRHGVRKHGRRPAKGRKREGRRSAHRGRRRGAGKGGGXSASALPGTKAERRPDGVPRTGTGGRRLEGPGEDGGEVRRGREGSQRHESLVGXRPRCSSALRSERRRQRDLGWLGAAPSGRLESAASVEGGGARGDGASEAGRGNGADAGVWHDAAKPLVAVARNDGGGSGCGDRLEGRRRAAAGGATVAGWFSCTGGLGREGKMEREPFFEWRPDMMGHTHPHSAGDMGDVRT

SEQ ID NO: 135858 - protein, 483 aa, Oryza sativa
  unsure (1)..(483): unsure at all Xaa locations
  Clone ID: PAT_MRT4530_37493C.1.pep
MIKMIGYTKSLDKLGFPLSRELATDLILQLLPPSFEPFIMNFNMNNLNRTLAELHGMLKTAEESIKKNSNHVMVMHKRKPNNKKSGQKRKLNSDEITSTSNSKTKVQKTWPAKDAECFFCKETGHWKRNWAERSRSLARGEVDIRVGNGARVAAVAVGTMPLSLPSGLVLELNNCYCIPALCKNIISASCLQAEGYGFRSVDNGCSVYYNDIFYFHASMMNGLYIVNLDGCSVYNINAKRQHPNDLNPTFIWYCRLGHINEKRMVKLHRDGLLHLFDFESFETYESCLLGKMTKAPFTGQSGRASELLGLVHTDVCGPMSSTARGGFGYFITFTDDFSRYGYVYLMSHKSESFEKFKEFQNEVQNHLGKTIKYLRSDRGGEYLSLEFGNHLKECGIVPQLTPPRTPQWNGVSERRNRTLLDMVRSMMSQTDLPLSFWGYALETAAFTLNRVPSKSVDKTPYEIWTGKRPSLSFLKIWXCEVYV

SEQ ID NO: 135859 - protein, 64 aa, Oryza sativa
  unsure (1)..(64): unsure at all Xaa locations
  Clone ID: PAT_MRT4530_37494C.1.pep
DWNRLISGSMPLSTMAVDTTVSEYWLNWRFMLXEVWVYSCMVLACFLIWKFQGPSSQDGNGYGC

SEQ ID NO: 135860 - protein, 385 aa, Oryza sativa
  Clone ID: PAT_MRT4530_37495C.1.pep
MEIQYELNSDRDSNRSPTGLGGPSDGSYIFVRGVTGGDRIDVGHLYAEIIGLLDKIMAAPAPSSFNLRSILEKEKLTGTNFMDWHRNLRIVLWQEHKEFVLTQPFPAGLPNNAHAAERREHEKRCNDYLDISCLMLATMSPELQRQYEALDAHTIITGLRNMFEDQARAERFNTSKSLFACRLTEGNPSLPPSFELIIMNFNMNNLNKTLAELHGMLKTAEESIKKNSNHVMVMHKRKPNNKKSGQKRKLNSNEITSTSNSKTKVQKTGPAKDAECFFCKETSHWKRNRKKYLEQLKHKQQDGKSSTSGINVIEINLATSSADSWVFDTGSVAHICKSLQGLKRSMSLAIGEVDIRVGNGARVAACCCGWHYAIIFTVRISFGVK

SEQ ID NO: 135861 - protein, 1050 aa, Oryza sativa
  unsure (1)..(1050): unsure at all Xaa locations
  Clone ID: PAT_MRT4530_37496C.1.pep
MAAPAPSSFNLRSILEKEKLTGTNIMDWYRNLRIVLRQEHKEFVLTQPFPADLPNNAPAAQRREHEKRCNDYLDISCLMLATMSPELQRQYEALDAHTIITGLRNMFEDQARAKRFNTSKSLFACRLAEGNPVSPHVIKMIGYNETLEKLGFPLSQELATDLILQSLPPSFEPFILNFNMNNMNRTLTKLPGMLKTAEESIKKNSNHVMVMHKRKPNNKKSGPAKDAECFFCKEAGHWKRNCKKYLEQLKQKQQDGKSSTSEGYGFRSVDNDCSVYYNDIFYFHAPMMSGLYIVNLNGYSVYNINAKRQRPNDLNPTFIWHCRLGHINEKRMEKIHRDGLLHSFDFESFETCESCLLGKMTKAPFTGQSERASELLALVHTDVCGPMSSTARGGFGYFFTFTDDFSRYGYVYLMRHKSESFEKFKEFHNEVQNHLGKTIKYLRSDRGGEYLSLEFGNHLKECGIVPQLTPPGTPQWNGVSEWRNRTLLDMVRSMMSQTNLLLSFWGYALETTAFTLNSVPSKSVDKTPYEIWTGKRPSLSFLKIWGCEVYVKRLQSDKLTPKSDKCFFVGYPKETKGYYFYNQEEGKVFVARHGVFLEKEFISRKDIGSMLWKHRFREDPKKKTDVDGNVHIYKARLVAKGFRQIQGVDYDETFSPVAMLKFIWIVLAIAAYFDYEIWQMYVKTAFLNGNLDEDVYMTQPKGFDDPQSAKKICKLHQSIYGLKQASRSWNIRFDEVVKALGFVRNEEEPCVYKKISGSALVFLILYVDDILLIGNDISMLESVKTSLKNSFSMKDLGEAAYILGIRIYRDRSKRLIGLSQSTYIDKVLKRFNMQDSKKGFLPMSHGINLGKNQCPQTTDERNKMSVIPYASAIGSIMYAMLCTRPDVSYALSATSRYQSDPGESHWIAVKNILKYLRRTKDMFLAYGGQEELVVNGYTDASFQIDKDDFRSQSGFVFCLNGGAVSWKSSKQDIVVDSTTEAEYIAASEAVWIKKFVSQLGVMTSASSSMDLYCDNSGAIAQAKEPRSHQKSKHILRQYHLIREXVGRGDV

SEQ ID NO: 135862 - protein, 206 aa, Oryza sativa
  Clone ID: PAT_MRT4530_37497C.1.pep
MEALVKGTKPTVGVTPDALPHNYFSQLPSPTTRASLLPPLLGATASSSPATLARLLASHKTVRLTVPPRRKKSRAPASLSPPSLSHALPLFSHAWEEAGSGEGRERMAARRKRAREKGGSGRRPRWPAPALLLFSSLRQPRLPARAVAGPAAGDVPDGSNWRGGNYDEVGGGRRLGRRWRHLLGGRFLAACGRRFHAALLRGEELS

SEQ ID NO: 135863 - protein, 224 aa, Oryza sativa
  Clone ID: PAT_MRT4530_37498C.1.pep
MVGPDSEKWLGAMKSEIESMHDNQVWNLVDPPDGVKAIECKWVFKKKTDVDGNLHIYKARLVVKGFKQIQGIKIYRDRSKRLIGLSQSTYIDKVLKRFNMQDSKKGESYWIAVKNILKYLRRTKDMFIFYGGQEELVVNGYTDASFQTDKDDFRSQSGFVFWLNGGAKIERSPVISQLRNRGTEQAKSWIGGTVDAPLTLRHNSNGARGVMAMPAKEGMATAAK

SEQ ID NO: 135864 - protein, 69 aa, Oryza sativa
  Clone ID: PAT_MRT4530_37499C.1.pep
MVQGTLEVLLVGAKGLENTDYLCNMDPYAVLKCRSQEQKSSVASGMFQYPFSYTPTMQKKNVLPFVIIV

SEQ ID NO: 135865 - protein, 282 aa, Oryza sativa
  Clone ID: PAT_MRT4530_3749C.1.pep
MGYLGPVRLDGSLTTEPLSILLQCILGIHDVLINLGKDTSQRTEWPKIHAIVGVFESFDFIFSANLMLVILGYTNDLSGRLQRREQDIHNERHLSIWRRVELCRLAEFFYPNDISSSELLRLEIQLENYIDGMRKDNGFKGINNLGDLSDKLRQTKKHIVYDLIYVLPKLVLILPVVTSVERAFSSMNFPWPNSLMLHALWIGYPCDTLTPPLAERAPFIMYLCLHGNANHLIKEKSSTYWHTSMTSLHNWDETFFRFQRLSKGPWGRYHRTEEDQAETNAF

SEQ ID NO: 135866 - protein, 144 aa, Oryza sativa
  Clone ID: PAT_MRT4530_374C.1.pep
LFVNDSAALQSPFLNLLLAPRRLHLRRDAVATTDSIWPHERGEVCDALPILHLLQSLLLLGPLAGGSPRRHSHDAQVAEDPARRHHSPVHAASSPLLASAPSLLLIRPPGRRPPLPLFSSLGSTDLAEVCIGDDYRVLVVTPAA

SEQ ID NO: 135867 - protein, 852 aa, Oryza sativa
  Clone ID: PAT_MRT4530_37500C.1.pep
MVALARMTVIMAAPAPSSFNLRSILEKEKLTGTNFMDWYRNLRIVLRQEYKEFVLTEPFPANLPNNAPAAQRREHEKRCNDYIDISCPMLATMSPELQRQYEALNAHTIITRLRNMIEDQARAERFNTSKSLFACRLAEGNPSLPPSFEPFIMNFNMNNLNRTFAELHGMLKTAEESIKKNSNHVMGLQRSRSLARGEVDIRVGNGARVAAVAERSGYLMRHKSESFEKFKELHNEVQNHLGKTINYLRSDRGGEYLSLEFGNHLKECGIVPQLTPPGTPQWNGASEWRNRTLLDMVYVKRLQSDKLTPKSDKCFLVGYPKETKGYYFYNREEGKVFVARHCVFLEKEFISRKDSGSMVRLEEIQETPENISTSTQPQQAEQDVVQQVEQVVVEPVVEAPASRRFERIWRTHARYALLTIGQRDILLLDNDEPTTYEEAMVGPDFEKWLGAMKSEIESMHVNQVWNLVDPPDGVKAIECKWVFKKKTDVDGNVHIYKARLVAKGFKQIQGVDYDETFSPVAMLKSIRIVLAIAAYFDYEIWQMDVKITFLNGNLNKDVYMTQPKGFVDPQSAKKICKLQKSIYGLKQASRSWNIHFDEVVKALGFVKNEEEPCVYKKISGSALVFLILYVDDILLIGNDIPMLESIKTSLKNSFSMKDLGEAAYILGIRIYRDRSKRLIGLSQSTYIDKVLKRFNMQDSNMVRRAYDNFRSQSGFVFYLNGGAVSWKSSKQDTVADSTTEAEYIAASEVANEAVWVKKFVSQLGVMTSASSPMDLYCDNSGAIAQAKEPRSHQKSKHILRRYHLIRKIVGRGDVKICKIYTDLNVADPLTKPLPQPEHEAHTRAMGIRYVHD

SEQ ID NO: 135868 - protein, 57 aa, Oryza sativa
  Clone ID: PAT_MRT4530_37501C.1.pep
WWRTRSSSTRHMVLNLVHLTEPPFQVKKGKYVLAIRRFIKENYLSSGYMIKSCMHEG

SEQ ID NO: 135869 - protein, 76 aa, Oryza sativa
  Clone ID: PAT_MRT4530_37502C.1.pep
CMTLFLTFEPLYYSPIPVHQHTTQRCGNCVLGSHMSVSSGIQHHPPSLCIGQVSSAPANSLQLAACSLHQKVDKRT

SEQ ID NO: 135870 - protein, 58 aa, Oryza sativa
  Clone ID: PAT_MRT4530_37503C.1.pep
NFRCTNQTYSNHVFLHKTLFLCVPSLQVLLYDNLVYNAESSMFCLYMAIVVSTQLTKL

SEQ ID NO: 135871 - protein, 57 aa, Oryza sativa
  Clone ID: PAT_MRT4530_37504C.1.pep
AGGARSRTARRATAPTASRDTQRAIRTPIVVARGSGSRAGLYRRASRPGGGFTPEFR

SEQ ID NO: 135872 - protein, 1732 aa, Oryza sativa
  Clone ID: PAT_MRT4530_37505C.1.pep
MRRSNDGRPFRPPDWGPPPHRYHHHHQNQYQYQQRYRPAQPGPRQFAVILLRGGSNLSAPPATEVEALVAGLPSPPPDSLSVSSSGRQAARLAFRSPQAAAAAARELWSLRLEGLHLLTPDVSDPALAAHAAPLIASLFAAHAARLVDSDLVSLTAARSSELAASIQAVKRRLAGHNRIRDFEQLQAQKRTLKAEKELVDAKIDEYKAAMRSIRRALLRGTEDDEEAEEEGLEVFGIGGGGEMNFARLHMIMLRECRRLKEGLPIYAYRRNILDHIFANQVMILIGETGSGKSTQLVQYLADSGLAANGSIVCTQPRKIAAISLAHRVVEESNGCYGDNFVLNSTFLDHQDFSSKIIYTTDNCLLHHCMNDMGLDGISYIIVDEAHERSLNTDLLLALIKKKLLDRLDLRLIIMSATADANRLAEYFYGCQTFYVKGRSFPVEIKYVPDISEEASFNTVPNHLRGSCATASYVYDVVKMVSIIHKNEEEGAILAFLTSQLEVEWACENFSDADAVVLPMHGKLSHVEQSLVFKSYPGKRKIIFCTNIAETSLTIKEVKYVVDSGLAKESRFVPSSGLNVLKVNWISQSSANQRAGRAGRTGAGRCYRLYSESDFSMMEVHQEPEIRKVHLGTAVLRILALGIRDAQNFEFVDAPNPEAINMAVKNLEQLGAVKYKCDGFELTDTGRYLVKLGIEPRLGKIMLDCFGFGLRKEGVVLAAVMANSSSIFCRVGTDEEKYKADRLKVPFCHQDGDLFTLLAVYKEWEDEHENRNTWCWQNSINAKTMRRCQETISDLENCLRHELNIIVPSYWCWNPEESTVHDKLLKRIILTSLSGNIAMFSGHERFGYQVISTDQAVKLHPSCSLLIYDSKPEWVVFTEILSVPNQYLVCVTAIDPDALCSIHPMPLIQQLEKLKLQVKVISGLGYNLLRKFCGKSGQNQQKIISLLQEEFRDDRVTVEVDFRNKEVVLFAKEQDIEKVFGIVNDALECEARMLRNECLEKSLFSGKPGDCSLALFGSGAEIKHLELEKRYLTVEVLHQNAHELNDKELICLVDTLISGVANFYKLYGNLQVASDETKWGKFTFLNPEYAEDAVSKLNGMEFHGSPLKVVPVCSSSNRGLPFPAVRAKVSWPLKQSRGLALVTCASGEAEFVVKDCFALGVGGRYINCEVSTRHENCIFVRGIPMHVTEPELYDAFRSTTTRKIVDVHLLRGTPIAAPSASLCAEALNREISSFMPKKIFPAQNFRVEVLTPEENDSVMRATITFDGSLHREAARALEHLQGSVLPCCLPWQTIQCQHVFHSTVSCQVRVYNVISQAVASLLESFRSQKGVSYNLEKNEYGIFRVKLTANATKTIADLRRPLEILMKGKTINHPDLTLSTVQLLMSRDGVADLKSVEQETGTYILYDRQSLNIKVFGLQDQVAAAEEKLIHALLQLRDKKPLDIRLRGRNLPPNLMKEMLKKFGADLEGLKREVPAVELRLNLRQHTLYVRGSKEDKQRVEEMISELVNSTKYNGLLQLPLENACPICLCEVEDPFKLESCGHVFCLTCLVDQCESALKSHDGFPLCCLKNGCKKQLLVVDLRSLLSSEKLEELFRASLRAFVASNAGKYRFCPTPDCPSIYQVAAADAESKPFVCGACFVEICNKCHLEYHPFISCEAYKEYKEDPDATLLEWRKGKENVKVCPSFHFTIEKADGCNHVECKCGSHICWACLENFRSSDDCYSHLRSVHLSY

SEQ ID NO: 135873 - protein, 343 aa, Oryza sativa
  unsure (1)..(343): unsure at all Xaa locations
  Clone ID: PAT_MRT4530_37506C.1.pep
MTVEVEAVTMAKEEQPEEEEVIEKLVEKITGLAAAIGKLPSLSPSPEVNALFTELVMTCIPPSSVDVEQLGAEAQDMRGRLIRLCADAEGHLEAHYSDVLAAHDNPLDHLALFPYFNNYIQLAQLEYALLARHLPAAPPPSRLAFLGSGPLPLSSLVLAARHLPAASFHNYDICADANRRASRLVRADRDLSARMAFHTSDVAHVTTDLAAYDVVFLAALVGMAAEEKARMVEHLGKHMAPGAALVVRSAHGARGFLYPVVDPEEIRRGGFDVLAVHHPEGEVINSVIIARXRPWPAPALEGGDAHAHGHGAVVSRPCQRCEMEARAHQKMEDMSAMEKLPSS

SEQ ID NO: 135874 - protein, 58 aa, Oryza sativa
  Clone ID: PAT_MRT4530_37507C.1.pep
MPLLVSLVRDGYSIHDADILHMELSLHGGMQILDETVRGKIITLEVESSDTIDNVKAK

SEQ ID NO: 135875 - protein, 111 aa, Oryza sativa
  Clone ID: PAT_MRT4530_37508C.1.pep
MTSSPVAARHLVLAGNRWRGDANGGHQRRSSAETEGWTRCCSSSRSRRWRRRPKVVAGPTARRGWTNGSGGELRGDGVGGAPMICGGNGGRDKDGGDLANLATAFPSDGGD

SEQ ID NO: 135876 - protein, 80 aa, Oryza sativa
  Clone ID: PAT_MRT4530_37509C.1.pep
FNCLILPLEFGLIWMVAKICHADVLLEFGGIPYIYCHIGGKKITFGTNDLLACYLVSKFFTGMHACLSKSCNISTPCLGR

SEQ ID NO: 135877 - protein, 423 aa, Oryza sativa
  Clone ID: PAT_MRT4530_3750C.1.pep
REAWEESKKLWEIVGPAVFLRLVLYSFNIISQAFAGHIGDLELAAFSIANNVITGLNFGFLLGMASALETLCGQAYGAKQCSMLGIYLQRSWIILFVFAVLLVPTYVFTAPLLEALGQPAALARKAGMVSVYMLPSHFQYAVLLPLNKFLQSQRKNWVTVVTAAAAFPVHIAVSWLLVSRLRFGVLGAAMSLGVSGWLVTLLQLAYVVGGGCPVTWSGFSPLAFVDLWGFVKLSVSSGVMVCLETWYYKILILLTGHLKNSELAVNALSICMSFQSWEMMIPVGFLAGTGVRVANELGAGNGKGAKFATIVSTTTSNAVIDAVDNISFLLAVTILLNGVQPVLSGVAIGSGWQAAVAYVNIGCYYFIGVPIGVLLGWSFNLGVFGIWAGMIAGTAIQTIILAHMTIQCDWNKEVGRFQAYLLT

SEQ ID NO: 135878 - protein, 160 aa, Oryza sativa
  unsure (1)..(160): unsure at all Xaa locations
  Clone ID: PAT_MRT4530_37510C.1.pep
STTGLRLTSTMTSSPVAARHLVLAGNRWRGDANGGHQRVEGDAANSPSSWMTANDXRMTTAARSKRRRXWVNDDGGVPAIFGGNGGVDEVLLLLAIPTVATTTEGGGWTNGAAWLDQRQRWRASGRRSRRRSDDLRRKRRTGQGRRRPCEPGDGLPEAFP

SEQ ID NO: 135879 - protein, 79 aa, Oryza sativa
  unsure (1)..(79): unsure at all Xaa locations
  Clone ID: PAT_MRT4530_37511C.1.pep
MVPKKDKXPPPPSKPSKSVGGRRTKNNLFKGKQKENANNLMLIDQATLXTKLLSEVAKCKQSTPSVLSDRLQINDSLGS

SEQ ID NO: 135880 - protein, 49 aa, Oryza sativa
  Clone ID: PAT_MRT4530_37512C.1.pep
KHTTDAMISHSSIEVLNWTTVNSKQHHYLKKKLIPSNVCSKTNRIHSNQ

SEQ ID NO: 135881 - protein, 222 aa, Oryza sativa
  Clone ID: PAT_MRT4530_37513C.1.pep
MGSPGAGSSGGGGGGHECSFKILLIGDSGVGKSSLLVSFVVAAAAAHLDDDIAPTIGVDFKIKFLTIGGKKLKLTIWDTAGQERFRTITSSYYRGAQGIILVYDVTKRESFTNLAEVWSKEIESHSSNKDCIKMLVGNKIDKEDERTVTREEGLAFAEESGCLFLESSAKTRDNVEKCFEELALKIMDVPSLLEEGSSSVVKRNILKQKQESQAKHGGGCCQ

SEQ ID NO: 135882 - protein, 52 aa, Oryza sativa
  Clone ID: PAT_MRT4530_37514C.1.pep
IGRCVSLAGYVILGQQGVVTRLLQKAVCMPQRGSWIACGFFCQEAYIYMGNQ

SEQ ID NO: 135883 - protein, 142 aa, Oryza sativa
  Clone ID: PAT_MRT4530_37515C.1.pep
SLVLYSQCAHLPPFGIARSPSPLRTKPGGAPRASPPPPSSGRGSERAAAAVAESVRPPSPAPTQQQSSSVGRKKGSRCRERRAGVGVSPLLPFQASRRRRRGGVGPTCHWPCSPLYIYTAPPPFRRQPEPSGETRLPPPPPP

SEQ ID NO: 135884 - protein, 440 aa, Oryza sativa
  Clone ID: PAT_MRT4530_37516C.1.pep
MKVEVVETTLVAPSEATPQHALWLSNLDLAVPKTHTPLVYYYPAPSPPPADAGPEAEAEGFFAPERLREALARALVPFYPLAGRLAAGPGGRLEIDCNGEGALFVVARADFTGDEMFTDFEPSPEARRLLVPFAASGEPPCVLAMVQVTFLKCGGVAVGTGMHHVTMDGAGAFQFIRTWTGLSRGLDAAAASPSPPSHDRTLLRARSPPHVPFEHPVYSPSYLNGLPRPFVTRVYSVPPKLLADIKAACAPGVSTYGAVTAHLWRAMCVARGLPHDAESRLRVPANIRQRVRPPLPSPYFGNAIVRDLVTVPVRDILSQPLGFVAERIKHAVARVDDAFVRSVIDFLELESEKGNQAARGQFMPETDLWVVSWLGMPIYDADFGWGRPAFVAPAQMFGSGTAYVTQAPDKDDGSGGGVSVLFALEPEYIQCFEKAFYGTE

SEQ ID NO: 135885 - protein, 132 aa, Oryza sativa
  Clone ID: PAT_MRT4530_37517C.1.pep
MTLSDVTLTAPHFVPVDFATWPEITPFMDGVCQVIAPSDGLGLFTELNKFGESCTAVESLFVRGLAAHLSAEKSALERPDGYRLRLRKTEEDLCHKEDERRVVAETIKKANAENKALTGDNKSLRADLEAAN

SEQ ID NO: 135886 - protein, 216 aa, Oryza sativa
  unsure (1)..(216): unsure at all Xaa locations
  Clone ID: PAT_MRT4530_37518C.1.pep
MDSPATPVGLSPPLHSLVLYKEPYYTESKRELLRQXRLGFTVDRVHGGGSRKRTAKIXLSKTNGRDLSVHDRSTANGNNDVSDNVITGGGSGAQARRRTTARRRKRRAPTGCGHRGELTGDQNGGGRSTDGDGVEEEAAATVGLTTTAVFRRSSATTERRTRSATAWRPRRXPPRAVMTTRATAAHGWTNGXDGGARLHGARALPATRDEGEGGDR

SEQ ID NO: 135887 - protein, 420 aa, Oryza sativa
  Clone ID: PAT_MRT4530_37519C.1.pep
MPEDLPKRKKTRGEIFFGPTKSTTRYWYLRVLNRFRSLDLVGQRHHNLNKDGVDKASSSNDDIGHLLTPAHQAAGFSLFDLFRIVDATDNFSLENKIGEGGFGRVYKGQLNGLPVAVKRCFVESSPERLSDFENEIKFIPRLQHRNIVTLKGYCIEGKERILVYEYMQNKSLDKFIFGPRTDWSLYWDRLFAIIEGIAQGIVYLHLHSGLKIIHRDLKLSNILLDSEMNPKISDFGTARSGFPNKGRRTDTVSGTYGYMAPEYSTRGIFSGKSDVFSFGSLLLEIVSGKRNGTWYSIRERKSISLHEYAWRLVFEEKNPERLIRSSLRISVGGDAPHLMGQIVGCAHIALLCVQEDPEDRPSMWDVVLMLHGGVAALSALPTPKQPARRYGGGREQRPKFREVLANGHDWDKKTVTVLMR

SEQ ID NO: 135888 - protein, 54 aa, Oryza sativa
  Clone ID: PAT_MRT4530_3751C.1.pep
GHLNQINWPLFYNVWSGKTLAFPNLIPLKKIPFSPVGVIAKRPPPIPFPNSCST

SEQ ID NO: 135889 - protein, 558 aa, Oryza sativa
  Clone ID: PAT_MRT4530_37520C.1.pep
MELSSSLAAVLHSPLFLLAALLLLPVFTLLSFSSAKKPGDGGGWRLPLPPSPRGVPFLGHLPLLGSLPHRKLRSMAEAHGPVMLLWFGRVPTVVASSAASAQEAMRARDAAFASRARVRMAERLIYGRDMVFAPYGEFWRQARRVSVLHLLSPRRIASFRGVREQEVAALLDRVRRRCGVRGGGETVNLSDLLMSYANGVISRAAFGDGAYGLDGDEGGEKLRELFANFEALLGTATVGEFVPWLAWVDKLMGLDAKAARISAELDGLLERVIADHRERRRLSQPDGGDGDGDGDENVDHRDFVDVLLDVSEVEEGAGAGEVLLFDTVAIKAIILDMIAAATDTTFTTLEWAMAELINHPPVMRKLQCEIRAAVGVPGASGGAEVTEDHLGELRLLRAVVKETLRLHAPVPLLVPRETVEDTELLGYRVPARTRVIINVWAIGRDAAAWGDRAEEFVPERWLDGGGEEVEYAAQLGQDFRFVPFGAGRRGCPGAGFAAPSIELALTNLLYHFDWELPPHADGAAAATAARLDMGELFGLSMRMKTTLNLVAKPWSSDV

SEQ ID NO: 135890 - protein, 320 aa, Oryza sativa
  Clone ID: PAT_MRT4530_37521C.1.pep
MSSSTSARDDEAPDLVCQIDCVHGMVDALSCVRWKRHQICPDLRPHFPLPRGVQDAVLELSEHGIVLIVEESGCLQAKVYLKRELFMEYEYAAEGRPRFGLSLGLLVDCLNTFSAPGHSSPVEIRYPGPDMQLLLKSVGSPDSCMYAEIRTRIPDTISWDYHFEHAGNTPVTFTVKSAVLKESIEDLEWPGSSIQIQMQPDPPSVLFKGEGHGDLQIEFPYYANTDLLIAFQCDHETSYRYKYKFLRATTSNFPNSIVKENRGSKVTIGRGGMLKIQHLVSVARPGMQNFRNVAGGAQQPSRIAYIEFFVKPEEYEINDA

SEQ ID NO: 135891 - protein, 404 aa, Oryza sativa
  Clone ID: PAT_MRT4530_37522C.1.pep
MVGLEEIQETPENVSRSTQPQQAEQDVAQQVEQVVVEPVVEALASQRFERIRRTPARYALLTTGQHDILLLDNDEPTTYEETMVGPDSEKWLGAMKSEIESMHVNQVWNLVDPPDGFRQIQGVDYDETFSPVTMLKSIRIVLAIAAYFDYEIWQMDVKTAFLNGNLDEDVYMTQPKGFVDPQSAKKICKLQKSIYGLKQASRSWNIRFDEVVKALGFVKNEEEPCVYKKINRSALVFLILYVDDILLIGNDIPMLKSVKTSLKNSFSMKDLGEATYILGIRIYRDRSKRLIGLSQSTYINKMLKRFNMQDSKKGFLSMSHGINLGKNQCPQTIDEQNKKSVIPYASAIGSIMYAMLCTRPDVSYALSATSRYQLDPDPLTKPLPQPKHEAHTRAMGIRYVHDWL

SEQ ID NO: 135892 - protein, 116 aa, Oryza sativa
  Clone ID: PAT_MRT4530_37523C.1.pep
MAIDDVMRTPAGAGLMSPYPSSSPPLYFPHLLSPLPPHGRRSPLSPCQYCHDLGNGDRDHDHSNGNLDAASRDCVEAAEVARPAGSSGGGDKARPGGGQSGEAGSGEEYCSRRADR

SEQ ID NO: 135893 - protein, 328 aa, Oryza sativa
  Clone ID: PAT_MRT4530_37524C.1.pep
MSPELQRQYEALDAHTIITGLRNMFEDQARAERFNTSKSLFACRLAEGNPVSPHVIKIIGYTESLDKLGFPLSQELATDLILQSLPPSFEPFIMNFNMNNLNRTLAELHGMLKTAEESIKKNSNHVMVMHKRKPNNRKSGQKRKLNSDEITSTSNSKTKVQKTVPAKDAECFFCKETGHWKRNCKKYLEQLKQKQQDGKSSTSGAEKKYGYVYLMRHKSESFEKFKEFQNEIQNHLGKTIKYLRSDRGGEYLSLEFGNHLKECGIVPQLTPPGTPQWNGVSERRNRTLLDMETPENAPTSTQPQAEQDVVQQVEQAVVEPVVEAPASR

SEQ ID NO: 135894 - protein, 61 aa, Oryza sativa
  Clone ID: PAT_MRT4530_37525C.1.pep
MRCSLGDLGFNTRGPNDMLIVTIELCYSVIAPLIIPFGVAHFALGWTIVPNQVLQAYVPPY

SEQ ID NO: 135895 - protein, 1500 aa, Oryza sativa
  Clone ID: PAT_MRT4530_37526C.1.pep
MDRVVDDIHRDNRNRRAARVPLDEGLDPEDYLQWEMRCDQIFNSHNYLEDKKARLASIEFTGYALSWWNQLQLKQGDLSVDAYYKEMELLMSHTGVTENDEATIARFLTGLNDDVKERVEISYYYDIQNMVHIAQRVEQQLTSRHTSRSCSFQRDGDGSAASKSMSFKLTTPSRDGSKPAASSVSKSKSKVESTATSSSKSRSVQCYTCGGRGHYMRDCPNQKKVLMTKEGYVSESILENSEGVQLDHTLTTGYRDIDDSSMDDGAEKNNGLSMLAYAVQRDGSNVDAKGQRCNIFQSECKIQEKLLLGRPWQFDRNATHEGRSNCYSWANGQAESSNKTLLKLVKKKIEEDPNKWHEVLSEALWAHRISKHGTTKVTPSELVYGQEAVLPVEALEEIEKEKKRVAKAYNKRVKAKLFQVGDLVRKTILPLGTRSREFGVAIVLVDLSKKLPTVCIAANCPTSFGMASWINSAWLLDVVCTKNFESPLDKLGFKEDAALVKRSWQPAPSSFNLRSILEKEKLTGTNFMDWTKQELRGLIPQSPCLRASLQKSLPPSFEPFIMNFNMNNLNKTLAELHEMQKTAEESIKKNSNHVMVMHKRKPNNKKSGQKRKLNYDGITSTSNSKTKVQKTGPAKDAECFFCKKTGHWKRNCKKYLEQLKQKQQDGKSSTSALCKNVISASCLQAEGYGFRSVDNGCSVYYNDIFYFHAPMMSGLYIVNLDGCSIYNINAKRQGPNDLNPTFIWHCRLGHINEKRMEKLHRDGLLHSLDFESFETCESCLLGKMTKAPFTGQSERTSELLVLVHTDVCGPMSSTARCGFGYFITFTDDFSRYGYVYLMRHKSESFEKFKEFQNELWGYALETAAFTLTRVPSKSVDKTPYEIWTGKRPSLSFLKIWGCEVYVKRLQSDKLTPKSNKCFFVGYPKETKGYYLYNREEGKVFVARHGVFLKKEFISRKDSGSIVRLEEIQETPENASTSTQPQQAEQDVVQQVEQVVVEPVVEAPASRRSERIRRTPARYALLTIGQRDILLLDNDEPTTYEEAMVGPDSEKWPGAMKSEIESMHVNQVWNLVDPPDGVKAIECKWVFKKKTYVDGNVHIYKARLVAKGFRQIQGVDYDETFSPVAMLKSIQIVLAIAAYFDYEIWQMDVKTAFLNGNLDEDKSIYGLKQASRSWNIRFDEVVKALGFVKNEEEPCVYKKISGSALVFLILYVDDILLIGNDIPMLESVKTSLKNSFSMKDLGEAAYIMGIRIYRDRSKRLIGLSQSTYIDKVLKRFNMQDSKKGFLPMSHGINHGKNQCPQTTDERNKMSVIPYAWAIGSIMYAMLCTRIDVSYALSATSRYQSDPGESHWIAVKNILKYLRRTKDMFLVYGGQEELVVNGYIDASFQTDKDDFRLQSGFVFCLNGRAVSWKSVMTSASSPMNLYCDNSGAIVQAKEHRSHQKSKHILRRYHLIHEIVGRGDVKICKIHTDLNVADLLTKPLPQPKHEAHTRAMGIRYVHD

SEQ ID NO: 135896 - protein, 395 aa, Oryza sativa
  Clone ID: PAT_MRT4530_37527C.1.pep
MTKAPFTGQSERASELLGLVHTDVCGPMSSTARCGFGYFITFTDDFSRYGYIYLMRHKSESFEKFKEFQNEVQNHLGKTIKYLRSDLSGEYLSLEFCNHLKECEIVPQLTPPGTPQWNGVSERRNRTLLDMVRSMMSQTDLPLSFWDYALGTAAFTLNRVPSKSVDKTLYEIWTGKRPSLSFLKIWGFWNLVDPLDGVKAIECKWVFKKKTDEDGNVHIYKERLVAEGFRQIQGVDYDKTFSPVAMLESIRIVLAIPAYFDYEIFQMDVKTAFLNGNLDEDVYMAQPKGFVDPQSAKNICKLQKSIYGLKQASRSWNIRFDEVVKTLGFVKNEEEPCVYKKISGSALVFLILYVDDILLIGNDIPMLESVKTSLKNSFSMKDLGEAAYILGIRIY

SEQ ID NO: 135897 - protein, 270 aa, Oryza sativa
  Clone ID: PAT_MRT4530_37528C.1.pep
MYCLSCMHYRYKDVAAGNEMKVRIDVGHLYAEIIGLLDKIMAAPAPSNFNLRSILEKEKLIGTNFMDWYRNLRIVLRQEQKEFVLTEPFPANLPNNAPAAQRREHEKRCNDYLDISCLILATMSPELQRQYEALDAHTIITGLCLQKVIQTLAELHGMLKTAEESIKKNSNHVMVMHKHKPNNKKSGQKRKLNSDEITSTSNSKTKVYLMRHKSESFEKFKEFQNEVQNHLGKTIKYLRSDRGGEYLSHEFGNHLKECGIVPQLTPPGTP

SEQ ID NO: 135898 - protein, 640 aa, Oryza sativa
  Clone ID: PAT_MRT4530_37529C.1.pep
MEIQYELTSDRDLNRSPTGLGGPSDGSYIFVKGVTGGGIASPAWVDEINRIDVGHLYAEIIGLLDKIMAAPAPSNFNLRSILEKEKLTGTNFMDWYRNLRIVLRQEHKEFVLTEPFPANLPNNAPAAQRREHEKRCNDYLDISCLMLATMSPELQRQYEALDAHTIITGLRNMFEDQARAERFNTSKSLFACRLAEGNLVSPHVIKMIGYTESLDKLGFPLSRELATDLILQSLPPSFEPFIMNFNMNNLNRTLAELHGMLKTAEESIKKNSNHVMVMHKRKPNNKKSGQKRKLNSDEITSTSNSKTKVQKTGSAKDAECFFCKETGHWKRNSLCNNVISTSCLQAEGYGFRSVDNGCSVYYNDIFYFHAPMMNGLYIVNLDGCSVYNINAKRQRPNNLNPTFIWHCCLGHINEKRIEKLHRDGLLHSFDFESFKTCESCLLGKMTKAPFTGQSERASELLGLVHTDVCGPMSSTARGGFGYFITFTDEFSRYGYVYLMRHKSESFEKFQEFQNEVQNHLGKTIKYLRSDRGGEYLSLEYGNHLKECGIVPQLTPPGTPQWNAVSERRNRILLDMVRSMMSQTDMPLSFWGYALETAAFTLNRVPSKSVDKTPYEIWTGKRPSLSFLKIWCCEVYVKRLQ

SEQ ID NO: 135899 - protein, 487 aa, Oryza sativa
  Clone ID: PAT_MRT4530_3752C.1.pep
MVPSFPQPASAAAATRPIPGSYGPPLLGPLRDRLDYFWFQGPDDFFRRRAADHKSTVFRANIPPTFPFFLGVDPRVVAVVDAAAFTALFDPALVDKRDVLIGPYVPSLAFTRGTRVGVYLDTQDPDHARTKAFSIDLLRRAARNWAAELRAAVDDMLAAVEEDLNRAPDPAAASASYLIPLQKCIFRFLCKALVGADPAADGLVDRFGVYILDVWLALQLVPTQKVGVIPQPLEELLLHSFPLPSFVVKPGYDLLYRFVEKHGAAAVSIAEKEHGISKEEAINNILFVLGFNAFGGFSVFLPFLVMEVGKPGRDDLRRRLREEVRRVLGGGDGGEAGFAAVREMALVRSTVYEVLRMQPPVPLQFGRARRDFVLRSHGGAAYEVGKGELLCGYQPLAMRDPAVFDRPEEFVPERFLGDDGEALLQYVYWSNGPETGEPSPGNKQCAAKEVVVATACMLVAELFRRYDDFECDGTSFTKLDKRELTPS

SEQ ID NO: 135900 - protein, 413 aa, Oryza sativa
  Clone ID: PAT_MRT4530_37530C.1.pep
MCRCAAAIARAVVEFLDAVLVGFFLSFFGPHPRDRDRDDSPGSGRRDSLAHKDRLGELLSDDDELGLGGRGGSHEDLADDCGSDEELRSEANFLKLCGTLFETPAELHNISYQINMESYIEHDKIPTNVLAVEATPAFESKSSGGFEYGEDHILTPQLNTEDTEHLPLVKSVYQSAIRGNSPFQNIKSINDGSSDSPFHTPLVLRDDMQTPRTVYTSHKGSSGKRVRTRKQFAYPIFRPTENKLQKMQLSDSAKMTQQISSDSVVKGESLNSSHFPLEVSKYQLDRQRLLDAGERSKSNSDENIEVCSLSRWLKSSPAGNTNQMYDENNLIEEGHAFMTSEDNVDVDNHTPRLSKARDCHCIPNTSRKYGEDQHVSWHSTPFEERLIKVLSDEEVPPTRKLVPGRLLYLEERV

SEQ ID NO: 135901 - protein, 471 aa, Oryza sativa
  unsure (1)..(471): unsure at all Xaa locations
  Clone ID: PAT_MRT4530_37531C.1.pep
TRPVDGNVHIYNARLVAKGFRQIQGIDYDETFSPVAMLKSIRIVLSIAAYFDYEIWLMDVKTVFLNGNLDEDVYMTQPKRFVDPQLAKKICKLHKSIYGLKQASRSWNIRFNEVFKALGFVKNEEEPCVYKKISGNALVFLILYVDDILLIGNDIPMLESVKTSLKNSFSMXDLGEAAYILGIRIYRDRSKRLIGLSXSTYIDKVXLKMFNMAESKKGFLPMSHGINLGKNQCPQTTDERNKMSVIPYASAIGSIMYAMLCTRPDVSYAVSATSRYQSDPGESHWIAVKNILKYLRRTKDMFLVYGGQEELIVNGYTDASFQTDKDDFRSQSVFVFCLNGGTVSXKSCKQYTVADSTTEAEYIAASEAAKEAVWIKKFVSQLGVMTSASSPMDHYCDNSGAIAQAKEPRLHQKSKHILRRYHLIREIVDRGDVKICKIHTDLNVADSLTKPLPQPKHEAHTRVMGIRCVHD

SEQ ID NO: 135902 - protein, 181 aa, Oryza sativa
  Clone ID: PAT_MRT4530_37532C.1.pep
GNLPRIEAPHRCHNHQPNPHEILPSLPILAHRRPRAAPRADPCARANPASETPENNHHLNPNPLPKPNDPTRGPATKREGYVYGRLGFRGVPSRGGRSRGCRRGRGRGGGGRRRRGRSRRGRRRGTPPPPSRSPPRTGTSSSRRGPSRRRGERRRGGGEERGYSLKWEAKLFFFFFFPGRP

SEQ ID NO: 135903 - protein, 730 aa, Oryza sativa
  unsure (1)..(730): unsure at all Xaa locations
  Clone ID: PAT_MRT4530_37533C.1.pep
PAFLSSQRKKESHGLHPCHGSEGIVVVDPLLLHEIACHQEHKEFVLTKPFPANLTNNAPAAQRREHEKRCNDYLDISCLMLATMSPELQRQYEALDAHTIFTGLRNMFEDQARAERFNTSKSLFACGLAEGNPMSPHVVKMIGYTESLDKLGFPLSRELATDLILQSLPPCFEPFIMNFNMNNLNRTLAELHGMLKTAEESIKKNSNHMMVMHKRKPNNKKSGQKRKVNSDEITSTSNSKTKVQKIGPAKDAECFFCKETGHXKRKCKKYLEXLKQKQQDGKSSTSGINVIEINLATSSTNSWVFDTRSVAHICKSLXGLKKSRSLARGEVDIRMGNGARVAAVAVGTMPLSLPSGLVLELNNCYCIPALCKNVISASCLQAEGYGFISVDNGCLVYYNDIFYFHAPMMNGLYIVNLDGCSVYNINAKRQRPNDLNSTFIWHCRLGHINEKRMEKLRRDGLLHSFDFESFETCESCLLGKMTKAPFMGQSERASELLGLVHTDVCGPMSSTARGGFGYFITFTDDFSRYGYVYLMRHKSESFEKFKKFXNEVQNHLGKTIKYLXSDRGGEYLSLEFGNHLKECGIVPQLTPPGTPQWNGVSERRNRTLLDMVXSMMSQTDLPLSFWGYALETAAFTLNRVPSKSVDKTPYEIWIGKRPSLSFLKIWGCEVYVTRLQSDKLTPKSDKCFFLGYPKETKGYYFYNREEGKVFVAPHGVFWKRKFIRSQTGGY

SEQ ID NO: 135904 - protein, 113 aa, Oryza sativa
  Clone ID: PAT_MRT4530_37534C.1.pep
PKINDDDDELQEGEETEQVVTARGTRSRERPKGGKDLRGKGTRFARHEAVRYYSKQPRPRPSQAARIQRDKASKNHYSLLVLGQAVTGHRRGGCSSSSERKGRKARRWMRGSI

SEQ ID NO: 135905 - protein, 484 aa, Oryza sativa
  Clone ID: PAT_MRT4530_37535C.1.pep
KHRLHKGPKGYGVHLQDNDDPTPYEEAMVGPDSEKWLGAMKSEIESIHVNQVWNLVDPPDGVKAIECKWVFKKKTDVDGNVHIYKARLVAKGFRQIQGVDYDETFSPVTMLQSIRIVLAIAAYFDYEIWQMDVKTAFLNGNLDEDVYMTQPKGFVDPQSAKNDILLIGNDIPMLESVKTSLKNSFSMKDLGEAAYILGIRIYRDRSKRLIGLSQSTYINKVLKRFNMQDSKKGFLPMSHGINLGKNQCPQTTNERNKMSVIPYASAIGSIMYAMLCTRPDVSYALSATSRYQSDPGESHWIAIKNILKYLRRTKDMFLVYGGQEELVVNGYTDASFQTDKDDFRSQSGFVFCLNGGAVSWKSPKQDTVADSTTEAKYIAASEAAKETVWIKKFVSQLGVMTSASSPMDLYCDNSGAIAQAKEPRSHQKSKHILRRYHLIREKVGRGDVKICKIHTDLNVADPLTKPLPQPKHEAHTRAGCKIHS

SEQ ID NO: 135906 - protein, 1323 aa, Oryza sativa
  unsure (1)..(1323): unsure at all Xaa locations
  Clone ID: PAT_MRT4530_37536C.1.pep
MAAPALSSFNLRSILEKEELTGTNFMDWYCNLGIVLRQEHKEFVLTQPFPADLPNNAPVAQRSEHEKRCNDYLDISCLMLATMSPEFQRQYEALDAHTIITGLRNMFEDQARAERFNTLKSLFACRLAEGNPVSLHVIKMIGYTESLDKLGCPLSRELATDLILQSLPPSFEPFIMNFNMNNLNSSLAELHGMLKTAEESIKKNSNHVMVMHKCKPNNKKSGQKRKLNSDEIMSTSNSKTKVEKTGPAKDTECFFYKETDHWXRNCKKYLEQLKQKQXDGKSSTLGINVIEINLATSSTDSWVFDTGSVAHICKSLQGLKRSRSLARSEVDIRVGNRARVAAVAVNTMPLSLPSXLVLELNNYYCIIVLCKNVISASCLQAEDYDFRSMDNGCSVYYNDIFYFHAPMMNGLYIVNLERCSVYNINAKSQRPNDLNPTFIWHCRLGHINEKRMEKLHRDGLLHSFDFEXFETCXSCLLGKMIKAXFQGQSERASELLGLVHTDVCGPMSSTARGDFGYFITFTDDFSRYGYVYLMRHKSESFEKFKEFQNEVQNHLGKTIKYLXSDRGEEYLSLEFGNHIKECGIVPQLTPTGTPQWNGVSERRNRTLLYMVRSMMSQTDMPLSFWGYALETAAFTLNRVPSKSVDKTPYEIWTGKRPSLSFLKIWGCEVYVKRLQSDKLTPKSDKCFFVGYHKEMKGYYFYNREXGKVFVARHGVXFFLKKEFISRKDSGSMVRLEEIQETPENASTSTQPQQAEQDVVQEQVVVEPVVEAPASRRSERIRRTPARYALLTTGQRDILLLDNDEPTTYEEAMVGPDSEKWLEAMKSEIEFMHVNQVWNLVDPPDGVKAIECKWVFKKKTDVDGNVHIHKARLVVKGFRQXFSPVAMLKSIQIVLAIATYFNYKIWQMDVKTAFLNGNLDEDVYMTQPKGFVDPQSAKRICKLQKSIYGLKQASRSWKICFDEVVKVLGFVKNEEEPCVYKKISGSTLVFLILYVDDILLIGNDIPMLESVKTSLKNSFSMKDLGEAAYILGIRIYRDRSKRLIGLSQSTYIDKVLKRFNMQDSKKGFLPMSHGINLGKNQCPQTTDERNKMSVIPYASAIGSIVYGMLCTRPDVSYALSATSRYQGYVPSPGESHWIVVKNILKYLRRTKDMFLVYGGQEEIVVNGYTDASFQTDKDDFRLQFGFVFCLNGGAVSWKSSKQDTVXADSTIEAEYIAASEAAKEAVWIKKXVSQLGVMTCASXPMDLYCDNIGAIAQAKEPRSHQKSKHILLRYHLIREIVGRGDVKICKINTDLNVADPLRKPLPQPKHEAHTRAMGIRYIHD

SEQ ID NO: 135907 - protein, 83 aa, Oryza sativa
  unsure (1)..(83): unsure at all Xaa locations
  Clone ID: PAT_MRT4530_37537C.1.pep
MSFVISLTLLTIVNNAITGNNLVSSWFGMEYSWFGDRTVQPGWLFRMVGPMQQGMLYSVGLILLNXYLTILNSQMFAKCCFLQ

SEQ ID NO: 135908 - protein, 351 aa, Oryza sativa
  Clone ID: PAT_MRT4530_37538C.1.pep
MGLIGSDRRRPGIRMGRVKLPIKRIENTTNRQVTFSKRRNGLIKKAYELSVLCDIDVALLMFSPSGRLSHFSGRRGVEDVILRYMNLSEHDRGEAIQNREEIQQEIYSSQQQLQITEDRLRMFEPDPAAFGTSSEVDGCEKYLMELLTRVVERKNNLLSSHMAPFDATTAAMQGADGTQMYVSQADGLATFGGDAAMWGPDGGADPGHPMFSASDPLIYLRDHDVYDANSQVAGLHGGDPCAAGGAAAAAAAVGCVDDDVAGGHAAAADAWRQAYTCTELLSTLIPTTPFPLMPHCLGPEDQYLSMEHGMVAAAQEPVEASTASCSYVPSDENSGTPVMAYDSNPPPANIA

SEQ ID NO: 135909 - protein, 779 aa, Oryza sativa
  unsure (1)..(779): unsure at all Xaa locations
  Clone ID: PAT_MRT4530_37539C.1.pep
MPCRRASTPAAAAAADPAVAAWPLTPLVLALAVFSAMPHVTLSRGRENQWPPLEGNSQLTTTKNLSCDEVPYPFGLKGKSAPGFRVTCRKNDSAAMLRIGHQKFRIDQVSSQEGFVVIFAGPIYRLCYDRNGRPVVGSTGIGPTNLTDTPFFFSKRNTLVATGCYSNFTATFTSSLHHHGWSTNGSCTTNGRVNSDGLCPGTACCDAYGMPLDDAQEVTFEFNKTSASVAGTCSAAFILYQKEQIFKVSGNSKPMHLHQEEHIFRAGGGDSKPVHLEDVLVPLGERRMVLDWVIGRATCEQARNNSFKTQYRCNNESSCMDRFMGEGYVCRCKAGYDQHNGNPYEAGGCQXVLCHNTPGGYTCSCPQXKHCVHGYSDRAQGALTPIGHLAPLPTTNRKKRKVERNRAELFRKNGGLLLQQRFSMMTSQGEDSSAKIFSAEELKDATDNYSESRILGRGGSGMVYKGILPNNTTVAIKKSILFDESQVEQFANEITILSQIDHPNVVKLLGCCLETNVPLLVYEFIPNGTLFQHIHNRSSLRWEDCLRIAEETAEALDYLHSTSSTPIIHRDIKSSNILLDENLMAKISDFGASRSVPFDQTHVTTLIQGTIGYLDPEYFQSSKLTEKSDVYSFGVVLAELLTRQKPISASRPEESCNLAMYIVNLFNERRLLQEIEPHILAEAGEEQIHAVAQLSVRCLNLKGEERPVMREVASVLHGLRESFDEEQIIRRSNESIQITNGQDSVHSEARPIPSLQSSGEITTEYSLPAEILPSSYLAR

SEQ ID NO: 135910 - protein, 180 aa, Oryza sativa
  Clone ID: PAT_MRT4530_3753C.1.pep
MHSKNRGSPSPFHPWLCGHDAEPVAHAVPPRVGLAIVRAHPAVLARPQPRNIPRTDLAALISTTPNPGRPPLHQTVARRCPRASVAAAESNFASTPGESSQDRRRIHEKDLSRSLASSFASPRSAELRRPCSALFLPPRSFPGRNSSSRLYSALGYVRSLPDRALEDSYPPSFAKGRKAD

SEQ ID NO: 135911 - protein, 104 aa, Oryza sativa
  unsure (1)..(104): unsure at all Xaa locations
  Clone ID: PAT_MRT4530_37540C.1.pep
LGDDGEPAGDSGRRRAGLEGVGHLEAGVGDPCVVGAGEELPVLGCRDAVVDSGDVRHVGAAELEPPEPRXTPSPRGTSPAASRPPPPPAQPSSSPPPGRCAPPP

SEQ ID NO: 135912 - protein, 525 aa, Oryza sativa
  unsure (1)..(525): unsure at all Xaa locations
  Clone ID: PAT_MRT4530_37541C.1.pep
MEAAGLSSWMRGFLLPSLWEAEVAVSAAALLVAALLLLFLDQAVQSSTKSPASSSSPPPSPTTTAAASCRRDGGCGGCGCRRRRAKGKPAAAELGGTSKVALPDGSPHSRGRTSYVIKLELLCAKYLIGANLNGSSDPYAVISCGEQRRFSSMVPSSRNPLWGEEFNFLVRELPVEFCTAPVNDSKVTITMYDWDTVCKCKVIGSVTVAVLGEDEAGATWFDLDSKSGQICLRFSSAKVFLTSXEIVHQSYSCALERSFLHHGXKRSQHSLINPAITIFLRTGSGGHGTPPSCSQNGRIRYKFTSFWNRNRTFRALENALQSYRATLEAEKQVRMHSLQQRRSSDVICSKIDDLKTAERSIEQAKAFQPFINEHVLVDATSLSKWYPSDEYGGKIREVMFRSLCHSPLCPPDTAVTEWQRASFSKNKTNLIYETKHQAHDVPFGSYFEIHCRWHLRTTSSSTCQVDIKIGVNMKKWCILQSKIKSGATDEYRREVCKILEAACDYVLKEESNNQASHEIEAISLT

SEQ ID NO: 135913 - protein, 86 aa, Oryza sativa
  Clone ID: PAT_MRT4530_37542C.1.pep
ASVTHQKWFASSSRLLPTFSGSANSPTVSHQYHAASARSAIVAGYRRRLQLQLPVGAVPRSSIVIPWLRLRCGLVHGDPRLAKETS

SEQ ID NO: 135914 - protein, 60 aa, Oryza sativa
  Clone ID: PAT_MRT4530_37543C.1.pep
RSNSGENFCGLFYKLFRGLRQGGSYVLDAGLELQLGAENWSDLGMVYIYSSGADYAIKFY

SEQ ID NO: 135915 - protein, 86 aa, Oryza sativa
  unsure (1)..(86): unsure at all Xaa locations
  Clone ID: PAT_MRT4530_37544C.1.pep
KHKNWKNPGFPKLNHFEKNPLFPSWVKTKKARTNGLSKNLPTLNGKWNPPFTGPXSPGGVGVTPKVTFTFASALTPVLLFFFPFLF

SEQ ID NO: 135916 - protein, 191 aa, Oryza sativa
  Clone ID: PAT_MRT4530_37545C.1.pep
MASSNIVNGEELGEPERRPLNPSAKGFIISLGKHSAISQGTKDIEKSNTDTMNKFITHCSGNGAEDGRTSSGNVISGYEGVCGTTFGVIDNKADTTGEIVDVTGCELSSGDKRELGCRGAQIAGKKSIILLTVMKGSLIHMAGPKRGIQLIGTNLIEYDMKIKTGEYIYENEDLQLIDGVSIIDDIDNMEL

SEQ ID NO: 135917 - protein, 194 aa, Oryza sativa
  unsure (1)..(194): unsure at all Xaa locations
  Clone ID: PAT_MRT4530_37546C.1.pep
LTCVWRRNIIISSIPRCLTHSRQQGSLPSRIHARLLPYRTWYVVSITMTVAPDFNANEQVHILNRRPWSNCYRAHVTVLTVPQPSEVMVREIATFYXFENQRASRIISRTPMEVAVREIATYWFGDQRANRIISRTPMEVAVQEITTHWFEDQQTCRVISRTPMEVAVREIATYWFEDQRASRIISRTPMEVLE

SEQ ID NO: 135918 - protein, 98 aa, Oryza sativa
  Clone ID: PAT_MRT4530_37547C.1.pep
MAKQCRCEPGESVSNARNAASSNHIDQGKQAGPHPSDCMGRELTRDHGDRSSSPHDLTNYKRFTKHAMEADMLLTGTDELFAITDVLFISQSLLPSGH

SEQ ID NO: 135919 - protein, 243 aa, Oryza sativa
  Clone ID: PAT_MRT4530_37548C.1.pep
MATLRLTSVTLRPAASPSSAAAPRSANFARAAARGFPSLRLAPPRRRGDLARRRAAADAAAEGYATALSEVASENGTLEATVSDLEKLEKIFAEEAIAEFFDNPTVPRDEKAQLIDEIAKSSELQAHVVNFLNVVVDNGRAGLMTQIVREFENAFNSLTGTEVATVTSVVQLESQDLAQIAQQVQNLTGAKNVRVKTRIDPELIAGFTIQYGRDGSSLIDMSVRKQIEEITSEFEMPAVTLDV

SEQ ID NO: 135920 - protein, 236 aa, Oryza sativa
  Clone ID: PAT_MRT4530_37549C.1.pep
MACKRPAPDGGDAFLAAASPCCKKPRPLFTSIFNYEYLHKLGAGSYGVVYKARDRRTGETVAVKWGDAPRRHGAPRHQAGQHPRRPGLRAICDFGMATTAPPPYEPYMVGTLHYNSPEQLTESGLNGKYDAKVVDMWAAGCVMAELLTGGRAFTSETAKEHLLELVELRDYDIGSRNSLAFGGLRWLSPAGREVLAGLLAFDGDKRMTAEAALEHRWFTEEADSPAVLSCLAAIAS

SEQ ID NO: 135921 - protein, 380 aa, Oryza sativa
  unsure (1)..(380): unsure at all Xaa locations
  Clone ID: PAT_MRT4530_3754C.1.pep
QCFIVSGARQLNDXLSPEEEAKFEYADCLFHGAFISVLDENILDVCTHMPSGKDMWDALEAKFRVSDAANELYVMEQFYDYKMVDDRSVVEQAHEIXALAKELENXSCKLPGQFVVGGIIFKLPPSWLDFTTSLKHNMKEFNVTNLSDSLGVAEKARAKVNRSKKIEGGSSTNLVXKKNPQVSHNKKKVKPDVKPKVTRNXRKKKGKGKTNDNYFVCSEPSHWAKEYPNYKDKKSANMVISDGGGTSRYGKFLPTILFVFHSHEXVVDTYSNIHVCVDISLFSSYQVRRGFSLLIENDSHAVVHSVGTVDLKFIXGKKTVQLKNEQHVPSIKKNLVSGSLFCIDGFKLVFKSNKYVVSKYGTFVGKSYDNGAQARQQAPR

SEQ ID NO: 135922 - protein, 300 aa, Oryza sativa
  Clone ID: PAT_MRT4530_37550C.1.pep
MESNLDMPVDKHPPLLVRDLHIMMDTSRHVAYASLLAHIVAGVRQSSGLILNTFNAIERTDVEQIRRDTAIPVFPVGPLHMLSPPATVATQKSSLLLEDRSCLEWLNTQLPGSVLFVSFGTLVSIDADELLEVAWGLAASNRPFLWVVRPRLVRGRDSVELPSELLEETRGRGRIIRWAPQEEVLSHPAIGAFLTHCGWNSTLESISRTVPMICKPCGGDQLGTARYVCDMWKVGVRVEVEDKLTRGGIQAAIERLMDGIEGGVVRDRMREMGDVVSKCTTKGGSSDLALQDLVDFIKSS

SEQ ID NO: 135923 - protein, 87 aa, Oryza sativa
  Clone ID: PAT_MRT4530_37551C.1.pep
QLPLVQCFRVVYVVCKIYVYTTLVSPVPCKLGKILVCQINFGEPVLVNSDKMQFMHLISLPCINQKNQNTLVADFDNSIRTYCPSVI

SEQ ID NO: 135924 - protein, 82 aa, Oryza sativa
  unsure (1)..(82): unsure at all Xaa locations
  Clone ID: PAT_MRT4530_37552C.1.pep
SHEAILAPLAIGYAVNVHHLGTIRITGTGINPTRSLGATIIYNKDXAWNDHWTLCVGPYRGAALAAMYDQVIIRATPFKIMS

SEQ ID NO: 135925 - protein, 61 aa, Oryza sativa
  Clone ID: PAT_MRT4530_37553C.1.pep
MKNLGGKKRREIEEEAVGEDAGGDEQAEAEHIGARAFIEDAAQERWGREGRRGDRRKKTGL

SEQ ID NO: 135926 - protein, 83 aa, Oryza sativa
  unsure (1)..(83): unsure at all Xaa locations
  Clone ID: PAT_MRT4530_37554C.1.pep
MIEVVLNDRLWKKMRVKSNKDDTIXDLLEDVXWRRRXTRAAEESSIXQVVQHXSKATSPSXTIEIXRRDVASRSFTTSRPLCL

SEQ ID NO: 135927 - protein, 276 aa, Oryza sativa
  unsure (1)..(276): unsure at all Xaa locations
  Clone ID: PAT_MRT4530_37555C.1.pep
TSVCIRVGRVGLRNQXLLRRLHGRAGDHVFGXSTRHDYSLFVNIYFTFTNMSNTGDNGNSGDKEKEAPVNTNGGNTAPNSGGGPFLGERAIRRRPPPAAAESSGEGQNHRRQQERRRSSETQVLDEMGASGRSAKRRRRSGPPEIGEAEEHPAAAEEDEEGADHISNLPDAILGDIVARLPTKEAGSTQILACRWRHIWRSSSLNLDCTTTSLSAKNDALAAGVVSSILSTHPGPCRRLCVPAHHLVDRPDAVDAWLRSATLDNLKELRVHQRTLL

SEQ ID NO: 135928 - protein, 67 aa, Oryza sativa
  Clone ID: PAT_MRT4530_37556C.1.pep
VHSIHALASFYTSNRTGSGVLTSVFCVVSQLLPCHPFWRLFSPSLSITQLLPLLNKPKNQKKKKQNK

SEQ ID NO: 135929 - protein, 217 aa, Oryza sativa
  Clone ID: PAT_MRT4530_37557C.1.pep
MLAARTRFAGGGGAAVVLLLIVASTVATRAAVADDFFSPLSPLLAPVIGSMCKTVACGKGNCTAASGFPGYRCECEPGWKQMHVGDQASFLPCVIPNWGRIWSDGGGEGRSGSGDGGTASNSSCTAASSSAGAATHPGFMYGRIPIALARQIRERYTRPGAIAEQAGPGAGSAHRGRCQWSPTIWRSSTPCSRSRSGPRPSAAAPTLTANAAPDPVP

SEQ ID NO: 135930 - protein, 329 aa, Oryza sativa
  Clone ID: PAT_MRT4530_37558C.1.pep
MAAPAPSSFNLRSILEKEKLTGTNFMDWHRNLRIVLWQEHKEFVLTQPFPAGLPNNAHAAERREHEKRCNDYLDISCLMLATMSPELQRQYEALDAHTIITGLRNMFEDQARAERFNTSKSLFACRLTEGNPSLPPSFELIIMNFNMNNLNKTLAELHGMLKTAEESIKKNSNHVMVMHKRKPNNKKSGQKRKLNSNEITSTSNSKTKVQKTGPAKDAECFFCKETSHWKRNRKKYLEQLKHKQQDGKSSTSGINVIEINLATSSADSWVFDTGSVAHICKSLQGLKRSMSLAIGEVDIRVGNGARVAACCCGWHYAIIFTVRISFGVK

SEQ ID NO: 135931 - protein, 310 aa, Oryza sativa
  unsure (1)..(310): unsure at all Xaa locations
  Clone ID: PAT_MRT4530_37559C.1.pep
MLAARTRFAGGGGAAVVLLLIVASTVATRAAVADDFFSPLSPLLAPVIGSMCKTVACGKGNCTAASGFPGYRCECEPGWKQMHVGDQASFLPCVIPNWGRIWSDGGGEGRSGSGDGGTASNSSCTAASSSAGAATHPGFMYGRIPIALARQIRERYTRPGAIAEQAVSSVRTNARCTRLWQSGSPWLSSWRSRVLMTGDKPASTWTLVVTGRHSERSPMYTLSIDHKNKLATGGAARGGGGGGIFVGATTGGRVQCAAHGXELGARTAAGVSGARRSGGVRRRAAAAAPALAPPPPLRPSPPTPLQILSL

SEQ ID NO: 135932 - protein, 206 aa, Oryza sativa
  Clone ID: PAT_MRT4530_3755C.1.pep
MAAAVTGGGGGGFRRWLREGWSQRRLPSFLPDPVEAEPFRIRHPGKVNGKRPKILAQYSRNRFPSLLMLMLGGATHYTQLVDLHEWSCQHHNDNQIGVQDKMASIGAALSGLKNSSFTTMGAEKLPDQMHDLKIRDDNEVQVTNINGKGAETGHIIVTTTGGRNGQPKLTKCKSAWEDMLNTEHAAALNWFEDTVRIRDQTVRHHR

SEQ ID NO: 135933 - protein, 86 aa, Oryza sativa
  Clone ID: PAT_MRT4530_37560C.1.pep
LTGMHRTSQMVYYWCLDRSLHALVTTDQSVARGIVPPTPATIGSMVHHSIYYSIFNILTKSLGHSFRSWTHGKFKIFTLNYSGAKF

SEQ ID NO: 135934 - protein, 1227 aa, Oryza sativa
  unsure (1)..(1227): unsure at all Xaa locations
  Clone ID: PAT_MRT4530_37561C.1.pep
MTEKLPPSPGTGVKPPVNKTEAKNPSAEVDPSNIVPITLDRLTAEQRDELEQMMSNVKNKFMDSFQETRRETIPMRSARVHLKVTKVLQLAQVTKVTFLKMWADLEKQLHSYFYSGIHEMKLSDLTAIKQRHDESVQDYIQRFREMRNRCYSLSLTDSQLADLAFQVLIAPIKEKFSAQDFESLSHLAQKVTLHEQRFAEAKKNFKKINHVYPYMCDSDDEDDDSEVAAAEWVKRKKVIPCQWVKSSGKEERFDFDITKADKIFDILLREKQIQLPAGHIIPSAEELGKRRYCKWHNSGSHSTNDCKVFRQQIQAAIEGGKIKFDDSKKPMKVDGNPFLVNMVHTSERAADGGSNRKFQVNSARIISKXRGSMIGSKVNIMKKMAVLILIGIVNFLDFAGMRVXRLPSIEDCPGCSNAGNSSRSYSRAEFEAKQADVDDVEEASAKVVLSPEQAIFEKPEGIENRHLKPLYINGFANGKPMSKMMVDGGAAVNLMPYATFRKLGRNPNDLIKTNMVLKDFGGNPSETKGVLNVELTVGSPGDRPRPTFISKNLSSEFRTKLIELLKEYRDCFAWEYYEMPGLSRSVVEHRLPIKPGIRPYQQPPRRCKADMLEVVKAEVKHLYDAGFIHPCRYAEWVSNIVPVIKKNGKVRVYIDDEVVISKEIEDHIADLRKVFERTRKYGLKMNPTKCAFGKLEPFTPLLRLKADQKFTWGAEQQKALDNIKKYLSSPPVLIPPQKGISFRLYLSAGDKSIGSVLIQELERKERAIFYLSRRLLDAETRYSPVEKLCLCLYFSCTKLRHYLLSNECTVICKADVVKYMLSAPILKGRVGKWIFALTEFDLRYESPKTIKGQAIADFIMDHRDDSIGSVDIVPWTLFFDGSVCTHGCGIGLVIISPRGASFEFAYTIKPYVTNNQAEYEAVLKGLQLLKEVEADAIEIMGDSLLVISQLAGEYECKNDTLMVYNEKCRELMSGFRLVTLKHVSREQNVEANDLAQGASGYKPMLKDVEIEVATITADDWRYVVFQYLQNPSQSASRKLCYKALKYTLLDDELYYRTIHGVLLKYLSADQAMVVMGEIPPYKLVYGHEAVLPWEVRIGSRRTYLQDELTTDEYYNLMADEREDLVQSRLRALAKVTKDKERVARHYNKKVVPKSFSEGELVWKLILPIGTRDNKFGKWSPNWEGPFQIHKVVSKGAYMLKGLVGKVYGRALNGKYLKKYYPNVWVNL

SEQ ID NO: 135935 - protein, 1326 aa, Oryza sativa
  unsure (1)..(1326): unsure at all Xaa locations
  Clone ID: PAT_MRT4530_37562C.1.pep
MAAPAPSNFNLWSILEKEKLTRTNFMDWYRNLRIVLRXEHKKFVLTQPFPADFPNNAPAAQRREHERRCNEYLDISCLMLATMSPELQRQYEALDAHTIITGLRNMFEDQARAERFNTSKSLFACRLAEGNPVSPHVIKIIGYTESLDKLGFPLSQELATDLILQSLPPSFEPFIMNFNMNNLNRTLAELHGMLKTAEESIKKNSNHVMVMHKRKPNNRKSGQKRKLNSDEITSTSNSKTKVQKTVPAKDAECFFCKETGHWKRNCKKYLEQLKQKQQDGKSSTSGINVIEINLATSSTDSWVFDTGSVAHICKSLXGLKRSRSLARGEVDIRVGNGARVAAVAVDTMPLSLPLGLVLELNNCYCIPALCKNVISASCLQAEGYGFRSMDNGCSVYYNDIFYFHAPMMNGLYIVNLDGCSVYNINAKWQRPNDLNPTFIWHCRLGHINEKRMEKLHRDGLLHSFDFESFETCESCXLGKITKAPFTGQSERASELLGPVHTDVCGPMSSTARGGFGYFITFTDDFSRYGYVYLMRHKSESFEKFKEFQNEIQNHLGKTIKYLRSDRGGEYLSLEFGNHLKECGIVPQLTPPGTPQWNGVSERRNRTLLDMVRLMMSQTDLPLSFWGYALETAAFTLNRVPSKSVDKTTYEIWTGKRPILSFLKIWGCEVYVKRLQSDKLTPKSDKCFFVGYPKETKGYYFYHREEGKVFVARHSVFLEKKFISRKDSVSMVXLEEIQETPENAPTSTQPQAEQDVVQQVEQAVVEPVVEAPASRRSEKIRRTPARYALLTTVQCDILLLDNDEPTTYEKAMVGPDSEKWLGTMKSEIESMHVNQVXKLVDPPDDVKAIECKWVFKKKTDVDGNVHIYKARLVTKSFKQIQGVDYDETFSPVAMLKSIWIVLAIAGYFDYEIWQMDVKTAFLNGNLYEDVYMTQPKGFVDPQSAKKICKLHKSIYGLKQASRSWNIRFDEVVKALGFVKNEEEPCVYKKVSGSALVFLILYVDDILLIGNDIPMLESVKTSLKNSFSMKDLGEVVYILGIRIYRDKSKRLIGLSQSTYIDKVLKRFNMQDSKKGFLPMSHGINLGKNQCPQTTDEXNKMSVIPYASAIGSIMYAMLCTRPNVSYALSATSRYQSDPGESHXITVKNILKYLRRTKDMFLVYGGXEELVVNGYTDASFQTDKDDFRSQSGFVFCLNRGAVSWKSSKQDTVADSTTEAEYIAASEAAKEVVWIKKFVSQLGVMTSASSPMDLYCDNSGAIAQAKXPRSHQKSKHILRRYHLIREIVGRGDVKIHKIHTDLNVADPLTKPLPQPKHEAQTRAMGVIYIHD

SEQ ID NO: 135936 - protein, 54 aa, Oryza sativa
  Clone ID: PAT_MRT4530_37563C.1.pep
MVSNKAMFSALLLIIVSVFAATVTMADHHEEQVVYRLLESCHPRMDYPMYSLPH

SEQ ID NO: 135937 - protein, 613 aa, Oryza sativa
  unsure (1)..(613): unsure at all Xaa locations
  Clone ID: PAT_MRT4530_37564C.1.pep
RDREQFQEVRQEINHRLKKTKTRQEWHVKSTVTTADEVETDKARRLLKGKAVASASVNMVFTLPAEFEAKQAEVDGVEEALAKLVLSPEQAIFEKPGVTENRHLKPLYINGFVNGKPMSKMMVDGGAAVNLMPYATFRKLGRNPDDLIKTNMVLKDFGGNPSETKRVLNVELTVGSKTVPTTFLVIDGKGSYSLLLGRDWIHANRCIPSTMHQCLIQWQGDKIEIVPADRSVNVANADLALWEMDGIDCLSGKGIVEGSNVYNKDTVDDLDAKQGQGFMSADDLEEIDIGPGGRPRPTFISKNLSSEFRTKLIELLKEYRDCFAWGYYEMPGLSRSIVVHRLPIKPGIRPYQXPPRRCKADMLEAVKAEVKRLYDVGFIRLCRYAEWVSNIVPVIKKNGKVRVCIDFRDPKDEYPRPIADQLVDAASGHKILSFMDGNAGYNQIFMAEEDIHQIAFRCPVAIGLFEXVVMTFGLKSAEATYQRAMNYXIFHDLISWXLVEVYIDDVVVKSKEIENHIADLRKVFERTRKFGLKMNPTKCAFGVSASQFLGFLIHDRGIEVPQRSINAIQNIQPLEDKXKLQELISKINFVRRFISNLSGRLEPFTSLLRLKAD

SEQ ID NO: 135938 - protein, 782 aa, Oryza sativa
  unsure (1)..(782): unsure at all Xaa locations
  Clone ID: PAT_MRT4530_37565C.1.pep
MLLSLPSGLVLELNNCYCIPALCKNVISASCLQAEGYGFRSVDNGCLVYYNDIFYSHAPIMNGLYIVNLDGCSVYNINAKRQRPNDLNPTFIWHCRLGHINEKHIEKLHRDGLLHWFDFESFXCESCLLSKMTKAPFTGQSERASELLGLVHTDVCGPMSSTARGGFGYFITFTDDFSRYGYVYLMRHKSESFEKFKEFQNEVQNHLGKTIKYIXSDRGGEYLSLEFGNHVKECGIVPQLTPPGTPQWNGVSERRNRTLLDMVRSMMSQTDLPLSFWGYALETAAFTLNRVPSKSVDKTPYEIWTDKRPSLSFLKIWGCEVYVKRLQSNKLTPKSDKCFFVGYPKETEGYYFYNWEEGKVFVAXHGVFLEKEFISRKVSGSMVXLEEIQETPENASTSTQPQQAEQDVVQQVEQVVVEPVVEAPASRRSERIRRTPTRYAVLTTGQRDILLLDNDEPTTYEEAMVGPDSEKWLGAMKSEIESMHVNQVWNLVDQPDGVKAIECKWVFKKKTDVDGNVHIYKARLVAKCFRQIQGVDYDETFSPVAMLKSIRIVLAIAAYFDXEIWQMDVKTAFLNGNLDEDVYMTQPKRFVDPQSAKRICKLQKSIYGLKQASRSWNIRFDEVVKVLGFVKNEEEPCVYKKISGXALVFIILYVDDILXIGNDIPMHESVKTSLKNSFSMNDLGEAAYILGIRIYRDRSKRLIGLSQSTYIDKVLKRFNMQYSKKGFLPMLHGINLGKNQCPQTTDEGNKMSAIPYASAIGSIIYAMLCTRPDVSYALSATN

SEQ ID NO: 135939 - protein, 553 aa, Oryza sativa
  Clone ID: PAT_MRT4530_37566C.1.pep
MVVQNGWAYTTGNSGRDREQFQEVRQEINHRLKKTKTRQEWHVKSTVTTADEVETDKARRLLKGKAVASASVNMVFTLPAEFEAKQAEVDGVEEALAKLVLSPEQAIFEKPGVTENRHLKPLYINGFVNGKPMSKMMVDGGAAVNLMPYATFRKLGRNPDDLIKTNMVLKDFGGNPSETKRVLNVELTVGSKTVPTTFLVIDGKGSYSLLLGRDWIHANRCIPSTMHQCLIQWQGDKIEIVPADRSVNVANADLALWEMDGIDCLSGKVWDGDFLKMESPNYYFEGIVEGSNVYNKDTVDDLDAKQGQGFMSADDLEEIDIGPGGRPRPTFIIPVIKKNGKVRVCIDFRDPKDEYPRPIADQLVDAASGHKILSFMDGNAAGLVEVYIDDVVVKSKEIENHIADLRKVFERTRKFGLKMNPTKCAFGVSASQFLGFLIHERGIEVPQRSINAIQKIQPLEDKTKLQELISKINFVRRFISNLSGRLEPFTSLLRLKADQKFIWGEEQQKTLDNIKKYLSSPPVLILSRPEFLSKIPNAYLCVNPRPGISRGTQ

SEQ ID NO: 135940 - protein, 1159 aa, Oryza sativa
  Clone ID: PAT_MRT4530_37567C.1.pep
MEIQYEHTSYRDPNRSLTGLGGPSDGSYIFVRGVTGGGIASPRRVVTIYDLILAWFLVYAIEMFDLCYRSLRLSQQWIDVGHLCAEIIGLLDKIMAAPASSNFNLRSILEKEKLTGINFMDWYRNLRTVLRQEHKEFVLTEPFPANLPNNAPAAQRREHEKRCNDYLDTSYLMLATMSPELQRKYDALDAHTIITRLRNMFEDQARAERFNTSKSLVACRLAEGNPMSPHVIKMIGYAESLDKLGFPLSRELVTDLILQSLPPSFEPFIMNFNMNNLNRTLAELHGMLKTAEESIKKNSNHVIVVHKRKPNNKKSCQKRKLNSDEITSTSNSKTKVQKTGPAKDAECFFCKETGHWKRNCKKYLEQFKQKQQDGKSSTSVYNINAKRQRPNDLNPTFIWHCRLGHINEKRMEKLHRDGLLHSFDFKSFETCESCLLGKMTKAPFTGQSERASELLGLVHTDVCGPMSSTAKGGFGYFITFTADFSRYGYVYLMRHKSEYFEKFKEFQNEVQNHLGKTIKYLRFDRGGKYLSLEFGNHLKECAIVPQLTPPGTPQWNGVSERRNRTLLDMVRSMMSQTDLPLSFWGYALETVAFTLNRVPSKSVDKTPYEIWTGKRPSLSFLKIWGCVVYVKRLQSDKLTPKSDKCFFVGYPKETKGYYFYNREEGKVFVARHGVFLEKEFISRQDSGSMVQLEEIQETPENASTSTQPQAEQDVVQQVEQVVVEPVVEAPASRRSDRIRRTPASLELLVDPPNGVKAIECKWVFKKKTDVDGNFNIYKARLVAKGFRQIQGVDYDETFSPVAMLKSIRIVLAIAAYFDYEIWQMDIKIAIHNGNLDEDVYMTQPKGFVDPQSAKKICKLQKSIYGLKQASRSWNIRLDKVVKALGFVKNEEEACVYKKISGSALVFLILYVDDILLIGNDILMLESVKTSLKNSFSMKDLGEATYILGIRIYRDRSKRLIGLSQSTYIERFIMYAMLCTRPDVSYSLSATSRYQSDPCESHWIAVKNILKYLRRTKDMFLVNGGQEELVVNGYTDASFQTDKDDFRSQSGFVFCLNGGAVSWKSSKQDTVSNYTTEAEYIASSEAAKEAVWIKKFISRLGVVTSASSPMDLYCDNSGAIAQAKEPRSHQKSKHILRRYHLIREGVSNRALAVVARFQSR

SEQ ID NO: 135941 - protein, 428 aa, Oryza sativa
  unsure (1)..(428): unsure at all Xaa locations
  Clone ID: PAT_MRT4530_37568C.1.pep
MAKKPPPSLGTGVKPPVNKTGGKNPSAEVDPTNIVPITLDRLIAEQRDELEQMMSNVKNKFMDSFQETRRGTIVQKYKLKVVAADEVGPSSSQGDKGTAIGSGDKSDIPQDDTGNLYRDPYPEWFERVPLPSRYKVPDFSKFSGQDNISTYEHVSRFLAQCGEASAIDALRVKLFPLSLSGSAFTWFSSLPYNSVNSWVDLEKQFHSYFYSGIHEMKLSDLTTIKQRHDESVQDYIQRFREMRNRCYSLSLTDSQLADLAFQGLIAPIKEKFSAQDFESLSHLAQKVILHEQRFAEARKNFKKINHVYPYMYDSDDEDDDFEVAAAEWVKSKKVIPCQWVKNSGKEERFDFDITKADKIFNLLLREKQIQLSAGHIIPSAEELGKRRYCKWHNSGSHSTXNDCKVFRQQVQAAIEGGKIKFDDSKKPM

SEQ ID NO: 135942 - protein, 379 aa, Oryza sativa
  Clone ID: PAT_MRT4530_37569C.1.pep
MWLEQNHIHLPSKKKKRKISANLFLVPRMVKDGLPRMVEDGLASHYELFLCLQMDDTLTTGSIRSTEGEKRRLAEASLAYNCERIDVGHLYAEIIGLLDKIMAAPAPYNFILQSILEKEKLTGTNFMDWYCNLRIVLRQEHKEFMLTQPFPADLPNNAPVAQRREHERRCNEYLDISCLMLATMSPELQRQYEALDAHMIITGLRNMFEDQARAEWFNTSKSLFACRLVEELHGMLKTVEESIKKNSNHVMVMHKRKPNNKKSGQKRKLNSDEITSTSSSKTKVQKTGPAKDAECFFCKETGHWKRNCKKYLQQLKQKQQDGKSSTSGINVIEINLATSFTDSWVFDTGSVAHICKSLQGLKRSRSLVSHPEVPFPSLN

SEQ ID NO: 135943 - protein, 65 aa, Oryza sativa
  Clone ID: PAT_MRT4530_3756C.1.pep
QDHKSLLCPAMCVLYFQILFDVVCKSSVLIPETHSKGCPDKLVCVIGYPVTSDAWFSSAKKKKKK

SEQ ID NO: 135944 - protein, 521 aa, Oryza sativa
  unsure (1)..(521): unsure at all Xaa locations
  Clone ID: PAT_MRT4530_37570C.1.pep
IDDRIENLSSEKLRLYKIRLIYSLRCLKFLLHQGLAFRGHDESEQFSNKAKNFIELLKWLASNSKEVDKLVLKNVXAPGNCTLTCPETQKQIXHCCAIETXKNIEEFGYEHYAILADESSDVSHKEHLAFCLCCIDNLGRLCDHFLGVVHVVSSTSSLKEAIXELLVSHHLTLSQISHHEXLRNARLQDIVNGFECGVLETSSGLNQEMGLSKLGETRWGSYYRTIVNIIAMYPAIHDVLINLGEDTSQRTEWPKIHAIVGVFESFDFIFSTHFMFVILGYTNDLSECLQKREQDILNAMILXLANSRMHELRSDGWVAFLKGSLXFCNKHGVEVPKADGVYVPFRISPRFARNQTNDDHFRREVYXIIDQISQESDNRFDEVNIELLSCMTTLIPADSFTSFDAXKVCRLAEFYPIDVSSSKLLRLEMQLENYIDDMRKDNVFKGINNLRDLSVKLRQTKKHXIAYDLICMLLKLVLTQPVVTSVERTFSAMNFIKHKLRNKMGDGLLDDCLVIFIERLS

SEQ ID NO: 135945 - protein, 368 aa, Oryza sativa
  Clone ID: PAT_MRT4530_37571C.1.pep
MVRLEEIHETPENGSTSTQPQQDEQDVVQQVEQVVVEPVVEARASRRSERIRRTPARYALLTTGQRDILLLDNDEPTTYEEAMKSIHGLKQASRSWNIRFDEVVKVLGFFKNEQEPCVYKKISGSALVFLILYVDDILLIGNDIPILESVKTLLKNSFSMKDLGEAAYILGIRIYRDRSKRLIGLSQSTYIDKVLKRFNMQDSKKGFLPMSHDINLGKNQCPQTTDERNKMSVIPYASAIGSIMYAMLCTCPDVSYALSATNRYQSDPGESHWIAVKNILKYLRRTEDMFLVYGGQEELVVNGYTDASFQTDKDDFRSRSGFVFCLNGGVVSWKSSKQDTVADSTTEAEYIAASEAAKDAVWIKKFVS

SEQ ID NO: 135946 - protein, 799 aa, Oryza sativa
  Clone ID: PAT_MRT4530_37572C.1.pep
MSPELQRQYEALDAHTIITGLRNMFEDQARAERFNTSKSLFACGLAEGNPMSPHVVKMIGYTESLDKLGFPLSRELATDLILQSLPPCFEPFIMNFNMNNLNRTLAELHGMLKTAEESIKKNSNHMMVMHKRKPNNKKSGQKRKVNSDEITSTSNSKTKVQKIGPAKDAECFFCKETVYNINAKRQRPNDLNSTFIWHCRLGHINEKRMEKLRRDGLLHSFDFESFETCESCLLGKMTKAPFMGQSERASELLGLVHTDFISRKDSGSMVRLEEIQETPENASASTQPQAEQDVVQQVEQVVVELVVEASASRRSERIRRTPARYALLTSGQHDILLLDNNEPTTYEEAMVGPDSEKWLGAMKFEIESMHVNQVRNLVDPPDGVKAIECKWVFKKKTDVDGNVHIYKARLVAKGFRQIQGIDYDETFSPVAMLKSIRIVLAIAAYFDYEIWQMDVKTVFLNGNLDEDVYMTQPKRFVDPQLAKKICKLQKSIYGLKQASRSWNIRFNEVVKALGFVKNEEEPCVYKKISGNALVLKMFNMQDSKKGFLPMSHGINLGKNQCPQTTDERNKMSVIPYASAIGSIMYAMLCTHPDVSYALSATSRYQSDLGESHWIAVKNILNYLRRTKDMFLVYGGQEELIVNGYTDASFQTDKDDFRSQSGFVFCLNGGAVSWKSSKQDTVADSTTEVEYIAASEAAKEAVWIKKFVSQLGVMTSASSPMDLYCDNSGAIAQAKEPRSHQKFKHILRRYYLIREIVGRGDVKICKIHTDLNVADPLTKPLPQPKHEAHTRAMGIRYVHD

SEQ ID NO: 135947 - protein, 135 aa, Oryza sativa
  Clone ID: PAT_MRT4530_37573C.1.pep
MAVAARRALWYSGVSPKARHMNSGRGRGLDISEPNGPLDSYIRKLMDAGNLEEINRIGKILSKRDMVKQSSESLIFKRKKKMGTHNMQDMWKVAGITSSAFLFGTAFISLFAGSLHGEEEEDGILQDKKRLGLEE

SEQ ID NO: 135948 - protein, 104 aa, Oryza sativa
  Clone ID: PAT_MRT4530_37574C.1.pep
FHDDQQSNDRHRMVVNQIINNQMIVNQRITRWQDDSTDLADIPIKADGTADMRYKESREAVASGLIEKDEVIEEAMNGEHHGQQHQSDHLKKDGTEDRRYTRKS

SEQ ID NO: 135949 - protein, 158 aa, Oryza sativa
  unsure (1)..(158): unsure at all Xaa locations
  Clone ID: PAT_MRT4530_37575C.1.pep
IPSTFLFFLGVDPXAFGTAAFTXLFDPTLIDKCDVLISPCVPNVAFTQGTHIGVYHDTXEPDHTRTKAFSTNLLXRAAHNWATELRAAVEEDKATDPAGXTSYLIPLQXCIFRFLCKALISIDLAADGLVDRFGLSRKWAGLGQPMVRPNQGVRPNPH

SEQ ID NO: 135950 - protein, 140 aa, Oryza sativa
  Clone ID: PAT_MRT4530_37576C.1.pep
PGSTTCIFLDEDSDALYLGGGRPEGPHPLDDSSERRQAAGAPEREGRSRPAGGLCGDDEPGRHISNGDDQTAREKTGMRLADGDGLPRMEDGRLVTVAVHLLHRASKSVAAPSRQPSLNRSTEPPPGAPQIAPTRRREKG

SEQ ID NO: 135951 - protein, 288 aa, Oryza sativa
  Clone ID: PAT_MRT4530_37577C.1.pep
MERPAPVRKSHTSTADLLTWPEGAAQELAAGATPPPNRRPHQPSEAISKVVFGGQVTEEEFESLNKRKPCSAPKWKEMTGSGIFAAEGEVEEDESANASATPVRTVSKNYQAISTISHISFAEEESVSPKKPTSIAEVAKQRELSGTLQSEDESKMKRQISNAKSKELSGHDIFAPPEDPRPRNSANGSTSQTPGKNAQVSTITFGEADTDSVVKTAKKIPEKKLTDLTGNDIFKGDAAPGTAEKHLSTAKLKEMTGSDIFADGKAPSRDYLGGIRKPPGGESSIALV

SEQ ID NO: 135952 - protein, 486 aa, Oryza sativa
  Clone ID: PAT_MRT4530_37578C.1.pep
MVGPDSKKWLGAMKSEIESMHVNQVWNLVDPPDEKDNVDGNVHIYKARLVAKGFRQIQGVDYDETFSPVAMLKSIQIVLAIAAYFDYEIWQMDVKTAFLNGNLDEDVYMTQPKGFVDPQLAKKICKLQKSIYGLKQASRSWNIRFDEVVKALGFVKNEEEPCVYKKISGSALVFLILYVDDILLIGNDIPMLESVKTSLKNSFSMKDLGEAAYILGIRIYRDRSKRLIGLSQSTYIDKVLKRFNMQDSKKGFLPMSHGINLGKNQCPQTTDERNKMSVIPYASAIGSIMYAMLCTRPDVSYAHSATSRYQSDPAENHWIAVKNILKYLRRTKDMFLVYRGQEELVVNGYTDASFQIDKDDFRSRSRFVLCLNGGAVSWKSSKQDTVADSTIEAKYIATSEAAKEAVWIKKFVSQLGVMTSTSSPMDLYCDNSGAIAQAKEPRSHQNSKHILRRYHLIREIVGRGDVKICKIHTDLNVADPLTKPLP

SEQ ID NO: 135953 - protein, 119 aa, Oryza sativa
  unsure (1)..(119): unsure at all Xaa locations
  Clone ID: PAT_MRT4530_37579C.1.pep
TSSIARTNDKAEIHLIAKCRVTKRIWXEIQRWINTDLXWISXDDCHSIEHWWNLVLESQTPSAVILGSXEIWCERNARIFRXKASIPSTILAKITEEASVWVKVRALRLQEFGILGDIT

SEQ ID NO: 135954 - protein, 84 aa, Oryza sativa
  unsure (1)..(84): unsure at all Xaa locations
  Clone ID: PAT_MRT4530_3757C.1.pep
RNRHEVEPLGGGGGGPAGAPEIFAGGTXARGSVRRAVVIGNGCAGAENQCLGLLRALGLADRLTLYVNPASPDHFSCQLLVTGS

SEQ ID NO: 135955 - protein, 929 aa, Oryza sativa
  Clone ID: PAT_MRT4530_37580C.1.pep
PSNYQLLLMHPVLDQLARLFAQLHSSKMAFIDSAPFIKTLELDNGVQQDSHEFLTLFLSLLEGSLSHSKVPGARTIVQHLFRGSVSHVTRCSSCGRDSEASSKMEDFYELELNIKGLNNLEQSLDDYLSTEALDGENQYFCESCQKRVDATRCIKLRSLPPVVNFQLKRYVFLPKTTTKKKISSAFSFPGQLDMGKRLSNPSSSYTYGLSAILIHKGSAANSGHYVAHVKDESNGQWWEFDDEHVSKLGLHPFGEKPGKSSDKTDQKPQGSSTADSVTNDDNNSCHEAAFTSTMEEMFSSTDAYMLMYKRIAKDENGIESNNISSNNSLPHHFVDEIDERNTSYVKECEEYESKKDVHLAYITERRQEVKSVLTEAPATPEEDSYFWISTDWLRQWADNVNPPSPIITGVRVHSSIDNSPIQCEHGKVPASKVTSMKRLSAGAWHKLFSKCLKDGAKNSVSADVYRDRKASLRSIAEAALAGNNPDGPLYFVSRPWLTQWLRRKNVDIPSDADSGPTIALTCTHGNLLPEHASGAKRVTVPEDLWLFLYETSGMKIDDIVTFPSDSQPCGICSQQLSVVASVEDNLRAVKLKQRQSHEKLTSGKSLALHPGQKYYLVPSSWLSEWRAYITATGKNISSLPEPQSLEVTINSLICEKHSRLLQRPLDLVCKRGTITQKASNTDGLTMISESDWILFSEEWNVAHGKGLCAEIVFSKSSQDNLQSSEAVPILVEDLDQSTNDLSNDLGGREPYVRTDPEVCEECIGEKESCALVEKLNYQNEDIQVYLVRGKEAPKSIREASAAVPVPDRRTSKRSRRTTSGNSISLKVSGSTTVYQLKLMIWESLGIVKENQELHKGSVEIEDDFATLADKCIFPGDVLWVKDSEIYENRDIADEISEQKVVVQTEEGFRGTLLTSSASAQLCQDISFSD

SEQ ID NO: 135956 - protein, 73 aa, Oryza sativa
  Clone ID: PAT_MRT4530_37581C.1.pep
DYWAVHIYICIDIHSNVVVLCTLVGQGCHKNGFCLCNRFQISFNMILSNQQIFQDISLLHINKQTTLILHHAC

SEQ ID NO: 135957 - protein, 877 aa, Oryza sativa
  unsure (1)..(877): unsure at all Xaa locations
  Clone ID: PAT_MRT4530_37582C.1.pep
HLSNLIAIPSLSHEHQYFLGPIGNSNPTEFISAETNRIPFRLASPNLGHWKNTFKSWPSLEKSSPERSWLVWCKRVSASKQVHWDELGIGQALALTLANSAKDEPLMASATYLWSNTLNAFLFNQXGPMTPTLLDITMITGLDITASANPMNLNSKNQFEFKTKTIGGWSGYIAAYMGKGSVTPREHTAFLLMWLEKFLFCGSSCGPTINWQFLAEALETKKQIALGKILLDYLYQTLINASARIATGSTVAAGGPWWFLQTWLNLVAMKAVNRPALSESQFPRLEPITDEDGEEKTHRRCMSFYDGFRKDARVWFVYGDSMDFELPSDFRFEEINSEKYDKSREVFSAAISPCILPVGIHQGRNIQVSYEFYHPMSSARQFGMGQLPIGLYFADKIQCRGEISSTLMMDRLLNIPRPPLGSIENIELARFRSRAFDRWWGEWKLHLFHRSASMYMTDLFLDVIPQTTESSPPRKDIKYAPGLLPNGGGLAPPVIGYHAPRTSSLLQGQIGELADAGRKRKTKASAVDPSVLALKKKAEKKKSKPTDDLPALDPSIEQAFDEEEIEEDDDQAAAELSDLGEKTPSASPKQTPPTPAAPAHFSRKKKTIVKKKSAPTPSKPAPPPPPHPSPPVQPTPSDCTPSAAGSHNIEEEEQPAAPVIPDYFDEEAEEETTNKALAPLTDDVKRTLEDISHRLETSLDNLVVDCGSIRTRFAEIQALIPDDLAKTISPAVYLEQHQFKLEKAKQRIADRRERRDIEATIKTNRQTVHEEKAKLDQLSIGPIQSNIDRLEARKIDLIAQLEECNAELALEQKKLADLPKAVEEQKSRLRSAIRNVADMTKSLKVISGIDAQDIQAIEEVDQIRQWAVSAIQRYLSG

SEQ ID NO: 135958 - protein, 147 aa, Oryza sativa
  Clone ID: PAT_MRT4530_37583C.1.pep
MPSPAPTLGVEPRGQPRADAAVLKKKQPRRIVAPRRCARMSVATSVRLAAEVIDSEERQQQPTPLWPAGATRRRRLQETIAANSARCGTAPVCKNIDLPRRGFQLRGTLSAATAADRPACASYHPAEDAELPLNQKRTFEIHSHHHE

SEQ ID NO: 135959 - protein, 295 aa, Oryza sativa
  Clone ID: PAT_MRT4530_37584C.1.pep
MPMSDPTAAVIPKPGGIGVGGGGGDDEEPVEIREVWADNLEEEFALIRDVVDEFPFVAMDTEFPGIVCRPVGAFRSPADYNYATLKANVDMLHLIQLGLTFSSPRGELPALGPGRRRCVWQFNFREFDDARDIFASDSIELLRRSGIDFRRNSERGVDARRFAELLMSSGVVLNDSVYWVTFHAGYDFGYLLKILTCSSLPDTQAGFFKLMKIYFPTVYDIKHLMKFCNSLHGGLNKLAELLDVERVGESHQAGSDSLVTSCAFWKLKDSFFAGSTEKYAGVLYGLNAENVVSAH

SEQ ID NO: 135960 - protein, 254 aa, Oryza sativa
  unsure (1)..(254): unsure at all Xaa locations
  Clone ID: PAT_MRT4530_37585C.1.pep
TVGIRFSNPASLSPLPLPHIGRRNLAPTGHSPLGSPPHRAVAAVGFARMNSTPSAFPPSGFVAGIRIPSRYGHPEARPLVVVVLPWLAVAVRHRLPPRRPPSRRRLHVAFAPPPPPPVAVAGNACARAVAIVVAGRPALSRAKPGRRRPSDQPRGXSGPLVPWTGGGPPAWSRSTVDRPPLSRCRVGPVCRRPFSLSPEPLTRVGFVRAVEGACGVVFPLQFKSRLSPSYLLFFRCIWNSIREFLGVTPRPPRP

SEQ ID NO: 135961 - protein, 369 aa, Oryza sativa
  unsure (1)..(369): unsure at all Xaa locations
  Clone ID: PAT_MRT4530_37586C.1.pep
MRQLEESYTTSPAVAHAGLWADVTKGGAGKGAPASGPHLAAAQRGGSPPWTGAKRVVHRRSTGPTAQIAPGXIGRAAVTRLGSAQGRPTGHGDGXRRARERVAGDGNRRRRRRRKGDAKAAAXAAARKEREGNRXGEEASPRVAGAEEDDGERRRQATGGRRQPADGLRGALRKEEREIREREMNHGGRHPWPKAAVEVELTGARGDANSGDESRRRKGREGAGRGRGRRESPANVGXSGGGERGGIRKSNPGHLGRGRGREREGSGRGRCGACAGVADVARRRRRRARGDCCGRGGAGARXETGPTGGTHLSATQXEEAGGRPARPSWALAFSRPSGRRGGRRMGRRPTRKEKXGKKKKKEEKDFPWN

SEQ ID NO: 135962 - protein, 240 aa, Oryza sativa
  unsure (1)..(240): unsure at all Xaa locations
  Clone ID: PAT_MRT4530_37587C.1.pep
FDLELQREHHSTGILDGTDEAYSLEKPPSDTHSYSGVGXKKSKTEYYPLYSASHTGIGGLTXIKGGAAPTCGAHRSAARERGKRGAGKRAPLGSGSKGGWSTVDRDHAGGPPPVHRIDGPDRPGADRTGGGDPARLGSRPXPTGHGDGDGARXANALPATATGGGGDGAKATRRRRRXAAARKEREGNRGERKPHRGWPARRKMTANGDGKPREDDGNRRTGFGETPPPLPLPLPRRLAA

SEQ ID NO: 135963 - protein, 191 aa, Oryza sativa
  unsure (1)..(191): unsure at all Xaa locations
  Clone ID: PAT_MRT4530_37588C.1.pep
AIKDRFAGCPGRIXVLTTSPTYSGXDRHDGVGSVGVFGXSAFGFTMAREGXTHCLLGTGRTLXVWCDRLEGIMRRVLSRPLSGMSCSGGXLGLLQRGVALDSDWLILINYYNCFTAFDYYFXMPALCKXTCSLLWLYLALYLLFRYDLLSTVGSTQSYSLFXHTRVEVLPSWSHLEEVGFVAAVKLRNSGL

SEQ ID NO: 135964 - protein, 1172 aa, Oryza sativa
  Clone ID: PAT_MRT4530_37589C.1.pep
MISLPLLLFVLFFSALLLFPSSSDDDGGGDAAGDELALLSFKSSLLYQGGQSLASWNTSGHGQHCTWVGVVCGRRHPHRVVKLRLRSSNLAGIISPSLGNLSFLRTLQLSDNHLSGKIPQELSRLIRLQQLVLNFNSLSGLTDLALAENTLSGSIPSSFGQLRRLSFLSLAFNNLSGAIPDPIWNISSLTIFEVISNKLSGTLPTNAFSNLPSLQEVYMYYNQFHGRIPASIGNASNISIFTIGLNSFSGVVPPEIGRMRNLQRLELPETLLEAKETNDWKFMTALTNCSNLQEVELGGCKFGGVLPDSVSNLSSSLVSLSIRDNKISGSLPRDIGNLVNLQYLSLANNSLTGSLPSSFSKLKNLRRLTVDNNKLIGSLPFTIGNLTQLTNMEVQFNAFGGTIPSTLGNLTKLFQINLGHNNFIGQIPIEIFSIPALSEILDVSHHNLEGSIPKEIGKLKNIVEFHADSNKLSGEIPSTIGECQLLQHLFLQNNFLNGSIPIALTQLKGLDTLDLSGNNLSGQIPMSLGDMPLLHSLNLSFNSFHGEVPTNGVFANASEIYIQGNAHICGGIPELHLPTCSLKSRKKKKHQILLLVVVICLVSTLAVFSLLYMLLTCHKRRKKEVPATTSMQGHPMITYKQLVKATDGFSSSHLLGSGSFGSVYKGEFDSQDGEITSLVAVKVLKLETPKALKSFTSECETLRNTRHRNLVKIVTICSSIDNRGNDFKAIVYDFMPNGSLEDWLHPETNDQAEQRHLTLHQRVTILLDVACALDHLHFHGPEPIVHCDIKSSNVLLDADMVAHVGDFGLARILIEGSSLMQQSTSSMGIRGTIGYAAPEYGVGNTASTHGDIYSYGILVLETVTGMRPADSTFRTGLSLRQYVEPGLHGDILLVFNSIYDLRCTHLNLINSANIVLIPKKDGADGVSDYRPISLIHSIAKIFSKLLALRLRSHMHALIPVNQSAFIKGRSIHDNFLFVRNMTRRFHRLRRAMLLFKLDITKAFDSVRWDYLMALLQHRGFPTRWIGWLAALLSTSTSQVLLNGSPGRRIKHGRGLRQGDPLSPLLFILAIDSLQRILSKATELGAISKLRGRTTRLRTSMYADDAVIFINPTRDDVTAFADILHRFGTATGLVTNLQKSQVAAIRCDNCHAQKFPNRIINAAEKRKITGAKP

SEQ ID NO: 135965 - protein, 117 aa, Oryza sativa
  Clone ID: PAT_MRT4530_3758C.1.pep
EKARASDERGGRWAEQRGSGERAPRPLHLLLHTAHPRRRSQRWGRVLERGGVERPARRWVARRRGAEARRMREKEPEALNVTRHGTELECVVQLRAKAVAWQAKALADQSTVVALHA

SEQ ID NO: 135966 - protein, 192 aa, Oryza sativa
  unsure (1)..(192): unsure at all Xaa locations
  Clone ID: PAT_MRT4530_37590C.1.pep
MAIKDQFAGCPGRTXILTTSPTYPRKGGRDGIGSAGESDXSAAGFIVAREGTARCLVRSGGETXVWCDWLEGVMRRVLSRPLSSMSCSSGWLGLLQRSVAFDSDWLILINYYNCFTAFNYCFXMLALCKRTFSLPWIYPASXLLFQYDLLSTLGSTQSCSLFPHTRVEVFLSWRCFEEVGFAAAVKLRNSGS

SEQ ID NO: 135967 - protein, 104 aa, Oryza sativa
  Clone ID: PAT_MRT4530_37591C.1.pep
PFFSQMYWYSLTPLDILLLRDAKPFTPGDRAWAGSIFTPNGHTLAGAVRSLLPQNQTISLIGPLSYHKETLYFPRPMGFVGKTPLIPLPRHDATSPLRSSNVVG

SEQ ID NO: 135968 - protein, 588 aa, Oryza sativa
  Clone ID: PAT_MRT4530_37592C.1.pep
MATTASKIIPQTLPEIPTTPEPQQYTKTAPDIPKSNNSRSSVPKLLQESDRGKLNHKLEPKEQKPNHHLKESVDVSSAKCPTEVSEEMVSEGIASQEKKVVEYESVNGSSTSFHTCEGSGPGKASGSARMTDRSETGERGSSSRCRPSTSSDISDESSCSSMSSTTKPHKSNDSRWEAIQTIRVRDGIIGLSHFRLLKKLGCGDIGSVYLSELSGAKSYFAMKIMDKASLASRKKLLRAQTEKEILQCLDHPFLPTLYTHFETDKFSCLVMEFCPGGDLHTLRQRQPGKYFPEQAVKFYVAEILLALEYLHMLGIIYRDLKPENVLVREDGHIMLSDFDLSLRCAVSPTLIKSSNPDAEALRKNSQGYCVQPACVEPSCVIQPSCAAPTTCFGPRFFSKSKKDRKPKPEIATQISPWPELIAEPSDARSMSFVGTHEYLAPEIIKGEGHGSAVDWWTFGIFLYELLFGKTPFKGSGNRATLFNVIGQPLRFPEYPIVSFSARDLIRGLLVKEPQHRLAYKRGATEIKQHPFFEGVNWALIRCASPPEVPKPVEIERPPKLPPSTSGTTDVSSGAPQKGSDGYLEFDFF

SEQ ID NO: 135969 - protein, 1145 aa, Oryza sativa
  Clone ID: PAT_MRT4530_37593C.1.pep
MERCQRVLFRRLGILHDEEDASVERILSQYMAMFDGPLPPHAIAALTAIFGLDDDDECAMDAALLPLVDEGITDVADKLVCRRWPACRLPSISMEPQLLEHMSMSHSLDFISWNVRVLNSPARCNTVHEMMLDTKCNLACLQETKLQNIDDGLTRFLGGYKLDSFAFKPATGTRGGIIILWNNAALILQDIRIGRFLISAQVMVPLTGATFLMTGVYGPTRHRLKDAFLRHIRRLKPNAGEGWLLFGDFNMIYRARDKNNGNLNLARMRRFRATIDRCELREIPLQNKRFTWSNERQRPTLVKLDHCFCNENWDLAFHHHVLHALPTGPSDHCPLVLSNPAAPCKPRPFRFENFWTRISGFKDMVKASWTQPSPHTEPMRHINHKLQRTASCIKTWAKSLFTEVKIQFHMALDVIQRLDVAQEHRDLSGPELRLRAALKRKTLTLATIERARKRQASRLTHIREGEANTMFFHLRVNARRRKNSIQRLCKENGWVVTHDEKEMTILDHFAHLMGRPGPRPNELNWEALDIQPFDLSTLEESFSEQEIHRAIKEMPVDKAPGPDGYTGIFFKSCWDIVKEDVSLVFNSIFNLRCASLGLLNSANIVLIPKKEGAESVSDYRPISLIHIIAKIFSKLLALRLRPHMRSLVSINQSAFIKGRSIHDNFLFVRNMARRFHRTNRPMLLFKLDITKAFDSIRWDYLMALLQRLGFPVKWRDWLGALLYTSTSQVLLNGIPGQRITHGRGLRQGDPLSPLLFVLAIDPLQRLLTKATDLGSLSKLRGRMPRLRTSMYADDAAIFVNPTRGDVQALTEILQRFGTATGLVTNFQKSQVAAIKCNNIDLDDVLEGVPAVRACFPIKYLGLPLILGRMRKADMQHIFDKITGRITGWRGKNMGLAGRSTLVKSVLTAQPIYLLTALKTSKEALECLDKQRRRFLWAGTGDITGGKCKVNWTKTCLPTRQGGLGVLNLEKFMRALRLRWLWHEWKDPNKPWVGLEIPCDEVDKSLFAASTKITIGDGNIARFWDSAWIDGRRPKDLMPLVYAISKKRKKTLRQGKENDAWVGDLALETNPVITVALVEQLVALWTAVHNVQLEEEESDQIAWKFTPHGHYSASSAYKAQCVGAPDTTFDSLIWKVWAPGKCKLHA

SEQ ID NO: 135970 - protein, 77 aa, Oryza sativa
  Clone ID: PAT_MRT4530_37594C.1.pep
NHRAVVVIAAPGGGPVHLVGVVTGWLRGRQVAVPGVGGVVAVEVEGWVAGCHREGDSHLVGLRAVQSVPEAGICRLG

SEQ ID NO: 135971 - protein, 111 aa, Oryza sativa
  Clone ID: PAT_MRT4530_37595C.1.pep
MDNVCQRLHTKEEGNRKGRRGKGKRTLRMSWEEEQQREAALAHASDGAIVTHRGGDAVIDLIGVPQMLKHEGDRPGDAATHWCHWRRGGSAEGTREENQFIEIVKDISQKF

SEQ ID NO: 135972 - protein, 48 aa, Oryza sativa
  Clone ID: PAT_MRT4530_37596C.1.pep
YGYHLNTNSNQKGMNQRFALRLLYLLNCLFNYNEYIMKMAIAYKLNTG

SEQ ID NO: 135973 - protein, 638 aa, Oryza sativa
  Clone ID: PAT_MRT4530_37597C.1.pep
MALTSAQRIALTVSFFGLLSFLLGVIAENKKPPYGTPIKGKDVVICRFPSDPTIAMGSLSVVSLVLTTIVGHAAIFYPYKSKSVPRGALFRSASLSAFFVIAELVSALAFAMLLWATVTEGLHRSNNIHHDLDTQCPTAKTGLFGGAAFLALDAALFWLVCQMLALNARSDYLDEDDKGDYGQVFASDVDGTKPYSPLASRTPLHSMDAGDDAEPSWRRSPSPPNPRARRPMLDQEIRRPHRFPRTEVSSMIRILRRREAEELHPPSRTRKSASPVLEPLIQLRPSDDEEDRRRPRRLDNQSRVEQMSDSGADTTPSQPPAEICQSKEEDSTMVKADTVGFHEQDKLPHQMSQLFRAQSSAGTHQSSQQNYSIMYQMAKKAELEEQGRSVARYIRKLYIQRCKKLNIEFEEDEEPEGVLHPSDAGPFQHTDKEYATPNPNDVGHLSEIPSQQEQAEMPRLPCLNKPVEYCMSDEYIDLLDKKAKAFFSRVSPVKQRSRKETIANGLQYLTEEAFLAFRNYIAEKDAFEEVDYKFGEILHHCFSVMEYRKVYCHYNFTVEMKNKDEECWTSRLYFAETKLMHGVKYYFCTPLEATDDGCCNACKNQGVNELKHPSEGGYEKGQSSTRCQYFDGDSDEEC

SEQ ID NO: 135974 - protein, 315 aa, Oryza sativa
  unsure (1)..(315): unsure at all Xaa locations
  Clone ID: PAT_MRT4530_37598C.1.pep
LFTVEEESAPKHTPRTMCQPXQTHDTEREAEHRTGRRYARPIAIGPTTPPRRKDSKTTPSRGLQRETPSSSVPKRXQGFHPELLAEGGGVPQLLNNSLRRVTTPENVVTVGPKIGLSFRSEXPIAMVRRPIRNQQLNIGDTWLLPHSIDAPPSAGFQSCQRQDFHNTHHLRRPLRRIRPMGPDQEQPRLSNLSLPKAPHKEGEELPKHSERVANHKEDDLVVSVLYPAAKPNSGLTEATTPPPPHRPPTATRAAQRRRRRRAASAAADAPQPRHLQPQSPPARQPAPPAAVGESRHRLTGRAALAPKLPPPLRCP

SEQ ID NO: 135975 - protein, 145 aa, Oryza sativa
  Clone ID: PAT_MRT4530_37599C.1.pep
MASFLAPQPSTQGIQLNRDSHSLVFHDLQPLQDANRQIQIQSTIFKEVSRQVQLREAAIDMLRPRRLSPYGSISIDSTDSSRQGLSRTCFLRFAATAGCKVTTCWAPATVPPNAFARRGLPLGGTGLAVSTYTTTSSDMRSPDAS

SEQ ID NO: 135976 - protein, 55 aa, Oryza sativa
  Clone ID: PAT_MRT4530_3759C.1.pep
MVAGIVVGGDASGSDSRHAELRLVSISGRERQVDSVGSFWPSGCQREEGNDSKTI

SEQ ID NO: 135977 - protein, 172 aa, Oryza sativa
  Clone ID: PAT_MRT4530_375C.1.pep
MALAIRFRPLALLTRSGREWRRAPRERVLDGKTASLSGHLPRALLRPAVLAPARAPRPPRRAPSQSLAAALGIGDEGRHRWDTAAALPTAVPPSIYPLCRPVAALVQEAHQSYWKGSSRLGQQRLRLEWLDGEEKLRVDDNGSIYSKSCHKVEGDRGSSALTAVVVFTEGHE

SEQ ID NO: 135978 - protein, 314 aa, Oryza sativa
  Clone ID: PAT_MRT4530_37600C.1.pep
MDLRARAAKEILNLTPYSASTHVVLSNIYATVGKWEEAAQIRKLLRNRGIRKKPGCSWIDLGRIVHIFVANDISHPRIKDVYKFLEVMSEKMKLAGYVPDKIWALAKDHAAGGETRLRHNSKKLALAFDRLLLEMHIGSIVSAMEAVPVEIIEGNPVSPHVIKMIGYTESLDKLGFPLSRELTTDLILQSLPPSFEPFIMNFNMNNLNRTLAELHGMLKTAEESIKKNSNHVMVMHKCKPNNKKSGQKRKLNSDEITSTSNSKTKVQKTGPAKDAECFFCKETCHWKRNCMKYLEQLKQKQQDGKSSTSGAEKK

SEQ ID NO: 135979 - protein, 67 aa, Oryza sativa
  unsure (1)..(67): unsure at all Xaa locations
  Clone ID: PAT_MRT4530_37601C.1.pep
GTSXXGRXIGHGGGDGGDDXGDDDDYFXDFNDGDEEEGGLFRRRIVIQELFNRDXXDAVMQDXCKTI

SEQ ID NO: 135980 - protein, 462 aa, Oryza sativa
  Clone ID: PAT_MRT4530_37602C.1.pep
MDISRTNEGYMSCGPVVEMSWHRAGVLLLGAQPWLPVSGIPAVARVRCAFCIMFEWCTSAFPGTGINTLAFGKSSWFGMYLLNAIYANETILCHSLLFPALAYLLRDLLSMSYTHLAIIHQTKSSTVMLKKSIYGLKQASRSWNICFNEVAKVLGFVKNEEEPCVYKKISGSAQVFLILYVDDILLIGNDIPMLGSVKTSLENSFSMKDFGEVAYILGIRIYRDRSRRLIGLSQSTYIDNVLKRFNMQDSKKDVSYAISATSRYQSDPGKSHWIAIKNILKYLRRTKDMFLVYGGQELLVVNGYTNTSIQIDKDDFRPQSEFVFCLNGGAVSWKSSKQDIVADSTTEVEYITASEAAKEAIWIKKFVSQLGVMASAPSPVNLYCNNSDAIAQAKEPRSHQNSKYILRRYHLIREIVDPLTKPLSQPKHEAHTRAMGIETCVIDSSASGRLLVICPRGNHRDD

SEQ ID NO: 135981 - protein, 1387 aa, Oryza sativa
  Clone ID: PAT_MRT4530_37603C.1.pep
MEIQYELTSDRDPNRSPMGLGGPSDGSYIFVRGVTGGGIASLLTKAERDCVHRIVRCPLEPHANEKNEPMRLTRFRLNSITPLRIDVGHLYAEIIGLLDKIMAAPAPSKFILRSILEKEKLTGTNFMDWYRNLRIVLRQEHKEFVHTQPFPADLPNNAPAAQRREHERRCNEYLDISCLMLPTMSPELQRKYEALDAHMIITGLRNMFEDQARAERFNTSKSLFACRLAEGNPVSPHVIKMIGYTESLHKLGFPLSRELATDLILQSLPPSFEPFIMNSNMNNLNRTLPELHGMLKTAEKSIKKNSNHVMVMHKRKPNNKKSGQKRKLNSDEITSTSNSKTKVQKTGPAKDAECFFCKETGHWKRNCKKYLEQLKQKQQDGKSSTSGINVIEINLATSSTDSWVFDTGSVAHICKSLQGLKRSRSLARGKVDIRVGNGARVAAVAVGTMPLSLPSGLVLELNNCYCIPALCKNVISASCWQAEGYDFRSVDNGCSVYYNDIFYCHAPMMNGLYIVNLDGCLVYNINAKRQRPNDLNPTFIWHCRLGHINEKRMEKLHRDGLLHSFDFESFETCESCLLSKMTKAPFTGQSERASELLGLVHTDVCGPMSSTARGGFGYFITFTDDFSRYGYVYLMRHKSESFEKFKEFQNEVQNHLDKTIKYVRSDRGGEYLSLEFGNHLKECGIVLQLTPPGTPRWNGVSERRNRTLLDMVRSMMSQTDLPLSFWDYALETAAFTLNRVPSKSVDKTPYEIWTGKRPSFSFLKIWGCEFYVKRLQSDKLTPKSDKCFFVGYPKEMKGYYFYNRDESKVFVARHSVFLEKEFISRKDSGTMVQLEEIQETTENASTSTQPQAKQDVVQQVEQVVVELVVEAPASRRSERIWCTTARYALLTTGQRDILLLDNDEPTTYEKAMVGPDSEKWLGAMKSEIEYMHVNQVWNLVDPPDGVKAIECKWVFKKKTDVDGNVHIYKARLVAKGFRQIQGVDYDETFSPVAMLKSIRIVLAIAAYFDYKIWQMDVKTAFLNGNLDEDVYMTQPKGFVDPQSAKKICKLQKSIYGLKQASRSWNIRFDEVVKALGFVKNKEEPCVYKKISGSALVFLILYVDDILLIGNDIPMLESVKTSLKNSFSMKDLGETAYILGIRIYRDTSKRLIGLSQSTYIDKNQCPQTTDERNKMSVIPYASAIGSIIATSRYQSDPGESRWIAVKNILEYLRRSKDMFLVYGGQEERVVNGYTDASFQTDKDDFRSQSGFVFCLNGGAVSWKSSKQDIVVDSTTEAEYIAASEAAKKAVWIKKFVSQLGVMTSASSPMDLYCDNSSAIAQAKEPRSHQKSKHILRRYHLIREIVDRGDVKICKIHTDLNVADPLTKPLPQPKHEAHTRAMGIRYVHD

SEQ ID NO: 135982 - protein, 509 aa, Oryza sativa
  Clone ID: PAT_MRT4530_37604C.1.pep
MKSEIESMHVNQVWNLLDPPDGVKAIECKWVFKKKTDVDGNIQIYKTRLVAKGFRQIQGVDYDETFSPVTMLKSIQIVLAIAAYFNYEIWLVNVKIAFLNGDLNEDVYMTQPKGFGDPQSAKKICKLHKSIYGLKQASWSWDIRFDEVVKALGFVKNEEEPRVYKKISGNALVFLILYVDDILLIGNDIPMLESVKTSLKNSFSVKDLGEAAYILGIRIYRDRSKRLIGLSQSTYIDKVLKRFNMQDSKKGFLSMSHGINLGKNRCPQMTDERSKMSVIPYALAIGSIMYAMLCTRPDVSYALSATSRYQSDPGETHWIAVKNILKYLIRTKDMFLVYGGQEELVVNDYTDASFQTDKDDFRSQSGFVFCLNGGAVSWKSSKQDTLANSTTKTEYIAASEAAKEAVWIKKFVSQLGVMTSTSSPMDLYCDNSGAIAQAKEPRSHQKSTHFMAVSPHSRDNPLTKALPQPKHEAHTRAIGAAVDAWTEKEFSGYSRVYMNLQGRTLNGPE

SEQ ID NO: 135983 - protein, 368 aa, Oryza sativa
  Clone ID: PAT_MRT4530_37605C.1.pep
MKRLLHKALHQGEGGTHVDVAQMDAQIALHYGIPYTASLLAFDPVQRLLALATLDGRIKIFGGDNIEGLLISPNSLPYKFLQFIQNQGFLIAISNENEIQVWNLEFRQLFYSSKWDINITAFAVVEGTFLMYLGDENGLLSVLKYDVDDGKLQKMPYNVPIHSLAEAACVSLEDPQSIVGILPQPDTFGTRVLIAYEKGLLVLWDVSEDRAISVRGYGDLHMKNQITGAQRDAGEDEDNNISAEEEREICSLCWASQGGSTVAVGYITGDILLWDMTARSSKQDNRSDEPSNVVKLQLASGSRRLPVIVLHWSSRSADSNKGGHLFVYGGDDMGSEESLTVLSLESTTGLESTRCMSRMDLKLDGSFC

SEQ ID NO: 135984 - protein, 333 aa, Oryza sativa
  Clone ID: PAT_MRT4530_37606C.1.pep
MASPDGGVGDGGAEPHEVMDDLLEMREQAAMLHSMLHGTSPSSCAAAASTRQLNQLIDGVMSRLQSSSLSVMSPGGGGGRRGSGGRKKKGAKAVAGPHRRSSSGRRRSKSPFVRMVTTKELEDGRQWRKYGQKHIQDSPNNPRSYYRCTHRPDQGCMATKQVQTSESNSSEFVISYYGEHTCSDPSTIPFVVEAEAPAADYANLISFGSSGGASTSRVDPLRQSRHRLMAEAVDPTPSCSFANCHSPVLSSECASEAAALSSSLPLSAVVGSAVTTPSTSIVGSAPADYDWPSGLAGGDMAGSFPSSPSSLGFMTGSFGNLPGDDDDMFGFDP

SEQ ID NO: 135985 - protein, 810 aa, Oryza sativa
  Clone ID: PAT_MRT4530_37607C.1.pep
MTAMGFPSQWNEWMTKIFSSASTPILLNGVLRKFFKCKRDVRQGDPLSPLLFALGADLLQSLINKAHIRGILKFPIPVIGDENIPIIQYADDTLIFLEASAPQLFALKAMLNSSALSSGLKDDLWNGMVRSVKFPRLFSFARHKEDSVSQHLAREPQDQFFLPLSQQALDEYNVLLADVQTTALLDVNDGWTYIWGSAMYTSQHLYKIGFWSLTPPLTLQWIWQCKVNMKIKVFGWLLLLDRIMAAPAPSSFNLRSILEKEKLTGTNFIDWYRNLRIVLRQEHKEFVLTQPFRADLPNNAPAAQHREHEKRCNDYLDISCLMLATMSLELQRQYEALDVHTIITGLCNMLEDQARAERLAEGNPVSPHVIKLIGYTESLDKLGFPLSRELATDLILQSLPPSFELFTMNFNMNNLNRTLAELHGMLKTAEESIKKNSNHVMVMHKRKPNYKKSVVKALGFVKNEEESCVYKKISGSALVFLILYVDDILLIGNDIPMLESVKTSLKNGFSMMELGEAAYILGIRIYRDRSNRLIGLSQSTYIDKVLKRFNMQDSKNGFLPMSHGINLGKNQRPQTTDEQNKMSVIPYASAIGSIMYAMLYTRPDVSYALSATSRYQSDPGESHWIAVKNILKYLRRTKDMFVVYGGQEELVVNGYTDASFQTDKDDFRSQTGFVFCLNGGAVSWKSSKQDTVADSTTEAEYIAASEVAKEAVWIKKFVSQLGVMTSASSPMDLYCDNSGAIAQAKGPRSHQKSKHILRRYHLIYEIVCRGDVKICKIHMDLNVADPLTKPLPQPKHEAHSRAMGIRYVHD

SEQ ID NO: 135986 - protein, 386 aa, Oryza sativa
  Clone ID: PAT_MRT4530_37608C.1.pep
MEARRISASPRPCSGRRVVARKRPRHEAAVNSVRKLQRREISSCRDRAFSMSAAQERFRNIQLQEEFDTHDPKENSLLLPYLRKRSKIIEIVAARDIVFALSQSGVCAAFSRETNRRICFLNGSPDEVIRSLFYNKNNESLITVSVYGSENFSALRCRTTRIEYIRRAKPDAGFPLFESESLKWPGFVEFDDVNGKVLTYSAQDSTYKVFDLKNYTLLYSISDKNVQEIKISPGIMLLIYTRTSSSVPLKILSIEDGTVLKSFNHLLHRNKKVDFIEQFNEKLLVKQEGENLQILDVRNFQLTEVSRTEFMTPSAFIFLYELQLFLTFRNRSVAVWNFRGELVTSFEDHLLWHPDCNTNNIYITSDQDLIISYCKADSNDSSSEEN

SEQ ID NO: 135987 - protein, 1188 aa, Oryza sativa
  unsure (1)..(1188): unsure at all Xaa locations
  Clone ID: PAT_MRT4530_37609C.1.pep
MPKVIEESITSYYQQIMAAPAPSNFNLRSILEKEKFTGTNFMDWYRNLRIVLRQEHKEFVLTESFPANLPNNAPAAQRREHEKRCNDYLDISRLILATMSPELQRQYEALDAHTIITGLRNMFEGQARAERFNISKSLFACRLVEGNPVSPHVIKMIGYTESLDKLGFPLSRELATDLILQSLPPSFEPFIMNFNMNNLNRALVELPGMLKTAEESIKKNSNHVMVMHKRKPNNKKSGQKRKLNSDEITSTSNSKTKVQKTGPAKDAECFFCKETGHWKRNCKKYVEQLKQKQQDGKNSTSEGYGFRSVDNGCPVYYNDIFYFHAPMMNGLYIVNLDGYSVYDINAKRQRPNDLNPTFIWHCCLGHINEKRMEKLHRDGLLHSFDFESFETCESCLLGKMTKAPFTGQSERASELLGLIHTDVCGPMSSTDRGGFGYFITFIDDFSRYGYVYLMRHKSESFEKFKEFQNEVQNHLGKTIKYLRSDRGGEYLSLEFGNHLKECGIVPQLTPPGMPQWNGVSERRNRTLLDMVRSMMSQTDLPLSFWGYALETAAFTLSRVPSKSVDKTPYEIWTGKRPSLSFLKIWGCEVYVKRLQSDKLTPKSDKCFFVGYPKETKGYYFYNQEEGKVFVARHGVFLEKEFISRKDSGSMLWKHRLHEGPIGYGVHLRDNDEPTTFEEAMVGPDSEKWFGAMKSEIESMHVNQVWNLVDPPDGVKAIECKWVFKKKTDVDGNVHIYKARLVAKGFIYKARLVAKGFRQIQGVDYDETFSPVAMLKSIRIVLAIAAYFDYEIWQMDVKTAFLNGNPDEDVYMTQPKGFVDPQSAKKICKLQKSIYGLKQASRSWNIRFDEVLKALGFVKNEEEPCVYKKISGSALVFLILYVDDILLIGNDIPMLESVKTSLKNSFSMKDLGEAAYILGIRIYRDRSKRLIGLSQSTYIDKVLKRFNMQDSKKGFLPMSHGINLGKNQCPQTTDERNKMSVIPYASAIGSIMYAMLCTRPDVSYALSATSQYQLDPGESHWIVVKNILKYLRRTKDMFLVYGGLEELVVNGYTDARFQTDKDDFRSQSGFMFCLNGGAVSWKSSKQDTVADSTTEAEYIAASEAAKEAVWIKKFVSQLGVMTSASSPMDLYCDNSGAIAQAKEPRSHQKSKHILRRYHLIREMVGRGDVKICKIHTDLNVAXPLTKPLP

SEQ ID NO: 135988 - protein, 102 aa, Oryza sativa
  unsure (1)..(102): unsure at all Xaa locations
  Clone ID: PAT_MRT4530_3760C.1.pep
DRIFLPFKKSKVAVLFPPVPRFGSIPLFLLPLPNELTEAPDTTKEKTQRNHQKQQQHXTMGXAPPTNLFLRRAILANRTWTXAXRVRSRRXRVHRLDVRAFS

SEQ ID NO: 135989 - protein, 344 aa, Oryza sativa
  unsure (1)..(344): unsure at all Xaa locations
  Clone ID: PAT_MRT4530_37610C.1.pep
MAKQAYATSSLVIGYALCSSLLAIINKYAITKFSYPGLLTALQYLTSVAGVWTLGKLGLLYHDPFNLQTAKKFAPAALVFYLAIFTNTHLLKHANVDTFIVFRSLTPLLVAIADTAFRIXKQPCPSKLTFVSLVTILGGAVGYVMTDSGFSLTAYSWAVAYLVTITTEMVYIKHMVTKLGLNTWGFVLYNNLLVLIIAPVFWFLTGEHLSVFRAIESRGQSWFELDAFVAVSLSCVFGLLISFFGFAARKAISATAFTVTGVVNKFLTVAINVMIWDKHASSFGLVCLLFTLAGGVLYQQSVTLKGNSSVQREAVAKQGKADNDTAELDEEKQSLVSSPKDSNV

SEQ ID NO: 135990 - protein, 679 aa, Oryza sativa
  Clone ID: PAT_MRT4530_37611C.1.pep
MAYGTTSSANRRSSLKASMENQEIAEIVAVVACEQGVFRSMRIASYEQAEAGDVGERGAGRAGPSSAGGSWSGETQQPLRLHRRRRGSVLSVSAASDGEQWLPPTSTVCLLHVDLGLMFAAQSQWISPTWIENPAHIRLSLEWVESRPTTAFHPHPGPGKRITSTLLRRLRRRRRRNALSSGCPSPSLVGSRLPPEARPDDRSGMAYAKDQARAERFNTSKSLFACRLGEGNPVSPHVIKMIGYTESLDKLGFPLSRELATDLILQSLPPSFELFIMNFNMNNLNRTLAELHGMLKTAEESIKKNSNHVMVMHKRKPNNKKSGQKRKLNFDEITSTSNSKTKVQKTGRAKDAECFFCKETGHWKRNCKKYLEQLKQKQQDGKSSTLGINVIEINLATSSTDSWVFDTRGGFGYFITFTDDFSRYGYVYLMRHKSESFEKFKEFQSEVQNHLGKTIKYIRSDRGGEYLSLEFGNHIKECGIVPQLTPPGTPQWNGVSERRNRTLLDMVRSMMSQTDLPLSFWGYALETAAFTLNRVPSKSVDKSPYEIWIGKCPSLSFLKIWGCEVYVKRLQSDKLTPKSDKCFFVGYPKETKGYYFYNREEGKVFVARHGVFLEKEFISRKDSGSMVRLEEIQETPENASTCTQPQQAEQDVVQEQVVVEPVVEAPASRRFERIRRTPA

SEQ ID NO: 135991 - protein, 285 aa, Oryza sativa
  Clone ID: PAT_MRT4530_37612C.1.pep
MPCLGFWVEKCKFRQGLEIGPIKQSTPNPVASNAGGGLRRGPGSREPHTTEARSSSRPLLACGAGDDGEIRVRFVSSVTCRAPPTPRHRPRAAAAATPRLRPRACRPWPSPPRHPSAAADANDAAAGLPRKTEEERELEEMCRLPHPLSSSSFAATVVAVVRIAAFGRYRLPSPPPLLAASPHRGWGRHRQCRQIHRGREARGVGRSRRRQIRPRPPPPRPDPPAVAVAGPIAREARERMRGRTVRGRERGSGAAGGWRGSDAAREGERRRAEREGGRWVALRRG

SEQ ID NO: 135992 - protein, 973 aa, Oryza sativa
  Clone ID: PAT_MRT4530_37613C.1.pep
MVEQLFVWAKMGGRMGSSASANYSPMAHRGCHGRKRCRGSGADLARIDVGHLYAEIISLLDKIMAAPAPSNFNLRSILEKEKLTGINFMDWYRNLRIVLRQEHKEFVLTQPFLADLPNNARAAQRREHEMRCNEYFDISCLMLATMSPELQRQYEALDAHTIITGLCNMFEDQARAERLAEGNPVSPHMIKMIGYTESLDKLGFPLSQELATDLILQSLPPSFEPFIMNFNMNNLNKTLAELHGMLKTAKESIKKNSNHVMVMHKSKPNNKKSGQKRKLNSDEITSTSNSKTKTIKYLRSDRGGEYLSLEFGNHLKECGIVPQLTPPGTPQWNGVSERRNRTLLDIVRSMMSQTDLPLSFWAYALEKAAFTLNKVPSKSVNKTPYEIWTGKRPSLSFLKIWGCEETLENASTSTQPQAEQDVVQQVEQVVVEPVVEAPASRRSERIRCTPARYALLTTGQRDILLLENDEPTTYEEAMVGLGAMKSEIESMHVNQVWNLVDPPDGVKAIEWKWVFKKKTDVDGNVHIYKARLVAKGFRQIQGVDYDETFSLVAMLKSIQIVLAITAYFDYEIWQMDVKTAFVNGNIDEDVYMTQLKGFVDPQSAKKICKLQKSIYGLKQASRSWNIRFDEVVKAWALSKTKKSLVLYVDDILLIGNDIPMLESVKTSLKNSFSMKDLGEAAYILGIRIYRDRSKRLIGLSQSTYIDKVLKRFNMQDSKKGFLPMSHGINLGKNQCPQTTDERNKMSVIPYASAIGSIMYAMLCTHPDVSYALSATSRYQSDPGESHWIAVKNILKYLRRTKDMFLVYGGQEELVVKGYTDASFQTDKDDFRSQSGFVFCLNGGAVSWKSSKQDTVVDSITEAEYIAASEAAKEAVWIKKFVFQLGVMTSASSPMDLYCDNSGAIAQAKEPRSHQKSKHILRRYHLIREIVGRGDVKICKIHTDLNVADPLTKPLPQPKHEAHTRAMGVRYIHD

SEQ ID NO: 135993 - protein, 609 aa, Oryza sativa
  Clone ID: PAT_MRT4530_37614C.1.pep
MTKAPFTGQSERASELLALVHTDVCGPMSSTARGGFGYFFTFTDDFSRYGYVYLMRHKSESFEKFKEFHNEVQNHLGKTIKYLRSDRGGEYLSLEFGNHLKECGIVPQLTPPGTPQWNGVSEWRNRTLLDMLWKHRFREDPKKKTDVDGNVHIYKARLVAKGFRQIQGVDYDETFSPVAMLKFIWIVLAIAAYFDYEIWQMYVKTAFLNGNLDEDVYMTQPKGFDDPQSAKKICKLHQSIYGLKQASRSWNIRFDEVVKALGFVRNEEEPCVYKKISGSALVFLILYVDDILLIGNDISMLESVKTSLKNSFSMKDLGEAAYILGIRIYRDRSKRLIGLSQSTYIDKVLKRFNMQDSKKGFLPMSHGINLGKNQCPQTTDERNKMSVIPYASAIGSIMYAMLCTRPDVSYALSATSRYQSDPGESHWIAVKNILKYLRRTKDMFLAYGGQEELVVNGYTDASFQIDKDDFRSQSGFVFCLNGGAVSWKSSKQDIVVDSTTEAEYIAASEAVWIKKFVSQLGVMTSASSSMDLYCDNSGAIAQAKEPRSHQKSKHILRQYHLIREIVGRGDVKICKIHTDLNVADPLTKPLPQPKHEAHTRAMGIRYIHD

SEQ ID NO: 135994 - protein, 644 aa, Oryza sativa
  unsure (1)..(644): unsure at all Xaa locations
  Clone ID: PAT_MRT4530_37615C.1.pep
MEKLHKDEDGFLYSFDFESFETCESCLLDKTTKAPFTDQSERASELLALVHTDVCGPMXSTTRGGFGYFITFTDYFSRYGYVYLMRHKSESFEKFKEFHNEVQNHLVKTIKYLRSDRGGEYLSLEFGNHLKECGIVPQLTPLGTPQWNGLSERRNRMLLDMVRSMMSQTDLPLSFWGYALETAAFTLNRIPSKSVDKTPYXIWTGKRPSLSFLKIWGCEAYVKRLQSDKLTPKSDKCLFVGYPKETKGYYFYNREEGKVFVARHGVFLEKEFISRKDSGSMVRLEEIQETPENASTSTQPQQGEQDVGQQVEQVVVQPAVEAPASRRSERKRRTPATYALLTTRQRDILLLDNDEPTTYEEAMVGPDSEKWLGAMKSEIESMHVNQVCKLVDPPDGVKAIECKWVFKKKTDVDRNVHIYKARLVVKGFRQIQGVDYDETFSPVTMLKSVRIVLAIDAYFDYEIWQMDVKTAFLNGNLYEDVYMTQPKGFVDPQSAKKICELQKSIYGLKQVSRSWNIRFDEVVKALGFVKNEEEPCVYKKISGSALVFLILYVDDILLIGNDIPMLESVKTSLKNSFSMKDLGEAAYILGIRIYRDTSKRLIGLSQSTYIDKVLKRFNMQDSKKGFLPMSHGINLGKNQCPQTR

SEQ ID NO: 135995 - protein, 74 aa, Oryza sativa
  unsure (1)..(74): unsure at all Xaa locations
  Clone ID: PAT_MRT4530_37616C.1.pep
MAATXLSTXLSPXXXXLRSTSSNLVSSXXSFLSKPMLXDLAVEGXPRRRXXPFXXVAVXVSEEVETEEDEEEEE

SEQ ID NO: 135996 - protein, 130 aa, Oryza sativa
  Clone ID: PAT_MRT4530_37617C.1.pep
MAAALALFLLFAAAAAILLLHLVVAARAFRNQRHGGAGRSRYRVPETSYTPSRAGLSPADLRFLPCFAASASASASPELCAVCLEAACAGERWRALPACGHAFHAACVDRWLARAAACPVCRASVSASAS

SEQ ID NO: 135997 - protein, 92 aa, Oryza sativa
  unsure (1)..(92): unsure at all Xaa locations
  Clone ID: PAT_MRT4530_37618C.1.pep
MNTYFTLCSCYTEYTASLSRRCFGEGIMFAYAISLCHDDDIRVVSGSLGVVSRLWDIIIXGYMLRMRDGQLMVTAQYGYSSAPVYNPKLVSW

SEQ ID NO: 135998 - protein, 137 aa, Oryza sativa
  Clone ID: PAT_MRT4530_37619C.1.pep
MSVEILDGRTVESFVEDEGAFNSTVDDRFAALDGDRDGRLSYADMAGELMSLRVLETHFGVDGAAATDAELVDLYRGLFARFDRDGDGAVDREEFRAEMKEVMLAVASGLGFLPVQMVVEEGSFLKRAVERELAKAA

SEQ ID NO: 135999 - protein, 511 aa, Oryza sativa
  Clone ID: PAT_MRT4530_3761C.1.pep
MELCSNIPGIGKMKYLQWLEEYHVKKEDIGFELSELGNLTELGGELKIFNLENVATREEANDAKLISKRNLKALTLVWSAKQLSIGSGVLDGLQPHPNLRALDIRNHGGSTGPTWLCGDVCVKGLKSLHLEGLSWGTFPPFGQLMHLEELTLINIAGIRKFGPDFGGVTQKSFLHLKKIKFVGMPELVEWVGGAHWHLFSKLASIRCEDCPNFSVLLLPFSKCSVICTQDINTVWFPNLCSLEIRNCSKLSLPPMPHNTMLTRVTVKEDNQAKLHFEEETLRIDGYGGALAFHNLDKVKDMTIENMFHISLTDLQKLNSLTSLDVTGCKSMLSSEVDNGFIFCSVQQLNLRDCHLTEKSLGGSFQQLVRLDVDSISAVFVETICSLLAATLIELRFTSDLITESFTEKQEQKGESKMSQGQRHIDPVWSTGHNACSNRMASKVTETAPGALSNGLWLAWAECAQTNQPMCVFGVAQGPARLLGFSSLYSTTHCKQRGARSLLPPRMTPPDE

SEQ ID NO: 136000 - protein, 472 aa, Oryza sativa
  unsure (1)..(472): unsure at all Xaa locations
  Clone ID: PAT_MRT4530_37620C.1.pep
PFPPPPHSDDRSLLPALPGRLVVLGPLGTGRRLRRGRPLRWPTDPPPWWRRGAAPFLEPEPPASFRPSPFPDXRRLRLSLAVPSPPRRASASPATTPSPSTASRSGSSGSGNPRRFASWQPRPPPPXAEELPPPPPPFLSDFLVPSPXPRASPSSDSSRVPGSCSSSCPEPSCPWQWPPPSPSSLPPQPSSSPRCRPSPSCPSLPSPPSPPWQPPPRPSRXAPLPADDXSAPSRAAAQRCRRRPWPASSSPPPPPPPRGPSPRPPTRSTPPPPPPPLHPPASTXPSPGPHGAXPSPGPPPRNQTTPXPLPTPLVFHPQFLLLSPHPPPTATPPPPLRRRLRPSVAGGGTGWRSSARRCSPSRRPPPSTQPPTRPTPPPSRRCRRPRAPPPPPPPPPPPGRRRRRPRGRSPAASDLTSSTPCMTGRIRGRRPCPPRRRPPPVIPSVHPPPPPSPPPPPAAASSRRRCSFPSPP

SEQ ID NO: 136001 - protein, 95 aa, Oryza sativa
  unsure (1)..(95): unsure at all Xaa locations
  Clone ID: PAT_MRT4530_37621C.1.pep
MVIRWPMVMSWLGVELTTPTASRRRRKKSAVWEHFTIEEMPGGSXRASCNLCKQTFGYSCGSDXSGTSHLKRHITLALCPMLKNEDMKLSLPLST

SEQ ID NO: 136002 - protein, 296 aa, Oryza sativa
  unsure (1)..(296): unsure at all Xaa locations
  Clone ID: PAT_MRT4530_37622C.1.pep
PSPGPPXPPAPAPVSPTATPPPPXSPPPPPFPPSRRPPPSTQPPTRPTPPPSRRCRRPRAPPPPPPPPPPPPCPPRRRPPPVIPSVHPPPPPSPPPPPAAPSPPRPSSPSHGGSRRTPGAGPPTSPRSPRPRDPAAPPPPPPPCGSRPRRAGPPRRGAASRSPRSAPPAAASPARTXSPPPPPAAPAARXPPVEPQARPSPQREHAPRGEPHPGQQXPTPPPXSPPPRTRTPCSSPPTPTDPXSAPPDPARRRIFPPAPLLCVAPPPVPPLCATPPPLSSRPGPPPMRHAPPPPPP

SEQ ID NO: 136003 - protein, 605 aa, Oryza sativa
  Clone ID: PAT_MRT4530_37623C.1.pep
MQSRCPSAAVFTPTTCRLRFRVLHRRFSGGVTAENEDADGGEEEEEADAAAVAGWVEELRELRVAELRREVEKYDLSIGSLQSKVKRLKEEREKSISGETKPPPAAAAVKEEEEDVRKGSPEEAGAVEDRVSGHESGRSCKESNSSDLKRPENDPAVADDDDREAEEEEEAAAAPAAGDIAVKEEASGESVAGSKEADVEKESSDVQSSASPSRRRRRKGGGGGEEAEAASPSVSVPLPAAEAEPLVAFLESVRTSKAGAVFERRLDSQDGERYSGTIRRHVDLETVRSRLVGATAAAAAAACYASASEFYRDMMLLCANALVFFPRGSPEHAAALQLRALVSKQVSKDRQPHAGAKAPAAAAEEEEKKKPAKADADIAGPLLEKAPIIVCRKRSSIAKAAAAAAKGEKAEKAETDKKEKDGSEEKKKAAAAATTATAAATAKDKKARGMRTNKSRGPARNQKTAKLSETGEGTKKSDKKGGGGGGSSSAGAAAGGVAKKRNAVDFLNRMNQNGSPSTERVSLLETLKLSAAATEQQETVVVVVIREGRRPEGGRRLRLQEGRRRLDATREEDRSATEAGGRAADAAAVPRGPRTTSRPGSAGRS

SEQ ID NO: 136004 - protein, 378 aa, Oryza sativa
  Clone ID: PAT_MRT4530_37624C.1.pep
MKASIKFRDDDRPLLRARVPIRVLGLPLHSGLSAGGDPRELRLDLSTAFSFGPAIRLSYRPNDPALPFSVSVRAGVGPLGSPARAPFSLAAEFNLLSGNPGSPAFFLLLKPRLGDFSLSHTLRSSPHPGNKVGEVSDGDGHGREVNYKAFSFAAAGKSGGGVGALLSGMRLTTRSVLPLWGRASLRFNWGLRAPPELQAALAADDAMVGASRSRKGGARVPVSKMPLLVIDKISIEQSPRAADKTRGNADSSPPAPAIAAAADADAADGTGRGGEGFSLVRRQLEALNAESGMLRRAVEDLRAEVGSRRAAVSTAGAPDTWRTPPAPPQPAQPYHYSSPVKPDRRGSGKDMAAAENATKPSSDELGDELKRALEARLR

SEQ ID NO: 136005 - protein, 63 aa, Oryza sativa
  Clone ID: PAT_MRT4530_37625C.1.pep
MGKKRIREERIRSLLVPARLPGCQRQELWDKWLGAEPMKVTAKPARDTGDECDDGRGWSPRRT

SEQ ID NO: 136006 - protein, 630 aa, Oryza sativa
  Clone ID: PAT_MRT4530_37626C.1.pep
MPSPSLLLHHHHHRLSPRFAPSRSPSPRTLSLHPAPRLRLRLRLRASARGGGGSTRDHDDGARSIPIARCYEAALARLDLSGTARREQAVAAAAAADGGAAAEAHLAAVADAMVMEAFLPGPDGARRSAMSTRLILQANEVTEKASKLKKDLGTEFFSENEPDAESVLAMAFKQVVMDQLTNFRLEVFSPGSEIDLQDLSKPRKVPADFSIRSSDEKLLAALAEAIFSCVIEDARNNYLGGTGGLFHKWKSNCSLDSSVCIDIISESEVVNSARRRLDSFDLVQSSHVAGKAKNGWWPAPKSERLVKIGGPDFMLWASEFVYTYKLQIDAKAFKNTKLGGHHVLANNKGEVLLSHAQMVELANILDMYFEDQFTLPGKTFYSNWNSEPSKIKKNNGYLNNLFALLAGSSIVFLVGAIAQLCWPQSLKDKRLATVSSCVSSSQSYCSDIHSLDSSELQAYCVSVVEKIKDSFGCTGDLMVDANIGAWVGELPEFFKGINCDSHDDYVDIQSTGAISQGEQPSLVSSPIKMSSHLEQNDDTQETLQNIASFQVVMSERGKVVGFQPTNRLAVNHWATNPLTKLLYEGRKISPAFLEPRLRISRPAKVVPVELLMSVNPESFFALVRPVQDPC

SEQ ID NO: 136007 - protein, 55 aa, Oryza sativa
  Clone ID: PAT_MRT4530_37627C.1.pep
GTLRVPVQCVLAGSRLAMLVGAHPVSVGSRSICKSYGPSEMPPLCVSMFRTTKNN

SEQ ID NO: 136008 - protein, 58 aa, Oryza sativa
  Clone ID: PAT_MRT4530_37628C.1.pep
QLVCSAKFFERIYYILVNLFLLRNTDLTISSNKINKIFAIKLIDDRCGHVPCDVRPCT

SEQ ID NO: 136009 - protein, 482 aa, Oryza sativa
  unsure (1)..(482): unsure at all Xaa locations
  Clone ID: PAT_MRT4530_37629C.1.pep
MAAAHVLVFPWPVQGHINCMLHFATGXSPSRPPRHLPPQRPHPPRRRRRRRRRAGRRLAAAPLRVHPRXLPDGHPRHAGAAVRLMESVQTQSSAYRSLLAELARGDGDGGGFPPVTCVVADGLLPFAVDVAEELGVPALSFRTASACSFLAYLSVPRLFELGELPFPAGGDLDEPVRGVPGMESFLRRRDLPGQCRNCTELQNDPLLEMVIDFTARSRHARALVLNTAASMERAALDHIARNMRDVFAVGPLHVMSPAPAAALASQWREDDGCMAWLDGQADRSVVYVSLGSLTVISPEQFTEFLSGLVAAGHPFLWVLRPDMVTARLQHADLQEAVVAAAAGDSKARVVRWAPQRDVLRHRAVGCFLTHAGWNSTLEAAVEGVPTVCWPFFVDQQINSRLVGAVWRTGLDMKDVCDAAVLARMVREAMESGEIRASAQALSQQLGRDVADGGSSATEFKRLIAFIEQLSTTAQNGGCSDGG

SEQ ID NO: 136010 - protein, 56 aa, Oryza sativa
  Clone ID: PAT_MRT4530_3762C.1.pep
ILWPILRPCTINQLLATFITASLHEAALTLSTTIPSLSDAGGDLSIADPYLQTFQL

SEQ ID NO: 136011 - protein, 219 aa, Oryza sativa
  Clone ID: PAT_MRT4530_37630C.1.pep
MDLHDASSVAAALAADFERRRTSSGELRPLRRRKEARRRGGINEPNGGSPNETQASAAARPAPLRQPTMAAAAPHHHSAPSAAHVSKRGRERGVEWSLSLLPPRFAGLHCPLPRRWSAVVAREVVEGAASLRSLPACSLAGASNKLIPKFDVNEAHNYTGLQHRAQQEQPSPTTPAKGRTSPSRGSEAVRLDLRSALVDTNMIDLHLFSSISSHHPPLG

SEQ ID NO: 136012 - protein, 67 aa, Oryza sativa
  Clone ID: PAT_MRT4530_37631C.1.pep
MGNDMGMERTCSGDASYIRVHHDGDDLYDLSFLDGGAVSVVLILNGSTEWRWTAMAKPVATAQQRLG

SEQ ID NO: 136013 - protein, 127 aa, Oryza sativa
  Clone ID: PAT_MRT4530_37632C.1.pep
RLPLPQLPSPWLSSSSVAECAAASLSRRRRVLPASHRADCAASTEITRLPLTPPPAPAPLVPARPCPPPLSDKVSFFGFITTRWERQSVHRFLSGLFQQLELDFSMSSARTPGGSQRSLNLGSMIHV

SEQ ID NO: 136014 - protein, 115 aa, Oryza sativa
  unsure (1)..(115): unsure at all Xaa locations
  Clone ID: PAT_MRT4530_37633C.1.pep
MSYCKGGRHGAGQALRQPLSLPDSPRHERGLPAALRGVGVKPEVWCAWLEGVMXSVLSRPLSDMDLYVNFVVCVPRPVLDGGFYAHSAWNSIREFLGVTLIKNLQRGISDNSLFK

SEQ ID NO: 136015 - protein, 168 aa, Oryza sativa
  unsure (1)..(168): unsure at all Xaa locations
  Clone ID: PAT_MRT4530_37634C.1.pep
MSLVKLFDTLAFDAWNPFSIFGTTVAADAWLASDTSAFANTYIESRETAEAYVFRADLPAGVKKEEVRVEVDEGNVLVITGERSVRREEKGQRSHHIERSCATFFGRFHLPXTTAVVDLVRASMDGGMLTVTVPKVVTDKQPAIAAXAAPVPAVVAPAVEAKAIEASP

SEQ ID NO: 136016 - protein, 748 aa, Oryza sativa
  Clone ID: PAT_MRT4530_37635C.1.pep
MLLPLMAVLIASAWPAAASTTTAAAQPAAACQRRCGDVDIPYPFGIGRGCYLYTGEGDVTFGLTCNRTADGSYRPFCWEYEVLDVSLRRGQARVRNDINRWCYNATTRSMDAESTWWWDVSDSWFHVSDEGNRLVVVGCNSLAYVTSVNETEYMTGCMATCPSVGRLENGSCSGMGCCEAAIPRGINSYVVGFEEKFNTTSGAVGRCSYAVVVEAASFEFRTTYVTTGDFVESTGGKVPLVLDWVVGKKTCREARRNATGYMCVSRDSECVDSRNGPGYLCNCSAGFEGNPYLLDGCQDINECEDSRFKYPCSVPGTCINTPGGFRCSCPDKTTGNAYFGTCEAKKSQLGVHIAIGVSIGIALLVIIMSSAYMIQQKRRLATVKRRYFNQHGGLLLFEEMKSNQGLSFTVFTKDELEEATNKFDERNVLGKGGNGTVYRGTLKDGRVVAIKRCKLINERQKKEFGKEMLILSQINHRNIVKLHGCCLEVEVPMLVYEFIPNGTLYQLIHGGRHGSRISFAARLKIAHEAAEALAYLHSWASPPIIHGDVKSPNMLIDENYTVKVSDFGASTLAPTDEAQFVTLVQGTCGYLDPEYMQTCKLTDKSDVYSFGVVLLELLTCRKALNLQALEEEKNLSSHFLLALSENRLEGILDSQIQSEQSIELIEQMADLAKQCLDMSSEKRPSMRQVAEELDRLRKLAEHPWGRHESEELEKLLVRGSPSTFSEIELSNGYVSLTDSAYLGIQSPR

SEQ ID NO: 136017 - protein, 493 aa, Oryza sativa
  unsure (1)..(493): unsure at all Xaa locations
  Clone ID: PAT_MRT4530_37636C.1.pep
MSLIRIGIRIEVLWALEARVMDPIYSXRGVTSGGIASLEAPLVYGADRRGSTARRTHEEEKVEPIMAAPAPSSFNLRSILEKEKLTGTNFMDWEHEKRCNDYLDISCLMLATMTPELQRQYEALDAHTIITGLRNMFEEHARAERLAEGNPVSPHEIKMIGYTESLDKLGFPLSRELATDLILQSLPPSFEPFIMNFNMNNLNRTLAEVHGMLKTAEESIKKNSNHVMVMHKRKPNNKKSGQKRKLNSDEITSTGNSKTKVQKTGPAKDTECFFCKETGHWKRNCRKYLEHLKQMQQDGKSSTLGINVIEINLATSSTDSWVFDSSFSMKDLGEAVYILGIRIYRDRSNRLIGLSQSTYIDKVLKRLNMQDSKKGESYWIAVKNILKYLRRTKDMFIFYGGQEELVVNGYTDASFQTDKDDFRSQSGFVFWLNGGAKIERSPVISQLRNRGTEQAKSWIGGTVDAPLTLRHNSNGARGVMAMPAKEGMATAAK

SEQ ID NO: 136018 - protein, 442 aa, Oryza sativa
  Clone ID: PAT_MRT4530_37637C.1.pep
MERYHPSEVYELFVRHMNTPRVVVDSGVCATATLVQVHSARKHGMLLEAVAALSEHGVCVRKGYISSDDGRWFMDVFHVTDAAGRKVADADALLARLESSLSAEALPRAAAGGPAAEGLTLLELVGADRPGLLSEVFAVLHDLRCNTVEARAWTHGGRVAALVFVRDEETGAPIDDAARVRRIESRLRHVLRGGARCARTVLADPSAAGNLDRRLHQLLKEDGEADSRGAAPMTAVAVQDWGERGYSVVTVSCRDRPKLLFDVVCTLTDLDYVVYHGTFDTDGDHAQQEFYIRRSDGRPISSEAERQHVIRCLQAAIERRASEGVRLELRISDRRGLLAYVTRVFRENGLSVTHAEITTRDDMAMNVFHVTDVAGRPADPKTIDEVIQRIGTESLRVDEERWPRLCSAEGDAAGRGGGGGLFSLGSLVKKNLFSLGLIRSCS

SEQ ID NO: 136019 - protein, 452 aa, Oryza sativa
  Clone ID: PAT_MRT4530_37638C.1.pep
MARRTYEEEKVEPIMAALAPSSFNLRSILEKEKLTGTNFMDWYRNLRIVLKQEHKEFVLTEPFPANLPNNAPAAQRREHEKRCNDYLDISCLMLATMSPELQRLAEGNPVSPHVIKMIGYTESLDKLGFPLSRELATDLILQSLPPSFEPFIMNFNMNNLNRTLAELHRMLKTAEESIKKNSNHVMVMHKRKPNNKKSGHIGDVTDSGGGSAERTARAAHARRRTAALGRKRRAPTGSGRHGELTGDQSDGGRPTDGDDDEEEAAALFGLTTATTLRRSSATAKGRTRTATTWRPRRRSSRATATTETAAAHGWSDGGDGGARLHGARALPATRGEGESGGGEPAPGFSEPAAAKLATPSASLSAPSWGEEDDGVEPSAATAAQRCYQIHHHCYSTPPPDPPPLPAATRARAPPMGNSRRRGKGRSRLAAERGGEKPSRTGEGRGEAGELRR

SEQ ID NO: 136020 - protein, 1296 aa, Oryza sativa
  Clone ID: PAT_MRT4530_37639C.1.pep
MESRSAREHGHGHLHQQHQRPWSCSFGFSWPPLQRSPPPSSSSSSYTCGYCRREFRSAQALGGHMNVHRRERARLRQFPNPRPHPLPNLNLSPPPPPPPPPPPPQQQQQCYCPGDRPAIVYSFFSTAAAAMAATKGLEVDLELGVGGDPLDGCAHDADELWHEAFSQGARAAANVQLRGGPIPSGSQAQDSRTCMAGRSRLQRRRRRPPWQWRAQLPSPLQPVLPAAAWEYGEENVRGGEGRADAIDYVLYIDARYFPRVPSTSQRLLPLRGASSAPTPSNFNLRSILEKEKLTGTNFMDWYRNLRIVLRQEHKEFVLTQPFPVDLPNNAIAAQCREHERRCNEYHDISCLMLATMSPKIQRQYEALDAHTIITGLRNMFEDQARAERFNTSKSLFACRLAEELHGMLKTAEESIKKNSNHVMVMHKRKPNNKKSGQKRKLNSDEIMSTSNSKTKVQKTGPAKNAECFFCKETGHWKRNCKKYLEQLKQKQQDGKSSTSGHINEKRMEKLQRDGLLHLFDFESFETCESCLLGKMTKAPFTGQSERASEQLALVHTDVCGPMSSIARGGFGYFITFTDDFSRYGYVYLMRHKSESFEKFKEFQNEVQNHLGKTIKYLRSDRGGEFLSLEFGNHLKECGIVPQLTPLGTPQWNGVSERRNRTLLDMVRSMMSQTNLPLSFWGYALKTAAFTLNRVPSKSVDKTPYEIWTRKRPSLSFLKIWGCEVYVKRLQSDKLTTKLDKCFFVRYPKETKGYYFYNREESKVFVARHGVFLEKEFISRKDNGSMLWKHRLHEGPKGYGVHLRDNDERTTYKEAMLGPDSEKWLGAIKSEIESMHVNQVWNLVDPPNGVKAIECKWVFKKKTDVDGNVHIYKARLVTKGFRQIQGVDYDETFSLVVMLKSIRIVLAISAYFDYEIWKMDVKTAFLNGNHDEDVYMIQPKGFVDPQSAKKICKLQKSIYGLKQASRSWNIRFDEVVKALGFVKNEEEPCVYKKIRGSALDLGEAAYILGIRIYRDRSKRLIGLSQSTYIDKVLKRFNMQDSKKGFLPISHGINLGKNQCPQMTDERNKMSVISYASAIGSIMYAMLYTRPDVSYALSATSRYQSDPGKSHWRAVKNILKYLRRTKDMFLVYGGQEELVVNGYTDACFQTDKDDFRSQSGFVFCLNGTAVSWKSSKQDTVADSTTEAEYIAASEAAKEAIWIKKFVSQLGVMTSASSPMDLYCDNSGAIAQAKEPRSHQKSKRILRRYHLIREIVGRGDVKICKIYTDLSVADSLTKPLPQPKHEAHTRAMGTRYVHD

SEQ ID NO: 136021 - protein, 103 aa, Oryza sativa
  unsure (1)..(103): unsure at all Xaa locations
  Clone ID: PAT_MRT4530_3763C.1.pep
TYLLHFLPLQISSPGTMPSSLNCLTKRGAPPTGSPIHFLQPSKISHFXXVTLTHSPSTPLSLLIVENILSINESPISDHFVFSRIDIGPICITLTLFSNICTP

SEQ ID NO: 136022 - protein, 76 aa, Oryza sativa
  Clone ID: PAT_MRT4530_37640C.1.pep
FFFFFFSWYFLVVFTSSLSLQLQKPYRSHVVSHLMYCPDSQRKNWHHPKRPPKEKPPKLPHRKSEIRILTLPSVYL

SEQ ID NO: 136023 - protein, 1138 aa, Oryza sativa
  unsure (1)..(1138): unsure at all Xaa locations
  Clone ID: PAT_MRT4530_37641C.1.pep
MHCPRLPAGMKSVVTFWSTLQFHIKKRFLENERFLENESELPLFPCMHHVQYKGISNPITRMVSIALNKLPPRIKNDMIMAAPAPSSFNLRSILEKEKLTGTNFMDWYRNLRIVLRQEHKEFVLTQPFPADLPNNAPAAQRREHERRCNDYLDISCLMLATMSPELQRQYEALDAHTIITGLRNMFEDQARAERFNTSKSLFACRLAEGNPVSPHVIKMIGYTESLDKLGFPLSRELATDLILQSLPPSFEPFIMNFNMNNLNRTLAELHGMLKTAEESIKKNSNHVMVMHKRKPNNKKSGQKRKLNSDEITSTSNSKTKVQKTGPAKDAECFFCKETGHWKRNCKKYLEQLKQKQQDGKSSTSGINVIEINLATSSTDSWVFDTGSVAHICKSLQGLKRSRSLARGEVDIRVGNGARVAAVAVGTMPLSLPSGLVLELNNCYCIPALCKNVISASCLQAEGYGFRSVDNGCSVYYNDIFYXHAPMMNGLYIVNLDGCSVYNINAKRQRPNDLNPTFIWHCRLGHINEKRMEKLHRDGLLHSFDFESFETCKSCLLGKMTKAPFTGQSERASEPLGLVHIDVCGPMSSTARGGFRYFITFTDDFSRYGYVYLMRHKSESFGKFKEFQNEVQNHLGKTIKYLRSDRGGEYLSLEFGNHLKECGIVPQVTPLGTPQWNGVSERRNRTLLDMVRSMMSQTDLPLSFWGYALETAAFTLNRVPSKSVDKTPYEIWTGKRPILSFLKIWGCELWKHRFYECPKGYGVHLRVWNLVDPPDGVKAIECKWVFKKKTDVDGNVHIYKARLMAKGFIQIQGVDYDETFSPVAMLNSIRIVLAIAAYFDYEIWQMDVKTAFLNGNLDEDVYMTQPKGFVDPQSTKKICKLQKSIYGLKQASRSWNIRFDEVVKALGFVKHEEEPCVYKKISGSALVFLILYVDDILLIGNDIPMLESVKTSLKNSFSMKDLGEAAYILGIRIYRDRSKRLIGLSQSTYIDKVLKRFNMQDSKKSFLPMSHGINLGKNQCPQTTDERNKMNVSYALSVTSRYQSDPGESHWIAVKNILKYLRRTKDMFLVYGGQEELVVNGYTDASFQTDKDDFRSQSGFVFCLNGGAVSWKSSKQDTVVDSTTEAEYIAASKAAKEAV

SEQ ID NO: 136024 - protein, 61 aa, Oryza sativa
  Clone ID: PAT_MRT4530_37642C.1.pep
MALDLATSLSPPTLFSQSTAGELARSDDLGNCDLYRYDKGSWNYGPHCHGCSALMWRLEST

SEQ ID NO: 136025 - protein, 79 aa, Oryza sativa
  Clone ID: PAT_MRT4530_37643C.1.pep
CLLGAIEHSRRGRVAAREQTGERPTMAFAALASLAMVASCSATGRAAAAVDVMQGITSAKRAVPPSLTLLSCCSVHNAG

SEQ ID NO: 136026 - protein, 95 aa, Oryza sativa
  Clone ID: PAT_MRT4530_37644C.1.pep
MALDLATSLSPPTLFSQSTAGRTRQIRRPRWGSGDASTMTAVDLSTSLPDLVSGDATTTAVVSGNDDHGKYDKGSWNYGPHCHGCSALMWRLEST

SEQ ID NO: 136027 - protein, 69 aa, Oryza sativa
  Clone ID: PAT_MRT4530_37645C.1.pep
MAPRRVYPGLRVPAPTPRAGPIPCCPDSDISASLLPRGDVASPAPQLAGAGWSFPAGDFAADEDVKRKQ

SEQ ID NO: 136028 - protein, 58 aa, Oryza sativa
  Clone ID: PAT_MRT4530_37646C.1.pep
MAVLVVRNHRRWLYVAGVVEEEQQRGERGCLLDEAHWRHWRLLVMNYQNLHIPYSRQG

SEQ ID NO: 136029 - protein, 446 aa, Oryza sativa
  Clone ID: PAT_MRT4530_37647C.1.pep
MGHGLSCSRDTDEYDLFRAAQLGDIHALSALLAADPALARRATVYDRFTALHIAAANGRLQVLSMLLDRDGDVDVLSRKKQTPLMVAAMRGNTECVVRLLRGGANVLTFDSPRARTCLHHAAYYGHAECLQAILGAAAQAQGPVAASWGFARFVNVRDERGATPLHLAARHARASCVRLLLDKGAIVSAPTAVYGFPGSTALHLAARAGSMECIRELLAWGADRLQRDSAGRIAYAVAMRRGHRACAALLNPAAAEPIVWPSPLKFIGELEADAKALLEAALMEANREREKRILHGSDINIKGGDEEEESEDEEEACNICFEQACSMEVKECGHQMCAACTLAICCHSKPNPKTLLLHPPACPFCRTTISRLVVATTNSNKTNSRRRSRSRSSSFKGGLSSAMGSFSRIGRGSGRLVVDGSSVGELADKPDHDFSSVAAAAAICDT

SEQ ID NO: 136030 - protein, 153 aa, Oryza sativa
  unsure (1)..(153): unsure at all Xaa locations
  Clone ID: PAT_MRT4530_37648C.1.pep
HGDRPPRYHEIDFPKFDGQGKXLHFLDRCEXFFQGQHTPEEEKVWLGSYHLLDGARXWYMRVERDLGTPTWCRFSDMLNLHFGPPLRQAPLGELDAYRRTTTVAAYIDRFLDLLSRDGPLMEDQQLDLFTTGLQEPLSIDVLLQYPHHHRVRH

SEQ ID NO: 136031 - protein, 197 aa, Oryza sativa
  unsure (1)..(197): unsure at all Xaa locations
  Clone ID: PAT_MRT4530_37649C.1.pep
MDSPATPVGLSPPLLSLVLRNEPCYTKXGSLERTAEIDPSKMDGRDRTVHDRLTANGHDDVSGDVTTGGGSGXAQARRRTTARRREQRAPGRRARRGELTGDQRSGGRPTDDDGGEEETAEKIGSMAATVLRRSSATAKGRTRTATRRRPRRRSFRAMATAGTAAAHGWSDGGDGGSRAHGARALRTTRGEGEGGDG

SEQ ID NO: 136032 - protein, 619 aa, Oryza sativa
  Clone ID: PAT_MRT4530_3764C.1.pep
MNIATGAMNTLLPKLGELLVGEYKLQKGVKGEIEELEKELKGMNAALHKVAETPVDQLDQQVKIWASEVRELSYDIEDAIDTFMLKCKGHEPATSFKKVTNLFNKFKTNHQIHGVIKDIMDQVKKVSERRDRYIVDDNAARPTVVDVDSRLEAMYRKATKLIGISKPKNELTKRLLEYDGSSSQQSNIISIVGFGGLGKTTLANSLFQELKAKFDSYCFVSVSLNPDINKILKNILLQLDEKMYSHIDETWETKQLIDKIRDFLNNRRFLCVIDDVWKKSAWDTIKLAVQDAKLGSKIIVTTRNKVIAEHAGGGVYEMKPLSDDDSRQLFCKRIFDSNDDCPADLCGVTEKILKKCGGVPLAIITTACLLASKPRNSEEWDKVNKSISLGLENNLDVDNMRKILSLSYSDLPFHLKTCLLSLSKYTEDELIRKDVLIWGWVAEGFITDETRPAGTSLQEIGESYFNELINRSLIQPMSENTLWDEDGKVHACKVHDMVLELINQLSVEEDFVTTYLSDGQQTGKHTCTAQKKKIRRLSLHNSNKSYASPEAREQLSKLEDCSGMDKNHLNHLDKLLLLRFLRLGHYGATELPESIGKLESLETLDIRGARKPSSFKSHK

SEQ ID NO: 136033 - protein, 157 aa, Oryza sativa
  Clone ID: PAT_MRT4530_37650C.1.pep
MVAAEENPESFFAAAPPLRDADAVAARLGEFIARNSSAAGAGGGGRRIVCVTSGGTTVPLEQRCVRYIDNFSSGHRGAASTEYFLKAGYAVIFLHRRGSCQAYCRFLPDDSFLKFFDVDAESKVQVAECHAPVVKKALEIMQGIEGVSVETPFTTIL

SEQ ID NO: 136034 - protein, 213 aa, Oryza sativa
  Clone ID: PAT_MRT4530_37651C.1.pep
MGIALRFEGVITVAIKEQLRHLCRFPDFARTKARVTKREQIGRARNRCGGRGIGRGRGGEGGEAWRGSAMQEEERMRRSEHNAVRAAERDAGGGERCGAGEELEAAACRVIVEAVIDEVLRFVGGGHQELEDGYRRRWRPDAPRDRSSRWCCCSAAATAWNRNGKTIADEFIWGQATRSFRISILRKSTWHSYGAGLQSKMHQRSLNLSGGFT

SEQ ID NO: 136035 - protein, 84 aa, Oryza sativa
  Clone ID: PAT_MRT4530_37652C.1.pep
KDALMSLSPDRLLYYSRGHTGVGPVLEDVHHEVVLPYDGVVDDSAAICLGVAARVRQAARYKRKGGCGSTLGIRYRQVQGLYYI

SEQ ID NO: 136036 - protein, 691 aa, Oryza sativa
  unsure (1)..(691): unsure at all Xaa locations
  Clone ID: PAT_MRT4530_37653C.1.pep
MRLAGGLLLLLLLLTIPDDGALSASPAAAGGERCRRQCGGLDAVPYPFGFSGSCPIKLACNATTSSYSYTASNFNASRSTFVVALPPSCSRTVSEARRWLSGANYGVSSRTGLFLRGDCHRNSSASNATNCSIPAETMSRMVPTASCGAEGNTTASALTSSSGSGIVGLFAEWKKLEEPSCDNLLTSVYGDTREGVFSLEFSVAEMGWWVNGNCTHGVCAANATCHDVRTPSGAWGHQCRCLEGMDGDGWVGPTSRRSTSAPFMKVIGAVNHGRDNLGALLCFGLFGISLEKWIAFFRFARRRRRRPVRXDRLAAKRLLSEAASSSGVPVYSYHEVARATNSFSHTHRLGTGAYGTVYVGKLPASSPSLVAIKRMRRRHDDGDDDAAVAVLLNEVKLISSLSHPGLVRLLGCCLDRGEQILVYEFVPNGTLAHHLAGGGLPWRARLGVAAETAAAIAYLHAKRPPILHRDVKSSNILLDGDLRPRLADFGLSRAVGRLDQASLSHVSTAPQGTPGYLDPEYHQNFHLSDKSDVYSFGVVLLELITAMKVVDFARPAAEVNLASLALDRIGKGRVDDIVDPALVDRADEWVMRSVRHVSELAFRCLAFQKDVRPAMSEVAAELARIRDAAPASVPGARTGAGSRPPMVIDVGVGFDGVDAAVKKVGSPVSVQDVWVSDQSSPSTNGSMPRFA

SEQ ID NO: 136037 - protein, 113 aa, Oryza sativa
  Clone ID: PAT_MRT4530_37654C.1.pep
CDLFCDFHLFSHLMCDLFCDVIIGLSPVLDLFWDDFVMIPIGLGFSFWVRFVMIWDWLWNVQSGRSLTDEAEEGASALVFRDLGFVCVFLCSVDLVPANGKLIFWDYRSVLML

SEQ ID NO: 136038 - protein, 825 aa, Oryza sativa
  Clone ID: PAT_MRT4530_37655C.1.pep
MSSTHVAVEAPDPGGDGGLGEARLVDADAAAAPAAGDAEGRLGGGGGGSSAPAAAGDADVTMTEAVEEEVEVEVAGDAEAEAAVVAGDAAGDPLYGTESAGMVVDEPVDAAEGGVDGGDGGEEGLEAEARVLQGEAATEPVPAGGDVAIASEVAAEAHDSATPEHAEAESNDLEENHVDRGKDNGVAVAHCDDEMQNNVEGSSEIQEDDGAPTLEQQDDESEMPLPSSVSNFELCARYSLPPLDKGEFRVSDLVWGKVKSHPWWPGEIFDPSDASELALKHQKKGSHLIAYFGDNTFAWCDESQLKPFVSNYSQMEKQSSSDAFVSSVNYALEELSRRILSGMSCSCLPEELSDNGMSYMVENAGLKDGVTCSAVNRSEILSCCSPENLLNYVKSLALFPGQGGDLLELVIACSQLTSFYRSKGCPELASFQTGSAWVENGVDPSSIKDDVVDEVVTNEEPPANDKPKRGRGRPRKQKPQDGLELTEKKSTSNLSTDNAYDHPAERQMDMEFDEFDGLQSKKKRSLDSFEDPETKAAAPSFGSSFKIGECIRRAASQLTGSSSIVKSQNEQVPHKNIAETENGDFDVSSDDAINELSVEKRAKRRRMHRHHSADPKELLSQLCSVAVEPTHGYSFSAMVINYFSDYRNYVVSTTTEANIVEKTTAKKGRKRKVMPSPEKQIQVIERSIIHVDEKMVDEVKPTALVLSFGRSSALPSETDLVKMFGRYGPLKESEIEVHASSNTVKVVFKKRADAERAFSFAGKFSTFGPSLRSYRLVNMPFFLSSQTNNTEAHSEYHGLEIPGPSESKVPLDAAEADQVDKTDEK

SEQ ID NO: 136039 - protein, 58 aa, Oryza sativa
  Clone ID: PAT_MRT4530_37656C.1.pep
HPSNYMKPKKVINTSQTMHAWMDGLRTINCKHQDDFFSHFFFSILLHDSMIHGQTLSR

SEQ ID NO: 136040 - protein, 106 aa, Oryza sativa
  Clone ID: PAT_MRT4530_37657C.1.pep
LFFFFFCFFFFFFFFFFFFFFFFFFWKGGNNQQDSIRLRKGPIYKGGRDFTWIFKKMSGGGPSVTQIYQGHRGGGQFLKRNIAQKPTGFKTPDFLVTFSHPPGGDQ

SEQ ID NO: 136041 - protein, 51 aa, Oryza sativa
  Clone ID: PAT_MRT4530_37658C.1.pep
WTFLERICQLNLSLYGVQYETIIVLTIYVKACFIHCAMYYKISMEVAKIKA

SEQ ID NO: 136042 - protein, 64 aa, Oryza sativa
  Clone ID: PAT_MRT4530_37659C.1.pep
YILFVFVCYFCFSLSSGRLMRGVSNFSTCSLVRETRRYTAPSIWFQDNSTDRSARGSVRIIRLF

SEQ ID NO: 136043 - protein, 178 aa, Oryza sativa
  Clone ID: PAT_MRT4530_3765C.1.pep
GRRAAAVRIKRPPRLFPPCARSPPDSPLPRRVAGHPARSWEGEAEEVAVAEGGMRTQSQRGQWWETVGRHRRPSIGHRRRPPSLFLPPHARGRRSRRVPFSCVGHRRPPPPPTSTTIGRPPTRLAPAVGEAIVSASPVSATASRHRPSIGRRRRRRRRTSVGHRRPPSLSPPCAGGFG

SEQ ID NO: 136044 - protein, 88 aa, Oryza sativa
  Clone ID: PAT_MRT4530_37660C.1.pep
CVVERRGGTHVCARSPRLAGQGRASGARARRTRRMVSGTSVFDVLHREKAAIRFLGSASRDCSLFVRDGSPSSPLVCCAPSSMPATAS

SEQ ID NO: 136045 - protein, 456 aa, Oryza sativa
  unsure (1)..(456): unsure at all Xaa locations
  Clone ID: PAT_MRT4530_37661C.1.pep
TGTRGGWRRSSTRTCRVTIHEYEGGRMKRSAAYEEVKAYLSASSARDVRHLRAEGAKDADKLVLSMVDGEEVSDVHAAAAHRWRRVLRLGXGGRAQENRRYYRLFFLDRHRELVINTYLPSIRRQGRAVMVQNRQRKLFTNISTHNWSDVDGLVRSAWSHVVFEHPKTFDTLAMDPAKKKEIMDDLDMFKNGKDYYARVGKAWKRGYLLHGPPGTGKSAMIAAMANYLDYDIYDIELTSVHSNTDLRKLFIETTSKSIIVIEDIDCSLDLTGARKKKKEAADDDDGGSKDGGAPPKPDMKKDASSKVTLSGLLNFIDGLWSACGGERLIVFTTNHVKKLDPALIRRGRMDKHIEMSYCCFEAFKFLAKTYLDVDSHRLFAAVDELLSEVDMTPADVAENLTPKSLDDNADTCLAALVKELEKAKENKSKGKNAHGEDKDEDEDEEDDDVEVVGKDK

SEQ ID NO: 136046 - protein, 189 aa, Oryza sativa
  Clone ID: PAT_MRT4530_37662C.1.pep
MSYMRGDLLTRTRKLVKGMAKPAPAWLKAMEQAPPPTFPRTDGKIKKIELPEDVYVKRFFKKHPDSLYHDAIKISGFDPPPARVFAWRVLELKKDGVNEDDAMAVADMEYAAEKKAKKKAYKELKEIARIEGKRPPPNPYPSAIKEIQAEEKKYVRERFHNPKILEIVKKMKEDKELFFKDREASRAGQ

SEQ ID NO: 136047 - protein, 45 aa, Oryza sativa
  Clone ID: PAT_MRT4530_37663C.1.pep
KNVTYTSAILSLGYMTVFCVIKTAEMRKNDVLTVSHRFYLKPSYN

SEQ ID NO: 136048 - protein, 133 aa, Oryza sativa
  Clone ID: PAT_MRT4530_37664C.1.pep
MSYMRGDLLTRTRKLVKGMAKPAPAWLKAMEQAPPPTFPRTDGKIKKIELPEDVYVKRFFKKHPDSLYHDAIKISGFDPPPARVFAWRVLELKKDGVNEDDAMAVADMEYAAEKKAKKKAYKELKEIARIEGK

SEQ ID NO: 136049 - protein, 717 aa, Oryza sativa
  Clone ID: PAT_MRT4530_37665C.1.pep
MERYFKPIKKTSGTKGDVAEDENPKAEVAKKPRVGIVLNLDDVVADPGLRRPIEEYDVGIRDQKPGVGKSGSDVFSKSGFQNWKKASESFAGHVGGVNSIHNNARRRCEDFKTSRRIATPERPCMNAILDVARLHLKLGIAFCGPEAILGNKGNFLEMLDWLRSFSESVDHAFKEHAVVFNEMTSPEMQAIFVKSCVEMTTQVIVDEIGDGYFSVLIDTPHDTLMVDRMSVIVRFVNRQGQVIERLIGVEYTTGDTGPLMKLALDGLFARLGLSISKLRGQGYNVASNMREEFDELKSIILKENPHAYYIHCFANRFQLAVVSIARSNKVVGDFLYYVDKIVRAVGDSCRTKDAMLQELYGKIREKIVRGDALPKIGMHPENDLSGPAHTRWGSYSTTLLNLLTMWDVVLDTLVTMCDKGIYPEPGSIPSDMIEQMESFEFVFVLHLMIRVLIWTDDLSCLLERKGKYIVNPLELITSVKNILQDLKENQWVDLLEEVKRFCILKSIPVPSMDDSIPVRGRSRHRGLVVTCHQQYYVETFIALIDLVTSDMNNRFSKTFMDLLRCFACFDPDDSFSQFDVDMLLSLADIYSADFSMTDREILREQLHMFIIHVRNTADFSSCNDLATLALKMVQTEMHVAFPLVYRLIELLLVLPVATPTTKRAFSARNIFEEDFCDNRSGDWLSDTMLCCVETEILAGIKNENILQHFERTRSKRN

SEQ ID NO: 136050 - protein, 57 aa, Oryza sativa
  Clone ID: PAT_MRT4530_37666C.1.pep
RTFEKKKKILKKKKKKKKKKKKKKKKKKKKKKKKKKKKKMPPPLKKSNLTTPTKHSF

SEQ ID NO: 136051 - protein, 36 aa, Oryza sativa
  Clone ID: PAT_MRT4530_37667C.1.pep
VLVPLLSRIGPHCVSPASPWMNFSLIYVRCAFKLSA

SEQ ID NO: 136052 - protein, 163 aa, Oryza sativa
  Clone ID: PAT_MRT4530_37668C.1.pep
MELEVGEETEEVGVEVACECCGLTEECTAPYIAGVRARYEGRWICGLCGDAVGEELGRASPPISPAEALDRHAFVCGAGRRSTAPPSPAESADDLISALRHLLRRRLGSPPLPPPRKVRSTPSSPRRDVPTSATAIVSVDTGGGGGAGGALARTESCFAALVE

SEQ ID NO: 136053 - protein, 159 aa, Oryza sativa
  unsure (1)..(159): unsure at all Xaa locations
  Clone ID: PAT_MRT4530_37669C.1.pep
MKLRLFMVSPSILNLCLFVPLEQSVFGMDSDEFSVKVHHGXFFVGHGNLRSYVDGKVSWFDHIKIDTWSPLWLDQLVEDLGYLRTPSLKYYWLLSSKGISDGLRVITCNTDTNVMASVVEKCMNLVVYFNHEGKVGGINWDDIMNNLVRRSPSCVACLA

SEQ ID NO: 136054 - protein, 79 aa, Oryza sativa
  Clone ID: PAT_MRT4530_3766C.1.pep
GRGRGAWARAAAGSAASRRARRGRSGTRAAAARAACRPPPPSPPPSSPRRRRPPPPPSSAIPPRRRRRPPRSRRGRAAP

SEQ ID NO: 136055 - protein, 119 aa, Oryza sativa
  Clone ID: PAT_MRT4530_37670C.1.pep
MPPLSVSQPYSQRRWSEWLRSNVGGEVEGKRWWRGGRSKAAGGSGVGRGNFLEIGPLDVDLKPRNTSWLKKADLIFVDHPVGVGYSYADDPSALATTDLQAARDAAELTSRLYPTRYPP

SEQ ID NO: 136056 - protein, 236 aa, Oryza sativa
  Clone ID: PAT_MRT4530_37671C.1.pep
SHHQLPRVNSQSPSSYQTSSYSLQSKETVLLEEDRVPREWTAQVEPGVQITFVSIPGGAGNDLKRIRFSREMFNKWEAQRWWGENYDRVVELYNVQTFSRQQGFSTPTSSVDEAMRDSFYSRVGSTRESPAMMMPPPPPLPSSGAGREHPISPPYDPSRGTTSSRDEASVSISNASDLEATEWVEQDEPGVSITIREFGDGTRELRRVRFSRERFGEERAKVWWEQNRDRIHAQYL

SEQ ID NO: 136057 - protein, 421 aa, Oryza sativa
  Clone ID: PAT_MRT4530_37672C.1.pep
MASPPAPANREELTRAALAFLRKVRSRFWLKPCVYKGLETILTEYGKYANASTSLVVDGAAVLLGDHPDLIAEFNTFVRPEYKIELPADHLPAAATAKPQGKGDVSPLEAKRFLERVKAEDEKLYDRVVVKLSDLHKKRWMDAHQVYAQLEKVFGPARRDLLRCSAEFLPKGPPPEFAEDPGAGPGPSSWKRKRAAAAAANTFAADAVKPIRTVKPRAADLLQISQPAHDVDKDKGVKPSRPKRPRNAGIQIGQAAVAAAAAAADDDDDGEAGGDPCWLVTERNPHAAAVTFRKILEFHARYSNLVATIKRAEELARTRHPRGALEDLFPGRECHEILGELYGGGWRTMRAAVVEDGDGHVDVTLAAILLRLRAEEDVAVQLARSRRDRTRYGARQGERSPAGDRAANRSTRGVRAKWREA

SEQ ID NO: 136058 - protein, 161 aa, Oryza sativa
  Clone ID: PAT_MRT4530_37673C.1.pep
GKQKIAFGVIKKGNIATVPLFQSKGVTANGDANPPAFALMVKKGCSPKRAFKKGLVLAKETTPSPQQGKTPPPCFLFVKTTPCPGNNCFPQFSVLAKKNLFFETKIQKNPRFCLFNLIPIKKKRGGFPFPKKKKKKKKKKKKKKKKKKKKKKERRERGGRR

SEQ ID NO: 136059 - protein, 145 aa, Oryza sativa
  Clone ID: PAT_MRT4530_37674C.1.pep
FALQTPNPFTCTVGAKQRALNRQRCTALSAQVAVAHPEIRSVLHFTLQSCSFDLATHWRRKQAPWWNRSWVSPKKKKKAPGSRSWTSASASSSSPPAGVVCQEAAPLLAAAGWCSLTAWRRTTSLEAGRNLSQQWKQISIRSVAI

SEQ ID NO: 136060 - protein, 257 aa, Oryza sativa
  Clone ID: PAT_MRT4530_37675C.1.pep
MWPSWVRTRSSKSKPAAAAADTTSTALVAASKRLTFSSPSLKDLQSLLVPPHAALSSSSPSPPRVFHRIRVAACALRVLRNLQSAGQQQQPHAAAAIWSEPGGGEGARVVLYYTSLRVVRGTYEDCRAVRAILRGLRAAVDERDLSMDPAFLPELAALLPHRRHVALPQVFVNGRHLGGAEEVRRLHESGELRRIVAAANPTPASCGRCAGERYVLCGSCDGSHKRYSHKVGGGFRACAMCNENGLVRCPDCCLPPA

SEQ ID NO: 136061 - protein, 56 aa, Oryza sativa
  unsure (1)..(56): unsure at all Xaa locations
  Clone ID: PAT_MRT4530_37676C.1.pep
MKELKLKEIKNGRFAMLAFMGFSVKGFLTGVGSVKNLFDHLADPVXKNIISSFKFH

SEQ ID NO: 136062 - protein, 1067 aa, Oryza sativa
  Clone ID: PAT_MRT4530_37677C.1.pep
MAAEGGRCQKSYFDVLGICCPSEVPLVEKLLQPLEGVQKVTVIVPSRTVIVVHDVDAISQSQIVKALNQARLEASVRAYGNGSEKITNKWPSPYVLLCGLLLVVSLFEHFWHPLKWFALVAAAAGLPPIVLRSIAAIRRLTLDVNILMLIAVAGAIALKDYSEAGFIVFLFTTAEWLETRASHKATAGMSALMSMAPQKAILAETGEVVAARDVKVNTVIAVKAGEVIPIDGVVVDGRSEVDESTLTGESFPVSKQPDSQVWAGTLNIDGYIAVRTTAMADNSAVAKMARLVEEAQNSRSSTQRLIDTCAKYYTPAVVVMAGSVAAIPAIAKAHNLKHWFQLALVLLVSACPCALVLSTPIATFCALLRAARTGLLIKGGDVLESLASIKVAAFDKTGTITRGEFSVEEFQPVGERVSLQQLLYWVSSVESRSSHPMASVLVDYAQSKSVEPKSENVSEFQIYPGEGIYGEIDGAGIYIGNKRILSRASCETVPDMKDMKGVTIGYVACNNELIGVFTLSDACRTGSAEAIKELRSLGIKSVMLTGDSSAAATYAQNQLGNILAEVHAELLPEDKVRIVGELKEKDGPTLMVGDGMNDAPALAKADVGVSMGVSGSAVAMETSHVALMSNDIRRIPKAVRLARRTHRTIIVNIIFSVITKLAIVGLAFAGHPLIWAAVLADVGTCLLVIMYSMLLLREKDSRKAKKCAASHHGSPKKCCSSSHHGSHAKKNHGVSHHCSDGPCKSMVSCKESSVAKNACHDHHHEHNHHEEPAHKHSSNQHGCHDHSHGHSNCKEPSNQLITNKHACHDGHNHCADTSNLHDTKKHDCHGHEHSTCKEELNALPPTNDHACHGHEHSHCEEPVALHSTGEHACHEHEHEHIHCDEPIGSHCADKHACHDHEQVHEHHCCDEQQTPHTADLHPCHDHDHDNLEVEEVKDCHAEPPHHHNHCCHEPHDQVKNDTHPVQEHSISIEESSDHHEHHHNEEHKAEDCGHHPKPKDCAPPPTDCISRNCCSNTSKGKDICSSLHRDHHTSQASRCCRSYVKCSRPSRSCCSHSIVKLPEIVVE

SEQ ID NO: 136063 - protein, 617 aa, Oryza sativa
  Clone ID: PAT_MRT4530_37678C.1.pep
MLAGCSFSSSRHQMSTAQRFDILPCGFSKRGSRGDGAAPRVAGDARSGATTCSFRTHPAPPVTQSVSWGAKPEPGGNGNGAHRAVKRAHDEDAVEEYGPIVRAKRTRMGGDGDEVWFHQSIAGTMQATAAGEGEEAEEEKVFLVPSAAAFPHGMAAAGPSLAAAKKEEYSKSPSDSSSSSGTDGGSSAMMPPPQPPEFDARNGVPAPGQAEREALELVRALTACADSLSAGNHEAANYYLARLGEMASPAGPTPMHRVAAYFTEALALRVVRMWPHMFDIGPPRELTDDAFGGGDDDAMALRILNAITPIPRFLHFTLNERLLREFEGHERVHVIDFDIKQGLQWPGLLQSLAARAVPPAHVRITGVGESRQELQETGARLARVAAALGLAFEFHAVVDRLEDVRLWMLHVKRGECVAVNCVLAMHRLLRDDAALTDFLGLARSTGATILLLGEHEGGGLNSGRWEARFARALRYYAAAFDAVDAAGLPEASPARAKAEEMFAREIRNAVAFEGPERFERHESFAGWRRRMEDGGGFKNAGIGEREAMQGRMIARMFGPDKYTVQAHGGGGSGGGEALTLRWLDQPLYTVTAWTPAGDGAGGSTVSASTTASHSQQS

SEQ ID NO: 136064 - protein, 152 aa, Oryza sativa
  unsure (1)..(152): unsure at all Xaa locations
  Clone ID: PAT_MRT4530_37679C.1.pep
RAQTXAXXXKPXXPGTXNXVXRXGHLGSXKXDXXKLXXPAXXXXGXXVXXHGQXXSGCXXQPVXXEXXXXXGGRRXRXGXAXXXCGRXXPRXAXXXRSXAXXCPXXVAXXSGXXGSLXALXGXXGXXXXAAXXXXHPDXXAGXXARAXXCCL

SEQ ID NO: 136065 - protein, 767 aa, Oryza sativa
  Clone ID: PAT_MRT4530_3767C.1.pep
MNIATGAMNTLLPKLGELLVGEYKLQKGVKGEIEELEKELKGMNAALHKVAETPVDQLDQQVKIWASEVRELSYDIEHAIDTFMLKCKGHEPATSFKKVTNLFNKFKTNHQIHGVIKDIMDQVKKVSERRDRCIVDDIAARPTVVDVDSRLEAMYRKATKLIGISKPKNELTKQLLEYDGSSSQQSNIISIVGFGGLGKTTLANSLFQELKAKFDSYCFVSVSLNPDINKILKNILLQLDEKMYSHIDETWETKQLIDKIRDFLNNRRFLCVIDDVWKKSAWDTIKLAVQDAKLGSKIIVTTRNKVVAEHAGGGVYEMKPLSDDDSRQLFCKRIFDSNDDCPADLCGVTEKILKKCGGVPLAIITTACLLASKPRNSEEWDKVNKSISLGLENNLDVDNMRKILSLSYNDLPFHLKTCLLSLSKYPEDELIRKDVLIWGWLAEGFITDETRLAGTSLQEIGESYFSELINRSLIQPMDTYFQYEDGKVHECRVHDMVLELINQLSAEEDFVTTYLSDGQQAGKCTCTTQKKKKIHRLSLHNSNKSYASPEAREQLSKVRSLTIFGKVDSIPPLSSFHVLRVLQIEDCSGMGKNHFSDLGKLRLLRFMRLGKLLRLFAGEVKLAQGLMLGDMKSLQELVIEATRKSDHLDRLAELPSLRFLRLQLAFVSEQLQEKLTIHRGACAFRSLKDFHFYSCMMPSFQPGAMPHLERLCLRIGTRLRRGDLNDLGLENLHSLRHVTIDYMGENTAVIEEALKDYPNQAALELLL

SEQ ID NO: 136066 - protein, 124 aa, Oryza sativa
  Clone ID: PAT_MRT4530_37680C.1.pep
MPDNGGAGANADADARAPLVFFADCRRRLDPPVDAAYFGNCVAKAAAARDRPGPADPRRGVLHARAPRDPEGRRRSWRLLRQPRFVAASASPRFRAYDAADFGLGRAKSQPGTSSGNNEALPKP

SEQ ID NO: 136067 - protein, 348 aa, Oryza sativa
  Clone ID: PAT_MRT4530_37681C.1.pep
MAIAADAEPADVVTMLNGQILDGRPLRVKFADKDQRGSSAHHATVKRLHLRAELFLHSLLLSSRIGMFFSTFLLLFWTIYSWTVRLNRDEIGNLRINNSWDSQRYDTLDQLLRSVLLSYLCMIHPCRLRKLLKSVASRHGLISGWKFSGKHCFNGRSLHHISEDSLNPYEQAISIIGKTLSTFDEDNRIPCFGFGDTSTHDQNVFSFYSGRRQYCNGVSEVLRGYREIAPRVRLSAPIIETAMRITQDSGYQYHILLIIADGQVPRCCGANSANNRDENYLEERTLQALVQAREMPETEKEEQFALEALKKIPSQYAAIISKRISDLAADAPSRMPLPPPPPRPVIST

SEQ ID NO: 136068 - protein, 316 aa, Oryza sativa
  Clone ID: PAT_MRT4530_37682C.1.pep
MDPATTELRFDTPLLRIYNDGRVERLFGTETTPAGFDGATGVTSKDVVIDDATGVSARLYIPDLPASGPGHHRKKLPIVVYFHGGGMVLDSAASPTYHRYLNSLVSKAGALAVSVNYRLAPEHPLPAAYDDAWAALSWTASAADPWLSEHGDVGRVFLAGDSGGANVVHNVAIMAGQLEGGVAITGILLLDPYFWGKNPVGAETTDPARRRQYEATWSFICDGKSGCDDPWINPMADGAPSLAVLGCRRALICIGGKDAMRDRGRLYCEKLRECGWRGEVEIWEADGQGHGFHLLWPTCTQAEAQLRVIAEFLSHG

SEQ ID NO: 136069 - protein, 1055 aa, Oryza sativa
  Clone ID: PAT_MRT4530_37683C.1.pep
MGEAGQDAPPPPEKGVEVEVFPAWARGVEECEARLGVSASRGLSSREAAARLRAHGPNELAEHPGPTLLQLVAQQFDDTLVRILLAAAAVSFALALSSSAGAVTLSAFVEPLVIFLILVVNAAVGVWQETNAEKALEALREIQSDHAAVLRDGDWLPSLPARDLVPGDIVQLRVGDKVPADMRVLRLVTSTLRVEQGSLTGETASVNKTAHQVPHDDADIQAKECMVFAGTTVVNGSAICLVVHTGMATEIGKIHAQIHEAAQEDDDTPLKKKLNEFGEALTKIIGLICALVWLINVKYFLTFELDGWMPRNIRFSFEKCTYYFEIAVALAVAAIPEGLPAVITTCLALGTRKMAAKNALVRKLPSVETLGCTTVICSDKTGTLTTNQMSVAKLVAIGDAEGKVRSFKVDGTTYDPRDGRIHDWPAGRMDANLQTIAKISAVCNDASVAHSSHQYTATGMPTEAALKVLVEKMGIPEGMNGLSLDPSETLGCCQWWSNVAKRIATLEFDRTRKSMGVIVKSKSGRNALLVKGAVENLLERSSHIQLQDGSVVPLDEKSRKAILENLHEMSIKALRCLGFAYKEDLAEFASYDGENHPAHKLLLDPVNYAAIETNLIFTGLAGLRDPPREEVFDAIEDCRAAGIRVMVITGDNKETAEAICREIGVFSHDEDITLKSLTGKEFMALEDKKTLLRRKGGLLFSRAEPRHKQEIVRLLKEDGEVVAMTGDGVNDAPALKLADIGVAMGITGTEVAKEASDMVLADDNFSTIVAAVGEGRSIYNNMKAFIRYMISSNIGEVASIFLTSALGIPEGLIPVQLLWVNLVTDGPPATALGFNPPDKDIMKKPPRKSDDSLITPWILFRYLVIGLYVGIATVGIFVIWYTHGSFMGIDLTGDGHTLVSYSQLSNWGQCSTWNNFTVTPFTAGARTFTFDDNPCEYFHGGKVKATTLSLSVLVAIEMFNSLNALSEDTSLLRMPPWVNPWLLLAMSVSFGLHFLILYVPFLAQVFGIVPLSLNEWLLVLLVALPVVLIDEVLKFVGRCTSSSGPKRRTRKQKGE

SEQ ID NO: 136070 - protein, 288 aa, Oryza sativa
  unsure (1)..(288): unsure at all Xaa locations
  Clone ID: PAT_MRT4530_37684C.1.pep
MVDPCLARAVLATPAHAFVPSCPGVWQTLCHVSSFTVRLHWLFGVIYLXTTARIASLSSSPARPRLPWSTTPXPCVHDHSTAPHARPTARLPQHQLPDFGYIDHGYSTHGFIDHGSLAPFALATSTTTQRAIIVLSTLEATGEHYSFLVTILRRRKKQLTMTSVATGSSSKSATIIDASTSCQSLGGISPPSITPGTGPHLPEPHRMDSNTFPLQVIAIYSTIPLDTYVLASYSSRGFPVRLCGRIVMKDVGPDLLIGIDKQSIWAESRHNSIRLLNEHATEPRNRST

SEQ ID NO: 136071 - protein, 163 aa, Oryza sativa
  unsure (1)..(163): unsure at all Xaa locations
  Clone ID: PAT_MRT4530_37685C.1.pep
MAGYPLETVLRFLSCGSEKDMELRIENAPSQNLYVVIFLALCLFLLLHQSLGNTPCVSEQLLGRDKILGSSLSFSKLHRLDEPSFYSYPLDSREPRTPPPLPQFFXGMKTDRIRSETTFIIFVFIFFLRIEIGIENPDTKTESNIIKYRYGANTNRNKYGNKY

SEQ ID NO: 136072 - protein, 51 aa, Oryza sativa
  Clone ID: PAT_MRT4530_37687C.1.pep
DFFGNGGSFLQFKRTAQTYQGFNQQLFNQIFLTQLKRNTYTPIIYLEAAYL

SEQ ID NO: 136073 - protein, 78 aa, Oryza sativa
  Clone ID: PAT_MRT4530_37688C.1.pep
KQQNVLGCTLTNLRYPGKVECGGSVSLSKWVRLWLDGICGQRSYDVFGLGKMGLVRRDDDRVGVVYTKKMKKKMMFLQ

SEQ ID NO: 136074 - protein, 29 aa, Oryza sativa
  Clone ID: PAT_MRT4530_37689C.1.pep
LYSIKRQHFGIGLVYTPVTKNQKFPHLLN

SEQ ID NO: 136075 - protein, 930 aa, Oryza sativa
  Clone ID: PAT_MRT4530_3768C.1.pep
MNIATGAMNTLLPKLGELLVGEYKLQKGVKGEIEELEKELKGMTAALHKVAETPVDQLDQQVKIWASEVRELSYDIEDAIDTFMLKCKGHEPATSFKKVTNLFNKFKTNHQIHGVMKDIMDQVKKVSERRDRYIVDDNAARPTVVDVDSRLEAMYRKATELIGISKPKNELTKQLLEYDGSSSQQSNIISIVGFGGLGKTTLANSLFQELKAKFDSYCFVSVSLNPDINKILKNILLQLDEKMYSHIDETWETKQLIDKIRDFLNNRRFLCVIDDVWKKSAWDTIKLAVQDAKLGSKIIVTTRNKVVAEHAGSGVYEMKPLSDDDSRQLFCKRIFDSNDDCPADLCGVTEKILKKCGGVPLAIITTACLLASKPRNSEEWDKVNKSISLGLENNLDVDKMRKILSLSYNDLPFHLKTCLLSLSKYPEDELIRKDVLIWGWLAEGFITDETRPVGTSLQEIGESYFNELINRSLIQPMSEDNFWDEDGKVHVFWDEDGKVHACKVHDMVLELINQLSVEEDFVTTYLSDGQQTGKHTCTAQKKKIRRLSLHNSNKSYASPEAREQLSKVRSITIFGKVDSIPPLSSFHVLRVLQLEDCSGMDKNHLNHLDKLRLLRFLRLGHYSATELPESIGKLESLETLDIRGARKPSSFKSHKVLFPMSFAKLRKLLRLYAGRVKLAQGLMLGNMKSLQELVIEATRKVIKEIGNLTELRTLRIVFGSEKTFELKESIQTSIQRLTNLQDLDLRNNISFEEIIDMQQVPSGLQRLFMPDSFMKAFPCWINSSMLSHLTTLSICLDFEYLQSDHLDRLAELPSLRFLRLQLAFVSEQLQEKLTIHRGACAFRSLKDFQFYSSMMPSFQPGAMPHLERLYLCIWTRLRRGGLNDLGLENLYSLRHATIYSFDDDSKAVIEEALKDYPNQAALKIQSMMMN

SEQ ID NO: 136076 - protein, 765 aa, Oryza sativa
  Clone ID: PAT_MRT4530_37690C.1.pep
MSSSFRSRRTLPIEEDGEDAPRADLLPGHQRSDRRSASSTNLDQHVVLGSHSPGHVVVDLRPTAANVDGGGKLELDPVGRMPVHFVLAFHDLTYNVGRPRRMAFWRRSRHVETDATTARGGGARAREGALLLDGVSGEAREGEIMAVLGASGAGKTTLIDALADRIQRDSLRGAVTLNGEPLGGRMLKVISAYVMQDDLLYPMLTVAETLMYSAEFRLPRSLSASKKATRVQELIDQLGLRAAANTIIGDEGRRGVSGGERRRVSIGIDIIHDPIILFLDEPTSGLDSTSAFMVVKVLQGIAKSGSVVIMSIHQPSYRIIGLIDRLMFLSRGRTVYYGPPASLPLFFSEFGHPIPDGQNPVEFALDHVRQLEAIPEGTDELVEFSKAWREKALARAVSSAACTGRHDKPSLPLKEAIRMSIARGKLVSGATTSTGDNGTAAAAASTAKVATYANPWWAEVWVLARRAFTNTRRTPELFLIRLATVVVTAFILATVFWRLDNTPKGVNERFGFFAIAVSTMFYTSADALPVFLVERYIYLRETAHNAYRRSSYTVSNAIVAFPPLVALSLAFTAITFFAVGLAGGAGGFLFFALIVLASFWAGSGFVTFLSGVVPHVIIGYTVVVAGLAYFLLLSGFFITRDRIPSYWIWLHYLSLIKYPYEAVMQNEFGAEAGRCFMRGVQMFDGTPMARLPVETKVRVLEAMSRSMGLELNSGSCITTGPDILARQAVTELGKWSCLWVTVAWGFLFRALFYLTLVLGSRNRRR

SEQ ID NO: 136077 - protein, 97 aa, Oryza sativa
  Clone ID: PAT_MRT4530_37691C.1.pep
MGRGCYMWANPSVAVYAAPYPTPLGRRYKTLPRGVQTTEKRAPTTEPAAGGANREGGSSATASARGGAAAAPSVLREHFGLETFRQTKMDFQRPEQA

SEQ ID NO: 136078 - protein, 63 aa, Oryza sativa
  Clone ID: PAT_MRT4530_37692C.1.pep
MASVRRANAGERDEMSAARHVHPRLFVSLRETEAEGPDQRVYNYYSVRISGSLCKVRCERGGG

SEQ ID NO: 136079 - protein, 107 aa, Oryza sativa
  unsure (1)..(107): unsure at all Xaa locations
  Clone ID: PAT_MRT4530_37693C.1.pep
MAGRRAEVAEPPPPPPXPLPMAADPALPRAAPPDPPPADAIAAPARGRHPPPAPPVSSSSSPTRQRRRRGRRRRHHHHRGGAAARGGQPERRGRRERKRKRGGGEKE

SEQ ID NO: 136080 - protein, 67 aa, Oryza sativa
  Clone ID: PAT_MRT4530_37694C.1.pep
ALSQEHYRLRSTTLLKRGNKSKTEYNHCTQQATPTMQICKGIQGWFVAICIKAVVKHFIEQNSKTVE

SEQ ID NO: 136081 - protein, 122 aa, Oryza sativa
  Clone ID: PAT_MRT4530_37695C.1.pep
MAVAALGFVTLLAFCFLAPAALMLGYYHDSPELVVVGSGCSRLVETNSFIVQDIKARTDGGSPENGLVLYGMPFLRALVCAELIDRCIGSKIWVIMKGDKELVGTLCGFDVYVNMVLEDVTE

SEQ ID NO: 136082 - protein, 133 aa, Oryza sativa
  Clone ID: PAT_MRT4530_37696C.1.pep
MPAVPPVMWVDVSQSFSVDKIYRQMLEGAIGRPSYKYQNLDALENKLKAELRDKRFLLALDGLQSDVAQQERDQLRSTTLLKRGNNSKAEYNHRTQQATPTMQTCKGIQGWFVSICIKAVVKHFIEQNSKTVE

SEQ ID NO: 136083 - protein, 508 aa, Oryza sativa
  unsure (1)..(508): unsure at all Xaa locations
  Clone ID: PAT_MRT4530_37697C.1.pep
LVQDITGYLCLSLALLLLTLVLHKVARKATGNGAGKPRLPPGPWRLPVIGNLHQVAMGGPLVHRTMADLARRHDAPLMSLRLGELRVVVASSADAAREITKTHDVAFATRPWSSTIRVLMSDGVGLVFAPYGALWRQLRKIAVVELLSARRVQSFRRIREDEVGRLVAAVAAAPAAQPVNVSERIAALISDSAVRTIIGDRFERRDEFLEGLAEAIKITSGFSLGDLFPSSRLASFVGGTTRRAEXEPRKNFELIECALRQHEERRAAGAVDDDEDLVDVLLRVQKDGSLQMPLTMGNIKAVVRDLFGAGSETSANTLQWTMSELVRNPRVMQKAQTELRDCLRGKQSVSEDDLIGLKYLKLVIKETLRLHPVVPLLLPRECQETCNIMGYDVPKGTNVLVNVWAICRDPRHWENAETFIPERFEDSTVDFKGTDFEFIPFGAGRRMCPGLAFAQVSMELALASLLYHFDWELPSGVAPSNLDMEEEMGITIRRKNDLYLVPKVRVPL

SEQ ID NO: 136084 - protein, 42 aa, Oryza sativa
  Clone ID: PAT_MRT4530_37698C.1.pep
LHLQLRSTTLLKRGKNSKAEYNHRTQQATPTVQTCKGIQGGV

SEQ ID NO: 136085 - protein, 414 aa, Oryza sativa
  unsure (1)..(414): unsure at all Xaa locations
  Clone ID: PAT_MRT4530_37699C.1.pep
GHDDLVANYFSANPIYTDEMFRRRFRMRRPLFLLIVHELSEWSPYFTQQVDATGRNSLSPLQKCTAAIRMLGYGTAADXLDEVLRIAPSTCLECLGKFAEGVIEKFGDEYLRPPRADELEKILQENEARDFPGMYGSIDCIYWPWKNCSKGWAGMFTSGNKGVPTMILEAVATKDLRIWHAFFGTAGSQNDINVLNKSPLFIQAIKGEAPTVHYNVNGTQYDMGYYLADRIYPEWAVFVKTVTAPQLAEDKLFALKQEGARKDVECAFGVLQSRFDIIRRPARLWKQGDVINIMQACVILHNMIVEDEKEAIRDVLDLNYNPSATIVLPPEVQRSDNPDVTPRNLAQISRLFCVLNPCPGPARKRHLVLTPKQKQQQRKKAILAGLQLHSTGKTQLGSEPWSSNSIFSSEALHF

SEQ ID NO: 136086 - protein, 125 aa, Oryza sativa
  Clone ID: PAT_MRT4530_3769C.1.pep
MLLANHSNVQEKIILGMEGRSSNEISSAEAVLVGALSSGVNAPTWFVLKITFLLLAFCFTAMLSLAFFSSDFMIIAHVLLLVTIGTVLFVLLNRFLAETGLVPVEQQMKEMGIHKIEATEKDKGN

SEQ ID NO: 136087 - protein, 112 aa, Oryza sativa
  unsure (1)..(112): unsure at all Xaa locations
  Clone ID: PAT_MRT4530_376C.1.pep
MXLAILARRRAAEALLXRPLGAAGXSALRASYXAVAGEESNVVVVAAXREGYXAAIKAAHXGSQDHLHREEGHLGGTXLNVVXIPXKSLXHSSHXYHKAKSSFTHHXVKFSN

SEQ ID NO: 136088 - protein, 106 aa, Oryza sativa
  Clone ID: PAT_MRT4530_37700C.1.pep
FVVLNFWGFFFFFFYFFYFLIIFLFFFTGKESCTPLIWTRENHPVGKIEQHKLNSPLHPTGCHWPRPDTLDINSRTSHAAKKMVLFTLCDYTEEKGGLLTPPQALF

SEQ ID NO: 136089 - protein, 146 aa, Oryza sativa
  Clone ID: PAT_MRT4530_37701C.1.pep
LRLQLRSTTLLKRGNNSKAEYNHRTQQATPMMQTCKGIQGRFVAICIKAVVKHFIEQNEVYNCIHKTAPRHVSVRRHVTMTYRKEAVTGPFAYPPLTDRTRPEGSPPSPAGNGQPSSRAAVNPEADQPDTPADPTPSRPPSPGYVG

SEQ ID NO: 136090 - protein, 108 aa, Oryza sativa
  Clone ID: PAT_MRT4530_37702C.1.pep
IDGLDLDTPQTSNNTVVSLDYSHSNVLNGNLKGQIYYRDYLTRFFPFDGRASVSLGNSIFQSEIDSTEWGGRLQLDTPLTGEKNLRLLWRADYNNESTAQPVNIFIPG

SEQ ID NO: 136091 - protein, 441 aa, Oryza sativa
  Clone ID: PAT_MRT4530_37703C.1.pep
MHPSGGALSVPPGFRFHPTDEELLYYYLRKKVAYEAIDLDVIREIDLNKLEPWDLKDRCRIGTGPQNEWYFFSHKDKMDGSSMSSSSTQQQAQVPPGFRFHPTDEELVDYYLRKKVAARRIDLNVIKDVDLYKIEPWDLQERCRINGGSAAEEQNEWYFFSHKDKKYPTGTRTNRATAAGFWKATGRDKPIYATKQHSLLVGMRKTLVYYRGRAPNGHKSDWIMHEYRLETTETAPPQEEGWVVCRVFKKRLPTTRRDSDHDAPCGSWYVDEDAPGAFMSPMMITRSSILRPHQHHAGITLQEQHLHTTYKHRDLTTKIQQLQVPAAGHHLLNTMPHDLESSTSSFHSLLVSPDHHQINMHHAQADPFFDDMHAVDQATTTDWRVLDKFVASQLSNDATNKPADHYTDEGDILQVSDKQQEVAAADYASTSTSSSQIDPWK

SEQ ID NO: 136092 - protein, 142 aa, Oryza sativa
  Clone ID: PAT_MRT4530_37704C.1.pep
KVGQGTRLPAQNCARPGTPPRGAERNTSTRVPAHTTKCGSARLPKEPPGGTTQAPAPRPGTDAPHGEAAAGGISQGNGGKPGPAAVPPERAPVGPPLPREPATPRQSTPGCPQRPTPSPHSRVNHAGRASVAPIHIDGFPSI

SEQ ID NO: 136093 - protein, 154 aa, Oryza sativa
  Clone ID: PAT_MRT4530_37705C.1.pep
MATQLYRWAPSYSLLADLTVADWFLRLHGYTTSSLSSAVATAAYCITKRQLKSISAETERWCGHQLSNTFAERPGRRHVGDDDPPAPIRMRGGGVRLVKRGDSARGWRREEATQWRTSVDGDGDLFPSDVRALCCLLAESLPAVLDDRFATCKG

SEQ ID NO: 136094 - protein, 371 aa, Oryza sativa
  Clone ID: PAT_MRT4530_37706C.1.pep
MKSKHYITIPAKHCLISFSKTILILPATKQTNKCSLHLSAIRSTSFSSLGFGCRCRFRFRFLSSPPRPSLRRVTRWSAASLSPRASLPSPRRVIAAAAAATVVLAVMNRVLYKLALVPMRNYPFFLAQATTFGYVIVYFSILFIRYHAGIVTKEMLALPKSRFMLIGLLEALGVASGMAAAGRKYRANQIFGCLLVTAGVILAVASGANSGPFLSDVKLFWPAVLMASSACHAGASIIKEFVFIDGAKRLKGKRPDIFVVNSFGSGFQALFVFLLLPFLSNLKGIPLAELPAYINRGAACFLNIGVKFSDCHGAPLLPLLFIAMNMAFNISVLNLVKMSTALVASLTATLAGIVVCGHFLRKRMLKYWKHL

SEQ ID NO: 136095 - protein, 269 aa, Oryza sativa
  unsure (1)..(269): unsure at all Xaa locations
  Clone ID: PAT_MRT4530_37707C.1.pep
MGMSGATNGCGAGEYIRIPEDVEAGLGKEAGKGEGEGECPAVLRWRAIRWWAQVAALGILLAGAAAAAVVFLGPLVIKKVIAPVIEWESRTFSRPVIALICFGAIAFFPSVLLPSSPXAMSIGMSLPFFIGSAFHSKIHRWLEKWPKKAAFVRLAGEGDWFHQFRAVALLRISPFPYLVFNYASVATNVKYGPYIAGSMAGTVHETFLAIYSGKLLQSLAVATTQGSFLSVDQIIYNGLGFSVAAVSTAAITIYAKKALQKLQADDELC

SEQ ID NO: 136096 - protein, 51 aa, Oryza sativa
  Clone ID: PAT_MRT4530_37708C.1.pep
AMPLMPEDVVHPASLISCLAVIRVCVLTMESLSSERAYFDYTISNGISSSD

SEQ ID NO: 136097 - protein, 239 aa, Oryza sativa
  Clone ID: PAT_MRT4530_37709C.1.pep
AAVVFLGPLVIKKVIAPVIEWESRTFSRPVIALICFGAIAFFPSVLLPSSPFMWMAGMSFGYFYGFLIITAAMSIGMSLPFFIGSAFHSKIHRWLEKWPKKAAFVRLAGEGDWFHQFRAVALLKISPFPYLVFNYASVATNVKYGPYIAGSMAGTVHETFLAIYSGKLLQSLAVATTQGSFLSVDQIIYNGLGFSVAAVSTAAITIYAKKALQKLQADDEAVLTLDEPREILLRIRPWS

SEQ ID NO: 136098 - protein, 132 aa, Oryza sativa
  unsure (1)..(132): unsure at all Xaa locations
  Clone ID: PAT_MRT4530_3770C.1.pep
GGDEEGVLPGEKEGADEPPPPPLPPPPLRCXVRRPPRRPPPRGRRRCWRGEAGGSSPPTIRPPTPLQPPPPCRPPPPPGRRRRQGREGSMARDGRHGGEGEQGRPARSKSTLQSPSPSPSRAPPKPMSPSPP

SEQ ID NO: 136099 - protein, 235 aa, Oryza sativa
  unsure (1)..(235): unsure at all Xaa locations
  Clone ID: PAT_MRT4530_37710C.1.pep
VRDVRLITKNIAQLAHNRGHGYSNSFTLARGVPLYPQDTASTLCLPCVAIXGKYPNRGCDNTPCTTQLTTVHHSXIIITPSINITRGMDSPATPTDFLPLHSLAPRNESCYTKGKVDATTGKRELGWAIRGHLREEDDDANSPVQETTTNDDERRPATRFNGGTVRLNNDDGAPAVFGGCEGADEVLLLRAHPKAATDGNGDGASGGAMRPEDRQRRRRLRQRGGGATGDGSTWD

SEQ ID NO: 136100 - protein, 282 aa, Oryza sativa
  Clone ID: PAT_MRT4530_37711C.1.pep
METLIGKYSLRLAKVPLKYLGNARAPLAAVNITFRAYEDISSWNRHRRIYPLGRVGQPTQLRPMSSHTSKTQGKEDKVASSGRDDGAEEEATMREEDGTASDECACPRVRRQAATAGKGRGGRGSGTLLPLPHRPSCHLRRHLLPVFVLLFTEIGLGLTGFGVFFSFLGIIFFFDKGLIAMGNILFLSGLGLTIGLKSTMQFFTKPKNYKGTISFGAGFFLVLIGWPFFGMLLEAYGFVVLFSGFWPTLVVFLQRIPIIGWIFQQPFVTSFLDRYRGKRVPV

SEQ ID NO: 136101 - protein, 216 aa, Oryza sativa
  Clone ID: PAT_MRT4530_37712C.1.pep
PTRPPTRPPTRPGLDSCQDINECDDPKKYPCYGKCINKLGGFDCFCPAGMRGNASVGPCRKDFPLGIGIAIGLGVGFGILLLSLSVVFLIRKQRSDIQRQLRKKYFQKNKGLLLEQLISSDERASDSTKIFSLEELKEATNNFDPTRVLGSGGHGMVYKGILSDQRVVAIKKPNIIREEEISQFINEGVILSQINHRHIVKLFGCCLETEVPLLVY

SEQ ID NO: 136102 - protein, 157 aa, Oryza sativa
  unsure (1)..(157): unsure at all Xaa locations
  Clone ID: PAT_MRT4530_37713C.1.pep
FLELCSVAQLARDDNCTLADNSMSLSKTEFLPVKHLNDVISSTNTNTAHNLTLMSIYSYVFALSSWSICMNCXRASYRSSTGXSRSAIAAAADRNDGLRGPFXIGDPGLDTAPRXTLLHXPPPPPXWRGRRXTXMXPXEKXXXEQXXXAPFXAEXXT

SEQ ID NO: 136103 - protein, 30 aa, Oryza sativa
  Clone ID: PAT_MRT4530_37714C.1.pep
KQIEIWTQIMGGIYSFATGISHIIKTNTNN

SEQ ID NO: 136104 - protein, 898 aa, Oryza sativa
  unsure (1)..(898): unsure at all Xaa locations
  Clone ID: PAT_MRT4530_37715C.1.pep
MGTHCIWLLGVLLLKAAIALVLLIKTTMLMVYYSNILVMGLIIILRALHVAAIRLLGDMSWELVETMLTEGMIDALANTVRDTLGSLGIASPGGKTNTALSAPLTTAPXGANNVKGLPQPGNHVHPGYSFLNHEVQISELPPAGCFPRSMVIPASLTVHLEFIHRMDKVLQKNCTLSVVTKTQQPLQSEEAHLFLYTPRLKVLILFIERARQLLGGSAASALSHLAQRIQRDSGTSDASIRSQIQNESAQLGVAMQHLGAMXANAXVQINKARMGPSPADAFVNAGSSVYINSAGPNPIMVQPSFQNTPPFGVSSIPVLGGISGALGIVQVFXPSNTSDPNLASEDSSTENAPNIGSXNNISMHGLPARTVIAAIPARSTAEAPNHVLSVILPVQVRSQVAMPNQSTVSQGSQTAVGGGSQPQASVGGVASIPSIVAQVTAQVANALSANQQGQVSSSAQNTVDQGSRSVTTNGVDNVDSLVSASTQLQNELSDSNNGRTSLNAQSLVAGAGISPSNTSDPNLASEDSSTENAPNIGSIQQHPEMEGIHADNVRKPSEESTTANLVGQITTTCTDDISVNRSAENSSQKNIPLDGVSAQSIKPSASSRSEPVGLGGGLQPKRRSRTAKPPGSSSDTGEVVNSSRISNSQNAVSMGQQVLQALASQNTNVNRSHVTDSPLPSTTSQFSGGMPPRRQGGEGQVDFGSMISSVLNNPAFGNLLSNVAEQTGMGSAGDLRNMVEECAQSPAIMDTMSNLVQNVDGSGRGQGGIDLSRMMQQMMPVVSQVLGGAGARPAGTNSGQSRLQPRRSDMRVDDASDYGNSQIDLHQAREHIEQHDSPRDIFGAVLETAAQAYGEDESIEDMLEELVSDPELTDDYLKLLLQQVRQRIQSASQSGNQS

SEQ ID NO: 136105 - protein, 185 aa, Oryza sativa
  Clone ID: PAT_MRT4530_37716C.1.pep
MDLGAAVDKMNRLRLAIPSASKNVSRCGKLAICRAQSEDSKGGGGFLTGFLIGGAIFGTLGYVFAPQISKTLDSLLDENGQDSESDEHGLVKPRYGRYYDEGLEKTRQTLGDKISQLNLAIDKAASRLKRVAGNVEKEAINDESEVETSSFNDNELVAENWVAHRFVHGASPSHCMFMSGRRPAV

SEQ ID NO: 136106 - protein, 118 aa, Oryza sativa
  Clone ID: PAT_MRT4530_37717C.1.pep
ARSICPWVARRCGEARCTHPGASSSSLAHNQLMVRCSLQQGFFGGPILGFLPLHSGDSLDRKGNKFWFPSSILVLIWYKFAKFLLQSIRFWCNGLNGWEKKTPLKKKKNKKKKKKKTT

SEQ ID NO: 136107 - protein, 46 aa, Oryza sativa
  Clone ID: PAT_MRT4530_37718C.1.pep
QFDYLFYMDLEASMADPKTQNALGNLKEFATFLRVLGSYPTDVNEA

SEQ ID NO: 136108 - protein, 118 aa, Oryza sativa
  Clone ID: PAT_MRT4530_37719C.1.pep
AQNLDNVANHLKLACSMADCTTLDYGGSCYGIGEKANVSYAFNSYYQQQKQDAKSCDFDGNGMITYLDPSMGECRFLVGIDDSKSSAVSSCGCGCGVCCGVWVLFFWVFMYLRMMGSV

SEQ ID NO: 136109 - protein, 1007 aa, Oryza sativa
  Clone ID: PAT_MRT4530_3771C.1.pep
MPIGEAVLSAFMQALFEKAVAAASSELKFPQNIAVELQNLSSSLSTILAHVEDAEERQLKDQAARSWLSRLKDVAYEMDDLLDEHAAEVLRSKLAGPSNYHHLKVRICFCCIWLKNGLFNRDLVKQIMRIEGKIDRLIKDRHIVDPIMRFNREEIRERPKTSSLIDDSSVYGREEDKEVIVNMLLTTNNSNHVNLSILPIVGMGGVGKTTLTQLVYNDVRVKKHFQLRMWLCVSENFDEAKLTKETIESVASGLSSATTNMNLLQEDLSNKLKGKRFLLVLDDVWNEDPDRWDRYRCALVAGAKGSKIMVTTRNENVGKLVGGLTPYYLKQLSYNDCWHLFRSYAFADGDSSAHPNLEMIGKEIVHKLKGLPLAARALGSLLCAKDNEDDWKNILESEIWELPSDKNNILPALRLSYNHLPPILKRCFAFCSVFHKDYVFEKDILVQIWMAVGYIQPQGRRRMEEIGNNYFDELLSRSFFQKHKDGYVMHDAMHDLAQSVSIDECMRLDNLPNNSTTERNARHLSFSCDNKSQTTFEAFRGFNRARSLLLLNGYKSKTSSIPSDLFLNLRYLHVLDLNRQEITELPESVGKLKMLRYLNLSGTVVRKLPSSIARTELITGIARIGKLTCLQKLEEFVVHKDKGYKVSELKAMNKIGGHICIKNLESVSSAEEADEALLTLGQLPLLKVIIIGGFPTIIKIGDEFSGSSEVKGFPSLKELVFEDTPNLERWTSTQDGEFLPFLRELQVLDCPKVTELPLLPSTLVELKISEAGFSVLPEVHAPRFLPSLTRLQIHKCPNLTSLQQGLLSQQLSALQQLTITNCPELIHPPTEGLRTLTALQSLHIYDCPRLATAEHRGLLPRMIEDLRITSCSNIINPLLDELNELFALKNLVIADCVSLNTFPEKLPATLKKLEIFNCSNLASLPACLQEASCLKTMTILNCVSIKCLPAHGLPLSLEELYIKECPFLAERCQENSGEDWPKISHIAIIEIDDDSAMPDRSIRRRLC

SEQ ID NO: 136110 - protein, 115 aa, Oryza sativa
  Clone ID: PAT_MRT4530_37720C.1.pep
EPVVAKMAPASSVRPSVRVPLHPHQWLVWMWWTLTTIGRYLQGGLRARRSWRTEMTSRRRMPRAVARLPLSRLPSNPTPRRLGVPYISRCQTNTSSPRTSQPFPASRRRCLVRLT

SEQ ID NO: 136111 - protein, 100 aa, Oryza sativa
  Clone ID: PAT_MRT4530_37721C.1.pep
MAPHCLVKLQDNCTLKAGKLFGIAVWKCLCYPPKVEAHGLWYSARPCSVCDYCCFQSQLNTDKSFSSENVYQNTNIMGFYETGTRQIFFIWNLTTNLTYL

SEQ ID NO: 136112 - protein, 161 aa, Oryza sativa
  Clone ID: PAT_MRT4530_37722C.1.pep
MELDRSRALTISDLARHYLQEVQHRPYASERARPGRDNARYSAGPIDRDDARGRTKATPATRKTTLTGPSDIYPRDRSKTAKRAAIIVFLPSPSHPMRRPAGAARWGGHAVARLWPSSWTAARARGGRHGKAYQQMSKLRSSPSSDSGTNRSSKGTARRRE

SEQ ID NO: 136113 - protein, 66 aa, Oryza sativa
  Clone ID: PAT_MRT4530_37723C.1.pep
MQRWCQPCMQQPKLRKEALSGCGGEAGEVVRAPTIHKACSSSRGKIRKAKLGMRSPARRPRGGKAI

SEQ ID NO: 136114 - protein, 41 aa, Oryza sativa
  Clone ID: PAT_MRT4530_37724C.1.pep
MSTTGDNNNTGDKEEEPPVNTNGGNTGGDDSSLLHHSWAGS

SEQ ID NO: 136115 - protein, 293 aa, Oryza sativa
  unsure (1)..(293): unsure at all Xaa locations
  Clone ID: PAT_MRT4530_37725C.1.pep
MAAIKLLKRGKPDLLAGAGLGCIEHDPLSRPAGGVGRGRRGEAGGEEVRQRGGGRQGGGGLRFPPASARLANECLRRSSSLPATGRTMRLRSPPSAAHLRHRAAPPCFSPVGGRTRRAPPVLLRPPLVFALDPDLGATASPVGHRPRRVPLVFPGLRPQLILATELYRRFSPLSATGHTVHVRSPPSRRRASPCRRSDTPRASSSPPHPGDRRPPPPSSSPRXPTPAQQPPPTSPPPPXSPPVPPRPSDLLPTPPAGRFGQRRKIEEDRVLGGDADRSLTRSCQLKFAMLLNS

SEQ ID NO: 136116 - protein, 59 aa, Oryza sativa
  unsure (1)..(59): unsure at all Xaa locations
  Clone ID: PAT_MRT4530_37726C.1.pep
MAVTRTALXVVLVAGAMTMTMRGAEAXXRAARSXSXQLXPWASRARGSRRAPCSARRWA

SEQ ID NO: 136117 - protein, 282 aa, Oryza sativa
  Clone ID: PAT_MRT4530_37727C.1.pep
MPGGCYQHTHNRRIARDAIPLQTKGKKIASDPNPASRIKSSPRAPAERRSEFAGDETPRRRRFPRRARAFVPPRRAEAVRLPAMAAEKPAPVRVLYCGVCGLPAEYCEFGPDFERCKPWLRANAPGVYPDELLASSSSAAADVDKVGERLQGVGISAADGSTSAGDASASKQEEVKRLPGGKVKKKDKQEVVIEKIVRNKRKCVTVVKGLELFGVKLSDASKKLGKKFATGASVVKGPTEKEQIDVQGDISYDIVEFITDTWPDVPESAIFFIEDGRKVPAA

SEQ ID NO: 136118 - protein, 64 aa, Oryza sativa
  Clone ID: PAT_MRT4530_37728C.1.pep
MAFGLTREKPEPSNLIDGEVAELGVAAESAKENDVVEPYDATLRHLDLGKRSYTAEMRCSANQS

SEQ ID NO: 136119 - protein, 58 aa, Oryza sativa
  Clone ID: PAT_MRT4530_37729C.1.pep
PQQLCIIDQEDSDLYVSLHTLLLLQCVVNADGVGSLWTLNGSIVALFLSEEGTRLSHF

SEQ ID NO: 136120 - protein, 40 aa, Oryza sativa
  Clone ID: PAT_MRT4530_3772C.1.pep
METSIAPWCQSYLLAKVLICAKQEWEHTLDNAIVAIEYDR

SEQ ID NO: 136121 - protein, 36 aa, Oryza sativa
  Clone ID: PAT_MRT4530_37730C.1.pep
KILNNIPFTHGLDFFKIYLKTLNFVILSFIVIIIRT

SEQ ID NO: 136122 - protein, 192 aa, Oryza sativa
  Clone ID: PAT_MRT4530_37731C.1.pep
MAEGAATLTRCGAPVAPLRLPPRQAATMISPRPALSSSSFLAFRPAAASPTTNPSPPPSPRLHAAPPPLSASFSPSTSVVAPDHVAAAAAASFYDVLGLHAGASAREIKDAYRRLARAVHPDASPHPAAASSDDFIRVHAAYSTLSDPDKRADYDRRLLLLAAGRRRATPSLGRSPTFPARRRRTWETDQCW

SEQ ID NO: 136123 - protein, 87 aa, Oryza sativa
  Clone ID: PAT_MRT4530_37732C.1.pep
TATQENDGGGRQGFVAVKETASEIERRKRPSEFVEGEIVCRWRVIEGEIKGRRKLSSEILIAVTTAAEVRMMTDGAAAFKGAATALS

SEQ ID NO: 136124 - protein, 113 aa, Oryza sativa
  Clone ID: PAT_MRT4530_37733C.1.pep
KGGIRRQPIRILAYPYSLIQRTVLIGKFFLRIQSSTNPLKILQCKGALNFLCTCLHSCIASCMVLSLSISLSLSISLSVPVLQRAGSLDWALTLPVWKQVGFPCAGQMWTRPV

SEQ ID NO: 136125 - protein, 65 aa, Oryza sativa
  Clone ID: PAT_MRT4530_37734C.1.pep
VNAGSSAMVAAVPHRELGDPNLWQVNVWWSTSGAWRWLRRRFVGRSVTQIHGQSMFGGQRHLPHK

SEQ ID NO: 136126 - protein, 65 aa, Oryza sativa
  Clone ID: PAT_MRT4530_37735C.1.pep
MALSLLAQFLPREVVITHQLPRQCNAEQLAEASLTSTDHGPPLMMIMPGIAGEIGQLQAAAGGGG

SEQ ID NO: 136127 - protein, 81 aa, Oryza sativa
  unsure (1)..(81): unsure at all Xaa locations
  Clone ID: PAT_MRT4530_37736C.1.pep
FYSLYKNITRYHFFYYNFVIILVDRQLALGHLSYGFVRWTERAIYLLLVHRLIGAWTAGALRDGGGTAATCGRPSQRCIXG

SEQ ID NO: 136128 - protein, 51 aa, Oryza sativa
  unsure (1)..(51): unsure at all Xaa locations
  Clone ID: PAT_MRT4530_37737C.1.pep
LASNMDPYVVTSLLAEMSILWEPVLETEVLXAAKKLDIEFLESHATFHLPV

SEQ ID NO: 136129 - protein, 67 aa, Oryza sativa
  Clone ID: PAT_MRT4530_37738C.1.pep
RSASLPCVSHIWIHGFSDQITPEFADVIFPVSFHLTWGIVASIVHLVSVQDVLQWPPLSLDYCYFKA

SEQ ID NO: 136130 - protein, 121 aa, Oryza sativa
  Clone ID: PAT_MRT4530_37739C.1.pep
MGITPPAVGSCRVPSLLPDLVEGSLLLPMGARRCCRHRCLPLAGSSGGESAAAHGSPPALPVGNPRRAQEPAASPPAESVGGKGTAAGQWLAMAAIAILKHRWIYILLSYRDALTKSKLAI

SEQ ID NO: 136131 - protein, 109 aa, Oryza sativa
  Clone ID: PAT_MRT4530_3773C.1.pep
MPIGEAVLSAFMQALFEKAVAAASSELKFPQNIAVELQNLSSSLSTILAHVEDAEERQLKDQAARSWLSRLKDVAYEMDDLLDEHAAEVLRSKLAGPSNYHHLKVRICF

SEQ ID NO: 136132 - protein, 639 aa, Oryza sativa
  Clone ID: PAT_MRT4530_37740C.1.pep
GGALWLLRLLGQAPALCPLGWGQARRDLGIWISEARCPFAVGSRRGGWWVEGSIAAVRWAAADWGQPGGRSGRRRGAADPLPTARPRFAAVEILEEVGGGDGDGRSLRGSLPASEDGLVGVRRADGGVWPAAAAAGAAPAGLPVLVFLLLAAAGLRVVPFLASGDVSFAAPVPPAAVSPSPPPPRIASPPPPRIHIKPHYLPRSSARSHSNSTRASRPAAVVYPPPPPPRIASPPPPRNHIKPHLRASGHLRGRIRIRPAHQVAPATQQPAPPPPPNYFPSSGGSSLTSDAFFISPGYHPVRLFSAGSHGYPYSPADSAIGYSRMLFTPENLAEFTNGFAEQNLLGEGGFGCVYKGILPDNRLVAVKKLKIGNGQGEREFKAEVDTISRVHHRHLVSLVGYCIADGQRMLVYDFVPNNTLYYHLHGHPRIIHRDIKSSNILLDDNFEAQVSDFGLARLAADSNTHVTTRVMGTFGYLAPEYALSGKLTAKSDVYSFGVVLLELITGRKPVDASQPLGDESLVEWARPLLLKAIEHREFGDLPDPRMENRFDENEMYHMIGAAAACIRHSAAMRPRMGQVVRALDSLADSNLNNGLQPGRSEVFLEPQSEEIRLFQLREFGSRDCSDEMSQASWRSRRDL

SEQ ID NO: 136133 - protein, 85 aa, Oryza sativa
  Clone ID: PAT_MRT4530_37741C.1.pep
GLLFFFFFWSQKILNATIKQIKSRTGGFHRTIKKNLPSRDTLQCVDTYMTHGERTKDGGLARRRQAPHTVIPCIMHLNSPKRTRG

SEQ ID NO: 136134 - protein, 111 aa, Oryza sativa
  unsure (1)..(111): unsure at all Xaa locations
  Clone ID: PAT_MRT4530_37742C.1.pep
KSHRGGRNIKRKKRPLFQVLGQKSKKPAFYGTPQAFWQPRERIKKKGPPPGGPRKNTEKPVKKNTQAKPVEHPPQKGQGDPPGEPQGGGXPGGPKPPPPGGEKHGPHPFGP

SEQ ID NO: 136135 - protein, 228 aa, Oryza sativa
  Clone ID: PAT_MRT4530_37743C.1.pep
MANGATSGGCGRREADGLREDLRNKMGEVREEERDHRGRERRPKEATMAELTGARGGRGSGDGRRRSGGGRGASRDGECGGVGSEVQRGGLRRLAAAGERKSGGGGGCTLLERKRAQGSSAKAKRKNSYNLEGEKEDVEDEGSGDLLTRSPVHIDEWDGVDYERRRSIEERGRSGRRLAGRRSAEGGGAAAGGRRRVAGRRPAGPRVVAGGGQLQPRPAADGVPRPAD

SEQ ID NO: 136136 - protein, 110 aa, Oryza sativa
  Clone ID: PAT_MRT4530_37744C.1.pep
ATWKAFASYPIPLQDFCVGERNSTVRVNGLECKNPMNASAHDFPKAAMLYNPRHPNNTDGPNVTMVNVLQLPDLQTLGMWIARLDFAPLGLNPPHTHPGATDIFTVLEGT

SEQ ID NO: 136137 - protein, 90 aa, Oryza sativa
  Clone ID: PAT_MRT4530_37745C.1.pep
GDSRADVLCIDALTGMDETNAHSAVARKVPKLAHMLDGGATAPIGSPAHTSGGRLETCGLTIAAGWTINRSTGRSLHALIFCCTDVYATL

SEQ ID NO: 136138 - protein, 162 aa, Oryza sativa
  Clone ID: PAT_MRT4530_37746C.1.pep
MQARRAPATLLLRRLLSLCAMAAVLLLSPSPAAVASAEPTTADDIIPALSGDDRCWWPADAPTAAAAPAGGGTGYDDAIAAVADDAVVVVAAPAAATAHRFRPRYDSAVSPGAKRELEHEARCGPRVPVRRGFPWPEWKPNCRREHGVAGAGGLGRRPWDEP

SEQ ID NO: 136139 - protein, 48 aa, Oryza sativa
  Clone ID: PAT_MRT4530_37747C.1.pep
PPAMFSMLGFFVQAIVPGKGPIKNLLDHVADPVANNAWAYAPNLVPGK

SEQ ID NO: 136140 - protein, 87 aa, Oryza sativa
  unsure (1)..(87): unsure at all Xaa locations
  Clone ID: PAT_MRT4530_37748C.1.pep
KKKKKKKTKQSRRSLLTPRLHTPSYLFLTLSYIQPTFTSLYHFFSSGWVVCSQLFPTFFIFPFHPPFXISNNPPPIPLPTPFPTLIH

SEQ ID NO: 136141 - protein, 125 aa, Oryza sativa
  unsure (1)..(125): unsure at all Xaa locations
  Clone ID: PAT_MRT4530_37749C.1.pep
YLRSTTRPVARIEFRGTMNPXISQSPSAPRVASFSSRGPNRIAAEILKPDMIAPGVDILAAWSGENPPSSIRVDDRRVEFSIIYGTSMXGVAAMLKVARPSWSPAAIKSALMTTAVRSPVAVIWQ

SEQ ID NO: 136142 - protein, 1108 aa, Oryza sativa
  Clone ID: PAT_MRT4530_3774C.1.pep
MPIGEAVLSAFMQALFEKAVAAASSELKFPQNIAVELQNLSSSLSTILAHVEDAEERQLKDQAARSWLSRLKDVAYEMDDLLDEHAAEVLRSKLAGPSNYHHLKVRICFCCIWLKNGLFNRDLVKQIMRIEGKIDRLIKDRHIVDPIMRFNREEIRERPKTSSLIDDSSVYGREEDKEVIVNMLLTTNNSNHVNLSILPIVGMGGVGKTTLTQLVYNDVRVKKHFQLRMWLCVSENFDEAKLTKETIESVASGLSSATTNMNLLQEDLSNKLKGKRFLLVLDDVWNEDPDRWDRYRCALVAGAKGSKIMVTTRNENVGKLVGGLTPYYLKQLSYNDCWHLFRSYAFADGDSSAHPNLEMIGKEIVHKLKGLPLAARALGSLLCAKDNEDDWKNILESEIWELPSDKNNILPALRLSYNHLPPILKRCFAFCSVFHKDYVFEKDILVQIWMAVGYIQPQGRRRMEEIGNNYFDELLSRSFFQKHKDGYVMHDAMHDLAQSVSIDECMRLDNLPNNSTTERNARHLSFSCDNKSQTTFEAFRGFNRARSLLLLNGYKSKTSSIPSDLFLNLRYLHVLDLNRQEITELPESVGKLKMLRYLNLSGTVVRKLPSSIGKLYCLQTLKLRNCSHNLVNLLSLEARTELITGIARIGKLTCLQKLEEFVVHKDKGYKVSELKAMNKIGGHICIKNLESVSSAEEADEALLSEKAHISILDLIWSSSRDFTSEEANQDIETLTSLEPHDELKELTVKAFAGFEFPHWILSHLQTIHLSDCTNCSILPALGQLPLLKVIIIGGFPTIIKIGDEFSGSSEVKGFPSLKELVFEDTPNLERWTSTQDGEFLPFLRELQVLDCPKVTELPLLPSTLVELKISEAGFSVLPEVHAPRFLPSLTRLQIHKCPNLTSLQQGLLSQQLSALQQLTITNCPELIHPPTEGLRTLTALQSLHIYDCPRLATAEHRGLLPRMIEDLRITSCSNIINPLLDELNELFALKNLVIADCVSLNTFPEKLPATLKKLEIFNCSNLASLPACLQEASCLKTMTILNCVSIKCLPAHGLPLSLEELYIKECPFLAERCQENSGEDWPKISHIAIIEIDDDSAMPDRSIRRRLC

SEQ ID NO: 136143 - protein, 258 aa, Oryza sativa
  unsure (1)..(258): unsure at all Xaa locations
  Clone ID: PAT_MRT4530_37750C.1.pep
MISQSPSAPRVASFSSRGPNRIAAEILKPDMIAPGVDILAAWSGENPPSSIRVDDRRVEFSIIYGTSMXGVAAMLKVARPSWSPAAIKSALMTTAYNVDNGGXPIKFMSTGQPAGPFELGSGHVDPNXRALDPGLVYDATADDYITFLCSLGYTRRQISLFTNDGSVTDYSARPQRRRRSVTNVGTNTDAVYSVNIASPPGTAIMSPMRLAFTAQRKTLNYSITMSASAAGPNTYRWGSIFWSDGQHTVRSPVAVIWQ

SEQ ID NO: 136144 - protein, 75 aa, Oryza sativa
  unsure (1)..(75): unsure at all Xaa locations
  Clone ID: PAT_MRT4530_37751C.1.pep
EGYHLRESHNGLYKTTSGTSSYIPDXYKGEQSATSMIAISKPCILAFSSNERVKKRTAFLAIFVQYLHIVVRLGG

SEQ ID NO: 136145 - protein, 78 aa, Oryza sativa
  Clone ID: PAT_MRT4530_37752C.1.pep
MAATTDWGPIIAAVVLFILLSPGFLFQLPARARVVELGNMGTSGLSILVHAILYFCILTIVVVAIGVHVYSTKPDPID

SEQ ID NO: 136146 - protein, 72 aa, Oryza sativa
  Clone ID: PAT_MRT4530_37753C.1.pep
GEKKGGGNKFSTKLGLISHGREQTPLKKGGGGTPPGGVYKFFGPNILKGEKLVDQKNFFGQAGFRGTSPGVW

SEQ ID NO: 136147 - protein, 255 aa, Oryza sativa
  Clone ID: PAT_MRT4530_37754C.1.pep
MAVVGVLALQGSFNEHLAALRRIGVRGVEVRKPEQLQGLDSLIIPGGESTTMAKLANYHNLFPALREFVGTGRPVWGTCAGLIFLANKAVGQKSGGQELIGGLDCTVHRNFFGSQLQSFETELSVPMLAEKEGGSDTCRGVFIRAPAILDVGSNVEVLADCPVPSDRPSITIASGEGVEEEVYSKDRVIVAVRQGNILATAFHPELTSDSRWHRFFLDMDKESDTKAFSALSLSSSSRDTQDGSKNKPLDLPIFE

SEQ ID NO: 136148 - protein, 82 aa, Oryza sativa
  Clone ID: PAT_MRT4530_37755C.1.pep
LRGPASHSGCQRASLSAVSCISPARVATGQYSRCVISCPGGPCDCPRSTTADHPMPPSSREAALASDNYPDRDLSTWRDVCL

SEQ ID NO: 136149 - protein, 73 aa, Oryza sativa
  Clone ID: PAT_MRT4530_37756C.1.pep
ARGYSSPLPPPPPPPLHHFAHLISLLPFLSESKPGASRFSVHAAPHCRRPSMLDYVGLSPPPPPPSSSSAAAA

SEQ ID NO: 136150 - protein, 97 aa, Oryza sativa
  Clone ID: PAT_MRT4530_37757C.1.pep
MGSPHDAEPPTASILVGTFLEWRRRARLANAQGGAQQHRVTDADNNLRAGDPFPGATANITDVGERDWKKKEKEERVEEEDESDRWVPRAYEGEDEK

SEQ ID NO: 136151 - protein, 76 aa, Oryza sativa
  unsure (1)..(76): unsure at all Xaa locations
  Clone ID: PAT_MRT4530_37758C.1.pep
QTVSDMFAASTFFVPGNGESMLFSSDQWIDGRSVASLAPDLLFVVPQRFXGSRTVASALANNSWVSDIRGALTIPV

SEQ ID NO: 136152 - protein, 57 aa, Oryza sativa
  Clone ID: PAT_MRT4530_37759C.1.pep
VLRGLGNLIAADDYMVDSVLTVGNNIIGKLHDPFPTISVYNVYSSVNSSLSFWKIYL

SEQ ID NO: 136153 - protein, 72 aa, Oryza sativa
  Clone ID: PAT_MRT4530_3775C.1.pep
SIAQSMHALYPVGQRWTRPYHQLGGRNREANFPAQPTLCKKCTTLSGLASPNSSRIERVNCVSASEGPPAVG

SEQ ID NO: 136154 - protein, 184 aa, Oryza sativa
  unsure (1)..(184): unsure at all Xaa locations
  Clone ID: PAT_MRT4530_37760C.1.pep
RSTRPSPPRRRAASTRAPSTTPPSGAASPARARWPPAAGAARPVRRRGGGGDGRRRRRPPTRARRPSRRGSGRGRRRRHGPPRGAPPRPRRRACAPRPTTTPSASPTPXEPPPRAGHAAXPAPPSDXPRSPPPXPPPPWTTRSPPSTRTSSTPWTGRHPPHPPPQPPTGGGRCFIWLLFGPHKV

SEQ ID NO: 136155 - protein, 107 aa, Oryza sativa
  unsure (1)..(107): unsure at all Xaa locations
  Clone ID: PAT_MRT4530_37761C.1.pep
MDDDGDDGLAIPIPLPVGAIRPRSLXARCRQPPAXCGXTLCAPAAAAPSSPAAPVRAAASPVVSAWRWATARGACRSGARTRPARSPAKQTTKLSHIKFGTSSRIAA

SEQ ID NO: 136156 - protein, 252 aa, Oryza sativa
  unsure (1)..(252): unsure at all Xaa locations
  Clone ID: PAT_MRT4530_37762C.1.pep
SNRKTGYNASSNLQNQGKLGPSAVLTSVFSDVAADSAWNPHVSVEPTCQDATSSLSFPSSLSAFTSSGWAGRPTGWGGSRRGEAGEEEAGRRRQAGDRRSGGGXPHAMDDDGDDGLAIPIPLPVGAIRLRSLLSPFLSSLCPLNGRCRQPPAACLPTAGRPLRPASLPASPTICPVLRQAGAAAASPVVSAWRWATARGACRSGARTRPARSPAKQTTKLSHIKFGTSSRIAAENLQAQRYYPAIQAIDDDD

SEQ ID NO: 136157 - protein, 78 aa, Oryza sativa
  Clone ID: PAT_MRT4530_37763C.1.pep
MPSPPRRLRALSLATPDSSAWRSGAARSGLLEVGACQIRPALTAHALGLEEDDDGGSGGSKEIAICNVDGEIADGAEN

SEQ ID NO: 136158 - protein, 472 aa, Oryza sativa
  Clone ID: PAT_MRT4530_37764C.1.pep
MMVVVMRRRMAAAAMLVLVAMAGGATVCAAQLRRNYYAGVCPNVESIVRGAVARKVQETFATVGATVRLFFHDCFVDGCDASVVVASAGNNTAEKDHPNNLSLAGDGFDTVIKAKAAVDAVPGCRDRVSCADILAMATRDAIALAGGPSYAVELGRLDGLRSTASSVNGRLPPPTFNLDQLTALFAANGLSQADMIALSAGHTVGFAHCNTFLGRIRGSSVDPTMSPRYAAQLQRSCPPNVDPRIAVTMDPVTPRAFDNQYFKNLQNGMGLLGSDQVLYSDPRSRPIVDSWAQSSAAFNQAFVTAMTKLGRVGVKTGSDKLEEHRPVFQLFEVFNGFRLASTLQAGLSGEIPNKIGTLQSLESLDLSKNKLSGGIPSSLSSLAFLSYLNLSYNNLSGMIPSGRQLDTLSANDPSLIAGRHPNEKRGGFIDRGTRTQAVGGGGAGVLHRRNWSPSPPAEDRRYGHGRAAEVRS

SEQ ID NO: 136159 - protein, 281 aa, Oryza sativa
  Clone ID: PAT_MRT4530_37765C.1.pep
MRPPAMSPADSLAAGRSRRVGASMPRPKRVRVYFVDADATDTDSSGDERSRPRVREVIDIDVGAASPAPAPKHPRRLVPTATAALARRRAGMAASRRFRGVRRRPWGRFSAEIRDPSLQKRLWLGTFDTAEEAAAVYDDAALRIKGSHAVTNFPSDSDTPSAKAKQMKLHPRRHTTPDKTPSSSTAAAAKASVPDPTPAPPEEDRANDSSFNPFASPTSVLRYAAADEVTAPSFEHLLVELGDLSAPPPSTKAAEFDWLPWWEGEDFVTAGLTASNAVSVK

SEQ ID NO: 136160 - protein, 90 aa, Oryza sativa
  Clone ID: PAT_MRT4530_37766C.1.pep
PILETNFGNIYNVPPVQRQLWCFIETVACLMKCIFKMEAHITYLASSLYHVFCKACIIPLPQLKHPKLLTLSLMQATRGDTHGSGFTTGF

SEQ ID NO: 136161 - protein, 232 aa, Oryza sativa
  unsure (1)..(232): unsure at all Xaa locations
  Clone ID: PAT_MRT4530_37767C.1.pep
LPPRARHTLADPLHSATLAQRPCSHASAQXIIITPSHITPPHHASPRAASPHSLTIVAQSSLGSSQHSRTPTASHTPATQQIAHGPARPHINRALRNQTLATSQTLRFRSSPGKTAKATXAPTWSLPETLIPLQDRQPASTPXMLGNLTHHSXRSIGLNATGKNCHFLEGPNALAINDPFGCLPFLLRQLAQNLGPVNVFPAFLLPPSPXSFFXIGNSNAKXMXVGNPWVTI

SEQ ID NO: 136162 - protein, 79 aa, Oryza sativa
  unsure (1)..(79): unsure at all Xaa locations
  Clone ID: PAT_MRT4530_37768C.1.pep
GKKCPKTYKKITGETTPPPRQMGKASMFLSLRKVHANKRKFSQPFQGFGPRTSPIALPKTPPKRKXXKLLLKXXRVRLA

SEQ ID NO: 136163 - protein, 220 aa, Oryza sativa
  unsure (1)..(220): unsure at all Xaa locations
  Clone ID: PAT_MRT4530_37769C.1.pep
MASSTTTSEDALRRALAERQAAVDAQAEAVRALKAAGAAAAKAEVDAAVEALKALKVEAGAAARRLQAAVGASGGGGGAAREEMRQAVVNTLERKLFYIPSFKIYRGVAGLYDYGPPGCAVKANVLAFWRQHFVLEENMLEVDCPCVTPEVVLKASGHVEKFTDLMVKDEKTGTCYRADHLLKDHCKEKLEKDLTLSPEXAAELKHVLAVLDDLSADELG

SEQ ID NO: 136164 - protein, 108 aa, Oryza sativa
  Clone ID: PAT_MRT4530_3776C.1.pep
PVTERLHRRPRPRRDRLRPPLLRSTVTVTTTIAAAHVKQGDDNDDGRDFLLIQRVNQEFYQPRVRAAVADQSQATAGAVFFSPKQLSPCPPRLPPPPNRPSGTVYRSL

SEQ ID NO: 136165 - protein, 163 aa, Oryza sativa
  Clone ID: PAT_MRT4530_37770C.1.pep
AVSHVAGGADEGGERVQGEAGAAESKVFYLKMKGDYHIYLAEFKSGDERKQAAESTMNAYKAAQDIALADLAPTHPIRLGLALNFSVFYYEILNSPDRACNLAKQAFDEAISELDSLGEESYKDSTLIMQLLRDNLTLWTSDANDDGGDEIKEAAASKEPGDQ

SEQ ID NO: 136166 - protein, 182 aa, Oryza sativa
  unsure (1)..(182): unsure at all Xaa locations
  Clone ID: PAT_MRT4530_37771C.1.pep
FHHPSKKPDEKNQVCPIKKPGEKSAKKKEKPNMSDLEKRGKNRAEKNQNCPIQKKPGEKKRVKKRKXKKQNSDKKKKKKKVHEKKKKSHTKKKINKKQQQQKSISPKXPKKNCRCKRKKSNSYKRQKKKKVVKKKRXPIPLKTGKKSDSCKGKKKSEKTSKKKKHARKEKQKRGEKYDFRHQ

SEQ ID NO: 136167 - protein, 338 aa, Oryza sativa
  Clone ID: PAT_MRT4530_37772C.1.pep
MAKMGFAPMLSVAVLLGTLAAFPAAVHSIGVCYGVVANNLPGPSEVVQLYRSKGIDSMRIYFADAAALNALSGSNIGLIMDVGNGNLSSLASSPSAAAGWVRDNIQAYPGVSFRYIAVGNEVQGSDTANILPAMRNVNSALVAAGLGNIKVSTSVRFDAFADTFPPSSGRFRDDYMTPIARFLATTGAPLLANVYPYFAYKDDQESGQKNIMLNYATFQPGTTVVDNGNRLTYTCLFDAMVDSIYAALEKAGTPSVSVVVSESGWPSAGGKVGASVNNAQTYNQGLINHVRGGTPKKRRALETYIFAMFDENGKPGDEIEKHFGLFNPNKSPSYSISF

SEQ ID NO: 136168 - protein, 139 aa, Oryza sativa
  Clone ID: PAT_MRT4530_37773C.1.pep
MSSIHFFPATSQAAAPSRRPLTKPSPKPPAATAAYHRGGDNEPVLFPRLFLRRRARPAAAPAEAPPVGPDGSSSGGGGGGGEGGGGGGDDEEDEGTRKGLLPEWLSVTTDDAKTVLAAIAISLAFRSFVAEPRFIPSLS

SEQ ID NO: 136169 - protein, 194 aa, Oryza sativa
  Clone ID: PAT_MRT4530_37774C.1.pep
MDSRISLVCFLVLASSLLHCARSDGSDSQLLKGINSYRASLKVPALSENKNAACLAEQLAQQFKDQPCTNTTGANTVPGTEQQFPDYPKYLDHCHLNASVTGDGQVMPACVPGLVPDVVLTNYTKSQYNQYLNDTKFSGVGIANEGDWVVVVLSTSSGSGDYSPAPPGSNWAPSVHPFNQLILLLVGIVCLLMI

SEQ ID NO: 136170 - protein, 146 aa, Oryza sativa
  unsure (1)..(146): unsure at all Xaa locations
  Clone ID: PAT_MRT4530_37775C.1.pep
EKTHINIGVIGXHSTPGRSTTTVHLIYMLGXIDKRVIERIKKETAEMNNRYFKARGARQARAERDRGIHXHVDLRNIKTTKYYCTDIEAPGHRDLMKNMITATSQADWAVLIIDSNTGGFEAGIYDDGHISEHALLAVTLGGKHMS

SEQ ID NO: 136171 - protein, 112 aa, Oryza sativa
  unsure (1)..(112): unsure at all Xaa locations
  Clone ID: PAT_MRT4530_37776C.1.pep
QEFCDYPKYLDHXHLNALVTGDGQVMPACVPGLVPDVVLTNYTKSQYNQYLNDTKFSGVGIANEGDWVVVCLSTSSGSSDYSPAPPGSNWAPLVHPFNKLIFLLGGHCLFGW

SEQ ID NO: 136172 - protein, 110 aa, Oryza sativa
  Clone ID: PAT_MRT4530_37777C.1.pep
VGPLCALCPDGYHSPRTTGPCTACPSRATSEAASVLITILIVLIVVLLYWAVLRADRELIEEHKQRLNWKMEDWFEEDYQEQRMTSVYRRDDSTIYSLPKAKPNVTYKMK

SEQ ID NO: 136173 - protein, 122 aa, Oryza sativa
  Clone ID: PAT_MRT4530_37778C.1.pep
PAGSSLAAAAAASLTAAAAACLVLQLFGDEMTKRTKKAGIVGKYGTRYGASLRKQIKKMEVSQHSKYFCEFCGKFAVKRKAVGIWGCKDCGKVKAGGAYTMNTASAVTVRSTIRRLREQTEA

SEQ ID NO: 136174 - protein, 150 aa, Oryza sativa
  Clone ID: PAT_MRT4530_37779C.1.pep
MERQTGSVLGTSLRREYPGLVKEYAGPGQRKRKRLAMSWGHYFGEKDHNGMTAGNRVKDEFWARVDAMKKYYGKGIKGKNASAIELNFEQYMTCKLDWINVDAWKCFCHWWTSDKYKEKRKRGQDARFANEDYAQQQGGSLPFCTIQQNL

SEQ ID NO: 136175 - protein, 284 aa, Oryza sativa
  Clone ID: PAT_MRT4530_3777C.1.pep
MAAPPQPVPAPAAASPEVFRLGFIGPGNLAESIARGVAASGVLPATAIRTAPHRRPERAEAFSSIGAHILETNAQVVDDSDVIVISVKPQIVRQVLVELKPLLSEEKLLVSIAAGIKMEDLQGWSGHRRFIRVMPNTPSAVGQAASVMCLGEMATENDENRVRSLFSAIGKVWTAEEKYFDAVTGLSGSGPAYIFLAIEAMADGGVAAGLPRDLALGLASQTVLGAATMVNKTGKHPGQLKDMVTSPAGTTITGIQELEKGAFRGTLINAVVAATKRCRELSQS

SEQ ID NO: 136176 - protein, 189 aa, Oryza sativa
  Clone ID: PAT_MRT4530_37780C.1.pep
SGFCLLPQATDCASDRDRTGSVHGVGTTSLDLATVLASPDSNCFPLHSKLATELAEVLGVLGNLHLLDLLTQTGTIPGTIFANDSCLLGALRHLVAEELEYEAGGGGGSERGGGGGCERTRGRADGGRHGGAQEQVDRGVERRPREPRVQLPLDPPQPRRRRPLRTRRPHPRLQGHRPRIPYAGRGRRP

SEQ ID NO: 136177 - protein, 297 aa, Oryza sativa
  Clone ID: PAT_MRT4530_37781C.1.pep
MEFWGLEVKPGQTVKCEPEDERFLHLSQAALGESKKGSDNAVMYVKTDDQKLVIGTLSADKFPQIQFDLVFDKEFELSHTSKTASVFFSGYKVSQPAEEDEMDFDSEEVEDEEEEEKIIPAPRANGKVEGKENEQKKQGKTDSSASKSKAAVNDDDDDDDSDEDDSEDEDLSPEDDDDDSSEDDSSEDDEDESDEEDTPKKPETGKRKVAEIVLKTPSSDKKAKIATPSGQKTGDKKGVHVATPHPAKQASKTPVNDKSKEKSPKSGGGSISCKSCSKTFNSEMALQSHSKAKHPAK

SEQ ID NO: 136178 - protein, 81 aa, Oryza sativa
  Clone ID: PAT_MRT4530_37782C.1.pep
IYIGGACIYFIHICLTQQHIIVAYTTLTSSHRKIKLNKNKITPRPVKSKNDEQTGNTPNKGGDIIQSEMNNLTRLYITITA

SEQ ID NO: 136179 - protein, 111 aa, Oryza sativa
  Clone ID: PAT_MRT4530_37783C.1.pep
MKGSVLVLVAVNEAAATSREGFGRCLTDADLDELRGSFELGFGFDKEKGGAGLCDTLPALDLYFTVNRQRLSDGSKLRSPTSTLSSSTLISGASSSPQFSPRRRMDDLLSR

SEQ ID NO: 136180 - protein, 79 aa, Oryza sativa
  Clone ID: PAT_MRT4530_37784C.1.pep
FIVDEKNHGFSKKVQKLQEQDILDDVVTLPPSGTSLMKLYMDCPFYGSVGDKLIDLCDYVRRTKGRRSEETRESDMAPH

SEQ ID NO: 136181 - protein, 47 aa, Oryza sativa
  Clone ID: PAT_MRT4530_37785C.1.pep
VLLPQSQNKCNKLIRELFKINVVSISKLNNCIYFETWNQNDLFFLVS

SEQ ID NO: 136182 - protein, 84 aa, Oryza sativa
  unsure (1)..(84): unsure at all Xaa locations
  Clone ID: PAT_MRT4530_37786C.1.pep
RHQLQLPQFGDLYLGSGILGSKLKLILAFNVPTLRYGIYPRYYGAXPSTITTLAGFCNDFNSICFGIKNKLQISSYVTCELWVI

SEQ ID NO: 136183 - protein, 157 aa, Oryza sativa
  Clone ID: PAT_MRT4530_37787C.1.pep
TRVSFSTEANIIADRLHRASDAAEASGYAFRDDDGGVSDGYDNAQDWGRREPEIICRHIDHVDMMGLNRTTLRLRYLINWLVTSLLQLRLPGSKGGDGDPLVHIYGPKIKYERGAAVAFNVKQSDGTFVNAEVVQKIAEKNGISLGIGFLSHIKVDL

SEQ ID NO: 136184 - protein, 141 aa, Oryza sativa
  unsure (1)..(141): unsure at all Xaa locations
  Clone ID: PAT_MRT4530_37788C.1.pep
MAALAAALVGFLLAVSSAPAGATTDASDAAALGNLYSSWNSPSQLAGWSAGGGGDPCGAGWQGISCSGAGVTEIRXAGVGLDGSLGYELSSLFSLKTLDLSNNNLHXSIPYQLPPNXTYLESGNQQLILETFPYSISNMVH

SEQ ID NO: 136185 - protein, 51 aa, Oryza sativa
  Clone ID: PAT_MRT4530_37789C.1.pep
AIDDMDPKVKEAFENIKFYKFYPVKTPDTPDVSNVKAKYINRYYRHAHHLM

SEQ ID NO: 136186 - protein, 85 aa, Oryza sativa
  unsure (1)..(85): unsure at all Xaa locations
  Clone ID: PAT_MRT4530_3778C.1.pep
RGARAERGREGERERGEGEREREGERDGPRGNRPIEPEGGKIDFCGGIELGRKIEIRXLYLTMDRGFEIRNGTETDCKRRNNFRN

SEQ ID NO: 136187 - protein, 163 aa, Oryza sativa
  Clone ID: PAT_MRT4530_37790C.1.pep
MAEREGAVVKKGPDEGMKMATALLEEFGLPLGLLPLAEVIEVGFVRATGYMWIAQRKKVEHQFKMVSKQVSYDVEITGYVKAKCIKKLKGVKAKELMLWPPVNEITVDNPPTGKIHFKSLAGVTKTFPVEAFAAGRKNAGCMWGGRREKRKEADFWSEVGEAR

SEQ ID NO: 136188 - protein, 223 aa, Oryza sativa
  unsure (1)..(223): unsure at all Xaa locations
  Clone ID: PAT_MRT4530_37791C.1.pep
MCSRPLEDSFVLPLSDDAYGGFLXVGGVESGRYDAWIFIWGTDTYTTKRFYKLNFSAVQPPRLMIWLWKTKCVMKIKVFAWFLFCDRFNTRDMLDRRHYAKEDDDLTCALCNTHQRETRLHLFFTCPFSARCWQHLGIQWNHNLEFFQMIVLARLRFAXRGFLEVFFLVSWHISKQRNGFIFQNIQPSFQSWKSLXFVKEVLLHMCIMKDPLKQSISDWLQTL

SEQ ID NO: 136189 - protein, 169 aa, Oryza sativa
  unsure (1)..(169): unsure at all Xaa locations
  Clone ID: PAT_MRT4530_37792C.1.pep
MVDRLLKDDATEEKGERARMASFVGGMAISDLVKTTLGPKGMDKILQSTGRGRSVTVTNDGATILKSLHIDNPAAKVLVDIXSKVQDDDGGAGSASALVLAAVPLGGAVLFVILLILPWTFLAAFRLAAECARGASLLWASDISEVPDDVGADRTTSAVATLSSKILSQ

SEQ ID NO: 136190 - protein, 400 aa, Oryza sativa
  Clone ID: PAT_MRT4530_37793C.1.pep
MGETPRTPAPDRPPPPVPVRVPVPEPQPEPETPQASPSPPPAPDPPTPLLFPESAPSTPREEYHTPPPSLDEARDEALVPHQEGVVDVNGGSEAAAKSPQLSPVRLQVSPSPHRLLPPAPGSPAVNGEDGAAGTAQGRRPGRPQLHLATGRLFRTPSQGSLAMSSPSPSPTPPSPLTPAPATTAPAPTPTAKSKSGQNTPKHKEALKPPATPVATAIAIPFNPAEEAMTSPLRIGNGKAARLDHQHGPVAGAAENGGDVPPEVAAVAAVGERRTTSVALRVATAVLSLVSFALMVSARTSGWAGDHYGRYEQYRYAVGVNIVVCIYSIAQAFGEIRRLVLAYLLMSASSAAASRNDLWMSSFGKDPFNKKINSAVWFSFIAFIGLATNSLISTANLFSMI

SEQ ID NO: 136191 - protein, 61 aa, Oryza sativa
  Clone ID: PAT_MRT4530_37794C.1.pep
KQVVSTSPTLGTRQRGRLVLHAKHGRESRCIYSRAQGGGYKESCVRTCQSLSKLHSSQQTS

SEQ ID NO: 136192 - protein, 100 aa, Oryza sativa
  Clone ID: PAT_MRT4530_37795C.1.pep
MQVNDGDDVQSLYRPVHACESLKAKEPIEQTIFFVGEKIRSSQDWLLISKGRTKRKGISVADFPRRKRTKTGAEAHRMSLKTAQNTGDEVTKSRFYHSLI

SEQ ID NO: 136193 - protein, 193 aa, Oryza sativa
  Clone ID: PAT_MRT4530_37796C.1.pep
MAKVLATVLCAALAFAAAVAVANARDLVVGGNNGGGWKVPAQPDALNRWAEATRFHIGDNLVFKFDGAADAVLEVTRDDYNHCGTGSPVATHKPTGGAATVPLTSSGYHFFVGAAPGSCDKGERVIVLVMSEKHSRRGQGFFAPVPAPAQSPLAAGLFQAPAPAPATGNPGRTPASGAVLVAAALLGAAVAGF

SEQ ID NO: 136194 - protein, 86 aa, Oryza sativa
  Clone ID: PAT_MRT4530_37797C.1.pep
MAAARHAPPFPHQPSLAGVCVLSESDTDRIAPVSGPGARRRQSIAAVKTMSPDEDNTMGSQDDGQHGCTFGSECEPSYEWLYEYRG

SEQ ID NO: 136195 - protein, 314 aa, Oryza sativa
  Clone ID: PAT_MRT4530_37798C.1.pep
MRMDRNEEEMVTNDSDPLLKRENEEAESSSQLTPPKPATLSALEIEDEETDGSSAGCCRICLETDSELGDELISPCMCKGTQQFVHRSCLDHWRSVKEGFAFSHCTTCKAQFHLRVETWEDNSWRKMKFRIFVARDVILVFLAVQLPSAMIGAISYFLDRDGSFRNSFSDGWDRFLSKHPIPFYYCIGVVVFFVLLGFFGLILHCSSFNDNQDPCLAGCRNCCYGWGVLDCLPASLEACFALVVVFVVVFAILGIAYGFLAATMAVQRIWQRHYHILTKRELTKEYVVEDLHGSYTPPKLDPEHEERLKMLKLL

SEQ ID NO: 136196 - protein, 189 aa, Oryza sativa
  Clone ID: PAT_MRT4530_37799C.1.pep
MADGPWPTTPPGSASLSVLNHVWYRRQKTKRSEGKVKRSDSVPVASITPRVALQTVNGGKPQRKHGNRQQIAAALHDWLTTSIGGQPPGGAPSSADRLLAPRSRRLSTTLIILSRKYVSGSEKRKRKKCSDDFIEILEETFESAKGLHTSGRLETEKVVMRPAKGRRETRWCSTTPPLLAEKGDVEEEY

SEQ ID NO: 136197 - protein, 144 aa, Oryza sativa
  Clone ID: PAT_MRT4530_3779C.1.pep
MSKGIAVVEPTNGRPRLSPKISIQHHTTNPNNNRCRRQTTTLSLQPPSLVHHPKIQADSGGYHPPLHKVVASTLHLKLPMARTGDPAIGGEKLHEEDIGRQVQETAILHYIELVASTLHLKLPTTRTGDPAIGGEELHEEDIGR

SEQ ID NO: 136198 - protein, 72 aa, Oryza sativa
  unsure (1)..(72): unsure at all Xaa locations
  Clone ID: PAT_MRT4530_377C.1.pep
LNCPRHFDASISPTGHRCRLHPSREAPPPTPPPPPPPAIPIHXEAPPPPPATPIHHATAASSASSHRIHPGE

SEQ ID NO: 136199 - protein, 117 aa, Oryza sativa
  Clone ID: PAT_MRT4530_37800C.1.pep
PFTSWHQRRSFLSPRFSFSSISTYNLYLYLGLRSGSKVSTGATRPLLRLVLVLFQPAAWWRTGLRRMRGTTSTTATATSPAAAKRRDPAATTSSSPTTTMVRRTITMTSTSTFSSIA

SEQ ID NO: 136200 - protein, 84 aa, Oryza sativa
  Clone ID: PAT_MRT4530_37801C.1.pep
GMAPPPLLTSPLVFSKGGVQSRCLSTCLGRVLYFDFTPPFTWGVSLHLFFTNFSCYFQATFVGIVLQGHLFPCGACGFPSPRAF

SEQ ID NO: 136201 - protein, 119 aa, Oryza sativa
  Clone ID: PAT_MRT4530_37802C.1.pep
TRKRESTKDTRLAEAERPPPRSISSGRVLGRSLPSSTSSSQGMCLPSVVLGFLVLGCVVRALMLGKGICICDDSCSWIWDRGVLDVACYRFGLISSMVFNRLESSMEMKWFRDRNLAIL

SEQ ID NO: 136202 - protein, 202 aa, Oryza sativa
  unsure (1)..(202): unsure at all Xaa locations
  Clone ID: PAT_MRT4530_37803C.1.pep
PXKRPPEENFXPKXEXXGXGGXVPEXPFLGXRGXXKXXEEPXVXEXFXNXASKREXRXXRKXRVGXPRGXXGGGRXPXXXXGVGNXVEEXGXRXMFXRRXGRXXXXFKVPXGDXGRXNTAXNXGKGWPPPRXXXGGXXXSAXXXFVEGXAGXXXGEXEDEGGDEXAKRRXECTXVNTXWWXPXGMLRIXILHXSFLLXSHSN

SEQ ID NO: 136203 - protein, 432 aa, Oryza sativa
  Clone ID: PAT_MRT4530_37804C.1.pep
MAMSSSRSAAAIRGRRVGALARARRHATRAMASLFGHVEPASKDPILGVTEAFLADPSPDKVNVGVGAYRDDNGKPVVLECVREAERRIAGNLNMEYLPMGGSIKMIEESLKLAYGEDSDFIKDKRIAAVQALSGTGACRLFADFQRRFLPNSQIYIPTPTWSNHHNIWRDAQVPQRTFTYYHPESRGLDFAGLMDDIKNAPNGSFFLLHACAHNPTGVDPTEEQWREISYQFKIKNHFPFFDMAYQGFASGDPERDAKAIRIFLEDGHQIGCAQSYAKNMGLYGQRAGCLSILCEDEMQAVSVKSQLQQIARPMYSNPPVHGALVVSIILNDPELKSLWLKEVKGMADRIIGMRKALRENLEGLGSPLSWDHITNQIGMFCYSGMTPEQVDRLTNEYHIYMTRNGRISMAGVTTGNVAYLANAIHEVTKTK

SEQ ID NO: 136204 - protein, 83 aa, Oryza sativa
  Clone ID: PAT_MRT4530_37805C.1.pep
APSVMAYADTTAAPLQGLKSTASMRVGRRFGNSSFCNVCNGGWIRCMQEWPTEGIKKSDILSYLSPFTTLDLLKHIEFLGPSQ

SEQ ID NO: 136205 - protein, 80 aa, Oryza sativa
  unsure (1)..(80): unsure at all Xaa locations
  Clone ID: PAT_MRT4530_37806C.1.pep
PLFATLAKAGGREAAAEEEVVLWTEDPRRFETPDGEAYLQYRLLAXAQPGFYFFRNGKRGERATTPADGMEMAHTYMPGS

SEQ ID NO: 136206 - protein, 89 aa, Oryza sativa
  Clone ID: PAT_MRT4530_37807C.1.pep
MGAVAEPKPEAKVEIVEEQATLEPMLPASSTSGCRPPPLHGPASSSSSSPPPPRVPPAACIGKVELQLPQHRQKPPSQQYGDKLNGFNS

SEQ ID NO: 136207 - protein, 89 aa, Oryza sativa
  Clone ID: PAT_MRT4530_37808C.1.pep
STITCMHACMGKYFCTVEVLSQKLWLLLGPSMHQPAHLRRRRSELRPHAAGRHPPCLGIIAAAVQQPGGPEQRRRRRRRRRRRHRCSRS

SEQ ID NO: 136208 - protein, 131 aa, Oryza sativa
  unsure (1)..(131): unsure at all Xaa locations
  Clone ID: PAT_MRT4530_37809C.1.pep
AGPFVCXALPAPLRPAPPPLCRPVWSLPGRCPRXALRRGVWSPPPVPRRPAGALGANTNFFSPGSGLLSAPLPAAWPARRRGAWRPCGRACARLRPRFGVAGCRARPPAQGVAVGGLARRAAPKSVRSRGS

SEQ ID NO: 136209 - protein, 111 aa, Oryza sativa
  Clone ID: PAT_MRT4530_3780C.1.pep
GYLSMLFTDDAAVLDVAQTGVWFVTVSQPINAVAFVMDGLYYGVSDFAFVAYSTLFAGAISSAVLLVAAPKFGLGGVWAGLTLFMSLRAIAGFWRLGSKGGPWKIIWSETE

SEQ ID NO: 136210 - protein, 772 aa, Oryza sativa
  Clone ID: PAT_MRT4530_37810C.1.pep
MEGDMIVSGSDGFFDNIFDQEIVSVISESPGVDEAAKALAELARKHSVDVTFDSPYSMEARSRGFDVPSWKKFIGGKLIGGKMDDITVIVAQVKAVMIPDDEAVGQWPSGEDQGFIYRRGRGYRAPATRRRDAMSSSSSSLAAAAARKRALTEQRFSELSPALSPEVVKALKGGGFRRCTPVQAAAIPLLLSHKDVAVDAATGSGKTLAFVVPVVEILRRRPSPPKPHEIYNVAQPFFATLKGVSSMLLVGGFDIKAELKKLEEEGANILVGTPGKLFDVMERLDTLNYKNLEILILDEADRLLDLGFQKQITSIISKLPKLRRTGLFSATQTEAVKELAKAGLRNPVRVEVKTEVKPTGKDGAQQELGPSKTPLGLRLEYMICEASNKSSQLVDFLVQNNGKKIMVYFATCACVDYWAIVLPLLDSLKGSPIIPYHGKMKQGPREKALASFSALSSGILVCTDVAARGLDIPHVDLIVQYDPPQDPNVFIHRAGRTARYDQEGDAIVFLLPKEDTYVEFLKRRGVPLTERECSTNAVDIVPQIRSAALEDRNVMEKGLTAFVSFVRAYKEHHCSYIFSWKDLEIGRLGMEYGLLQIPSMPEVKHHSLSLEGFTPVKDVDVTKIKYKDKAREKQRQKTLKRKAEELALRPEIEKRRKAPEKPEKPKRKKTGKQRQAVQTKEDMDELANEYRLLKKLKRGVIDEDEYEKLTGFGESDDDDSSDGGDSDLDERKERGNKVLKKIKQKGKAKGVGCKFCPGYCMFDFVICDKDGE

SEQ ID NO: 136211 - protein, 937 aa, Oryza sativa
  Clone ID: PAT_MRT4530_37811C.1.pep
MMRVLMAASSTATRLSPPRLHAPTTPSPHLPLRRSRFSPLRAAKYASLLTPAETGGEDAFFVNGDDGGVFAVADGVSGWAEKDVNPALFSRELMAHTSTFLKDEEVNHDPQLLLMKAHAATTSVGSATVIIAMLEKTGILKIASVGDCGLKVIRKEPSDFDPVVYQVCTVNLMEGDMIVSGSDGFFDNIFDQEIVSVISESPGVDEAAKALAELARKHSVDVTFDSPYSMEARSRGFDVPSWKKFIGGKLIGGKMDDITVIVAQVKAVMIPDDEAVGQWPSGEDQGFIYRRGRGYRAPATRRRDAMSSSSSSLAAAAARKRALTEQRFSELSPALSPEVVKALKGGGFRRCTPVQAAAIPLLLSHKDVAVDAATGSGKTLAFVVPVVEILRRRPSPPKPHEIYNVAQPFFATLKGVSSMLLVGGFDIKAELKKLEEEGANILVGTPGKLFDVMERLDTLNYKNLEILILDEADRLLDLGFQKQITSIISKLPKLRRTGLFSATQTEAVKELAKAGLRNPVRVEVKTEVKPTGKDGAQQELGPSKTPLGLRLEYMICEASNKSSQLVDFLVQNNGKKIMVYFATCACVDYWAIVLPLLDSLKGSPIIPYHGKMKQGPREKALASFSALSSGILVCTDVAARGLDIPHVDLIVQYDPPQDPNVFIHRAGRTARYDQEGDAIVFLLPKEDTYVEFLKRRGVPLTERECSTNAVDIVPQIRSAALEDRNVMEKGLTAFVSFVRAYKEHHCSYIFSWKDLEIGRLGMEYGLLQIPSMPEVKHHSLSLEGFTPVKDVDVTKIKYKDKAREKQRQKTLKRKAEELALRPEIEKRRKAPEKPEKPKRKKTGKQRQAVQTKEDMDELANEYRLLKKLKRGVIDEDEYEKLTGFGESDDDDSSDGGDSDLDERKERGNKVLKKIKQKGKAKGSRRFEGRSKQKTRRR

SEQ ID NO: 136212 - protein, 885 aa, Oryza sativa
  Clone ID: PAT_MRT4530_37812C.1.pep
MLSVRCGGGGGGAAAVEEHGAVRHHRPLTPRQQQQLRTVVESLRLDPLEVDEGARLEIARQSYRAGDYKAALEHCNAVYRANPRLLENLLLLGAVYYQLREFDMCIAKNEEAVAIQPNCPECFNSIANAWREKGDVDNAIQFYVHAVQLRPTFADAWTNLANAYTRKGNLSQAAECCHQALALNPHLADAYCNLGDVLKAQGLYREAYSHYLDALNIKPTFANAWNNIAGLLMQWGDFNKAALYYKEAIKCNPAFYDAHLNLGNLYKVTGMRQDAIVCFQNAARAKPENAVAYVFSGNLGNAYHEQGQLDLAILSYRQAIHCNSSYVEAYNNLGNALKDAGRNEEAISCYQTCLALQPSHPQALTNLGNVYMERVSFWSTCRNMMDIAASLYMATLTVTTGLSAPYNNLAMIYKQQGNCNHAITCFNEVLRIDPMAADCLVNRGNTFKEAGRITEAIQDYFHAVTIRPTMAEAHANLAAAYKDTGLLEASIISYKQALQLRQDFPEATCNLLHTLQMSSLPSVQPFHAIAYPIDSTLALEISRTYAAHYSLVASRFGLPTFTHSYPVPISNDGRTSRLRIGYVSSDFGNHPLSHLMGSIFGMHNQDTIEVFCYALSQDDGTEWRQRIRSEAEHFIDVSSMSSDMIAKVINEDKIQILINLNGYTKGARNEIFALQPAPIQVSYMGFPGTTGADYIDYLVTDEFVSPLKFSHIYSEKLVHLPHCYFVNDYKQKNRDVLGPVCPHKRADYGLPEDKFIFACFNQLYKMDPDIFNTCPLCNGHTTGTDILWAGLPMITLPLEKMATRVAGSLCLATGIGEEMVVNRVSFFTSVNKNGRLLVWSVIVISGPEDWWQFRSWMVVVLFSEIVGLDSFKLQYPPCPVFVIHG

SEQ ID NO: 136213 - protein, 184 aa, Oryza sativa
  unsure (1)..(184): unsure at all Xaa locations
  Clone ID: PAT_MRT4530_37813C.1.pep
HRACGVVFEDWESSKPGMVVTFGPSGLTTEXVXXVEMHHXALQEALPGDNVXFNVKNXAVKDLKXGYLASNSXKDNXAXEXAXFXSXXIIMNHPGXIGNXYAPXLDCHTSXIAVXFAEXVTXIDXXSGXELEKEPXFXKKRXXGMVXIXXTXPXVVENXXXLPPLGXXAVXXXKQTXXXGVXXT

SEQ ID NO: 136214 - protein, 140 aa, Oryza sativa
  Clone ID: PAT_MRT4530_37814C.1.pep
MSCTNDKFKDCVLREELVKVLKDQCGAINRDMTVVIERMVQTSTERFQRMLNANLTTINNCLDSSSDVEEEYSLVAKLLGETNDPEMENDDGEILGVIDTTNYKTILVQHVLSIQVEHAQELQHYNSSSSRIVGYFPLGS

SEQ ID NO: 136215 - protein, 171 aa, Oryza sativa
  unsure (1)..(171): unsure at all Xaa locations
  Clone ID: PAT_MRT4530_37815C.1.pep
IPFPLWDEYICRGCYHLVYMGVCMMGLFRFANNRVDGDLIENYFPGVTVFCFYLGFLFLWWXLFRVRVTSWFCCPCLCCTFYYSCYWLXMFATYRTCILLYFLGVYSCLLILCFLCSXIVCCVSCVALFATFVCYLCFFCVCIIYGCSIYVYAYVVVVLTSGVFCMSVVVC

SEQ ID NO: 136216 - protein, 469 aa, Oryza sativa
  unsure (1)..(469): unsure at all Xaa locations
  Clone ID: PAT_MRT4530_37816C.1.pep
VPARPGALLQGGTRNLPRIARALAQHPTPPAPRARGRSSTNTLPVTPKTHSTRATHPSSTTPAGRLLAAPGSAGSLSRSSPRGPVIAAGGLPPPSSGQIWEEGGKDPPPRPRGSSSPPPPPRASSSSPPPPPSPASPLPPLYAAPPAGRRAAPPPSAPPXPWPPPAPPSPPPATPPPLPPSPLQPDXEGGRSPPSLTVSVPPLPXSPSSSQICEGRSLSPPPPSHLLTPAGSGRGRGGEPPPHRHHHAPPPSPPSSGRIYDRGRKEWPPLSLPPPPPPPPPHLHAIPPPPSPPPPPSSPSSFSPSLQTPLPYPIRRRRPIPIRPPPPSLGLRPHSPPPPPXRAPPPPACTPPPSASPPSPLPPPEASPPREPPPRPPVRSVGHSALGHNXQPPRTQPPRASPPAPAARCCPLPLPTPPPSPSPPPFSSRPHVVCPPPSLDPPPLPPPPXSAPRPGQAAPRPHVAPATAM

SEQ ID NO: 136217 - protein, 91 aa, Oryza sativa
  Clone ID: PAT_MRT4530_37817C.1.pep
MKQGGGAIATRRGGLAPRPSYSLTQQLTAKGLTSSSSKGFRSYLPAIAPLHPNSSSSSGSGRVGGFSLRRGKGNARDGGDQLLRPPGFRFY

SEQ ID NO: 136218 - protein, 192 aa, Oryza sativa
  unsure (1)..(192): unsure at all Xaa locations
  Clone ID: PAT_MRT4530_37818C.1.pep
RQNLPMCPLCXRRPPFEGIDKLFGALKLDDTGKVGKGAGMPCFLCLHPTCKQSMITQGVWGGAECTGTLILDPVSAPKWRLYCNRCNCIVLLPHAAHKISTTDKKCPTCESTIIEVDFNKKTTPLKDGATLHEGCILCDELLHSLIEMKHGKSFFMRRGRGRGRGRGRGRGSSRGRRGSSRHDDPKMSFRDF

SEQ ID NO: 136219 - protein, 103 aa, Oryza sativa
  Clone ID: PAT_MRT4530_37819C.1.pep
MRARGARSFVSPSLPSPLPPTPTPHIPGWHPSSPPRPAPRSSPGRQLRPSPPQAGAALPPPLPPLFPPRLRPLSSPSSLDPARGSPDLDSSGDNGGSSGCSTA

SEQ ID NO: 136220 - protein, 324 aa, Oryza sativa
  Clone ID: PAT_MRT4530_3781C.1.pep
MGRHSYPTRILVDSSGQKCDTSDKGVRTSYSIHAPCRDAAPSDVARIFALGGGAAALALGPLCANRLQRGTGVACLPLLAKATLRNLAIAVSLIHVVSAADYTIGSAAGGWGGEYKAWVASQTFSPGDTLTFKYSSYHNVVEVTKDDYEACSATSPVSADSSGSTTIVLTTPGKRYFICGAPGHCQSGMKLVVDVADRPAPATPSPPPLLPPSPRHKRRTAPAPMPLPPAQAPVWSPAPAPAATQRRHSGHKKHRSRHLPPKPAPAMAPTVQSVEADFPAAAFAPMSSPPPPPPMSSDASAVVRQKWSDVIVGLVALGLVVLGV

SEQ ID NO: 136221 - protein, 97 aa, Oryza sativa
  Clone ID: PAT_MRT4530_37820C.1.pep
FGLKDMMGWNDPMPYLDRGMKKDSRVATGKRRGIISSLLVRSHRRLAPACAVGSPLLTRSRHRFIPARAAGSPLLPSPPRTLAADSPLLPPLTLERS

SEQ ID NO: 136222 - protein, 112 aa, Oryza sativa
  Clone ID: PAT_MRT4530_37821C.1.pep
MVYGEGEVQATEVWLSVQEATRVLERFKAMPQLDRYKKTMDLDGFIKERTDKLQEKLHKVRRDADESETKILIVEAFYSRCAGLEDLTIEQLTSLGWMADAQLKIVNNSVYP

SEQ ID NO: 136223 - protein, 226 aa, Oryza sativa
  Clone ID: PAT_MRT4530_37822C.1.pep
GLAKAVAIGSNGITFAILAFNVWYGSRLVMSHGYKGGTVFVVSYAVIQGGLSEASSATKRILEVIRRVPKIDSESDTGEELGNVAGEVEFRNVKFCYPSRPESPIFVSFNLRVPAGRTVALVGGSGSGKSTVIALLERFYDPSAGEVMVDGVDIRRLRLKWLRAQMGLVSQEPALFATSIRENILFGKEDATAEEVIAAAKAANAHSFISQLPQGLRCAFFVAAAA

SEQ ID NO: 136224 - protein, 91 aa, Oryza sativa
  Clone ID: PAT_MRT4530_37823C.1.pep
ANPRAPRDFSCRPSLGGVFFSTSGMCQSPRSSLFYSPPYSGLVRGVCLSPSWNLFPVFLIQEQMNRNQIKKKKKKKKKKKKKNQKKKKTQK

SEQ ID NO: 136225 - protein, 156 aa, Oryza sativa
  unsure (1)..(156): unsure at all Xaa locations
  Clone ID: PAT_MRT4530_37824C.1.pep
MYMQSKDRIKNRILYSQKIEYNNREQSREALPXNLIVTFSRCRTSKTNVPETCSPDQEEASPXIDSACVAWRRRLNLYRNIKTPARSPLRVTKPDKSRVIYPDSTPFYASDYXESCHARRATXAHVPPLLSTSHASSGXESILPYKERVTPRPRSR

SEQ ID NO: 136226 - protein, 107 aa, Oryza sativa
  Clone ID: PAT_MRT4530_37825C.1.pep
MAAQAVAASRLVSSCGPCWLDVAVESSGAAPEEICRARSRLHFQDRARFQGKRRNITKLRGMAVEDDGLAVDGAHGRVARRQRQAKAVGMETGSESAPVAWAKQAYG

SEQ ID NO: 136227 - protein, 749 aa, Oryza sativa
  Clone ID: PAT_MRT4530_37826C.1.pep
MRVKSRGRSGDEDGRPSEVGSVVRGCNNTDLDDLLGFKARLSHQSNAQASWNTTTSYCQWSGVICSHRHKQRVLALNLTSTGLHGYISASIGNLTYLRSLDLSCNQLYGEIPLTIGWLSKLSYLDLSNNSFQGEIPRTIGQLPQLSYLYLSNNSLQGEITDELRNCTNLASIKLDLNSLNGKIPDWFGGFLKLNSISVGKNIFTGIIPQSLGNLSALSELFLNENHLTGPIPEALGKISSLERLALQVNHLSGTIPRTLLNLSSLIHIGLQENELHGRLPSDLGNGLPKIQYFIVALNHFTGSIPPSIANATNMRSIDLSSNNFTGIIPPEIGMLCLKYLMLQRNQLKATSVKDWRFITFLTNCTRLRAVTIQNNRLGGALPNSITNLSAQLELLDIGFNKISVKVLTLVQRLSIASDIAAALDYLHNSCHPTIVHCDFKPSNILLGEDMVAHVGDLGLAKILTDPEGEQLINSKSSVGLMGTIGYIAPGKAPTNDMFTDGLTLQKYAEMAYPARLIDIVDPHLLSIENTLGEINCVMSSVTRLALAAQFYPKLFQIQDALVKKQVWGQWGVGEVRSTSAAPGERRGLHADPPTGSKARNTPGHRNRKRDSSSQERAEGCAAEGNQSTASSGGRGWEGTPGGGGSGTEGSRWRGSFRWWQRRGRRSACTAARGEVEGIGERRAPVAMAKRSAVVAPVAASVAARTVHIRLSHRELCLSRPPPRRAPLPCDQAVPNATHHRCRYGNLSKE

SEQ ID NO: 136228 - protein, 48 aa, Oryza sativa
  Clone ID: PAT_MRT4530_37827C.1.pep
GWPTHGGWPCRDNLKGLFYFPNQREVPPHGLLNLLPPPQIVNNSLVSK

SEQ ID NO: 136229 - protein, 301 aa, Oryza sativa
  unsure (1)..(301): unsure at all Xaa locations
  Clone ID: PAT_MRT4530_37828C.1.pep
HEEEILHMNAGXGETSYARNSTVQKTEQDRMKMLINEAITDLCEPTSTILPKSMAIADLGCSSGPNALTLVSAALDAIHHHCAQQQQPPPEVCVFLNDLPSNDFNSVAKSLATLKHSHGDLDDPVVITGIGMIPGSFYERLFPCGSLHFVCSSNSLHWLSKAPDDLKEGKIPMYDMVEHLRVSRRAAVRDAYARQFRKDFTQFLSLRAQELVTGGRMVISLYGRCSENPISRSNQAWQVVAVALNDMASRGIIDKEKLDSFYIPLYAPLENEVNEIIEDEGSFEINKMLVRNPFSGMDDAT

SEQ ID NO: 136230 - protein, 71 aa, Oryza sativa
  Clone ID: PAT_MRT4530_37829C.1.pep
LGPPKKNIILAKHRLVKLEPLKGPPLLLYFDLKHLFVVVVVQAAITTPSQVKNDFLWCRTKVLLNFCCIML

SEQ ID NO: 136231 - protein, 80 aa, Oryza sativa
  Clone ID: PAT_MRT4530_3782C.1.pep
KCIFTFFAVIFLVPHPRHMEHPRLGNQSAVAAVLCHSHSNTRSKPHLQPTPQLEAMPGLLTHVFINTIWVLNLLSHNRNS

SEQ ID NO: 136232 - protein, 64 aa, Oryza sativa
  unsure (1)..(64): unsure at all Xaa locations
  Clone ID: PAT_MRT4530_37830C.1.pep
ELWRRDPGQVGLDLDVGRLHQGGDLLRGXGDAIVVEDEGRRACRRPRWTTLXGELELDLRTHAD

SEQ ID NO: 136233 - protein, 159 aa, Oryza sativa
  unsure (1)..(159): unsure at all Xaa locations
  Clone ID: PAT_MRT4530_37831C.1.pep
GECLRRRRTIEPRDLLLPHCTDEASLECMMRGRGIXTGAALPGCPDSYQQQLQQSGQAQLTERRSQGHEFKDRHQKISRFRQGDVIRLPADGAHWCSMVVKCPVVAIYVTDINNGANQLDPRQXDFLLAGNKRNPQASXREVEXEWSQNIFSGFSTELL

SEQ ID NO: 136234 - protein, 138 aa, Oryza sativa
  Clone ID: PAT_MRT4530_37833C.1.pep
VSELRLCSVVLPLWGRHMLLWGPVFFCLSFLRPHAGIWLAGATCIVLAPVFWACLLRLCCFVLSSLFFDQRTSFFFFWPVMFFLLWVFFSAGGAWFPFFSAWPRVCLSVLVLRKKKGRHARGVVLAFAVGERVDDQIK

SEQ ID NO: 136235 - protein, 101 aa, Oryza sativa
  unsure (1)..(101): unsure at all Xaa locations
  Clone ID: PAT_MRT4530_37834C.1.pep
YVYTGKHNSTTNACSENKSYKHTYXGAHMLLALTHICADFLQACMHDAHSIWQHRCHRQSPRCRRRRAPTSAPXSGGAGRRRVCPSISAARRAGGSARRSR

SEQ ID NO: 136236 - protein, 55 aa, Oryza sativa
  Clone ID: PAT_MRT4530_37835C.1.pep
RSASASSCYGCTTLVCFALLIGSCIRSCLTAQSIAPSYSHLLLDEGGALLYAQCS

SEQ ID NO: 136237 - protein, 139 aa, Oryza sativa
  unsure (1)..(139): unsure at all Xaa locations
  Clone ID: PAT_MRT4530_37836C.1.pep
QKISFLGKIQQLRGPHESKRDRLVAFKKLPKGXKNMSKKGPRGMLLFXNQRFAKYYLGHVFWGPLKKGGKKNVAPKTWFKGRLRPLNYDEMHHPVCWIGLEPPPPKMGTRGPACWTWPRFNVSLNPEQVKWGAKSPFFF

SEQ ID NO: 136238 - protein, 376 aa, Oryza sativa
  Clone ID: PAT_MRT4530_37837C.1.pep
MTLLAAITNPSAAAAAAAVAANPIVLTPGAAPPPPTSSALPTQIPPSDWSLSPADPALATAASFLSTSLSSTSVSLPRFRSLLASFLTTLSNSLSLPAPSPNLPQAIRSVSPYFPAALASPVASRAASLAEYDVLLALAECGLLRHPPPSLLSSLSEADRPELVCAVVRQAADLRSSELLATLRCFLSPASDAAYDAMMSVKNRWKEAAVLAVNRCKEKGAGKKVDAMARQAALLLMMGYDGFTSPEVCLHYLFASENVDSVVFGAAVSELDGGEVVRLMKYLTKWIGKYQRFPEAQACPEAVGMPGLELCDIVPSFRVVAGALGLVFDQHFSHLALNAELKEDLKAAEMMVKQLATEAESAGPILDLLRRMQQDV

SEQ ID NO: 136239 - protein, 347 aa, Oryza sativa
  Clone ID: PAT_MRT4530_37838C.1.pep
MPTDETAAAAPATTALSGHGCTVCVTGAGGFIASWLVKRLLEKGYTVRGTVRNPMDPKNDHLRALDGAGERLVLLRADLLDPDSLVAAFTGCEGVFHAASPVTDDPEKMIEPAIRGTRYVITAAADTGIKRVVFTSSIGTVYMNPYRDPNKPVDDTCWSDLEYCKRTENWYCYAKTVAEQGAWEVARRRGVDLVVVNPVLVLGPLLQATVNASTEHVMKYLTGSAKTYVNAAQAYVHVRDVAEAHVRVYDCGGARGRYICAESTLHRGDLCRALAKLFPEYPVPSRCKDEAAPPVKGYLFSNQRLRDLGMDFVPVRQCLYETVRSLQDKGLLPVLPPTADDHHHPSS

SEQ ID NO: 136240 - protein, 142 aa, Oryza sativa
  Clone ID: PAT_MRT4530_37839C.1.pep
SFQTWHNTHLKFETQCVLLLFSFVATIKAGHESIPDLSHKTSQHSSSYNPQPRDFPNDRLYRAYLVIQLFKSTVTSDPKNITATWVGHDICSNTAYLGFHCGTPGRDKMLTVTAFILNGYNLRAPRLQGFIDQLPDLALFHA

SEQ ID NO: 136241 - protein, 74 aa, Oryza sativa
  unsure (1)..(74): unsure at all Xaa locations
  Clone ID: PAT_MRT4530_3783C.1.pep
AKCXWHHXRXGLPPPATXXEREGLPDPXRQEGSNGGGGXRFARXRLPINCRSHKVALSSSNIKGFFPSVMQLPM

SEQ ID NO: 136242 - protein, 777 aa, Oryza sativa
  Clone ID: PAT_MRT4530_37840C.1.pep
MAKSNNGNGYLGVTEPISLSGPTEKDVVRTQEVEKCLADAGLYESQEEAVSREEVLGKLDQIVKAWIKKATRASGFGDQFVQEANAKIFTFGSYRLGVHGPGADIDTLCVGPRHATRTEYFFQALYDMLVDMPEVTELHPVPDAHVPVLKFKLNGVSIDLLYANLTHVVIPEDLDLSHDSILHNVDEQTVRSLNGCRVTDKILRLVPNILVCTSCIVYFSDDMLNALWWIRYDGRLFASTFRTTLRFMRFWAKRRGVYSNVIGFLGGINWALLVARICQLYPNASPSMLISRFFKVYSKWKWPNPVMLCHIEEGSLGLLVWDPRRNFRDRGHHMPIITPAYPSMNSSYNVSISTRHVMVQEFTRASDICQAIDERKADWDALFEPYPFFESYRNYLKIEITARNEDDLRNWKGWVESRLRTLVLKIERFTREMLLSHPNPRDFIDSSRPLHCFYFMGLWKKQISQAQEAEQYDIRAIVNEFKSNIHAYQHWREGMEIEVSHVKRKDIPSFVFPGGIRPSRPSRTVGKEARAVSRSNISANVQERNVPSMAQPMPYKSSEVNKIPSDPHGGYQSQERNNAVVSSLPCEETGHMFNGYANLHTESVELEHLRSYKGSTSVPENHVVHDLVKPPESMPPNSIHVYPSPTNGLGHLLDSSCKKPADIIVNKTTNFSSAVLAVPDELDELDSHQVKVNQKDLTAVDQGLSLEHKVGSNGGKAGTTGSPDNNHLKRKAEEELEPLELAAPLVRPPAPTSMTQRRPLRLRLSTVVQPKPAEGTS

SEQ ID NO: 136243 - protein, 117 aa, Oryza sativa
  unsure (1)..(117): unsure at all Xaa locations
  Clone ID: PAT_MRT4530_37841C.1.pep
MPLYFIYMQDSTHTSTQLLKVVARRPTHLTRVRIEQNGVQSGVHVAGRPAYVCVIGWRNRKRPDPMQTQXAITIAPTESHIITSRIITFVYGSINTRTHLCAAELYMGPTARGAYTV

SEQ ID NO: 136244 - protein, 61 aa, Oryza sativa
  unsure (1)..(61): unsure at all Xaa locations
  Clone ID: PAT_MRT4530_37842C.1.pep
MACSFPPSSATRLQAVDAAAXRSSRXPPRARTXSPVQKSLGAGCKXAXAXRQXRCDXDXXI

SEQ ID NO: 136245 - protein, 1332 aa, Oryza sativa
  Clone ID: PAT_MRT4530_37843C.1.pep
MPARTRSVNSLDSVDGFDARAEILQLRREMTDLSNLRGEMGEIKDLLKSICTALPGFHSAGASTSGTAGAGGSAGTQAMAGASVSAGAQAATGTGALIAPLVPPGFSSVAPILSTGGMQSGVALPQTADETQVNSTNAIPSSQIHAGMGSVFPSTSLPPIFPIHMSGAVPSVGHVNFSIEPNTVNPNFAPIFTSAPIFTSATRTQAGHLPGGLNIHGVESQEDVGMNHYGIETNQPWRYPQMQPTARPHLNATGIHMANGGGPVWPEGPRHLFGGMPNPYADMTLRSQRLELTIFNGEDAIGWLQQCEKFFEMTGTPVEQWVNLATGHLVGRAGKWFRNLGIPWHYINWPQFYLMISDRFTEANAHEAVEQLQNVRQTGSVMHYIDKFEDSVALVKRDHPYLIEYYILSCFIGGLRADIKHDHKCRTGKVIHMMEEVEDEEEESGSPEENQEGEYQTAPGSPAKKEDDNEEQLMQISTHAIQGTYGINTFSLITYVKGRKVVALVDSGSTNTFMNYEFALRSGCEIIEFDHNRVMVAGGGILNSTAKTEVIQYKVQGYLFVHTLKTLEMENVPVPDSVATILAGFAEVFAEPKGLPPRRECDHAIPLKMGAEPPNQRPYRVPHQQKNAMEEIIKELLESEEIRPNLSPYSSPAVMVRKRDGSWRMCVDYRQLNARTIKNKFPMPIVEDLLDELNGAKLVRKCVLVFFDDILIYSKNLEEHEKQLQCVLSILRSHKLYAKRSKCTFAAPSVEYLGHIVSGEGVATKPSKIKDVLEWAVPVNITKLRGFLRLTGYYRRFVQGYGAICRPLHDLLKKDNFHWGPEQQKAFDQLKKIMTTCPVLALPDFSKPFVLETDACGSSIGAVLIQEGRPIAYYSKALGQRAAGSSTYEKEAIAILEALKKWRHYLLGNQVIIRIDQQSLKYMATHKLSEGIQHKLLLKLLELDYNIEYKKGKENAAADALSRRDTKEVEEKEKCYAITLVYPEWIEDVKSSYLNDAQYMKLVDGEELNEESSNFSLGAGILRYKNRIYVGSTTNIRNKLIQAFHKSAFGGHSGVKVTYHRIKKIFYWPQLKKEVEKIVSECPTCQITKAEHVHSPGLLDPLQIPEMAWTHISMDFIEGLPKSQGKDVTPYEALYGVHPPQNGEQAIPGNVTEEIRITAQQREELMLRLKDNLLRAQNRIRKFADRLRSERSFQEGDMVYLKMQPYRQNAFGLRGSLKLRAKFYGPFRILKRIGKVAYHLQLPEEAGIHPVFHVSQLKKHVGNLVVPLPNLPLVDEDGNIKTEPVAVLARRVVPRRNEPVTQWLVHWENLSPEDATWEDSAFIQATFPHFRP

SEQ ID NO: 136246 - protein, 103 aa, Oryza sativa
  unsure (1)..(103): unsure at all Xaa locations
  Clone ID: PAT_MRT4530_37844C.1.pep
TSVCTRVGRVGLRNHANHALLRRLHGRAGDQVFGXSARRDYSLFVNVYFIFTNMSNTGDNGNTGDKEKEAPDNTNGGNTASNSSGGPFLGNITTGAINPFSYI

SEQ ID NO: 136247 - protein, 1377 aa, Oryza sativa
  Clone ID: PAT_MRT4530_37845C.1.pep
MPARTRSVNSLDSVDGFDARAEILQLRREMTDLSNLRGEMGEIKDLLKSICTALPGFHSAGASTSGTAGAGGSAGTQAMAGASVSAGAQAATGTGALIAPLVPPGFSSVAPILSTGGMQSGVALPQTADETQVNSTNAIPSSQIHAGMGSVFPSTSLPPIFPIHMSGAVPSVGHVNFSIEPNTVNPNFAPIFTSAPIFTSATRTQAGHLPGGLNIHGVESQEDVGMNHYGIETNQPWRYPQMQPTARPHLNATGIHMANGGGPVWPEGPRHLFGGMPNPYADMTLRSQRLELTIFNGEDAIGWLQQCEKFFEMTGTPVEQWVNLATGHLVGRAGKWFRNLGIPWHYINWPQFYLMISDRFTEANAHEAVEQLQNVRQTGSVMHYIDKFEDSVALVKRDHPYLIEYYILSCFIGGLRADIKHDHKCRTGKVIHMMEEVEDEEEESGSPEENQEGEYQTAPGSPAKKEDDNEEQLMQISTHAIQGTYGINTFSLITYVKGRKVVALVDSGSTNTFMNYEFALRSGCEIIEFDHNRVMVAGGGILNSTAKTEVIQYKVQGYLFGKAFQLIPLKGYDIVLGADWIYEHSPINLDLKQRTLTMNKMLDKNVMGFVIEVHTLKTLEMENVPVPDSVATILAGFAEVFAEPKGLPPRRECDHAIPLKMGAEPPNQRPYRVPHQQKNAMEEIIKELLESEEIRPNLSPYSSPAVMVRKRDGSWRMCVDYRQLNARTIKNKFPMPIVEDLLDELNGAKVFSKLDLRSGKNLEEHEKQLQCVLSILRSHKLYAKRSKCTFAAPSVEYLGHIVSGEGVATKPSKIKDVLEWAVPVNITKLRGFLRLTGYYRRFVQGYGAICRPLHDLLKKDNFHWGPEQQKAFDQLKKIMTTCPVLALPDFSKPFVLETDACGSSIGAVLIQEGRPIAYYSKALGQRAAGSSTYEKEAIAILEALKKWRHYLLGNQVIIRIDQQSLKYMATHKLSEGIQHKLLLKLLELDYNIEYKKGKENAAADALSRRDTKEVEEKEKCYAITLVYPEWIEDVKSSYLNDAQYMKLVDGEELNEESSNFSLGAGILRYKNRIYVGSTTNIRNKLIQAFHKSAFGGHSGVKVTYHRIKKIFYWPQLKKEVEKIVSECPTCQITKAEHVHSPGLLDPLQIPEMAWTHISMDFIEGLPKSQGKDVTPYEALYGVHPPQNGEQAIPGNVTEEIRITAQQREELMLRLKDNLLRAQNRIRKFADRLRSERSFQEGDMVYLKMQPYRQNAFGLRGSLKFRAQFCGPFRILKRIGKVAYHLQLPEEAGIHPVFHVSQLKKHVGNLVVPLPNLPLVDEDGNIKTEPVAVLARRVVPRRNEPVTQWLVHWENLSPEDATWEDSAFIQATFPHFRP

SEQ ID NO: 136248 - protein, 130 aa, Oryza sativa
  Clone ID: PAT_MRT4530_37846C.1.pep
MDSENDMLNANNSASDDFYSCGEASPCSLAASAPSCPASRLGLSKKLEARELCRAELKLPTSLARLELVSSSSQADELAQARLVDNPTPGGGTPEDQPFERHGGSRGEEEQRGRIHGCVCAERRWEEECV

SEQ ID NO: 136249 - protein, 111 aa, Oryza sativa
  Clone ID: PAT_MRT4530_37847C.1.pep
MRASDSLATAALSNWLAAVAVTRRSRGLDGAVEYGLTAVAAEHGVGALGDGQWAPVDGVNGVDAVAGAAVDVVWEALIIAEVEAAGDAERWRQRGGMENAMEWHGSNLPKL

SEQ ID NO: 136250 - protein, 69 aa, Oryza sativa
  Clone ID: PAT_MRT4530_37848C.1.pep
MAWVREGAAPTSLARFPCHVGADQSSRWQAQCVTTSWFISSRTPWSAGGRSWSHRSAATRAVVTREAAL

SEQ ID NO: 136251 - protein, 60 aa, Oryza sativa
  Clone ID: PAT_MRT4530_37849C.1.pep
MRRMVFILFVGRVLFYCILLLSAYQEFSEFRTDGGPTPKGLTAKFNLFTHQVFQNLGMAQ

SEQ ID NO: 136252 - protein, 587 aa, Oryza sativa
  Clone ID: PAT_MRT4530_3784C.1.pep
MALSGFNSDESDSPRIDSGSGLRHPLTSADLKAFHWYGNEMFGVTSSISKYIGSNLPEAPPRGDVPERGRGGGEPEAKEREVKVVVVDEPPGAPVARLQAQRPLAPLQVTTQAPPPPMSVASGGVEPPPQVATFQPVMQTPPQVAFASLNSRVYTNGITLCVFLVHLAAATFAVGFFVFRAVKDIVQHPRSRNAQRERSLLREWLPPVEGAVALSIVLAFAWQKAVRAWPRAMVGVILWSSFGITLAVGAMLMCFSMPATVGLGVAMVMFSIGTGLYACWVTRRVGFTARVFERAVQPVDKFRGLNGPAYLMVAAGFVWISVWCVAVIGAANYRFPGLTILGLVLSLMWTAEVMRNVANLTASRVIALYYLRGMQSSVQFSFQRALSYNLGSACLGSLFVPTIEALRIVARGLNLLEGEDEFMFSCAHCCLHVMNAIFEFGNSWAFVHIAAYGRGFVQASRSTWEQFERLQGMPALVDSDITSSVCFLTGVTSGALCVALAGSWTFATHKHYTATVSLLAFFVGYLMTRIGMALPQACVGCYYVCFAENPTSRLFDPTIPERLHKMQEGADPLVPTPRFPQQHPGAA

SEQ ID NO: 136253 - protein, 79 aa, Oryza sativa
  unsure (1)..(79): unsure at all Xaa locations
  Clone ID: PAT_MRT4530_37850C.1.pep
YGHGGGVGGGFGGGKGGGLPSRCYISSLAVMGFFVAPFHMLXIQLDDTTFDAYVVGKXENAPGIVVLQGMAGGCLLDQE

SEQ ID NO: 136254 - protein, 86 aa, Oryza sativa
  unsure (1)..(86): unsure at all Xaa locations
  Clone ID: PAT_MRT4530_37851C.1.pep
LGPDRIXDHRSNAWTRRLIFKPHIIGAVQTSPGADQSSAGHRSFHLCKLNAAHSVRAYDVNFLVSVHRCVYVSSYVYILHHVHTWT

SEQ ID NO: 136255 - protein, 178 aa, Oryza sativa
  Clone ID: PAT_MRT4530_37852C.1.pep
MEGGHGQGWVTASHFVDVEREWEKRTTLYRPRVKSFWVLVRRLLCCRRKSYRPDYAAAGEEDDGEKSSLLLTSRSSLEELLVSDDADDDGAIDDAAVTCRNASLCAKKDGQAPVVVLPPPGLHHPVMARPAHGMVTTSSGGGRDGAAVQCRRRFMFGGLRRRLMMRRPWRPVLVAIPE

SEQ ID NO: 136256 - protein, 152 aa, Oryza sativa
  Clone ID: PAT_MRT4530_37853C.1.pep
SSISSSYTTAAALGRPPATALEGGGDTRVPLLPRPPFCASMEAEVVSHLATLVSLVTCCSSPPATKTRCRVAVEAGTTIGSAPGGSTPTRHCPRPPSAALGGSAPVRHRPRPPSAAPIMLRPHAPLSLVPLRHSLLAPSPRVTVLSSPPPVV

SEQ ID NO: 136257 - protein, 102 aa, Oryza sativa
  Clone ID: PAT_MRT4530_37854C.1.pep
PQEAEYMAATWGARTIGPTVPSAYLDNRLPDDASHGFHLHTPMAAACREWLDARPAGSVVYASFGSIAAPGPETMAEVAEGLHSSGSPFLWVARTTQRNGPS

SEQ ID NO: 136258 - protein, 644 aa, Oryza sativa
  Clone ID: PAT_MRT4530_37855C.1.pep
MAPPATASASASAPVSLLFLSLPLSPSSCRGLPAPHTHLPPRRLALAPARLGAALLSSLGDAQEEEEYDDEEEEELVVVGYVSGAHGVRGDVLVSPRTDFPQLRFATPGKRWLRARAAGKQQVKEFELVRGRAHTGKKSWIVTFDGVDSVDEARQIVGSAILVKVGDRPKMEEDEIYSLDLVGMRVIVKDTGKLVGTVGQVFNFGAGDLLQVMVGGTEDTVSQPNSENQGSTPSGEHVWIPFAEDIVPDIDMESREMWITPPKGLLELNARSDKRSKKERRAMEWKEKKRLQRRVIAAKKILSEMDQGHVLEGLLSGDKVQKASLAEQIGSIDFQLFRHAMHSVSRPIGSLSKDVFVKSSSSRKKLMRIPYETLLNHEENANFASELNEGAGIIQKSKAATILITNDSDTLDAEFQGLLNSFNKLMKVEETRGSIPFVIVCPAGHVGSVQNCLVENDYFGLDTQKVWVLEEMKLPIVSMSSKLNSRKILLKSPWEILQKPAGTGVIFSLLSSNKILDTLNEMGVEYVQICSLSNKPNLGHPLLFGAVSSFGADAGLMLRKSSKETEDDFDLILSMNHVNKMCRDVTKLRFSAQQEQHVHVEHVDGQWVDVQPEATNCHRLHAEVTSVLNYCSPDKVCVIEIVQQ

SEQ ID NO: 136259 - protein, 57 aa, Oryza sativa
  Clone ID: PAT_MRT4530_37856C.1.pep
MGGSSAQLPQGVMKRKGRSVILNPGRVMFSDDVTTPSPNNSFAQEVPHFEAHILNTV

SEQ ID NO: 136260 - protein, 51 aa, Oryza sativa
  Clone ID: PAT_MRT4530_37857C.1.pep
MGIMKYPRHPSITLWRPSRFWRPSKTSYAKTTLSTHLSPSDLCEKIETIRG

SEQ ID NO: 136261 - protein, 716 aa, Oryza sativa
  Clone ID: PAT_MRT4530_37858C.1.pep
MGVVEAKALHGAVEALAGSLQPHVATAFFVFSACTVALAALLAVVRLRPPWWCDCTVCEAFLTASWAGEFDNLCDWYAHLLRTSPAQTVHVHVLRNVLTANPVTVDHVLRARFDNYPKGAPFSAILADFLGRGIFNVDGDAWLFQRKLAAAELASPALRAFAARVVASELRCRLIPLLHSASREGNGKVLDLQDMFRRFAFDSICKISFGLDPGCLELSMPVSTLVEAFDTASTLSARRATVPMQIIWRLKRFLNVGDERKLRDAVRLVDALAAEVIRQRRKLGGAATGSDLLSRFMGSIDDDKYLRDIVVATAIRDEVARVTGDGNRTMAATFDKLKDMHYVHAAMYESMRLFPPVQFDSKFAAGDDTLPDGTVVAKGTRVTYHAYAMGRMESVWGPDCAEFRPERWLRDGRFVPESPYRYPVFQAGVRVCIGKELALMEMKAVIVAVVRSFDIEAIARSSRRPKFAPGLTATFAGGLPPTTWDAEASAAWDRASGKVAELVICPIYANLPAELQAKIFEPAPAGARKVVLATNIADAETPYNPRTAMESFLVAPVSRASAEQRACRSGIQVDRDSDTIGAYVCNPTTRRWASLTQPATPWPRRHDGAFIAFDPAVSQTRRLACGVVGRTPTLDLLIPESSSGEDELAPSPEERTLLLRVFSVSHAAAASASQVVGCSCQVRLRRRALTTRRRELPCSPREGERERVKEGKRRRR

SEQ ID NO: 136262 - protein, 905 aa, Oryza sativa
  Clone ID: PAT_MRT4530_37859C.1.pep
MKGLSLNSGKKRISSLLLSPVTSRIDIRSIRTLVEHTRPTAANVITIRSLCDNYFKDDGPTQPSSLTGDSSLSSSLPTVGRVHDDEQGVIVLFALLDKTGILPIDHGIIYALLLGGLVLDVDAILMLLSSNQMIFFFDRKPKLAWLAPRPGPCGGGQAEALHGAVEALAGSLQPHVATAFFVFSACTVALAALLAVVRLRPPWWCDCTVCEAFLTASWAGEFDNLCDWYAHLLRTSPAQTVHVHVLRNVLTANPVTVDHVLRARFDNYPKGAPFSAILADFLGRGIFNVDGDAWLFQRKLAAAELASPALRAFAARVVASELRCRLIPLLHSASREGNGKVLDLQDMFRRFAFDSICKISFGLDPGCLELSMPVSTLVEAFDTASTLSARRATVPMQIIWRLKRFLNVGDERKLRDAVRLVDALAAEVIRQRRKLGGAATGSDLLSRFMGSIDDDKYLRDIVVSFMLAGRDTIASALTAFFLLLSDHPEVATAIRDEVARVTGDGNRTMAATFDKLKDMHYVHAAMYESMRLFPPVQFDSKFAAGDDTLPDGTVVAKGTRVTYHAYAMGRMESVWGPDCAEFRPERWLRDGRFVPESPYRYPVFQAGVRVCIGKELALMEMKAVIVAVVRSFDIEAIARSSRRPKFAPGLTATFAGGLPPTTWDAEASAAWDRASGKVAELVICPIYANLPAELQAKIFEPAPAGARKVVLATNIADAETPYNPRTAMESFLVAPVSRASAEQRACRSGIQVDRDSDTIGAYVCNPTTRRWASLTQPATPWPRRHDGAFIAFDPAVSQTRRLACGVVGRTPTLDLLIPESSSGEDELAPSPEERTLLLRVFSVSHAAAASASQVVGCSCQVRLRRRALTTRRPACFLDFHARGEEPAPRPREARWAQYSANFSGC

SEQ ID NO: 136263 - protein, 803 aa, Oryza sativa
  Clone ID: PAT_MRT4530_3785C.1.pep
MRGVSIFTTSISFLLALTIALAEDQRSSLARGSSISTQDDTTTILVSPNGHFSCGFYKVATNAFTFSIWFSRSSEKTVAWTANRDAPVNGKGSKLTFRKDGSLALVDYNGTVVWSTNTTATGASRAELDDSGNLVVMDPAGHRLWKSFDSPTDTLLPLQPMTRDTKLVSASARGLPYSGLYTFFFDSNNILSIIYNGPKTSSIYWPNPYERSWENGRTTYNSSQYGILNQEGMFLASDKLQFEASDLGDKDVMRRLTLDYDGNLRLYSLNATNGKWSVSWLAFPRLCEIHGLCGINSFCTYMPSLQCSCLEGFEMTEPSYWSQGCRHKENITVKGDHNANNNTEQKFIFVEIPKTDFYGYDFNYTPSVALPVCKQICLNDDGCEAFAYRKGKGECFPKALLINGKKFPDPSNDIYLKFSKEASSSQLLASKPSHICKVTEKDAYPSSQMFEGSNSKFKFGYFLSSALTLLVVEVILVTVGCWATYKWGRRPEIRDEGCTIISSQFRRFSYKELEKATGFFQEELGSGGSGAVYKGILDDNRKVAVKKLNDVIHGEQEFRSELSIIGRVYHMNLVRIWGFCAEKTHKLLVSEFVENGSLDRVLSNHQSVFPVLPWSQRYNIALGVAKGLAYLHHECLEWIVHCDVKPENILLDKDFEPKIADFGLVKLLNRGPSTNILSRVHGTRGYIAPEWALNLPITGKADVYSYGVVLLELVKGNRVSRWVVDGEEEVELAVKRTVDILKEKLASGDQSWLLDFVDCRLNGEFNYSQAALVLNTAVSCLDEDRRKRPSMNSVVEILLSLME

SEQ ID NO: 136264 - protein, 203 aa, Oryza sativa
  unsure (1)..(203): unsure at all Xaa locations
  Clone ID: PAT_MRT4530_37860C.1.pep
FTFAAMDRSWMYRRTVRRHSKXYRNXVLNFINTAEEDRKRRNXDYICCQCAYCKNEXMFDSRVDVHAHLIQRGFMEGYTCWVKHGEQESLDDVAAADRSGAQNXENEDEHNMFVPSPLGGEMVDVDHDLMQDILHDVEDTAYNERDSIKFSRLVGDSETPLYAGCKAKHTKLSDTLNLTKLKASSGWTXKSFIDLWGILKAML

SEQ ID NO: 136265 - protein, 1373 aa, Oryza sativa
  Clone ID: PAT_MRT4530_37861C.1.pep
MGLAVEPPLALSRSRIRNAKSVGVLEEVQNRSVRQKGRNSFRTALAESWMVTKTHSNESIVDMEEMNEFRLDVASLKKDVADLKSLKTEMREIKGLLRELCKQKNIEETEGEKGEATTQLPQDRTVAQAADGAGPSNPNAEVRVAIETTTNAPNNELVNLWATTGGASRGNGHAGQPTQQFFTDHQTRQNMQGGNVGGHQGFTQGTGMFHGNSRVHVIDPQRNMYGGNGNHYAEAIIKGPRLEIPLFGGEEPVDWLKQCEKFFEITGTPVDQWVNLALAHLQGRAIKWYRGIGIPWQLISWPQWCAMVCTRFSAADVHEAVELFQNVKQHGQTVDQYIDKFEEYMDLVKRDHPYLQEQYLNSCFIGGLRNDIKHDVSGHKPQGLLETYWYAKNYEKAANARRMTMGLNRNRLPNQNVINQGRNFANKVPPKTNGDKKCWFCKEVWFPGHQCKVKKALNALMLEDEELEEKGEEEKEVKTREMTQENGETSPDESGTEELMYVSQNAMQGTTRPDTFSMIIQIHGKRAIGLVDSGSTSTFMDEEFALRNNCPTISTEVKRVEVAGGGELKSGVQITQVTDVSEEDANSGIPADIQTILQEFPTVLEAPSGLPPRRSCDHVISLKEGATPPNLRPYRVPHHQKEAMEKIIAELIESKEIQVSNSPYSSPAVMVRKKDGSWRLCVDYRQLNAQTIKNKFPMPIIEDLLDELNGAKVFSKLDLRSGYHQIRMSESDVPNTAFRTHLGHYEYQVMPFGLTNAPATFQSLMNQVLAPFLRKFVLVFFDDILIYSKNRAEHKQHIKFVLEVLRAHELVIRPKKCAFGLSSVSYLGHIIFQNGVATDPSKVEKIANWPIPKNVTDLRKFLGITGYYRRFIKGYGLICRPLHDMLKKEGFQWGEKQTEAFQELKQKMCSSPVLTLPDFTKEFTIEADACGTGIGAVLMQSGKPIAFFSKSLGPKAAAQSIYKKEAMAILESLKKWRHYILGSKLIIKTDQQSLKHMMKQRLVEGIQHKLLLKLMEYDYCIEYKAGKENVVADALSRLPQGKSEEEQCDAITVVIPDWILDIQRRHSGMRATYHRIKSLFYWLGLKKVVEQFIRECPVCQVTKAEHVHIPGLLNPLEVPDMAWTHITMDFIEGLPKSKGKDVILVVVDRLTKYAHFLALTHPYSVEQVVEVFMDNIHKLHGMPMAIITDRDRIFTSQLFQEVFKAMKVQLRFSTAYHPQTDGQTERVNQCLESYLRSMAFQEPHQWYSWLALAEWWYNTTYHTSLQMTPFQAMYGYPPPQINEFSVPCNVSAEARVTTEQKEAILRKLKSSLTEAQRRMKHYADRNRSERSLAVGDMVYIKLQPYRQTAFGIRGSLKLRSKFYGPFKVLERVG

SEQ ID NO: 136266 - protein, 91 aa, Oryza sativa
  unsure (1)..(91): unsure at all Xaa locations
  Clone ID: PAT_MRT4530_37862C.1.pep
SPWRRRRRLSPASSSPPSFSPPWRRRRXRXLRSAQREXGAGEARDVTGAAEEADARAADDAAAEECXFLPGPGGDLVKAXGEDGTYPVVCR

SEQ ID NO: 136267 - protein, 384 aa, Oryza sativa
  unsure (1)..(384): unsure at all Xaa locations
  Clone ID: PAT_MRT4530_37863C.1.pep
MDISYASSNRASVCSASVAALXASEPTLANEGDHAANVVVVARVKVDLTQETTDPNVPLAKKAKKCSSEVWSHXDMYEKKTVGYDGTEIVELWEKGKKYSYTSRCESNSXTTIFWSHLDNKHQIKSGQQLQDFKKSESGTXVGIYRYDEGVSLKKYYLIIIYEYPFNIVEHEYFVDLIKSLCPTFAMKSCITVRKDIFFERGXRKIMYEYFKTLSCRFCTTMDMWASNQNKGXMCIIVNWIDDNWCMQKRIIMFMHVEGHHTGNLSKEFYDSVRDWNLARKLLALTLDNASANNVCAKGLVQKLNKIQPLICDEAIFHVRCLNHIFNLVAQDDLKQISINISNIRRTVXEVGTQPTEWNSRGLRXASACQGCHVTCGLKSDHAS

SEQ ID NO: 136268 - protein, 176 aa, Oryza sativa
  unsure (1)..(176): unsure at all Xaa locations
  Clone ID: PAT_MRT4530_37864C.1.pep
MVRMAGVDREWLHSMAHVLALDTWTWPREDVPGLGRSEEDGGGANLERRQRERTTAAGGFWSGAARARRRRPRSGHGGRRRRHILAPLSSPTVLSSPPAPTPXGGILGTXRCGSGASSPSSSTTAAAARPRPPSPATVARIGAGAGVVGVEGVSARESRSASCTARSRPRISHRTK

SEQ ID NO: 136269 - protein, 115 aa, Oryza sativa
  Clone ID: PAT_MRT4530_37865C.1.pep
MADLTRTTVMVTSGCPTPRGGSGRHSGGGSGSGSGDGSGRTQPPLGPYAPTTTTRRAGAGKTIGAYHDAPTPTRQHHISRRKCTRNHPIPWAGIQDVGSEPETARYPGQASASVR

SEQ ID NO: 136270 - protein, 214 aa, Oryza sativa
  Clone ID: PAT_MRT4530_37866C.1.pep
MGWATRFLAAVCFFAAGVVFAPDVLLGARSGSGSGGGAAAAAKVAHLLCFATSWGAALWATFIGGIIMFKNLPRHQFGNLQGKLFPAYFMLISACAAVSVAAFAYLHPWKTASTVERYQLGFLLAALGFDLSNLLVFTPMTIEMMKKRHKIERDLSIGEEVGWSKNVQVAKNNPTLAAINKKFGMIHGLSSLANIMSFGSLAMHSWYLASKLEM

SEQ ID NO: 136271 - protein, 398 aa, Oryza sativa
  unsure (1)..(398): unsure at all Xaa locations
  Clone ID: PAT_MRT4530_37867C.1.pep
HYRILKLACLQMLQVTRQVDDLLQKGYIRPSSSPWGAPVIFVEKKDHTQRMCVDYRALNDVTIKNKYPLPRIDDLFDQLKGATVFSKIDLRSGYHQLRIKEEDIPKTVFTTRYGLFECTVMSFGLTNAPAFFMNLMNKVFMEYLDKFVVVFIDDILIYSXTKEEHEEHLRLASEKLREHQLYAKFSKCEFWLSEVKFLGHVISAGGVAVDPSNVESVTNWKQPKTVSEIRSFLGLVGYYRRFIENFSKIAKPMTRLLXKDVKYKWSEECEQSFQELKSRLISAPILILPDPKKGFQVYCDASKLGLGCVLMKDGKVVAYASRQLRPHEKNYPTHDLELAAVVHALKIWRHYLFGTRTEVYTDHKSLKYIFTQPDLNMRQRRWLELIKDYDLGITGNIS

SEQ ID NO: 136272 - protein, 101 aa, Oryza sativa
  Clone ID: PAT_MRT4530_37868C.1.pep
SKVASNVNKINVYTCALEGSVAEQDTEILIEGLATTMYKIDWRVFSDPIGARHLTGQTWTHVFEEVPSVKNTRTTFLLDRPICPWSMPLNQEHDHKISFQG

SEQ ID NO: 136273 - protein, 86 aa, Oryza sativa
  Clone ID: PAT_MRT4530_37869C.1.pep
ASPSHLAGALDAARPFLRGKEEQADPALPKLAAVLRAAGAGECWHKHGTFLAHLLDVHRILRLWGAPDPDARWGLYHSAYSNSYVN

SEQ ID NO: 136274 - protein, 98 aa, Oryza sativa
  unsure (1)..(98): unsure at all Xaa locations
  Clone ID: PAT_MRT4530_3786C.1.pep
MAARAQWRLLALPLAIILAADLSPGLVRHTCXSAEDYPSFPMAILYLMEAIVNDLRFQSMDLKVSDFHDCQPLMRHAVAYEFNIDVRRNVVPVHLLQD

SEQ ID NO: 136275 - protein, 240 aa, Oryza sativa
  Clone ID: PAT_MRT4530_37870C.1.pep
ARGETPVGSDDVLSSPTCAQPSWQIDQSKSLVTFAASVEACLGTKQENTKLTNSPVHDTKSTYSSSCPTGRVSFKLYDWNPAEFPRRLRHQIFEWLSSMPVELEGYIRPGCTILTVFVAMPQHMWDKLSEDTGNLVKSLVNAPNSLLLGKGAFFIHVNNMIFQVLKDGATLTSTRLEVQSPRIHYVHPSWFEAGKPIDLILCGSSLDQPKFRSLVSFDGLYLKHDCRRILSHETFDCIGS

SEQ ID NO: 136276 - protein, 49 aa, Oryza sativa
  Clone ID: PAT_MRT4530_37871C.1.pep
CYLFVMASVCDPRPRKVPSCNAIGMGNKIFKLKFVVLETNSTVCCGIMF

SEQ ID NO: 136277 - protein, 1440 aa, Oryza sativa
  Clone ID: PAT_MRT4530_37872C.1.pep
MSYAAYKMMHWPTGVDHCAAGFVTHSPSDAAAFFTAATVGPGPEGDIDSAAAASRPRRLGPSPNLVVAAANVLEVYAVRAETAAEDGGGGTQPSSSSGAVLDGISGARLELVCYYRLHGNIESMTVLSDGAENRRATIALAFKDAKITCLEFDDAIHGLRTSSMHCFEGPEWQHLKRGRESFAWGPVIKADPLGRCGAALAYGLQMIILKAAQVGHSLVGEDEPTCALSSTAVCIESSYLIDLRALDMNHVKDFAFVHGYIEPVLVILHEQEPTWAGRILSKHHTCMISAFSISMTLKQHPVIWSAANTNLPHDAYQLLAVPPPISGVLVICANSIHYHSQSTSCSLDLNNFSSHPDGSPEISKSNFQVELDAAKATWLSNDIVMFSTKAGEMLLLTVVYDGRVVQRLDLMKSKASVLSSAVTSIGNSFFFLGSRLGDSLLVQFSYCASKSVLQDLTNERSADIEGDLPFSKRLKRIPSDVLQDVTSVEELSFQNIIAPNSLESAQKISYIVRDALINVGPLKDFSYGLRANADPNAMGNAKQSNYELYGKPRFQILPQCWNPLVAAVHHQDSICWICGDHGSKVCCSGHGKNGSLSVLQQSIRPDLITEVELPSCRGIWTVYYKSYRGQMAEDNEYHAYLIISLENRTMETCIGSFLGMVLETGDDLGEVTETVDYFVQASTIAAGNLFGRRRVIQVYGKGARVLDGSFMTQELNFTTHASESSSSEALGVACASIADPYVLLKMVDGSVQLLIGDYCTCTLSVNAPSIFISSSERIAACTLYRDRGPEPWLTKTRSDAWLSTGIAEAIDGNGTSSHDQSDIYCIICYESGKLEIFEVPSFRCVFSVENFISGEALLVDKFSQLIYEDSTKERYDCTKASLKKEAGDSIRIVELAMHRWSGQFSRPFLFGLLNDGTLLCYHAFSYEASESNVKRVPLSPQGSADHHNASDSRLRNLRFHRVSIDITSREDIPTLGRPRITTFNNVGGYEGLFLSGTRPAWVMVCRQRLRVHPQLCDGPIEAFTVLHNVNCSHGFIYVTSQGFLKICQLPSAYNYDSYWPVQKFKLKTIQVPLHGTPHQVTYYAEQSLYPLIVSVPVVRPLNQVLSSMADQESVHHMDNDVTSTDALHKTYTVDEFEVRILELEKPGGHWETKSTIPMQLFENALTVRIVTLHNTTTKENETLLAIGTAYVLGEDVAARGRVLLFSFTKSENSQNLVTEVYSKESKGAVSAVASLQGHLLIASGPKITLNKWTGAELTAVAFYDAPLHVVSLNIVKNFVSFGDIHKSIYFPSWKEQGSQLSLLAKDFGSLDCFATEFLIDGSTLSLVASDSDKNVQIFYYAPKMVESWKGQKLLSRAEFHVGAHITKFLRLQMLPTQGLSSEKTNRFALLFGNLDGGIGCIAPIDELTFRRLQSLQRKLVDAVPHVCGLNPRSFRQFHSN

SEQ ID NO: 136278 - protein, 223 aa, Oryza sativa
  unsure (1)..(223): unsure at all Xaa locations
  Clone ID: PAT_MRT4530_37873C.1.pep
MVALRHRPAGGGGGGASPEARGGGGGRGRGGGGGGAXPSPATAAEAGVAFFSRARAVAGAAAGRPRAWREVLDATAFSRPESCGEARARARRNLAYFRANYALAALVLVFLGLVYRPVSMLAFLALFAAWLGLYFGRGDGEPPLACMGREVDDRVVLAALSVATVLAVALSRAGLNLLVSLVLAAAAIGAHAAFRMNVYLDERDAYDGSSFMGSSYGGYALPR

SEQ ID NO: 136279 - protein, 39 aa, Oryza sativa
  Clone ID: PAT_MRT4530_37874C.1.pep
VLNLVEDMNQRVGVIFGKFYPEVRPFFVKTIAIVGGESS

SEQ ID NO: 136280 - protein, 155 aa, Oryza sativa
  Clone ID: PAT_MRT4530_37875C.1.pep
MQIFVKTLTGKTITLEVESSDTIDNVKAKIQDKEGIPPDQQRLIFAGKQLEDGRTLADYNIQKESTLHLVLRLRGGAKKRKKKTYTKPKKQKHKHKKVKLAVLQFYKVDDATGKVTRLRKECPNAECGAGTFMANHFDRHYCGKCGLTYVYNQQA

SEQ ID NO: 136281 - protein, 150 aa, Oryza sativa
  Clone ID: PAT_MRT4530_37876C.1.pep
MASPPRIEVEKLSVEQLKALKEQTDLEVNLLQDSLTKIRSAATRLENASAALHDLSLRPKGKKMLVPLTASLYVPGTLDDSEKVLVDVGTGYFIEKTMTEGKEYCERKINLLKSNFDELVEMATKKKNIADEMGRLLQAKLRQSSPSPSS

SEQ ID NO: 136282 - protein, 155 aa, Oryza sativa
  Clone ID: PAT_MRT4530_37877C.1.pep
MQIFVKTLTGKTITLEVESSDTIDNVKAKIQDKEGIPPDQQRLIFAGKQLEDGRTLADYNIQKESTLHLVLRLRGGAKKRKKKTYTKPKKIKHKHKKVKLAVLQFYKVDDATGKVTRLRKECPNNDCGAGTFMANHFDRHYCGKCGLTYVYNQKA

SEQ ID NO: 136283 - protein, 253 aa, Oryza sativa
  unsure (1)..(253): unsure at all Xaa locations
  Clone ID: PAT_MRT4530_37878C.1.pep
MLLRSASSPLLGHAACASAAEHVGAVVVVVPVSPAAARQRGPPLCRATSEGDLMAAVSARPRALSVASSASISVEEEVEEEEEEEEDVLGAAVPLRRLLTSTGLDADTGRGREGDAAVVEEGVGGGGGGRKVCNGGGGGSGGKGDGGRRDADAHYRRMIQADPANPLLLGNYARFLKEVEGDAARAQEYCERAIVANPGDGDALALYAGLVWETTRDAXPRRRLLHPRRPRRPRRLLRPRLLRRLPLGRRGRR

SEQ ID NO: 136284 - protein, 55 aa, Oryza sativa
  Clone ID: PAT_MRT4530_37879C.1.pep
NKTILNVKNQKGGLYRSDLPPSVRPNKACRWNKPQILTFFFPCPPPPTFIQCIQT

SEQ ID NO: 136285 - protein, 162 aa, Oryza sativa
  unsure (1)..(162): unsure at all Xaa locations
  Clone ID: PAT_MRT4530_3787C.1.pep
YPNSSEKTYPRNGPFXGARVADAVVQLDGARRSGGGCLRGWRREKEELTRTNHIKNKLKRTKYVACGIFQSSTEKLLFSKTQSCKXNLEVLISPNPAKPGRIGCNFFYRCPXIYYLPDSESEVRGGGGGASHXGALPLXPPQHCPATSAGGRCQPLWRRPVG

SEQ ID NO: 136286 - protein, 310 aa, Oryza sativa
  Clone ID: PAT_MRT4530_37880C.1.pep
MEMMRMAMSPAMSSATAAAASEDEGDLRRGPWTVEEDMLLVDYIANHGEGRWNSLARCAGLRRTGKSCRLRWLNYLRPDVRRGNITADEQLLILDLHSRWGNRWSKIAQYLPGRTDNEIKNYWRTRVQKHAKQLRCDVNSKEFRDVVRHVWMPRLIERIQADAAAAGEVAAPAPVSAAATRSMSSPAGAMYLHHQQIPLAAGAMVVAPAVSSEAYHHHGCGGGGDTSCSEPSQAAVTMSPDDASSTLRSSSAAAENDTIHGDVLSGSWSELLATTTTTIAATAGLPDFDELGDFEDNLWSLEDIWLHQQC

SEQ ID NO: 136287 - protein, 391 aa, Oryza sativa
  Clone ID: PAT_MRT4530_37881C.1.pep
RSDKERNTLIKRKRGEHKPPPVSCIDTFLIKPREKKKTQKTSNQCSVKNDEEEPNCEKVKPQRVGSTPAYGFAFKCDERAEKRREFYSKLEEKIHAQELEKSNMQAKSKETEEAELKKLRKSLNFRANPMPSFYKEPPPPKVELKKIPTTRARSPKLGRSKNTSSVSTEESTVPSSRPARLSLDERASQNGVKKVPAANTVRKPQRKSLPKLPSEQTVTEQGRRAGEPATSTTAGASPERGRRDSSSGVRCFVFFTGGERSRASVHSRRRCDGRRLSCPHERRRRLLAAVVVIVFLGVPEEAGVGAEDVAVVGGGVDGAGEVGVGAVGVAGGLPDEARVEREGVAVAGVGDDGALAVLLRPRRVALHLPTAASSPDALLDDRVAWVRVGNH

SEQ ID NO: 136288 - protein, 357 aa, Oryza sativa
  Clone ID: PAT_MRT4530_37882C.1.pep
MTAMAAAAAVLVSLLLVAAAAGQQAALVPGVMIFGDSVVDAGNNNRLATLVRADFPPYGRDFPETHGAPTGRFCNGKLATDYTVDNLGLTSYPPPYLGQLAQSDNRSLLHGANFASGASGYLDTTASLYGAISLSRQLGYFKEYKTKVEAVAGGKKAAALTSESIYVVSAGTSDFVQNYYVNPMLAATYTPDQFSDVLMQPFTTFIEGLYGQGARRIGVTSLPPMGCLPASVTLFGGGSGGGCVERLNNDSRTFNAKLEAASDSIRKQHSDLKLVVFDIYNPLLDLVTNPTAAGFFESRRACCGTGTIETSVLCNQGAVGTCANATGYVFWDGFHPTDAANKVLADALLLQGLQLIS

SEQ ID NO: 136289 - protein, 420 aa, Oryza sativa
  Clone ID: PAT_MRT4530_37883C.1.pep
MAVAPPSPLSLVFVVLAAVSLSASAAAAPASVLPRGAIPTKSGYLPIPPANASLYFAFYEATEPVTPPATTPLLVWLEGGPGCSGFLSNFLQIGPYLLAGGSLSPNPFAWNRRFGLLFIDSPLGTGFSVAPSPAAIPTNQSVVADHVLAALQSLYSLEPSFRARPLYLTGESYAGKTIPAAGALIVATNPTLPEKKRINLRGVAIGNGMTHPVTQARAVELIKAERWSEAYVAREGLLKWMENASGVPSLFDVEVTTSLEAEAAALAPLLNGAEAKAALGARGDAEWKMCSAAVGAAQHKDVMKSVKPEVEALLRRGTTPTRVLLYGGIRDVKDGPVSTEAWVRELEWDGLAAFQDADRAVWRHRGGELAGSVQRHGALVNVAVYGAGHFVPFSQGRAAQEMIEDWVFGKGLFGASGGKA

SEQ ID NO: 136290 - protein, 78 aa, Oryza sativa
  Clone ID: PAT_MRT4530_37884C.1.pep
WGERERGSRGVFPPTLLHAGTAGCGGFGGGGVAWRGRSGGSGGRTGMMGGPHPSARVAAMFRRGGGSSPLYPGPAGRR

SEQ ID NO: 136291 - protein, 804 aa, Oryza sativa
  Clone ID: PAT_MRT4530_37885C.1.pep
MAAGAGDGDQRWLVECLTATLDTARDVRAFAEESLRQASLLPGLILQTAPIELLALFPSLSPLLAAMQPSPTLPLPPLLYRAEGVDGGRVSLAASLAPMSPSSNQQQSGDIIPSTIFMLENFSCQKIVIIRQLLLTSLDDSHGKIRTAIGMAVAAIGQQDWPEDWPELLPYLLKLISDQSNGCGVRGALRCLALLSDDLDDTCIPKLVPELFPSLYSIISSPHRETTFVSSFKVYQLSMIQASEDVDSVGYDSDGSERSLESFGIQLFELWISIVGNSRLAKIIAGNIKELAYYTIAYQQITEEQLQNWSRDANQYVADEDDVTYSCRVSGSLLLEEIVTAYDEYGIESVLEASQMRFHESRELKKAGSTDWWRLHEASFFALGSLSEQLCEAQLFHQFDYCRYDLDFGVFQCGMMDSGYNVRDLLEQMVTDTVGTEPVISPIILDVWAQHIADPFISIDAVEVLEAIKNAPGCLEPLVSRILPTIGSILEKPKIQQNGLAAGSLDLLTMILKNAPTTVVKAIFDTCFTSIIQIVLESDDHGEMQNATECLAAFISGGRQELLLWGGGQGRTLKMLLDAASRLLDPVLESSVSLFVGSYILQLIIHLPSHLSPHFPELIAAIVRRMQSSSITGLKSSLVVIVARLRGQRWSVFRNSNIYHLLQGYNNSLAYIMSEWSQLQNTLAEIQEQVVGDEDDCEEDSDWEEIQNGDSSIPHDMIYSASVPSNAKPSVEHLNAMAKVFDEDDDGSYDDDLAKADSLNEVKLSDFLTNIFVKLWESDRLLFEYLCQALTDSQRTAVDKVLRK

SEQ ID NO: 136292 - protein, 44 aa, Oryza sativa
  Clone ID: PAT_MRT4530_37886C.1.pep
KIFQRHPFSNSRSGHESQCLTILADEVYASALDDMPAWLEKPAV

SEQ ID NO: 136293 - protein, 33 aa, Oryza sativa
  Clone ID: PAT_MRT4530_37887C.1.pep
MGSDATYPSTMRHVTRAISASTHTATLSPRPSA

SEQ ID NO: 136294 - protein, 255 aa, Oryza sativa
  Clone ID: PAT_MRT4530_37888C.1.pep
MGLYDKGGQSGIFKIDSKEYVPLAGHLSTKSCENVCMLSRSLRALVNVTKHSRPDGKLDQLVKEVIEYDLALRAVMGKTEMLIFPSTMLPKQYQAFQGKHYLWGLFRPRKDIVGVAEEQAAHAMCLENQEGSKDGTEQVEFHGVPDPNMDTEPQDPEAAEMQDAADRNMAPPIGGSNASRANHPSMAATQPANREQIDPSLGIPQGRMFAFVAQPTPRFEQLMQELEREGALISTMPRVTYGPGCGQSQATTAKG

SEQ ID NO: 136295 - protein, 969 aa, Oryza sativa
  Clone ID: PAT_MRT4530_37889C.1.pep
MTTLQLDPPVVPARRSAATSCDLHPDETFTGFCTACLRERLAGLEASAAAASAPGRKSTSAIRSLFARPFGGGAGGSSVAGAGASLPDLRRCKSFSCGRGGDALAAAAAAAAAGTARADEPQRRSCDVRGHSTLWSLFHQDDRGRVPSSSSAADIAPPHQQPPPPPPRPFIPDDFLDEDIPVVMEHDEIMPVVEPVIVVDTSGEIETEPNVVAREGKAMKDHMDFESSQPKKPPTKDLKESFWVAASVFSKKWQKWRRKQKLKKEAAVSKAAAAAMPPPEKPSKPSFLRRRRLRGEAGSELAGGRRSCDTDPRFSLDAGRMSVDDAGFSWDEPRASWDGYLFGAGAGIGLGRAPPPLSRLPPMMSVLEDTPATIVERSDGQIPVEDDADIDPPGGSLQTRDYYLDSSTRRRRSLERSSSVRRPSFEVTEPKPAPTTIANGKESPLGGSEFYHFHHAEDLLDRGFSSNSLIEDISASLEAALSGPGSAKKPRRWRKAWSLWGFIHRRASGRRSGGPSDIADRSFSEAWPDLRVRGYNPKMQRCNSNLSARSSFSSNSGGLGSSRRSHVDVNGSSARRREEHVLERNRSARYSPPGRVDNGMLRFYLTPMRSGGGGGGGRARVAAASETVKGGTRLALIVSMRRCLALPLELRVDLGWSSADADTASHTAWRPHRRCVLSDELLASIAPVVLAAAHGHGNRPTQERTDHSGIDRNDGKDKHETAGQSSAPASAAPTKNHDEPAGVASPVSRQKRHGFRRAELGSTSTRRVQWHPARCPPEGPNARLATGRRNVSHVFGRRTSSRVPCGLHGAMLRHQSETGHIRRHGLLNAGCCFVSLPGVAWKFRFCNQSDTIKRTKQTSRTTPNFSFSMRGALILDQMARANCTHRTIPCTAEDMQWHVWHCSCMHCTVPLSHGSTVRNKADMAIVLPAEKVDRCVETFDDTSVVRPCHFSVLTKLISKHILICRSKWI

SEQ ID NO: 136296 - protein, 110 aa, Oryza sativa
  Clone ID: PAT_MRT4530_3788C.1.pep
MESGRIEGGARRQRRDEGNDKNYGELAPLTALAGQRTYSAAANREGSADKHGGAVSGVSTCRSRIGERRRGEWGCGARLREKSGDTQDRLQRDAALLKTVVTDFYNTRFG

SEQ ID NO: 136297 - protein, 80 aa, Oryza sativa
  Clone ID: PAT_MRT4530_37890C.1.pep
AWSNGELHNVRHRVRCVAGVQRVSIALFLLAPKDDVVRAPEAFVSAERPRRFRDFGYDDYRRLRQSTGEHAGEALARLAA

SEQ ID NO: 136298 - protein, 96 aa, Oryza sativa
  unsure (1)..(96): unsure at all Xaa locations
  Clone ID: PAT_MRT4530_37891C.1.pep
PPRRRDSRRRPPPPPRRRDPRSPPPSPSPSVPPRPRPPXTPTSPTPGLTTSARSADRLDLFAAASPPSSSPPPGSRTPTACAALSKYVLLLLPLCP

SEQ ID NO: 136299 - protein, 156 aa, Oryza sativa
  unsure (1)..(156): unsure at all Xaa locations
  Clone ID: PAT_MRT4530_37892C.1.pep
KEEGGRVAAYLDKAAQAVGVLDPGGGEDEGGEAAAKRSRRSALRADVVNPGVGEVGVREVGAGDGRTVANTXGGGGDGSGEGGGGEVXGGSGGTDGDGEGGGDRGSRRRGGGGGRRRESRRRGGQGQGGRGSQWTDSGEDQRRRWRGRRRGRQRWR

SEQ ID NO: 136300 - protein, 257 aa, Oryza sativa
  unsure (1)..(257): unsure at all Xaa locations
  Clone ID: PAT_MRT4530_37893C.1.pep
KIREASIVRQKNRVKKPGEKKPNLSDKKTGEKIEKRKEKPNVKKNRQKKTKSVSXQKKKRVKKLEKKRKTKGKKNRAKKQNLSDQKTGKKKVRLPSKQNKXRKILKKKSDSLLEKKKKRKNNKKGENKGIKVHKKKKKNWKKRKKREKKKNNKNKILXSPKWKKNRTSDSYKRQKKKKAKKKRTLKRTRKKRMRKEKQKREKYMVFVVSKKNKKKHARKKLLERNAPFLKNGLRKSHKKKYTVYKKTSRSLKYKHYY

SEQ ID NO: 136301 - protein, 260 aa, Oryza sativa
  unsure (1)..(260): unsure at all Xaa locations
  Clone ID: PAT_MRT4530_37894C.1.pep
MAASTSKGKGSWREKIEIALALSNIDLALTEPCPTAPVAPKYDTDHAKWESSNRKCLMVIKSSIVEAVRGAIPVCTTATEYLQRVENQFTISSKAYASSLIKSLVTMKYHGGDVREYILKMSGITSKLKKIDLVLPDDFLVHLIFASLPSEFESFAVNYNSLPENWNIEKLIAMCVQEEDRPKTRGDSANYVKNKKRNNHSQNVASPKARGKAPQVDPNPRQEVERDACRWCKQKGHFQKDCPEFLKHLLKKGEXIITFV

SEQ ID NO: 136302 - protein, 98 aa, Oryza sativa
  unsure (1)..(98): unsure at all Xaa locations
  Clone ID: PAT_MRT4530_37895C.1.pep
APWRRPRRRPPPPASSPSPPPTSPHYPPRRCHPRPPPSVHGSPPLAPAPSRRPHAPPGAAARCRPPPARAPAPPRSPRRRWPHPKSSSXPPPPPPPQH

SEQ ID NO: 136303 - protein, 158 aa, Oryza sativa
  unsure (1)..(158): unsure at all Xaa locations
  Clone ID: PAT_MRT4530_37896C.1.pep
YGSPTLLALAELGEAVGIIAVQSIEEPGTQLTLRTYHTGGGFTGGTADLVRPPFELXIQFNEDLVXPVMGSLLFLCYIEXYVTTQSQVILHSXREPHKKLDSSDQYQESXIPEIRAGTSTLHFKERGLWMAREALIPTLLSPPHTHQLLGCGEGLGIT

SEQ ID NO: 136304 - protein, 103 aa, Oryza sativa
  Clone ID: PAT_MRT4530_37897C.1.pep
MAGQIGGKETNPRMDLQSTACPIKKWRGKGRDHGWNNAYLQARSEPEMPAALAREEEACGSMAPAFPLDATRSPLLSSSSSSRFAAARREREGGGEGRRTKRN

SEQ ID NO: 136305 - protein, 65 aa, Oryza sativa
  Clone ID: PAT_MRT4530_37898C.1.pep
EQARIFAIEILVQGEILFCLFYLALQVSVDVLAYQARMAYLRAARMGEFVLTYEDKGGDWMLVGD

SEQ ID NO: 136306 - protein, 174 aa, Oryza sativa
  Clone ID: PAT_MRT4530_37899C.1.pep
MKRTRAQQPKLQEGQDGGGAAGNANPKPQRRAKQPRQPKAASAAAKKAAAAAAARESSSSSVGAGAAVTSAASSSCSSGADMAPTVPDVCGGGGGGAGYEAGAATTVEWDLDGGLSNGLSWWTFGVEEEKLLGWFPFVEEDFRCLGARGDAEMAFDDDIWRIHQIYEIPNYAAK

SEQ ID NO: 136307 - protein, 101 aa, Oryza sativa
  Clone ID: PAT_MRT4530_3789C.1.pep
GGAAEEGAPAGGPAGRKPRRAPPGPEGAGAGAGKAEIVRPPPARRRRPPGPSAQESATARGAPDGPPGEPKDPPAHDAQNPMKEGHSLLYHSYCHRVIFRG

SEQ ID NO: 136308 - protein, 488 aa, Oryza sativa
  Clone ID: PAT_MRT4530_378C.1.pep
MAVEGFEEAIKCLENLKLESGEASLEQRLPAAACGDHHTAAGAGLPPGFRFHPTDEELLLHYLGSRAAAAPCPAPIIAEVDIYKYNPWELPAMAVFGECEWYFFSPRDRKYPNGVRPNRAAGSGYWKATGTDKPILGNAADETVGVKKALVFYRGRPPKGTKTSWIMHEYRLANAAASSSSSYTSNMKQLASSSSSSSSSASMRLDEWVLCRIYKKKEANQQLQHYIDMMMDDDNDDEHNLQVQQQQQQQAQSHRMPRPPSISDYLLDYSDDLPPSTDQTPSLHLGFTAVNEGNNKRHKTMEEYYSISISTADMLHASSSTSNNKSTQINFSSIFEPQTPAAAGHQLIDEGRWPGGAWRSGPQVQTSDGRKSSGWALSVEAVELWIWGFGAAVVARFGENNGGGHWAPARSEMGSWRDKELGDFVIEMLLSMIKVLVTELLSSWLVTSIVQATWLPYVESTLDVTWQMTAVDVEHGGSDMECARVLAL

SEQ ID NO: 136309 - protein, 175 aa, Oryza sativa
  Clone ID: PAT_MRT4530_37900C.1.pep
MAAAGEEKPLPAEEIQGINDEAEPHPPRRKRNDDLLHDEEFQRVVRDIVIGPDNVPGGGHALRIIRDPATAFEELLECYRKAGLLEGQVWKRCNIFKGLEGLDNLQDEHTVAGATARRRTVSSRRAASACGYVDSGSVVRRRGSAMGVRRHVGVASAAAAEGNARVLSSGVGSAS

SEQ ID NO: 136310 - protein, 301 aa, Oryza sativa
  Clone ID: PAT_MRT4530_37901C.1.pep
MAASAAAPATVAGLLVAVAAIMAASPAGAQPSPGYYPSSVHRAMAFSRDYTNKWGPQHQTLSADQSSLTIWLDKTCGSGFKSRKSYRNGYFAARVKLPAGYTAGTNTAFYLSNNEAHPGFHDEIDMEFLGTIPGEPYTLQTNVYVRGSGDGRIVGREMRFHLWFDPTADFHHYAILWNPDAITFFVDDVPIRRYERKSELTFPDRPMWVYGSIWDASDWATDDGRHRADYRYQPFVARFDRFTVAGCAPSAPASCRPVPASPAGAGLTPRQYAAMRWAQQSHMVYYYCQDYRRDHSLTPEC

SEQ ID NO: 136311 - protein, 181 aa, Oryza sativa
  unsure (1)..(181): unsure at all Xaa locations
  Clone ID: PAT_MRT4530_37902C.1.pep
MEQPTIQNLFAPRADLCEPSCSSKPILSDGYEISPDFIAMIQEQTFSGSIGENLYLHLRDFELVCSCLSIVGMTHETLKWKLFPFXSLRDEAKQWYTLSVRKFHGEXELKCKFCLAFFLLTRVINLXLDILSFXRNEKESLAAAWAKFSLLTQSGPYSSLPDHVLLQHFRYPSAQPSASVA

SEQ ID NO: 136312 - protein, 103 aa, Oryza sativa
  Clone ID: PAT_MRT4530_37903C.1.pep
LHPPPFPPFFPPLIPAPGPDSPAAPRGFSPPFRKTPPPRDRPWFPPGLRVLSTPASPPPVVKLYRCPPPPHFCSPAPLNNGPPPCLFIKAPPPLKKIYLPFDF

SEQ ID NO: 136313 - protein, 52 aa, Oryza sativa
  Clone ID: PAT_MRT4530_37904C.1.pep
MEALMSLTPRLEEGRLADRAREGGAVVLTGQEGRYTTRSDHGSSVPSGCRCA

SEQ ID NO: 136314 - protein, 482 aa, Oryza sativa
  Clone ID: PAT_MRT4530_37905C.1.pep
MQHLMALHPTMAAITMQRATLLLHNPPCLSLTWMLGVHNQIRQLMKFPTIMIVQQTLNLLSKRLFFVNRTLRLSKQAKATIEPTQYGEDLLSNRRNPNALKEHLLKMTAEHRAEMANKRGKPLHADNGNVEIGNGYGVPGGGAYYAANMSSDKPKDIADKAKGADDLPEFLRQRLRARGILKDEATNNRFTIKQNVDSPVGQIKAAQELPPGWVEAKDPTSGASYFYNQSTGTTQWDRPGAPLNTMQHQAPPSSSLPENWEEALDQSTGQKYYYNTNTQATQWEPPTAVNPGVAPHAPTNAAVEMAAQNTDIWNSQMQRCLGCGGWGVGLVQPWGYCNHCTRVQNLPFQQYPSYPNNTTHSSSNKNPGNVAAKDRSSAKPPFGKANRKDHRKRNRPEDDELDPMDPSSYSDAPRGGWVVGLKGVQPRAADTTAAGPLFQQRPYPSPGAVLRKNAEVASHGKKRGMAPITKRGDGSDGLGEAD

SEQ ID NO: 136315 - protein, 53 aa, Oryza sativa
  Clone ID: PAT_MRT4530_37906C.1.pep
MASDCDKTPRITQLKAVHHSRIIVTPSKTRGMDSLATPMGLSPPLLSLVLRSP

SEQ ID NO: 136316 - protein, 120 aa, Oryza sativa
  Clone ID: PAT_MRT4530_37907C.1.pep
FVSPFFFFFSIQSTAAAILLGFRLLLFLHYSLKMRVRGKTCQCIIVTDGLQIQHFCQFLKVHYMNWQRHWRAKSRSHRSAGCHGDPHLSSRPQHNFQQSAGWLQCSSGHRFLLQPRNIKN

SEQ ID NO: 136317 - protein, 59 aa, Oryza sativa
  Clone ID: PAT_MRT4530_37908C.1.pep
RARARSRFTLCYPAGSPRDRLLAPAGSRLFILYRQEGMIFAESRPINCCWCAAKKETVE

SEQ ID NO: 136318 - protein, 254 aa, Oryza sativa
  unsure (1)..(254): unsure at all Xaa locations
  Clone ID: PAT_MRT4530_37909C.1.pep
MDISRANEGYTSCGPVVEMSWHMAGILLLGAQPWLPISGVPAVARVGSVLLFMARMGWELCHVFRPYAVVGKKLPEKYGDDAEPRAAWEVTAVILTGSPERTSLAVTAGADSFPTTCQNAALLAIGTLHQRYPDELQHSPYRYHPRRGGARDCATFRDACSEDDATIMHLARMVEAYDMARIDFHHMVXRRGLVKNNMKILELRQENLQLKKDLDAVKAQLCQLKIAQGEICCPKRRHICCSQKITTRKSTSRP

SEQ ID NO: 136319 - protein, 88 aa, Oryza sativa
  Clone ID: PAT_MRT4530_3790C.1.pep
MQYELNSDRDPNRSPTGLGGPSDGSYIFVRGVTGGGIVSPWEYGEQNARGGEGRAGAIDYFLYIDARYFARVPSTSQRLLPLDSASSD

SEQ ID NO: 136320 - protein, 288 aa, Oryza sativa
  unsure (1)..(288): unsure at all Xaa locations
  Clone ID: PAT_MRT4530_37910C.1.pep
MLGCFSRLRRPASAGAAPAPMAQSDDASTSTSAGGGGGCTAETSPCSSSSSLRCKNSGGVGGEDDDDGVGGGGAVVAENASALSDSGLSSAIASRRFFLSSPGRSNSIVDSSAHGAAVGVGAAGVAVQTYSPDPHADFLRSMEAIXAALRLDARRRGDRARLHELLFWYLALNDRRAHKYVVSAFTDLFFGITAAANVXRAMLRSLQQQQKQRWSSNQQTPASCTTIQSETRSGKSTTGQQHYTSFLTGSDADIQLLLHLSPHLNQSQLFLTGYRNLNLLRMAQVVAF

SEQ ID NO: 136321 - protein, 56 aa, Oryza sativa
  Clone ID: PAT_MRT4530_37911C.1.pep
EENYFVISPSVKKDCDTSPESRVYFFRMLLTLDLAFGPHFAGANLSCVILPLSSSS

SEQ ID NO: 136322 - protein, 34 aa, Oryza sativa
  Clone ID: PAT_MRT4530_37912C.1.pep
FWETLVRLPLCGYSLTPPVKIKQGFKSVKKGCFK

SEQ ID NO: 136323 - protein, 87 aa, Oryza sativa
  Clone ID: PAT_MRT4530_37913C.1.pep
CQGCWRVSIGHLPPPPPPPLPPPPPPPLPPPPEPPPPLPPPPEPPPPPEPPPLPPPPQLSSPCPPTALHLQIDLDLWPGLYLALLAS

SEQ ID NO: 136324 - protein, 90 aa, Oryza sativa
  Clone ID: PAT_MRT4530_37914C.1.pep
LPYILHSLVWRTSYEIKAIGSPSATLVQPTFILHVVMVLCWCEQEPQDWSTNAHGVGNCIECSSSLHDPGQDSNRSMSVLVNEIKLIGLA

SEQ ID NO: 136325 - protein, 957 aa, Oryza sativa
  Clone ID: PAT_MRT4530_37915C.1.pep
MDSSCRPPSYGPWPNMNHLHPPEFHSCCNHTYPPGYYSFRLPSPQEIPPPHLYYHGPFPQHPNAYPSYFARPPPYPVDQTAYGYDKFKSHCCGCPNHSCHGGERSNIKIEEERPEVNPDTEQRDASGSDIVRHPNYQNQAIWLPSGNMNDKENKKSMELPPQFYNGWIPVSGKWVGDVKQQDQDDQKAKQFQWPIFWMPAGYNEKRQEAKELKEVDESPKVSEEAPPSPKIKIIPLSWFENGHNDQKPSVKDESHHNERSTVKKQSAGTEHQDGREMKNIPLMPKKESEEKMPARENYKTIPVMPRKDNEENKPAGGNYRIIPVMPVKESDDKKPEASVQRDEKKASSTEMEEENGKRSNEESSKAKNSKLPPVCLRVDPLPRKKSGSGSSRSPNPKKERTVSEAKEKAHDEMNKGRAYGNETVQAASVKQMQEEQFPMSLADQKVQATGVNFDAQENVGEKNLQGSDKNTEGEAKIQGEPAKDYDTTPSINFSEVDAAVCIQSAYRGYNVRRWQPLEKLRMIKNVNEQMKDLKEQLQGIEASSKQLTVKEQVAINETIMNLLLKLDTIQGLHPTVREARKSVARELISLQEKLDCLCKQSSGESIHTNGEKEKPEAMENNFQNTDPVSAIEASEKEKAAGVDEEQGLSTINSKLLMPDAVSSCTTSERSSTMISPAAADNSMITMAATSVESSVSADKVSPVEGQVTEAAVEHAPVEKDQCEEPNTTIVDSGDSSVSLKNEELQDHDQAPSGSSIMSNSAEQPEEASDVNMQQQVENVDTTQDATEESDATPEIGMVDVTYADTENYVQSPLLQTTSKLQSTTGQNVLKEPEAAKQSDVSGEYESVLVGKQNESANNLTGDSAKEEPPLEDASVQTENMASEEASLASATPDGMKDENKNKLAEENQKLKEMLQNLLASGSDQMGVITELSEKVKTLERKLARKKRPKDMWQGSGS

SEQ ID NO: 136326 - protein, 129 aa, Oryza sativa
  unsure (1)..(129): unsure at all Xaa locations
  Clone ID: PAT_MRT4530_37916C.1.pep
VFQDISXNSRRQTSTQSHRLREILTHRFHISGQQQQWFSSIFMHRGLSTQSTLGIGLPMCKSSSHGTFLLFRPSKFSFEYLLLPPRSAPTASSARARTPGFSRRSRESKLTYACMRRHSSSIGHLIIHA

SEQ ID NO: 136327 - protein, 83 aa, Oryza sativa
  unsure (1)..(83): unsure at all Xaa locations
  Clone ID: PAT_MRT4530_37917C.1.pep
LPPTLPQRRPPPPPGPPGVPVLGALPLVGLASHADLRRRGGVVAVRGXGRSCRCAATRLVGCCTAWRRRQPSAAPSSSGRRRP

SEQ ID NO: 136328 - protein, 47 aa, Oryza sativa
  unsure (1)..(47): unsure at all Xaa locations
  Clone ID: PAT_MRT4530_37918C.1.pep
FAAKICPAASFRDXTCLIEKGPKGATSTKELWLSFWSEVHYNSLVAT

SEQ ID NO: 136329 - protein, 52 aa, Oryza sativa
  Clone ID: PAT_MRT4530_37919C.1.pep
MADFVWYGITQAKAKTYTYLVFHLGAGDETVRTEDNTDNIFTNQLIKYQEKS

SEQ ID NO: 136330 - protein, 110 aa, Oryza sativa
  unsure (1)..(110): unsure at all Xaa locations
  Clone ID: PAT_MRT4530_3791C.1.pep
EERGQATRSTRHNIYTSQHTPPDLDIRDXPRYTPSGACEGWQEESSAISDLDGFIFEEEDYSVIDYELIIHAAKSTTVRXLSQILYFLAYTMVPTISILSKYRSRDIKRR

SEQ ID NO: 136331 - protein, 104 aa, Oryza sativa
  Clone ID: PAT_MRT4530_37920C.1.pep
MAVGWGCARIREVPRLSTPFSTVAPLPSPSSPTIGSFPPCQGATATYLPPRSTLGPASRRLPGGAAVWDWLLPLPSGISPTQWRVSDFPAQQRHGCSPAQQRLG

SEQ ID NO: 136332 - protein, 63 aa, Oryza sativa
  Clone ID: PAT_MRT4530_37921C.1.pep
QANAAGRTCSLFALSLLRYFKIACFSCLHIIELTTRNTRILNYWALFELKCNKFNIRDAFFCP

SEQ ID NO: 136333 - protein, 382 aa, Oryza sativa
  Clone ID: PAT_MRT4530_37922C.1.pep
MGILIQKEGLMIGLIVSGGSLLLLLGFAAPFILISRNTYFAERMIINLEELEKATNNFDKTREVGDGGHGVVYKGIIDLHVVAIKKSKIVVQREIDEFINEVTILSQVNHRNVVKLLGCCLETEVPLLVYEFISNGTLYHHLHVDGPVSLSWDDRLRITVEVARALSYLHSAASMPIFHRDIKSSNILLDDSLTAKVSDFGTSRYISINQTGITTAVQGTVGYLDPMYYYTGRLTSKSDVFSFGVLLMELLTRKKPVGDTFDNGHNLVSHFVLVFSEGNLYDIIDPQVKEEDDGEALEVATLAIACTKFKGEDRPTMREVEMALENIASKKGLFHNGNTTASRRPDENQNSTLYMSVEGVTKEAITESTTEEEILLSSRFAR

SEQ ID NO: 136334 - protein, 248 aa, Oryza sativa
  unsure (1)..(248): unsure at all Xaa locations
  Clone ID: PAT_MRT4530_37923C.1.pep
MAAALRRTAAPMAAAAVFRLSAPPRHAARLARFLGGASAASSDAAVASGEFVPWHNGGGVLHRAASVDPTAVVEAGAVVHSGAVLGKDVVVGSGAVVGPSVSIGQSTRIWYNVVLSNCSVGEFCTLHNGACIGQDGFGFFVGDDGQLYASPXLHVKIGNHVEIGANTCIDRGRLGDYVTLGGRVAIRDHVSIASKVRLAANSSVTKDIQKPGDYGGFPAVPINEWRRQTANLRIFSKKDGGRRYYKVF

SEQ ID NO: 136335 - protein, 256 aa, Oryza sativa
  Clone ID: PAT_MRT4530_37924C.1.pep
MPLLPMTKLELGHRGEAWEPGCLRAVAGELLFTFLFVFIGVASTITAGKAAGGAGEAAAVTAAAMAQALVVAVLATAGFHVSGGHLNPAVTLSLAVGGHITLFRSALYVAAQLAGSSLACLLLRCLTGGAATPVHALADGVGPVQGVAAEAVFTFTLLLVICATILDPRRAAPPGTGPLLTGLLVGANTVAGGALTGASMNPARSFGPALATGEWAHHWVYWVGPLAGGPLAVVAYELLFMDVEDAGGAHQPLPQE

SEQ ID NO: 136336 - protein, 281 aa, Oryza sativa
  Clone ID: PAT_MRT4530_37925C.1.pep
MVGVLSNRVDRLDLAAGDHIYSWRTAYLYAHHGIYIGDAMVIHFTRATGHEIGTGTFLDMFLFSSSPATEEGPPCEKCGHLIKQQGVIMSCLDCFLDGGNPYLFDYAVSPAFFLVKARGGTCTLAASDPADIVIHRAQHLLNSGFGTYSLFKNNCEDFAIYCKTGLLVETAFSVGRSGQLASLTAAFSAVASSPLRFLTTSAGGLVVVTSGMYCVGRYVSDIGVRRDVVKVPVERLVEHWPPRDVAVAPPQESHQECQGNDVAPQECHGDGDGGCVSESLS

SEQ ID NO: 136337 - protein, 98 aa, Oryza sativa
  Clone ID: PAT_MRT4530_37926C.1.pep
MKLIAAYLLAVLGGNTSPSADDIKNILESELEGKDITEVIAAGREKFASVPSGGGGGIAVAAPTAAGGGAAPAEEAKKEEKVEEKEESDDDMGFSLFD

SEQ ID NO: 136338 - protein, 113 aa, Oryza sativa
  Clone ID: PAT_MRT4530_37927C.1.pep
MKLIAAYLLAVLGGNTSPSADDIKNILESVGVEANDERLEFLLSELEGKDITEVIAAGREKFASVPSGGGGGIAVAAPTAAGGGAAPAEEAKKEEKVEEKEESDDDMGFSLFD

SEQ ID NO: 136339 - protein, 57 aa, Oryza sativa
  Clone ID: PAT_MRT4530_37928C.1.pep
HICNVASHLRPIRICSVLISSTSGLLSHVVVLCHASSLDLVLEHVLALEFTLHARVV

SEQ ID NO: 136340 - protein, 40 aa, Oryza sativa
  Clone ID: PAT_MRT4530_37929C.1.pep
NHVMTRCKDYNNSTYQNHKKRLVHIYTKIGPSKSIRKEKK

SEQ ID NO: 136341 - protein, 1143 aa, Oryza sativa
  Clone ID: PAT_MRT4530_3792C.1.pep
MSQVRSAPELDSRRRRRDSDDESGERDLDTRRHRRRSPSSESCSSSGDDDRSRRHRHDESSRRRQRDQSHRRDRGGHDERRRRSPQRRKEPTPPPPLLPEMIPGRTGGIYIPPFRMAQMMREVEDKSSAEYQRLSWDALKKSINGLVNKVNATNVKNIVPELFAENLVRGRGLFCQSCIKSQMASPGFTDVFAALVAIVNTKFPEIGRLLLVRVVLQLKRAYKRNDKVTFLNSPFQLDMQVIAHELVALELLTVLLENPTDDSVEVHILFLMSFYVDHVFIYAISEAYGYVSYLDLSPQGLHAIFERFRGILQEGEIDKRVQFLIEGLFAIRKAKFQGFPAIRPELDLVEQEDQFTHEISLEDELDPETNLNVFRGNPNFAEDEKAYENLKRSILGAESSDDEEGSDDSSDEDAEEESDDEEDEEQMEIRDQTETNLINLRRTIYSTIMSSVDFEEAGHKLLKIKLEPGQEMELCIMLLECCSQERTYLRYYGLLGQRFCMINKVYQDNFEKCFVQQYSMIHRLETNKLRNVAKFFAHLLGTDALPWHVLAYIRLTEEDTTSSSRIFIKILFQELSEHLGIRLLNERLNDPNMQDSFDSIFPKDHPKNTRFSINFFTSIGLGGITETLREYLKNMPRLIMQKQKPASSESDSSDSGSGSDSYSSESESSSDESDRKRNKRRKKCRRGGDKVNMEEKVGGDVRVLKPLMHLLLGLVMYWVAEEMTVPVLVDVTTRALCPGADIACPEAIYLTGLHQTVGGIFRAVGYTLMGQLADEYGRKPLLLLTASTSIIPYGVLACNKSKIAVYIFLILRTLSFMIGQGTITSLAVTYTADVVDPSKRAFAFGCITGILSASHALGNGFSRFLPERWIFQVSVALLISSVIYMKISLVETLQRASSGSFEHMSFSSLVVRLPLRRWESIKENINIIRRSETLSRITYISFFYELGMIGISDVLMYYLKSVFGFDKNQFSEILMVVGIGSIFSQILVLPVIINTVGEKGVLCVGILASVAYAVLYGLAWSYWVPYLTSSLGVIYVLVKPATYAIISGEVDSSDQGKAQGFISTVKSTAVLLAPLFMSPLTSYFISEQAPFNCKGFSFLVAGFFLAISLGISFMLKPEAKCTRVAVPDQLDHEAVQAPLLAQP

SEQ ID NO: 136342 - protein, 75 aa, Oryza sativa
  Clone ID: PAT_MRT4530_37930C.1.pep
RDHPPAAVRQRMLAGERRRDDANGGHQRRRRRGGRGRRRDGDHDGDLPERRRRLEQRRSTAGATATTTARGYTVL

SEQ ID NO: 136343 - protein, 146 aa, Oryza sativa
  Clone ID: PAT_MRT4530_37931C.1.pep
MVTMHAGRHGVVVAPDASKGEEHFTVDTEHGNDEAEDEHDERQEDCSVLRPPPPMCRKGEREKGVELRPPLTRLHSPRCSPRSGSWVLRPSCRHHVNATLDEDLVRVEATSAKTGINTAEGPRLYGSDNYTNTGTKSRQLIITKRH

SEQ ID NO: 136344 - protein, 100 aa, Oryza sativa
  Clone ID: PAT_MRT4530_37932C.1.pep
RSIYCTVVYINTQIDLCVSKPQVMYKPPPELPQKVCTMGGSKGSANPRTPQETSQTWHPNQTGGSHGDTKHVCVPEGLTGESRIFLTHTDNPNKNTSLTT

SEQ ID NO: 136345 - protein, 53 aa, Oryza sativa
  unsure (1)..(53): unsure at all Xaa locations
  Clone ID: PAT_MRT4530_37933C.1.pep
IRRPRGLILPKYTCXNRIKHKYTQHYGTXASTTLRQGGAYAQHAVTLDPCVXV

SEQ ID NO: 136346 - protein, 257 aa, Oryza sativa
  unsure (1)..(257): unsure at all Xaa locations
  Clone ID: PAT_MRT4530_37934C.1.pep
MSLARGGSPRWTRSTDREGGGTPRGAHVVPTRHRRGSHAGDHAGDGTGGSDLPPGRSDGGGGSRPGARGHGSSRPGGHGAQRHYREAAXGKQRRLTASGAARRVTTARPRAARGVGARRERGGDCGGFSPGVRPARRGDEDRPRXRRRTMDGLRNHLVNKRXGVRGREEIGRGRGRRPKAAAMAMLIGXDEGGVPAADSDGGGVDEVARTTANATTSTARLGAAASGGRRAEKRRRWRAHGARAKEGTGAGDCKAKK

SEQ ID NO: 136347 - protein, 182 aa, Oryza sativa
  unsure (1)..(182): unsure at all Xaa locations
  Clone ID: PAT_MRT4530_37935C.1.pep
GGFGTRTSTNGDFSAVVFGGIQPAYAYAMGXMISXYFLTDHAXIKDKTRNYALXFXGLAXLXFLXNIGXHYXFGXMGEYLPXKIXEXILAXIXPLQIXWFEXXXXSXGAXCXHLAXNPLVXSLXGDPIALVIXXISPXLIAXXGXVXXXRLGPVXITMPPXIIVCFYAPPVXLXKXXXKSII

SEQ ID NO: 136348 - protein, 428 aa, Oryza sativa
  unsure (1)..(428): unsure at all Xaa locations
  Clone ID: PAT_MRT4530_37936C.1.pep
RGQREGALAASIWRRESTAARWRPDGERTAMGSRNPDGQRTAMERGAARGGXERGAAGVGGDVNRGGGGVMLEIGGGLAARGRERREIRAGEAWAGMGEGARLRGASCYSRRGATLLDARHVLDHMPQRREPPRAAGLRAPPAAAAASSRRTPPLRVAGRAAAAAACPAASALMVSSQLNSSDVAQRSEEWFALRKDKLTTSTFSTALGFWAGNRRSELWSEKVFGSTEIKLEDAARSAMNWGTVNESVAIEQYTSITGRSVGSLGFAVHTEANFGWLGASPDGVLGCDPDGGILEVKCPYNKGKPELALPWRAMPYYYMPQVQGLMEIMGRDWVELYCWTPNGSSLFRVPRDRGYWELIHEVLRDFWWGNVMPARELVLLGKEAEARSFEPQPKHRSTNLVIFRSRKLASEAKLLCKDIGGHVEFFP

SEQ ID NO: 136349 - protein, 105 aa, Oryza sativa
  Clone ID: PAT_MRT4530_37937C.1.pep
GPPASLLAGGGPATAAAADHGGVETAAFLKNCALCGRDLGPGKDTYIYRGEVAFCSKECRECVIEYYERKERNCSLTSIKDTPAVSGASGSDQSGASGSETVAAA

SEQ ID NO: 136350 - protein, 68 aa, Oryza sativa
  Clone ID: PAT_MRT4530_37938C.1.pep
ERREKGGKGTWRRGGQQGAAEETTGGKATRATSRRNGRRRRGASIPLREAYRTLRFLPPSLRIPSSRR

SEQ ID NO: 136351 - protein, 51 aa, Oryza sativa
  Clone ID: PAT_MRT4530_37939C.1.pep
LHISMVFLCRSLEQEEPRGHGRQCLSRDPSNSKCAKVSNSYVLLHIVQTTE

SEQ ID NO: 136352 - protein, 148 aa, Oryza sativa
  Clone ID: PAT_MRT4530_3793C.1.pep
SPWPPVCGWASLLVKWAAAHFPGPRSERPSGKPGDSGSRVSSPPPRLSLSLSLSLSPRRRRRRRRWATASFQTREAMGWPRAWLLARGFRGFRSRRPLEAIRHHSLAPMPQINYQADIVSQRDQEIQYPWLVTFVFADATDVKEPFVA

SEQ ID NO: 136353 - protein, 1773 aa, Oryza sativa
  Clone ID: PAT_MRT4530_37940C.1.pep
MPEWSQNEEGEAGVGAVESDPAAEAHAAAGITGAELVTQLVPRRPLQRLQPLELRLGRGVTVLVAARVRSGDGEHEAYVVEVVVESRRRRRRCEAGSLGLSGFRRERKESGEAQRREEAIRLDLETVGKRVDEEKGAWVFEEEDEMASDPAALRVLTEVSEHERILGSWISLVKVGGRRRGEMVTKTRSNDEIVGLEEMNEFRSDVASLKKEVKEIKDLLLELCKQKGNEGQENPVGDAATKEKSTGEAGPSRSVQVTTPSLGVQFSIEPNTMSLSAPMGQEARPQGGVSSVQTDLGQVTTVLSKPPPFIPFAPFPNQRVPFLNSAPFQTQTTVGGRVPNSNFQTQGTATSSGTGQQGVHILDHSRPGGMVYQGENQHYAEAVIKGPRLEIPLFTGEDPIDWLKQCEKFYEITGTPYDQWVNLAIAHLQGRAMKWFRGVGIPWQLIPWPQWCHMVSTRFSAANEHEAVELFQNVKQYGSTVEQYIDKFEEYVDLVRRDHPYLQEQYLNSCFIGGLRGDIKHDVCGQKPQGLLESYWYAKNYEKAANARKVALNFSRNRNQNTNFNNPGRNTNNRPQRGDGEKKEDRKCWFCKEPWFPRHQCKVKQAINALLVENEPCTEEEEDESKEKEQEELATDQIEAPKQEGAHEELMSVSFSAASGTTRPDTFSVLIMINGKQAVGLIDSGSTGTFMTHEFAVKCKCPIATSTIKKVIVAGGGELKSNLVVPEVAYKIQGVKFVNAFSLITLKGYDVILGADWIFRHSPITLDLKQRELSITKEGKLVEFQDFTKPGKHFLIDGHKMEKLIKKGAVGCVLQVNAMTEEERKEEAAVPADVQEVLSQFPGVMKEPKGLPPRRACDHVINLKPGSEPPNQRPYRVPHYQKEAMENIISDLIQSKEIRFSDSPYACPAVMVRKRDGSWRMCVDYRQLNAQTVKNKFPMPIIDDLLDELHGARIFSKLDLRSGYHQIRMAEEDIPKTAFKTHMGHYEYQVMPFGLTNAPATFQSLMNQVLAPFLRKFVLVFFDDILIYSKTREEHIKHIKAVLQVLEKNQLVVRLKKCAFGLSSVAYLGHVISSDGVATDPSKISDIMNRKEPKNVTEVREFLGMTGYYRRFIKGYGLICRPLHDMLKKGGFNWGLAQSEAFTELKGKLCTSPVLALPNFEQPFVIEADACEVGIGAVLMQAGRPIAYYSKALGPKAAAQSIYEKEAMAILEALKRWRHYVLGGELVIKTDQQSLKYMMNQRLVEGIQHKLLLKLMEYNYTIEYKAGRENLVADALSRSPKNKEEVTELCAAIAVVVPEWILDIKRSYEEDVQAHKLLSLIGTAGDPQGEYKFEAGIMKYKGRIYVGETGEIRGQLIQAFHSSTFGGHSGIRATYQRIKKLFYWPGLKKGVENHIRNCPVCQVTKSEHVHIPGLLNPLEVPDMAWTHISMDFVEGLPKSKGKDVILVVVDRLTKYAHFIALSHPYTVEEVVQVFMDNIHKLHGMPIAIVTDRDRVFTSTFFQEVFKSQKVQLRFSTAYHPQTDGQTERVNQCLESYLRCMTFQEPQNWCSWIALAEWWYNTTYHTAIQMTPFKALYGYSPPQISEFSVPCDVSQEARVTLEEKEAIVQKLKASMEDAQRRMKYYADRNRTERKLEVGDMVYLKLQPYRQNAFGIRGSLKLRGKYYGPFKVLEKVGAVAYRLQLPEEAALHPVFHVSQLKKHLGTHAVPMPNLPAVGPDGQIKTEPVAVLQRRMIPRNNVAVTQWLILWSNLTPAEATWEDASYIQKVVPNFQP

SEQ ID NO: 136354 - protein, 1298 aa, Oryza sativa
  unsure (1)..(1298): unsure at all Xaa locations
  Clone ID: PAT_MRT4530_37941C.1.pep
MEEISESSEFRLTEDAKEGENVSSWMVTKMRSNDEIVGLEEMNEFRSDVASLKKEVVELKGLRSEVKEIKGLLLELCKQKGNEGQENPVGDAAAKEKSTGEAGPSRSVQVTTPSLGVQFSIEPNTMSLSAPMGQEARPQGGVSSVQTDLGQVTTVLSTPFQTQTTVGGRVPNSNFQTQGTATSSGTGQQGVHILDHSRPGGMVYQGENQHYAEAVIKGPRLEIPLFTGEDPIDWLKQCEKFYEITGTPYDQWVNLAIAHLQGRAMKWFRGVGIPWQLIPWPQWCHMVSTRFSAANEHEAVELFQNVKQYGSTVEQYIDKFEEYVDLVRRDHPYLQEQYLNSCFIGGLREDIKHDVCGQKPQGLLESYWYAKNYEKAANARKVALNFSRNRNQNTNFNNLGRNANNRPQRGDGEKKEDRKCWFCKEPWFPRHQCKVKQAINALLVENEPCTEEEEDESKEKEQEELATDQIEAPKQEGAHEELMSVSFSAASGTTRPDTFSVLIMINGKQAVGLIDSGSTGTFMTHEFAVKCKCPIATSTIKKVIVAGGGELKSNLVVPEVAYKKERKEEAAVPADVQEVLSQFPGVMKEPKGLPPRRACDHVINLKPGSEPPNQRPYRVPHYQKEAMENIISDLIQSKEIRFSDSPYACPAIMVRKRDGSWRMCVDYRQLNAQTVKNKFPMPIIEDLLDELHGARIFSKLDLRSGYHQIRMAEEDIPKTAFKTHMGHYEYQVMPFGLTNAPATFQSLMNQALAPFLRKFVLVFFYDILIYSKTREEHIKHIKAVLQVLEKNQLVVRLKKCAFGLSSVAYLGHVISSDGVATDPSKISDIMNRKEPKNVTEVREFLGMTGYYRRFIKGYGLICRPLHDMLKKGGFNWGLAQSEAFTELKGKLCTSPVLALPNFEQPFVIEADACEVGIGAVLMQAGRPIAYYSKALGPKAAAQSIYEKEAMAILEALKRWRHYVLGGELVIKTDQQSLKYMMNQRLVEGIQHKLLLKLMEYNYTIEYKAGRENLVADALSRSPKNKEEVTELCAAIAVVVPEWILDIKRSYEEDVQAHKLLSLIGTAGDPEGEYKFEAGIMKYXRKNICIRATYQRIKKLFYWPGLKKGVENHIRNCPVCQVTKSEHVHIPGLLNPLEVPDMAWTHISMDFVEGLPKSKGKDVILVVVDRLTKYAHFIALSHPYTVEEVVQVFMDNIHKLHGMPIAIVTDRDRVFTSTFFQEVFKSQKVQLRFSTAYHPQTDGQTERVNQCLESYLRCMTFQEPQNWCSWIALAEWWYNTTYHTAIQMTPFKALYGYSP

SEQ ID NO: 136355 - protein, 282 aa, Oryza sativa
  Clone ID: PAT_MRT4530_37942C.1.pep
MVTKMRSNDEIVGLEEMNEFRSDVASLKKEVVELKGLRSEVKEIKGLLLELCKQKGNEGQENPVGDAAAKEKSTGEAGPSRSVQVTTPSLGVQFSIEPNTMSLSAPMGQEARPQGGVSSVQTDLGQVTTVLSKPPPFIPFAPFPNQRVPFLNSAPFQTQTTVGGRVPNSNFQTQGTATSSGTGQQGVHILDHSRPGGMVYQGENQHYAEAVIKGPRLEIPLFTGEDPIDWLKQCEKFYEITGTPYDQWVNLAIAHLQGRAMKWFRGVGIPWQLIPWPQWCHM

SEQ ID NO: 136356 - protein, 646 aa, Oryza sativa
  Clone ID: PAT_MRT4530_37943C.1.pep
MVSRRAMRAPEMLRWLAAAAALVALLAAAPAAGFYLPGVAPTDFGKGDSLPVKVNKLTSVKTQLPYAYYSLPFCKPETIVDSAENLGEVLRGDRIENSPYVFQMREPKMCQIVCKLTVGEKEAKELKEKIEDEYRVNMILDNLPLVVSVLRQDKNIAYQGGYHVGVKGQYTGSKEEKYFIHNHLSFLVKYHKDDDSELSRIVGFEVKPYSIKHQLDDKWDGVNTRLSTCDPHANKLVTSSDSPQEVEAGKEIIFTYDVHFEESDIKWASRWDTYLLMTDDQIHWFSIVNSLMIVLFLSGMVAMIMLRTLYRDISRYNQLETQEEAQEETGWKLVHGDVFRPPTNSDLLCVYVGTGVQFFGMLLVTMIFAVLGFLSPSNRGGLMTAMLLVWVLMGLLAGYASSRLYKMFKGSEWKRITMRTAFLFPGIAFVIFFILNALIWGEKSSGAVPFTTMFALVLLWFGISVPLVFVGSYLGFKKPALEPPVKTNKIPRQIPEQAWYMNPIFTILIGGILPFGAVFIELFFILTSIWLHQFYYIFGFLFLVFVILIITCAEITVVLCYFQLCSEDYMWWWRSYLTSGSSALYLFLYAAFYFFTKLQITKLVSGILYFGYMLLASLAFFVLTGTIGFCACFWFTRLIYSSVKID

SEQ ID NO: 136357 - protein, 90 aa, Oryza sativa
  Clone ID: PAT_MRT4530_37944C.1.pep
LVLVMVGGRSTETSTARDMNLIQKHQSVPNNLVPRKLLTQPSALGYSAPLHSFLCESNMELKCRILSIINTIEAIQVKTKDLFVHNGTVM

SEQ ID NO: 136358 - protein, 1006 aa, Oryza sativa
  Clone ID: PAT_MRT4530_37945C.1.pep
MGKERGREEQVATVRAVLGDGTPEMDIIRALHMAGDDPTRAINILLDFPHGPPPPPPPSPSPSPSPPAGKPTKPHPESTPPTKTPARSKPAAAAAEKPRPSVAPESTNGGGGGEHWWLVGSVEMAGLSTCKGRRVASGDAVTFSFPNSPVAAAAGGKSRSGRPALVSCSSEIMRFSTPRHGEVGRIPNEWARCLLPLLKEGKIKIDGVCKSAPEVLSIMDTVLLSVSVYINSSMFHGQKQSTPKAARAATEDSTFHPLPALFKLTGLSPFKKAAFTPEDLYSRKRPLETKSSAPATKLTTEKLRLSSDGNEDDHAERIVSDSELDDIIGISDSSALEERDPPDALQCDLRPYQKQAFYWMMQLEKGSSSQDAATTLHPCWEAYKLEDKYGLVILFEPFLYYNDFLKLTLGRLYCIHFRRELVLYLNVFSGDATTEFPSTLQLARGGILADAMGLGKTIMTIALLLADSSKGCITTQHSTHICEEASGLGELPVQPHDDVKKLAIPFSFSKLRKPKTPLIAGGNLIVCPMTLLGQWKAEIEAHATPGSVSIYVHYGQNRPKEANLIGQSDIVLTTYGVLSSEFSNENSTESGGLYSIHWFRVVLDEAHMIKSPKSLISLAAAALTADRRWCLTGTPIQNNLEDIYSLFRFLRVEPWRNWSLPILILPPANIEVKYCDLSETEKDFYDALFRRSKSFNVGSRGDTQEFADLNKLAKRFLHGGNGAVNGDSSLPSRAYIEEVVQELQKGEGECPICLEAFEDAVLTPCAHRLCRECLLSSWRSASAGLCPVCRKSMSKQDLITAPTDNRFQIDVEKNWVESSKISFLLQELEVLRTSGAKSIIFSQWTAFLDLLQIPLSRATENFVVPNHGYYENSCISTRHNFSFARLDGTLNLQQREKVIKEFSEDKSILVLLMSLKAGGVGINLTAASNAFVMDPWWNPAVEEQAIMRIHRIGQTKSVSIKRFIVKGTVEERMEAVQARKQRMISGALTDQEVRSARIEELKMLFS

SEQ ID NO: 136359 - protein, 124 aa, Oryza sativa
  Clone ID: PAT_MRT4530_37946C.1.pep
MAGFKLVPQGTGTSRYNMLDWSNALKVYMQAWMEGRRPKDLLVPLVYAISKKRRESLHQGKENNVWVGDLALETNPHITVALVEQLVAFMDRSPWVWAPGKCKLHAWFIILNKVWTSDRLATRG

SEQ ID NO: 136360 - protein, 126 aa, Oryza sativa
  unsure (1)..(126): unsure at all Xaa locations
  Clone ID: PAT_MRT4530_37947C.1.pep
MNTNFIVYPNYLGYNASLSGXCNGVGIMIVYTMALCHDDDIRVVFGNLSVVFRLLDIIIWGYMMRKRGGPLLVIAQYRYSSARVYSPNLLSWGGYSSVFSPSWMVMTDCRXKLGNQGWLFEAPGGH

SEQ ID NO: 136361 - protein, 82 aa, Oryza sativa
  Clone ID: PAT_MRT4530_37948C.1.pep
LLVAADRYNLQRLKLICEERLCRYIAVGTVGNILALADQHHCAGHKTQYCALCFRGAEDGRQLDIWLASRHRILSCLLPDLQ

SEQ ID NO: 136362 - protein, 121 aa, Oryza sativa
  Clone ID: PAT_MRT4530_37949C.1.pep
MSHSRSGGRRGWSCPLQALLHIQLGVETKGNPKHAFPSKETSRPDETQSDSDLPVRPATHRRSDRPSTGGRTGQHTAVRPAYSEETDKGVSVRDRVDVNDCASCGNATGLVVGAPPTPRIF

SEQ ID NO: 136363 - protein, 120 aa, Oryza sativa
  Clone ID: PAT_MRT4530_3794C.1.pep
MGGLAPSAPWRWSWSVARAVFLASLLVLASAQQQPRPPRAPEMSAVDVDAILARVCGGGSSRQAAPVPPLPLCHELMRHRGGVRRHHRRPAPPPGRDEEVDLRYGVAKRLVPTGPNPLHN

SEQ ID NO: 136364 - protein, 77 aa, Oryza sativa
  Clone ID: PAT_MRT4530_37950C.1.pep
GLVNHVLVILHHFQWGAKISYNKHTICFTQSIFKSIIYITFLILYLPKILSKLFVTGYHLMFFIPFLHFLNHCYPFI

SEQ ID NO: 136365 - protein, 211 aa, Oryza sativa
  Clone ID: PAT_MRT4530_37951C.1.pep
GSTCHAPSSTSSSTSGTSSRPTSSSNPPAVISRRTLIPPPPATATATPPAPVPAREVVVVATDRTSSWATQRKKKMMMRMKKRSAAGSLRSASILTSSSSDRPPAMIPRRIFIPPAAAAAATPPPTTVIPLPPVAVITDRSTPTIQMMMMMMRKMRSRKQRRRSRWSTTSCGASSRTSTSSRAGTTIGSRRWMRSGRSTSTPPWTRRPART

SEQ ID NO: 136366 - protein, 130 aa, Oryza sativa
  unsure (1)..(130): unsure at all Xaa locations
  Clone ID: PAT_MRT4530_37952C.1.pep
CGGGGGSGRRSRERPQWPDPCPTILSRPDPAVGGAVVEEEAAXQSGERSRWRDPRLTVRWRRRKRPAVGGEATMAGXRRLAMWWWWRRKRPTIGGEAAVAGSTPRRPDPAANDREAGRRQRPALGRGATA

SEQ ID NO: 136367 - protein, 133 aa, Oryza sativa
  Clone ID: PAT_MRT4530_37953C.1.pep
MGMEGIGEGIGTAADEEDVGAGGGGKSAPAVADGAEVGTGCGGEEAAAPAAGMRRQSTRGRSTGSGGREESAALAAAVHAGRISSEDAAARRQNMRGGGGASEEEKRSLRVWSDVFVAGGGGAKYSARMDGAD

SEQ ID NO: 136368 - protein, 127 aa, Oryza sativa
  Clone ID: PAT_MRT4530_37954C.1.pep
MAPFLRGTPSRADLATSTHPNYSSRATHRTQRQGHPSATELPVPVECAHKEEGKKGARRGRTWGQQKEQHAARMVGAHRTEAHRKNGAAPQDRDTKNLPNDVDASANEHASANTAQIAPGGADRPYL

SEQ ID NO: 136369 - protein, 43 aa, Oryza sativa
  Clone ID: PAT_MRT4530_37955C.1.pep
HASARRRRRLALAMASQLCAGTSVPQFHGLRTYFCSRCMVTLT

SEQ ID NO: 136370 - protein, 69 aa, Oryza sativa
  Clone ID: PAT_MRT4530_37956C.1.pep
NPMFRYSLNIDLNLLILFIKYCFGLFLPLMIVGHGHLYLSAFSCKSNCGPCICCNGVEVFAQSSFLAST

SEQ ID NO: 136371 - protein, 369 aa, Oryza sativa
  Clone ID: PAT_MRT4530_37957C.1.pep
MAPPCGDAAAAASAAPGLANLLIREGAGLPSRPERYPPFRPCTSDSFAPISREGDDIPPQKKSVSLRSGGGGNAAEREEGGANRNGKKEKTGAQRITGWGLREFSKIGFTKLPGPGLSRPGGKHSYCAEVTAVFTLPYPGGKPGNRGNRAVTGGMVNPGVDCFVSKKVEAKGRTTYNEIMVQTSNDEVYTSSGELIVADEIFAELKSITQNGLEFDEKNIRRRVYDAFNVLIAIRVIAKDKKEIKWMGLTNYRYEKIQKLEEVHKELITRIKNKKKLLQEIEKQFDDLQNITLRNQASQRPAESVNGILLPFLLIKTSRKARVEIEISEDSKFARFDFNGAPFTMHDDVSILEAIRRNNKGRAGLSIHP

SEQ ID NO: 136372 - protein, 238 aa, Oryza sativa
  Clone ID: PAT_MRT4530_37958C.1.pep
MNPGRPAPASFRDRTNEFRAAVESAARYASSSAAAAPSSSSGGGVGGPLDVSRGAASAHSEFNRRASKIGLGIHQTSQKLARLAKLAKRTSVFDDPTVEIQELTAVIKKDITALNSAVVDLQVLCNSQNESGNLSKDTTNHSTTVVDNLKNRLMSATKEFKEVLTMRTENLKVHENRRQMFSSSAANNASNPFVRQRPLVTRDGGLIMVGGGRRGAAAEEVKLSTGNVFAALETLKKC

SEQ ID NO: 136373 - protein, 63 aa, Oryza sativa
  Clone ID: PAT_MRT4530_37959C.1.pep
IPHAIFGPIRPTKSPGLTSASPLIHVRRRRRPPVRKPRRQKLRGPSQLWRGGPRIFFSLAALS

SEQ ID NO: 136374 - protein, 143 aa, Oryza sativa
  Clone ID: PAT_MRT4530_3795C.1.pep
MVRTGTMLRKKQRSSAVGIPCEKVTRVRILGGQLRSMVRIGTKLREELRSRRSRIPGDKIGYEMAYGGWTSCGRDLHNGLHEHAAARLGDASRASVWPGHAARQAESDSVNFMWPAVAAGFGEFVLFGFAEILIQLTFEGVFS

SEQ ID NO: 136375 - protein, 331 aa, Oryza sativa
  unsure (1)..(331): unsure at all Xaa locations
  Clone ID: PAT_MRT4530_37960C.1.pep
MVGGGRRGAAAEEVKLSTGNVFAALETLKKKKKGGDKAKGGSSSSSGRKREQQGAQPSSQQQQQQQKEVFWAPAPLTTKSWADVEDDDDDDYFATTAPPRPVWGTGHGDDGAKEEDEEDDDDAVHAALQEEVXSEDXALDDEVDDGAVDEPEHEVDDTSAEPAGKKAAVPVAPPKDTERQLSKKELKXKELAELDAVLAELGISGGSSNAAQDENNAEKKGSNQTGDGDAPAPSESKSSKKKKNKKAKEAKESQEPADGTEETASAEPDEDTTSVDVKERLKKMASMKKKKSGKESDTAAKIAAAEAAARSARLAAAKKKEKNHYNQQPVR

SEQ ID NO: 136376 - protein, 286 aa, Oryza sativa
  Clone ID: PAT_MRT4530_37961C.1.pep
MSGRDRLPRRFIEDGRGYPDIRVVDERRGYPDIRVVEDRRGYHGIRAIEDHRGYPDIHEGLVMRVAPRSHTAMPEEEIEIQGAEFRRLMADHRALAEERLALHRELQAGKDEVRHLNTIIADISAKKETYIGELVDKRRKLEAELRANESLRDEIVQLRGEIDKHLVVRKELSAKSASIMHELTREQSNKQQIPMLKAEIDALRQELVHARSACELEQKGNFQLVEQKKAMEKNMISMAQEIEQMRAELANSEGRPWAPGATYGMKLGSPEVTFPTSYGDNYNIHV

SEQ ID NO: 136377 - protein, 1367 aa, Oryza sativa
  Clone ID: PAT_MRT4530_37962C.1.pep
MPPSVATHASLLLKAAAAAAHLHPKPFFSPRAAPPRIPSAPAPPAAGGSRYRPTTTTTAAATATSATAACRWFRWPPPAQAPVRGLCSLPHSGGGGGGGEGMGSEGVGRRRRVVAPAVNGVAKDGAPQPPPPKLLTLPTVLTIGRVAAVPLLISTFYMEGPWAATATTGIFLAAAVTDWLDGYIARKMQLGTPFGAFLDPVADKLMVAATLVLLCTKPLEISLLRDGPWLLTVPAIAIIGREAVAVNNLGKWKTATQMTALTILLASRDKSLPAQDALVTSGIALLYVSAGLAIWSLVLCAESGHLAAARQIHARLVAASVTPSNFLASKLISLYSRADRLRDARRVFDSIPQPSLFAWNAILISLSLHSPDPSAAVRLFASSAVSPDEITLSTLLRSLAASGPALSPLVTGELHAVAFLRGFGSDLFVSNALITAYANAGDMRSARAVFDEMPRRDVVSWNSLISACARAGWYRECLDLFQEFVRVRCSDGDGVGPNGVTVTSVLHACAQLKVVDFGIGVHRFAAESGLDMDMAVWNSIIGFYAKCGRLQYARQLLDGMTRKDSISYSAMITGYMNNGHVEEGMQLFRQASARGISMWNSVIAGLVQNGRQSDVLRLLQEMIASKVLPNSATLSIVMPSVPSFSTLLGAKQAHGYAIRNDYDQSIRLVSALIDAYAKAGFLDTARKVFKLTEHRSTIVWTSIISAVAAHGEAVEALSLFNQMITAGAKPDTVTFTTVLSACAHSGKVAEARKVFNSMQAVFGISPVIEQYACMVSALSRAGMLKEAVKLVNKMPFEPNAKVWGALLNGAAVVGDVEFGRYAFDRLFVIEPKNTGNYIVMANLYSNAGKWEEAETIRSMLWGVGLEKEVPPQVKSQCLMKHQKSSIQKLKVAAISTCTDRPNEAGDSITSGNIDVNSNVQYTSPYRDEAPHLTPQPSDIRRTPSASSLHSYYLPPIQQPSAPQAQKQRRMQRQKQPQPSHIVRPSLTPNLGPLDTTTTTRNVDERREAKLGEMAATAMQCRGGERSEDGGGGGMRTVECLRGRLLAERVASKAAKEEADSLAKRVSSLSHIPYCYNLLDRKCVILFLSFFWWLVMIWSQLDELEKKLSDEVKIRNKAERRLRRAIKKLESLKILDVELSDSSIGSLSSNSCSGHRAPETEADVNNPGSSAGSCTQVNSSQEGSWCSVVSEQSPSVHCKEEEENGLDPEDAKNCGSGEEAGDHDSERTHGTLPCSRDDEPVHVPSDYGSSKSQDNQRGGAAGRLALVLVDPQPNAETGNEDDMRIDIQARKAQAEPREGDGEMEEANELAIVLVDPQPEPKAEPAATARPRNDVQSVLLALRQVKEQLRYTIERRSELVAHQELCGHC

SEQ ID NO: 136378 - protein, 122 aa, Oryza sativa
  Clone ID: PAT_MRT4530_37963C.1.pep
MSSAARHHCSGLRERLGCVQCSFCATVLLVSVPCSSVLRVVAVQCGHCSGILSAVNLPPSPVSASIELTPQMKQELDAGPPPGEYSDESSGDDREGRDAEDDAPAPAAAAVANKRTCPAVFS

SEQ ID NO: 136379 - protein, 1021 aa, Oryza sativa
  Clone ID: PAT_MRT4530_37964C.1.pep
MPPSVATHASLLLKAAAAAAHLHPKPFFSPRAAPPRIPSAPAPPAAGGSRYRPTTTTTAAATATSATAACRWFRWPPPAQAPVRGLCSLPHSGGGGGGGEGMGSEGVGRRRRVVAPAVNGVAKDGAPQPPPPKLLTLPTVLTIGRVAAVPLLISTFYMEGPWAATATTGIFLAAAVTDWLDGYIARKLMVAATLVLLCTKPLEISLLRDGPWLLTVPAIAIIGREAVAVNNLGKWKTATQMTALTILLASRDKSLPAQDALVTSGIALLYVSAGLAIWSLVLCAESGHLAAARQIHARLVAASVTPSNFLASKLISLYSRADRLRDARRVFDSIPQPSLFAWNAILISLSLHSPDPSAAVRLFASSAVSPDEITLSTLLRSLAASGPALSPLVTGELHAVAFLRGFGSDLFVSNALITAYANAGDMRSARAVFDEMPRRDVVSWNSLISACARAGWYRECLDLFQEFVRVRCSDGDGVGPNGVTVTSVLHACAQLKVVDFGIGVHRFAAESGLDMDMAVWNSIIGFYAKCGRLQYARQLLDGMTRKDSISYSAMITGYMNNGHVEEGMQLFRQASARGISMWNSVIAGLVQNGRQSDVLRLLQEMIASKVLPNSATLSIVMPSVPSFSTLLGAKQAHGYAIRNDYDQSIRLVSALIDAYAKAGFLDTARKVFKLTEHRSTIVWTSIISAVAAHGEAVEALSLFNQMITAGAKPDTVTFTTVLSACAHSGKVAEARKVFNSMQAVFGISPVIEQYACMVSALSRAGMLKEAVKLVNKMPFEPNAKVWGALLNGAAVVGDVEFGRYAFDRLFVIEPKNTGNYIVMANLYSNAGKWEEAETIRSMLWGVGLEKEVPPQVKSQCLMKHQKSSIQKLKVAAISTCTDRPNEAGDSITSGNIDVNSNVQYTSPYRDEAPHLTPQPSDIRRTPSASSLHSYYLPPIQQPSAPQAQKQRRMQRQKQPQPSHIVRPSLTPNLGPLDTTTEAHAGGRTGTAVTYRTPIPDPKSWSLGYYYYHQKRRREKGS

SEQ ID NO: 136380 - protein, 93 aa, Oryza sativa
  Clone ID: PAT_MRT4530_37965C.1.pep
MKLNTTTTLALLLLLLLASSSLQVSMAGSDFCDGKCKVRCSKASRHDDCLKYCGVCCASCNCVPSGTAGNKDECPCYRDMTTGHGARKRPKCP

SEQ ID NO: 136381 - protein, 65 aa, Oryza sativa
  unsure (1)..(65): unsure at all Xaa locations
  Clone ID: PAT_MRT4530_37966C.1.pep
MVDYPYGPWRIHLVVPGPLNMKHQVIKAMKPMNKNYXSSSRPSLTNTLLYDGKPIFNTTTVTCLI

SEQ ID NO: 136382 - protein, 133 aa, Oryza sativa
  unsure (1)..(133): unsure at all Xaa locations
  Clone ID: PAT_MRT4530_37967C.1.pep
IWSIAHNREQGYSNSFTLARGAQLYPQDTIHRHVTMPAXHVTMSSDCDKTLRITXSNHPHHAXGFTPTPTPRVGSPPMHRGKSSSWTTGHXGRPNSIMPTLATGSSTGSSYTTDQAITHSRLWXALYVFQGFP

SEQ ID NO: 136383 - protein, 497 aa, Oryza sativa
  unsure (1)..(497): unsure at all Xaa locations
  Clone ID: PAT_MRT4530_37968C.1.pep
MATCADTLGPLLGTAAANATDYLCNQFADTTSAVDSTYLLFSAYLVFAMQLGFAMLCAGSVRAKNTMNIMLTNVLDAAAGALFYYLFGFAFAFGAPSNGFIGKHFFGLKQVPQVGFDYSFFLFQWAFAIAAAGITSGSIAERTQFVAYLIYSAFLTGFVYPVVSHWIWSADGWASASRTSGSLLFGSGVIDFAGSGVVHMVGGXGRTLGRPHRGPPHWXRFDHAGRSVALRGHSASLVVLGSFLLWFGWYGFNPGSFLTILKSYGPPGSIHGQWSAVGRTAVTTTLAGSTAALTTLFGKRLQTGHWNVIDVCNGLLGGFAAITAGCSVVDPWAAIICGFVSAWVLIGLNALAARLKFDDPLEAAQLHGGCGAWGVIFTALFARKEYVDQIFGQPGRPYGLFMGGGGRLLGAHIVVILVIAAWVSFTMAPLFLVLNKLGLLRISAEDEMAGMDQTRHGGFAYAYHDDDASGKPDRSVGGFMLKSAHGTQVAAEMGGHV

SEQ ID NO: 136384 - protein, 94 aa, Oryza sativa
  unsure (1)..(94): unsure at all Xaa locations
  Clone ID: PAT_MRT4530_37969C.1.pep
FFFXXFXXFFFFFFFFFXFLXXXTXHTXXTIKIIQSCKSIILYTSKEXKKVDKKYKXGERIMNRCTXIKFTHQTNPKYIYAGKHSLNIXGTAAY

SEQ ID NO: 136385 - protein, 267 aa, Oryza sativa
  unsure (1)..(267): unsure at all Xaa locations
  Clone ID: PAT_MRT4530_3796C.1.pep
MAAAEQKGKKPRTDGAEAEPVDAALLQSIEKLQEIQDEIEKVNEEACDKVLELEQKYNEVRRPVYVRRNKIIKQIPDFWLTAFLSHPMLGELLTEDDQKIFKHLESIDVDDSEDIKSGYSITLTFSPNPYFEDTKLTKTYSFSDDEAVKVKATSIRWKKGMDIANDRAYTKKGDKRILIDESFFTWFNSEKNRSFAHGAMDEVADVIKEDLWPNPLKYFNNEFEEELELLDDDDEQYFFALDXVSDDDDEEEDDEDQGEGEEDGEEN

SEQ ID NO: 136386 - protein, 60 aa, Oryza sativa
  unsure (1)..(60): unsure at all Xaa locations
  Clone ID: PAT_MRT4530_37970C.1.pep
GPETKCPGTCMLPNRTLXPRAMDKELPDAFQLPSTMXAGXVLHHPGXGRTPSTARLASRR

SEQ ID NO: 136387 - protein, 394 aa, Oryza sativa
  Clone ID: PAT_MRT4530_37971C.1.pep
MEWTAAEMDEARSIIARLTNAYDSGTLVAGAGNGDTRHDRIVRELQAWLPWRTMDQLIGLYIELMAEEPAAAQPQYFDAGAVVDPTFDFFNDHNNFLGMPPPPVQQADDHNMNNVVADAGMNYYYGGGGAGGAMVFGGAPMGETVEQAAPPVPVVPVVMNRDDDEVNNQGGGRHRAAPTNTTRRFWTTEEHRQFLRGLRVYGRGEWKSISMNFVRSKTPVQVSSHAQKYFRRVESAAADKQRYSINDVGLNDDTAAMDGTNSYSNNNFGGWQSLAFAGGHLEPVSGGGAARQVIAPASSSAAAMNSAAQFWAPMLFNPQIQQQFMQMQAQTQQAWNDQHMMMAAAPMEGATDTNFEPAGAVNYYYYQQQQEEEEGGAYGVPADQWMMNQNNNMC

SEQ ID NO: 136388 - protein, 367 aa, Oryza sativa
  Clone ID: PAT_MRT4530_37972C.1.pep
MAEEPAAAQPQYFDAGAVVDPTFDFFIDHNNFLGMPPPPVQQADDHAMNNVVADASMNYFYGGGAMVFGGGAPMGETVEQAAPPVPAPVAVAPVVMNRDDDEVNNQGGRRHRAAPTNTTRRFWTTEEHRATLIYSSYDFDDPLITNLLITMTRMKKNMYFLCFTMQFLRGLRVYGRGEWKSISMNFVRSKTPVQVSSHAQKYFRRVESAAADKQRYSINDVGLNDDTAAMDGTNSYSNNNFGGWQSLAFAGGHLEPVSGGGAARQVIAPASSSAAAMNSAAQFWAPMLFNPQIQQQFMQMQAQTQQAWNDQHMMMAAAPMEGATDTNFEPAGAVNYYYYQQQQEEEEGGAYGVPADQWMMNQNNNMF

SEQ ID NO: 136389 - protein, 374 aa, Oryza sativa
  unsure (1)..(374): unsure at all Xaa locations
  Clone ID: PAT_MRT4530_37973C.1.pep
QSVAGVGRRRRQVTSATTSRWRRCRRCRARACTSSPSRRLKQATNGYDEKLLLGSGGAGKVYLGXLPSGQRVAIKKIYRSKKVSEFYAEVAVLAKLRHRNLTTLVGYCLGGDHHALVYEYLGGGNLWRALFQGELAWRRRLEVAVDVAEGLAYLHGFREGAVVHRDVKPTNVLLSESGAAKLSDFGVSRIVPEGGTHVSTEVRGTRGYVDPESFSAGHVSEAGDVYSFGVVLLELATGMRAVVPTPSGGAESIVHAAHWAVAQAGGEAGAAAESMVDERLGADWDRPTVRAVFALACRCVRPYKHERPAMGEVLAELKAMLADYTARGGGADRSEASTSSSTATPDLASLPSTSKHNRREKGRGDAAAAHHHSA

SEQ ID NO: 136390 - protein, 50 aa, Oryza sativa
  unsure (1)..(50): unsure at all Xaa locations
  Clone ID: PAT_MRT4530_37974C.1.pep
XGKKTLTKLLWPPFKQTTKFFFFFPQIWPLTFLKSFGSKYQGEPLTLFFP

SEQ ID NO: 136391 - protein, 68 aa, Oryza sativa
  Clone ID: PAT_MRT4530_37975C.1.pep
GAGCSRNPRDRAASASCRSTSPPSVPDLATAVPDLPLPSLEASPPSLPDAGKRHFPTRCGKACRLIPG

SEQ ID NO: 136392 - protein, 385 aa, Oryza sativa
  Clone ID: PAT_MRT4530_37976C.1.pep
MAFFSFPPSLFHPLLLSSSSARATSSSSTPTATDAKCHCCKRKRLKGMMPNWWWIGGAKLRPGRRAQRQSHLWWRLSTMVARVSAMHGQRSAVGGGACARGGGRVTVVDWGSGAATTVALRAVVPAVEVGRWATTASPARVDEAGRREDNGVVGSDMRMRGGHGGCRSEEKESPDRDVEEKAERLGMKLNLTRRWVHDARRIRPRLKEFISDQTYTCGSSRIDEARICVALKREDQYREDLTTTGRLKLWKTHLGRGVLQLVFDRRSYLPGVQNLMIGAKRWFGGVAHRHKTGGMVQLCGDQGDVVSIRLGRRCARLSGHGLDQVKFKMEDGGEHGLQGVNDVTARKKSNFAWQDDCGDMREGGALLQVESRGRTCRDSGSLLLR

SEQ ID NO: 136393 - protein, 329 aa, Oryza sativa
  unsure (1)..(329): unsure at all Xaa locations
  Clone ID: PAT_MRT4530_37977C.1.pep
MKMQIYDGSQVWDAGLTVEALVATDLVKELGPTLKRAHSFLKNSQLLDNCPRDFNRWYRHISKGGWTFTTADDGWQVSDCTATALKACLLLSRISPEIVGEPLEIDAQYDAVNCLMSLMNDNGGFSAFELVRSNTWLECLALFKKLHPGHRKEEVENCISKGANFIESSQRSDGSWYGSWGICFTYATWFAVTGLVSAGRTLGNSATVRKACDFLLSKQLPSGGWGESYLSCHDEVYTNLKGNRPHGTHTAWAMIALIDAGQAERDPVPLHRAAKALLNLQLEDGEFPQQXLTRTVDKXAMASYSQFRNIFPIMALTGYRRRVLLAGNI

SEQ ID NO: 136394 - protein, 89 aa, Oryza sativa
  Clone ID: PAT_MRT4530_37979C.1.pep
GKRLGKILGGKTAATKFPSLKGTTISPLLLGGKANPQLVIQGSITNPPFPNNGQTAYHGGEGWAIFFPFFGTKKKARGPLQKKQFAQRP

SEQ ID NO: 136395 - protein, 259 aa, Oryza sativa
  Clone ID: PAT_MRT4530_3797C.1.pep
MAAAEQKGKKPRTDGAEAEPVDAALLQSIEKLQEIQDEIERVNEEACDKVLELEQKYNEVRRPVYVRRNKIIKQIPDFWLTAFLSHPMLGELLTEDDQKIFKHLESIDVDDSEDIKSGYSITLTFSPNPYFEDTKLTKTYSFSDDEAVKVKATSIRWKKGMDIANDRAYTKKGDKRILIDESFFTWFNSEKNRSFAHGAMDEVADVIKEDLWPNPLKYFNNEFEEELELLDDDDEVSDDDDEEEDDEDQGEGEEDGEEN

SEQ ID NO: 136396 - protein, 160 aa, Oryza sativa
  Clone ID: PAT_MRT4530_37980C.1.pep
PRAAGWDKGEGGFLAPILELKLGVGGTSYADFIRSVHLPMQLSQVDPIVASFSGGAVGVISALMVVEINNVKQQEHKRCEYCLGTGYLPCARCSSTGTLVLTEPVSTFSDANLKIYYATCLPRTARCPNCSGAGKVMCPTCLCTGMAMASEHDPRIDPFD

SEQ ID NO: 136397 - protein, 369 aa, Oryza sativa
  Clone ID: PAT_MRT4530_37981C.1.pep
MLCSARMLACSGLGGPGGRLRPSPRPGAYADRLRPPLPARRWRVASSAAASGGSPDLPSSSSSSSPPPTPAAASFGSGDEQAAGSPGFCIIEGPETVQDFEKLDLQEIQDNIRSRRNKIFLHMEELAPLLVNLYSRYCDIKQIRRLRIQQRIKNVELGISVDVPEGELPDFPSFIPFLPPLSAANLKIYYATCFTLIAGIMVFGGFLAPILELKLGVGGTSYADFIRSVHLPMQLSQVDPIVASFSGGAVGVISALMVVEINNVKQQEHKRCKYCLGTGYLACARCSSTGTLVLTEPVSTFSDGDQPLSTPRTERCPNCSGAGKVMCPTCLCTGMAMANNSIDRRAWGSRLTNRATLHILVMCGANRLN

SEQ ID NO: 136398 - protein, 89 aa, Oryza sativa
  Clone ID: PAT_MRT4530_37982C.1.pep
ASDVKQQEHKRCKYCLGTGYLACARCSSTGTLVLTEPVSTFSDGDQPLSTPRTERCPNCSGAGKVMCPTCLCTGMAMASEHDPRIDPFD

SEQ ID NO: 136399 - protein, 335 aa, Oryza sativa
  Clone ID: PAT_MRT4530_37983C.1.pep
MSSGAASPPPPPPAAAEDGRVTSHVDPFLVEALDNPRHRLMVLRMAMDIQKFMQNPQLHEFEFQHFPTSYLRCAAHRVAQHYGLETTVADSLVDGSVSKIVAKKTSESKLPVIALSEVPSKQARNEHEAAEKLKFVICPRPKAFQNGAGDAGAKNNAARTVEERIEEYNKARARIFNGSISDIEGTSDLGALSVARDEPINVEPPVDENKVNTMNSRSRVAVFKDTEKDRSDPDYDRNYKRYVRGPVHDFNVSPGGFNFVVPQFMQYGVGFMQSANMSRNQPSVYFGQPDLSMGSSSGTAVYPQWPTPAMIYPHCYDNLGHMISQVPVYQSFNHG

SEQ ID NO: 136400 - protein, 69 aa, Oryza sativa
  Clone ID: PAT_MRT4530_37984C.1.pep
MTVKPPSLAASHFFLPIHTVSNTCLAFAPQCQSTMAWHRMNGVSPRRLAASSRHCAHAVHGHPLAMRCP

SEQ ID NO: 136401 - protein, 161 aa, Oryza sativa
  unsure (1)..(161): unsure at all Xaa locations
  Clone ID: PAT_MRT4530_37985C.1.pep
VNVHRGIHVLSAKATDAYESARTKVANFVNAANSREIVFTRNATEAINLVAYSWGMSNLKQGDEIVLTIAEHHSAIVPWQFVSQKTGATLKYVGLTKEGVPDIEQLKGLLSNKTKIVVVHHVSNVLGSMLPIEDIVTWSNRIGAKVLVDACXSVSYMPVDV

SEQ ID NO: 136402 - protein, 84 aa, Oryza sativa
  unsure (1)..(84): unsure at all Xaa locations
  Clone ID: PAT_MRT4530_37986C.1.pep
SLADYNIXQKESTLHLXMGLRGDMHYLRERPSAGKTISSXLRGSDTIDNVMAKIQDREGIPPDHQRLIFSYKHLXDEHTLADYN

SEQ ID NO: 136403 - protein, 227 aa, Oryza sativa
  Clone ID: PAT_MRT4530_37987C.1.pep
MAAEMEVDDVDVHEVPECIASMIDRGSVESHRLFLARRTAMEMLRDRGYSVPEAEIARTLPEFRAWWAEKPGIERLAFTTTLVSDPSKKVQLVFCPPEPVKIATIREIYLQTKEENLSRLVLILQSKILSRAREAIKEIFKFKVDIFQATDLLVNITKHVLKPKHEVLSADQKAKLLKEYNVEDSQLPRMLETDAVARYYGFDKGTVVKVIYDGELTGKRVAYRCVF

SEQ ID NO: 136404 - protein, 46 aa, Oryza sativa
  unsure (1)..(46): unsure at all Xaa locations
  Clone ID: PAT_MRT4530_37988C.1.pep
RNQMYTKAILNLDKSICRYKVSGKCVCGLESXTAHTLVACXSVRAF

SEQ ID NO: 136405 - protein, 125 aa, Oryza sativa
  Clone ID: PAT_MRT4530_37989C.1.pep
MTTELEGSGSATLAPGGVTTIAGSDACGGGKNTISVGFSCSSTYSADLYMPFSTSVRLALPTGPLQRMWETTVLSCMDVEEKEKSSTTHMPIGLLIRPNADQPSVVCPSHANTHLRPHRQDITPI

SEQ ID NO: 136406 - protein, 125 aa, Oryza sativa
  unsure (1)..(125): unsure at all Xaa locations
  Clone ID: PAT_MRT4530_3798C.1.pep
MSGERCAGRPLFGGAISSTFPVRFQEVFVDPARDESLIFELLDLKGEVEDGGSALWFLRDIANEQDAGDNLVVEHSGTIELGGLRFGDAPAVAGTAVGQLAISKGRQGREAQNIVRXYLANIRLK

SEQ ID NO: 136407 - protein, 45 aa, Oryza sativa
  Clone ID: PAT_MRT4530_37990C.1.pep
LPIQFYCTGGVCLHLTTLTGGMELESARKSGTPAGILGTHLYKDN

SEQ ID NO: 136408 - protein, 160 aa, Oryza sativa
  Clone ID: PAT_MRT4530_37991C.1.pep
MAPVSISDERAVSVSAERVWKVFSDAPAMPKVCAGFIDAIEVEGDGGAGTVTTMKLNPAVDDGGSFKTRVVARDNAAHIIKSEVLDVPAGSKVGKLKSHVTETKIEAAGAGSCLAKINVEYELEDGGSLSPEKEKLILDGYFGMLKMIEDYLVAHPTEYA

SEQ ID NO: 136409 - protein, 382 aa, Oryza sativa
  Clone ID: PAT_MRT4530_37992C.1.pep
MEAETECKVPGVYSETGIPVEDPAPGLNSDVSKKDAPPAVAAPGPGLYFEIGKKARDLLYKDFHTDQKFTLTTYTNNGVVSITDFRMLFTGSFLVDILARLLSIVCVWSICQVDVCYDVSTGFFVRWMVGKSVRFRFGDRRIDWVYLFGPWVVITAASTMKDEAIFSEIQTKLKSNNVMLDVLTTITTEDLGVSGLKQIVSLPFPYQTAGKAELQYLHDYAGISLGVGLTSKPLVNLSGVFGNKSVAVGADVAVDTSTGDFTKYDAGLTINNSDLAADLTLNNKGDSLTASYYHLVNKESGTAAGAELTHSFSTKENTLSFGMQHALDPLTTVKARYNNHGMVSALIQHEWRPKSFLTLSAEVDTKAIDKASKVGLSLVLKP

SEQ ID NO: 136410 - protein, 73 aa, Oryza sativa
  unsure (1)..(73): unsure at all Xaa locations
  Clone ID: PAT_MRT4530_37993C.1.pep
WKIVNNKQKKNERRGILNHSKPYCRIIGGRRIEKGKKKLKKQSAYIILPTXXKTXXPSSKITYXLRDXXDQSE

SEQ ID NO: 136411 - protein, 49 aa, Oryza sativa
  Clone ID: PAT_MRT4530_37994C.1.pep
NTCLRAEHWCKPVGVLLSWSSNGCYPTAQGDGGSCDNTLLRARRDGIAL

SEQ ID NO: 136412 - protein, 642 aa, Oryza sativa
  Clone ID: PAT_MRT4530_37995C.1.pep
MKMVPIHMLMLLVATAFSWWGTRRKNITRSISPVWRGISKMPMEDVESVGSCSPCNSMIYNESFVHTEDQTQHFQGSPELKTSRGKMTMALLLVSYVLANFAFFGVAVGLVVFLRQVLHQENAEAANSVSMWMGTVYIFSLFCAFLSDSYMGRYITCIMFQFIFIVGLMLLSLLSWFLLVEPPGCGDGGGLRQCAAPSRRGVAVFYLSIYMAAFGNGGYQPSVATFGADQFDDADPGERRRKQAFFCLFYLSLNVGSLFYNSVLVFFEDRGRWVAGFWVSTAAAALALALFLLGTPRYRRVRPAGNPLTRIAQVFVAAYRKRHIVPPPGDHLHEVDGEGSAIRGVRKLAHSDQLRFLDKAATATEEDYHAGNTQDPWRLCTVTQVEEVKCVVSMVPIWICSIVYSVEFTQMSSLFVEQGTTMNTDILGLFNAPAACMSVFDVAGVLATLAFSHYVLVPAAARLTKNPRGVGELKRMGAGLVIALLGMVAAAVVEVHRRRRSGAGGRAMSVLWQAPQYAVMGASEVFVYVGQLEFFNVQSPEGVKSLGSSLCMASISLGNYASMVMVSAISGVASRRRTGGGTAGWILAELDRGHLDRSFITLAVLSAVDLVVFIVFARLFKGIEPEVEGISSSPQDDHIYIV

SEQ ID NO: 136413 - protein, 137 aa, Oryza sativa
  Clone ID: PAT_MRT4530_37996C.1.pep
RPDLISISPPVSPKTTRRQHPTFPHGIRGGEIRPPIDDGHAPRRPSTPTRRSSCPPPSTTTTITRPSGRTSPTTTICICNLWVDYNLYIDQMDYYHPPEYPYVDNHNLELPCRTTTAYMTTSTIDLLISTTHHKLIE

SEQ ID NO: 136414 - protein, 79 aa, Oryza sativa
  Clone ID: PAT_MRT4530_37997C.1.pep
MAAVGPNRGDSRKTEWARRAARVWAVGYSRRSVMVRRLKTSEGRATMGEDNGMCGKAREISVVVVCGRGDDAAHGGGAR

SEQ ID NO: 136415 - protein, 83 aa, Oryza sativa
  unsure (1)..(83): unsure at all Xaa locations
  Clone ID: PAT_MRT4530_37998C.1.pep
CRGXPGLPYXDVIRLLXDNXALXIAAYQVXGEXSXIXAGGXLNXIDXKKVMMXXLXXXXRXGXDILLTXFARXXAHVLCGMRS

SEQ ID NO: 136416 - protein, 64 aa, Oryza sativa
  Clone ID: PAT_MRT4530_37999C.1.pep
MQPVAACWKRCRFAGIVAATITPPESPPPPLLFARKRKGIGEMILGLGLGCRIFFHVGINRDRP

SEQ ID NO: 136417 - protein, 125 aa, Oryza sativa
  Clone ID: PAT_MRT4530_3799C.1.pep
GERIVATTPLSPRRLCRTALKVGNDRFLPVGPGGMDRIGSRSKNRGKEGRGGIEEDGDDEEGGEGEEVLGRLLPPRLGCRAPGAHDVDAAPGRLQAKVPLQLQPRRRPRRRRLLARQLLLPFHPI

SEQ ID NO: 136418 - protein, 64 aa, Oryza sativa
  Clone ID: PAT_MRT4530_379C.1.pep
LKLSSPAARAIGRVSWLDYCERFEIGLISFRGVPSAPPGVPSKSRPRAQIARELSDSGIHGRPE

SEQ ID NO: 136419 - protein, 424 aa, Oryza sativa
  Clone ID: PAT_MRT4530_37C.1.pep
MKACTMHPKIHDFIATDVSSFMDTCLPLDLAHRFSINSGVTLEGPSRSSDILSLLDSLPGSDQWQLLKVLDLEGCTGLKNKHLKNICKILLLKYLSLRNKGVTQLPKKIEKLQYLETLDIRQTKIRAFAKKSFFLPMLKHLLAGNKGSPSRNDNNSHGFEESPATVELPSGTRRMERLEILSHVDASNNVNDLIDIGQLLQLRKLGVILDGKKAGNLALLFKHIEELHGCLLTLSIQINHPATSEGTVPETDKLATLVSPPKLLQSLNISGITSGLPDWITELDQLTKITLSNTYLGEDAIRVFGKLRILRCLRLRHKSYTGTKLTFNTEEFHHLKSLLVDGCDITNIDFVNIGAAPKLEMIIWSFDSIDALPLSGIEHLPKLKKLELNGDGDMAAMRRIRDAHPNCPVFKHNSSHQREEAGTD

SEQ ID NO: 136420 - protein, 397 aa, Oryza sativa
  Clone ID: PAT_MRT4530_38000C.1.pep
MALALRALPRRLLRHPLLHSMPLSSSPPDPRELLRIERILSTPTSSSTPPPQRQEGPRPAATSSLHETAGPTAAESASLLRRGLPTSSKLPHHHHHHRHRQLRDELRGLRLGEREIRAALASDAEGLLLSMSPGEPTRLVGLVRDELRCRAAVRDRVLAGGALAAAVAARRRVELLHARGLTRRDALRVLAAEPRAILYGLEDVERKVDFLVSRMGFEIGWLVEFPEFLGVNLERRIVPRHNVVEHLRSIGGLGDPIEMKHYVRFSRQRFYNMFVKPYPECERIFGGIVREKGKEVRRWRHPVGLWKLFKPVKYESTEEDVNNMKMQLQDKKYPFFSLKGLRVLQESKATPTSDATTEAIDFEESEFTRSGSMGFELNDYPGSGANNRHSPHSEGNR

SEQ ID NO: 136421 - protein, 67 aa, Oryza sativa
  unsure (1)..(67): unsure at all Xaa locations
  Clone ID: PAT_MRT4530_38001C.1.pep
RTGRGXPSPPSQVIAVVSIARSSPGHGCRLRRGVYAAAMPHLSSSARRRVSLEVASPPELLEASCRI

SEQ ID NO: 136422 - protein, 250 aa, Oryza sativa
  Clone ID: PAT_MRT4530_38002C.1.pep
MARSAFFFHCVAAVAACIAATAAALSGTATFYGGSDASGTMGGACGYGNLYSTGYGTNTAALSSALFNDGAACGECYQITCDQSNSKWCKAGTSVTITATNLCPPDYSKPSNDGGWCNPPRQHFDMAQPAWEQIGVYRGGIVPVNFQRVSCTRKGGVRFTINGNSYFELVLITNVGGPGSIKSVQIKGTKTGWVTMSRNWGANWQANNYLNNQAISFSVTSTAGKTLVFEDVAPSNWQFGQTFTSGVQFY

SEQ ID NO: 136423 - protein, 339 aa, Oryza sativa
  Clone ID: PAT_MRT4530_38003C.1.pep
MAPSSTSSEGASDEWLPPSRRPELADVVPVTQDDGPHPVVAIAYRDEFREVMDYFRALYFAGERSVRALHLTAEVIDLNPGNYTVWHFRRLVLEALDADLREEMDFVDRIAECNPKNYQIWHHKRWLAEKLGPDIANKEHEFTRKILSMDAKNYHAWSHRQWVLQALGGWETELQYCNQLLEEDVFNNSAWNQRYLVITSSPLLGGLAAMRDSEVDYTVGAILANPQNESPWRYLKGLYKGENNLLMADERISDVCLKVLKHDSTCVFALSLLLDLLQIGLQPSDELKGTIEAIKNSDPEADEAVDADLATAICSILQRCDPLRINYWSWYRTTISSQT

SEQ ID NO: 136424 - protein, 146 aa, Oryza sativa
  Clone ID: PAT_MRT4530_38004C.1.pep
MGLNTSPPISWAALRPIQTRPYSSHHPPVSLAPPRRHPATRRGGGAPASHAGTTSLGFGPTRTRQHRRPSTRQSGENPLSLSDGPGSAAAGDYRRRDRCEIGRRRRALLCSEANREEVSGDRRETLTICSLMVFPSISIVRILKST

SEQ ID NO: 136425 - protein, 669 aa, Oryza sativa
  Clone ID: PAT_MRT4530_38005C.1.pep
MLRAESIRPNARRLTGQDAAATGDDRQDTADVGASAHTVACRLGRDAAGDGGGGEDDGAVERQGATALAEETGAVERRGAAARRGLAYGAAAGCGRMRPEARTTPPAAIKPLPAAHLSHRSSSPPPSAPCMSSCSSSLSQCRANDDYQGLRGRAHDDDVGGGGTAQRSAFHTICRVLHYLKRFLVMNPEQPDSARPAVDYLDMDAQLLGRFPEWEGNGVADVPFEMYAYRVMERDKSNACRDRSSDSGSDDNSLCGDDSVSGGSSTTTTVTNASASASSRPILDRRGSTRSSAPRRKVAIAATKAGKCRSATAAMGEPVVPPRAPAAHAAVAAPKPPGDAVAAEGEARAPPRPPPAVAAGAGAGASGGGRRVFSVELRPGETTIVSWRKMLKEADLGAALPPPPPAAAAQPAVAPLPGPSGAANQGKIPEHELINRLMGIVGHLVHRRTLKGAEHKVESIDGFQDPVTHDDRMALRGKSVMDAVLEDRICDLYDLYVEVRNDQRMKRRRLAAAAKLRDSDPAAPQSAQSLQNMTSTHTMYPVVNNGNSQSSRSVDKVNEMSVGAGSDGNRSSTSMKKRKIDSEDRQVNPPKATAELHHHGIEIQKPAKRADEATKSAAATGDLQWSISFRGNWGGGQPSPKRSWPYFFWGHSQPNHNAAKRQPVGEAKA

SEQ ID NO: 136426 - protein, 96 aa, Oryza sativa
  Clone ID: PAT_MRT4530_38006C.1.pep
SLAISLLGFGSFPLSSRFGSLLGVSPPAVMNPVVDDLTTEFRMSSILLSTATMVGRTSRLLLTHCCTSRMNSQNPSVLVASRIAQDQPHHSVRQPI

SEQ ID NO: 136427 - protein, 200 aa, Oryza sativa
  unsure (1)..(200): unsure at all Xaa locations
  Clone ID: PAT_MRT4530_38007C.1.pep
MLATAAPRLRAAAWGSLSPPAPVRAQFVSLPLSLPGRYASLRLRASAAAAAKEGAEEMGFEEMAAGTRRRYYMLGGKGGVGKTSCAASLAVRFANNGHPTLVVSTDPAHSLSDSFAQDLSGGALVPVEGPEAPLFALEINPEKAREEFRAASQKNGGTGVKDFMDGMGLGXVLAEQLGELKLGXSYLDTPPPGLDEXIAI

SEQ ID NO: 136428 - protein, 82 aa, Oryza sativa
  Clone ID: PAT_MRT4530_38008C.1.pep
MPPRGSAGQRARTDAVVAKPSAPRAAGVSTAHDLTLPFHPTIVLWPAGRCRGGYELVTYLPRHACTVPWRRRRENGRDKVAG

SEQ ID NO: 136429 - protein, 382 aa, Oryza sativa
  Clone ID: PAT_MRT4530_38009C.1.pep
MLATAAPRLRAAAWGSLSPPAPVRAQFVSLPLSLPGRYASLRLRASAAAAAKEGAEEMGFEEMAAGTRRRYYMLGGKGGVGKTSCAASLAVRFANNGHPTLVVSTDPAHSLSDSFAQVASPVEHLLSRFEDLSGGALVPVEGPEAPLFALEINPEKAREEFRAASQKNGGTGVKDFMDGMGLGVLAEQLGELKLGELLDTPPPGLDEAIAISKVMQFLEAQEYSMFRRIVFDTAPTGHTLRLLSLPDFLDASIGKILKLRSKIASATSAIKSVFGQEVQQQDAVMAISESARLHSSLRNESVPVKRLIVNQILPPSSSDCKFCAIKRKGHLPSSFIQDQTRALDMIRNDPELMGLNLIQAPLVDMEIRGVPALKFLGDIVWK

SEQ ID NO: 136430 - protein, 451 aa, Oryza sativa
  Clone ID: PAT_MRT4530_3800C.1.pep
MAQAVVPAMQCQVGAVRARPAAAAAAAGGRVWGVRRTGRGTSGFRVMAVSTETTGVVTRMEQLLNMDTTPFTDKIIAEYIWVGGTGIDLRSKSRTISKPVEDPSELPKWNYDGSSTGQAPGEDSEVILYPQAIFKDPFRGGNNILVMCDTYTPAGEPIPTNKRNRAAQVFSDPKVVSQVPWFGIEQEYTLLQRDVNWPLGWPVGGYPGPQGPYYCAVGSDKSFGRDISDAHYKACLYAGINISGTNGEVMPGQWEYQVGPSVGIEAGDHIWISRYILERITEQAGVVLTLDPKPIQADSVICFVIRLRLILQITKSMREDGGFEVIKKAILNLSLRHDLHISAYGEGNERRLTGLHETASIDNFSWGVANRGCSIRVGRDTEAKGKGYLEDRRPASNMDPYVVTALLAETTILWEPTLEAEVLAAKKLALKFLENHATFHSPVNILVEHHT

SEQ ID NO: 136431 - protein, 916 aa, Oryza sativa
  unsure (1)..(916): unsure at all Xaa locations
  Clone ID: PAT_MRT4530_38010C.1.pep
MRSLAVASPLPPAAAVRRRPRASASGREVISQCWKCEINQDQPLGNSLRIGHSQGSLQRHGSRNLLAAAAAISIEQAEVSTYLPKGDMWSVHKFGGTCMGTPQRIQNVADIVLGDSSERKLIIVSAMSKVTDMMFNLVHKAQSRDNSYVTALDEVFNKHMAAAKELLDGEDLARFLAQLHSDISNLRAMLRAIFIAGHATESFSDFVVGHGELWSAQMLSYAIKKSGVPCSWMDTREVLVVKPSGSNQVDPDYLESEKRLQKWFSRQPAEIIIATGFIASTAENIPTTLKRDGSDFSASIIGSLVRACQVTIWTDVDGVFSAEPRKVSEAVILSTLSYQEAWEMSYFGANVLHPRTIIPVMKDNIPIVIRNMFNLSAPGTTICKQPANENADLDACVKSFATIDKLALVNVEGTGMAGVPGTASAIFSAAKDVGANVIMISQASSEHSVCFAVPEKEVAAVSAALHVRFREALSAXGRLSKVEVIHDCSILAAVGLKMASTPGVSATLFDALAKANINVRAIAQGCSEYNITVVLKQEDCVRALRAVHSRFFLSKTTLAVGIIGPGLIGRTLLNQLKDQAAVLKENMNIDLRVMGITGSRTMVLSDTGIDLAHWKEQLQTEAEPANLDKFVDHLSENQLFPNRVLVDCTADTCVACHYYDWLKKGIHVITPNKKANSGPLDRYLKLRTLQRASYTHYFYEATGGAGLPIISTLRGLLETGDKILRIEGIFSGTLSYIFNNFEGTRTFSNVVAEAKEAGYTEPDPRDDLSGTDVARKVIILARESGLRLELSDIPVKSLVPEALRSCSSADEFMQKLPSFDQDWDRQRDEAEAAGEVLRYVGVVDVANRKGRVELQRYKRDHPFAQLSGSDNIIAFTTSRYKEQPLIVRGPGAGAEVTAGGVFCDILRLASYLGAPS

SEQ ID NO: 136432 - protein, 61 aa, Oryza sativa
  unsure (1)..(61): unsure at all Xaa locations
  Clone ID: PAT_MRT4530_38011C.1.pep
MNGAAARRHIFLGVVLAFLLFLLMYKTLVPRAWPFRTATTXKRPPEMRKKSYVIFTNGQGR

SEQ ID NO: 136433 - protein, 69 aa, Oryza sativa
  unsure (1)..(69): unsure at all Xaa locations
  Clone ID: PAT_MRT4530_38012C.1.pep
FDGLPVGXXQKKSGSXRXRXNGXWXXXRXRSRTXLXDXTRSHTLDLAXRLXPSVTTTTEGVVXHRVHFA

SEQ ID NO: 136434 - protein, 122 aa, Oryza sativa
  unsure (1)..(122): unsure at all Xaa locations
  Clone ID: PAT_MRT4530_38013C.1.pep
RQYQXQSLVLXQXRVLSPXNELVRKQXGKAASPFLQXXGFQLRNNQVGQQFGRGAQKKNYQDINIVQAIGQKLQLQQFGDLXFDWNLAQAKALLALKVPFRYGINPRXYGKKSPKXXXGAPL

SEQ ID NO: 136435 - protein, 56 aa, Oryza sativa
  Clone ID: PAT_MRT4530_38014C.1.pep
MERGGPYDGLCRFQIHLGTRGDCPLPCEEWGQAMELPAISVESGHLGLSMWADDSS

SEQ ID NO: 136436 - protein, 177 aa, Oryza sativa
  Clone ID: PAT_MRT4530_38015C.1.pep
MEARSMDRLSVHHNGGGISKPCHGGGKGGGGGGKGSRGGGGKGIKVVYISSPMKLTASAEEFRAVVQELTGRDSNVADHDLDHHHHHHQQQRYHSFSSSSFGRASMMMPAAAAGGVVPRSSMPPTMATANAAGAGRMMMATADATGGGAAGVMATAAPMPFQSVYDHGSLLYGQDYW

SEQ ID NO: 136437 - protein, 380 aa, Oryza sativa
  unsure (1)..(380): unsure at all Xaa locations
  Clone ID: PAT_MRT4530_38016C.1.pep
MDYDELDSMERETTATPMARSLFLPSHHVAVTPYKLPDAATSTLITAVPRTEPGTRKTKAAKGXFVVELWGELWVLVGPISSLEQEGFQDRFGFLRYGEDGRIEGELERILGPQCLISDSWEVHSPDWCDPGVNFGEFLGSRIWPIVPARNRGNWGPIWCQLGSNLEVEAIDPAGEMIAAVGRGPEGWGEDEMSVLPRHTKVVVTGNNRTKSVLVGLHGVVKKAVGLGGWHWLVLTNGIEVKLQRNALSVIEPPTGNEDDDKFDCENMQWNSSDLASDDAQSPKPQRSRSRQHRGFQTKSFSRSMSCDSHSKASFSSSSRAHTKVDLSKLEMTALWRYWRHFNLDASPNPSREQLVDAVQRHFVSQTXAAKRLKTNVKVA

SEQ ID NO: 136438 - protein, 112 aa, Oryza sativa
  Clone ID: PAT_MRT4530_38017C.1.pep
HASAKPQRSRSRQHRGFQTKSFSRSMSCDSHSKASFSSSSRAHTKVDLSKLEMTALWRYWRHFNLDASPNPSREQLVDAVQRHFVSQQLDELQVIVGFVQAAKRLKTNVKVA

SEQ ID NO: 136439 - protein, 325 aa, Oryza sativa
  Clone ID: PAT_MRT4530_38018C.1.pep
MVAHGVLPAKEIIGWRPAYGEAFPTPDTHEVVVFSHFFYGFQLRGTLSQKYFFMPFETSNKGWHANWFYVQNLEPALPEYSCLPPKYQETWNSLPMGDEATQALTLLNRLLKLKEQGMQGEQITRHFIKSRLAPIKERSRTGFEFDGKNDPNRKDPESLEFKIKKEMMKPSDIDPYGKDFDSAVNSETAAKEAGSATAAKAEPSREDRRNEASTFDKVEGPARPPPKIITGQSPHLQPPAARWTGSLAMALASSSATIDGSIGNEEGMHEGCEVKEMVYALGIEQWLTEAAVINDDGGGDPRSALGRKDVFSVILMFPAGVLEAS

SEQ ID NO: 136440 - protein, 131 aa, Oryza sativa
  Clone ID: PAT_MRT4530_38019C.1.pep
LACRRRRRRRRRNGSRVAVRAPVLRALHLLQHRARGKLLEKPEQRLSFACRERSIYAAASCSCTMAFVLWLSFELDKRAKNKVLVLSRDLLLLQIAERALTLVWSNPLACLMCIMAYAYSHTGHSERELAR

SEQ ID NO: 136441 - protein, 48 aa, Oryza sativa
  Clone ID: PAT_MRT4530_3801C.1.pep
SPQWPSAPDHTLPSPPPWPPATSTNPIPTSPPPPPPPPGGSALRRGKP

SEQ ID NO: 136442 - protein, 170 aa, Oryza sativa
  Clone ID: PAT_MRT4530_38020C.1.pep
MAAGGYGERARLKYREAPKDYEEVLGGGGPRWHGDELPRRRSYEPDGARNREETHRGDGSVWVRRRHSVWPAGGATVALPFPANQRVSVFGFGCGGGGRRGTQLVAGAGFAQGYQRGCRVSQREPGAVGLALSLWASALAGGGGIGLATAAAVVGAWARQGSGRDGVGFV

SEQ ID NO: 136443 - protein, 48 aa, Oryza sativa
  Clone ID: PAT_MRT4530_38021C.1.pep
MIKPGLNPPLKISSWTPSRSRTVIPGCTPGTAQGSGLRKAIVVLEAEI

SEQ ID NO: 136444 - protein, 95 aa, Oryza sativa
  Clone ID: PAT_MRT4530_38022C.1.pep
VRALVALHALHSSTWKAPSIPIPLLADIVKYHMHMSTKYSNNKYLPSKHYSLFPSKPTNSTKQTLNLFTPTSTNMLSTTLHTYSKILTLYSKQLS

SEQ ID NO: 136445 - protein, 487 aa, Oryza sativa
  Clone ID: PAT_MRT4530_38023C.1.pep
MLVALLTILATAAAAAAAAAVASSSLRRRKNQPPGSLGLPVVGHTLALLRALRSNAAEDWLRRRAAAYGPVSTISLFGRPTAFLAGASCNKLLFSSDKLAAMSSASFLRMVGRRNIREVAGDDHRRVRAMMARFLRLDAVKNYVSAMDDEVRRHLRAEWGGRAAVAGMPSMKSLTFDVMCTVLFGLERRGDHAAVRRELSSEFQQLVRGIWAVPVNLPFTTFGKCLPASRRGRRPVAWIVEERRRAMPRGGGGGGSAGDLVTHMLAEGMDEEEIIDNVVFLMVAAHDTTAVLLTFLLRHLDGNRAAYERVAAEQEAIAAQRRRRGGSGSALTWDDLAGMRYTWAAAMETLRMVPPTFANMRKAVADVEVGGYVIPKWWQVITAATMTHLDPTIFPDPGRFEPARFEAAAAKSAPPPFSYVPFGGGARACPGNEFARAETLVAMHYIVTGFRWRLAAGCDGGFSRHPLPCPNQGLLLDIEPKEYNELC

SEQ ID NO: 136446 - protein, 145 aa, Oryza sativa
  Clone ID: PAT_MRT4530_38024C.1.pep
SYDCLSLFQEALRNNELKYNGKTIALPFNMSVFKWATETRRILEDAELPDTVSFYNIYGTSYDTPYDVCYGSESSPIGDLSEVCHTMPVYTYVDGDGTVTIESTMADGFAAKERVGIEADHRGLLCDENVFELLKKWLRVKGRKH

SEQ ID NO: 136447 - protein, 166 aa, Oryza sativa
  unsure (1)..(166): unsure at all Xaa locations
  Clone ID: PAT_MRT4530_38025C.1.pep
GGELGARRGGATRHERGRKRGQTEEENKGKLYMALDRRDRTPNERNRFGKKSNSVLGIKSKRIRFGENTQRFVLILGGKERGEREEQNPXINRTRGDRIGADLEGENGGSGGLRDGGRRLKTALTCGPHMSAAGGGGGGRLGLGRHGPVRPRGERESXWAEFGPMT

SEQ ID NO: 136448 - protein, 535 aa, Oryza sativa
  unsure (1)..(535): unsure at all Xaa locations
  Clone ID: PAT_MRT4530_38026C.1.pep
MPAAAGDVNSTWTLAIRAAADQGRPRRAVALYLSSLRSGRRPCPFALAAVLKSVFRLLLPAAHPLLAAGAALIHAHLLRLGLLAHPYPRAGLAHLYARLPDPFXAHRLVDETPPRPPRGRAGAHSFLVSRNSLLASLLRSGDLAAARALFDRMPVRDVVSWNSMVAGLAKAGHLDAAIELFDKMPERNAASWNAVMCGYIAQGDLAQARELFEQMPVRSNVSWITMISGYANSGDVHAAGELFERMENKKDLYAWNAMIACYAKNGCAREALAVFNRMLKPHVWVMPNEKTFSSVISACSQLGDLRFGLWAESFMGSVGIELDDHLRTALVDLHTKSGRIDRAFDLFRGLGMRDVVSYSAIIVGCGMNGKFNEAVSLFKEMSDAKISPNAVTFVGLLSAYSNAGLMEEARACFASMTEKYKISPSMEHYTIMVDLLGRSGKLDEAYQLIMQMPMKPDASIWGALLLACRLHNNVELGEIVASKCFELEPGESGYYILLGNIYSEANKWEKVKRLRKIMAERGLNKMPGSSWVQAS

SEQ ID NO: 136449 - protein, 225 aa, Oryza sativa
  Clone ID: PAT_MRT4530_38027C.1.pep
MTTTIATDGAAAACPPALVPSSYASAIKLPCGVGSFLDFRGNCIVYVGVVQGCISTFDLLDYSGAKQISQTGVFDFFINTSPRPRPRIGHHVENLPRPCREPGGVQASIVVYNIDEAGDPVVWPSIEEAKNMWSKLMDMSEATQKKWMQDSKTLLQQQIMKLNKKLDNLKAENYKREITNIISQIGGGHRKNLNDLSPEMVKNVKREVAKLREAIRNRIIKLHAQ

SEQ ID NO: 136450 - protein, 55 aa, Oryza sativa
  Clone ID: PAT_MRT4530_38028C.1.pep
RTRPLLYSNGGPIIMVQIENEFGSFGDDKNYLHYLVEVARRYLGNDIMLYTVSQL

SEQ ID NO: 136451 - protein, 137 aa, Oryza sativa
  Clone ID: PAT_MRT4530_38029C.1.pep
WLRSPRRTASRASRSSLRCAPSPPVALRLVWRAPPPSPPRRRRRRPLCPSCRPRSRRPQARRRRSRHCPRDRRRRRRRCRHRRRTPPPAAPPPPPPPSLPRTAPPPPPPRRRHQETPRNRRAPRPPGETVMPTPATP

SEQ ID NO: 136452 - protein, 193 aa, Oryza sativa
  Clone ID: PAT_MRT4530_3802C.1.pep
MAAGPPAPIPSPPAALSPFQPYLNPPRTSSVRFRLSPPFLLAGIELAPSLSLSSLADDLRPAFSARRDRLPPLRRLLRLRHTAVDPVHPLAEPADRRNTVDPVDPSRAAALLRSGRLFRCRLRPRVSRGPPPRFPLSLPSLGRRSDVPMAAASDHRGAGAPPPAGRADVAAFGRTERLLRGARPSAARALGCG

SEQ ID NO: 136453 - protein, 503 aa, Oryza sativa
  Clone ID: PAT_MRT4530_38030C.1.pep
MAEKGNPANKVAIVAVPFPAQGHLNQVLHLSLQLASSSHGLAVHYAAPAPQLRQARARVHGWDDKALLSVQFHDLGISTYVSPPPDPTADTPFPSHLMPLWEAYTADARAPLSALLDELSASHRRVVVVCDTINSFAVEEAARLPNGEAFPVSCVAVSALALHIDTGHRLLRENGLNHAPLETYMTQEFLDYASERARASESILSGAGILANASRALEGDFIDDLAETLAAGGKKLFAIGPLNPLLNTGSSEQGRRRHECLDWLDRQPPDSVLYVSFGTTCSLRVEQVAELAATLRGSKQRFIWVMRDADRGNIFTDTGEGETRHAKLLSEFSKQTEGTGMVITGWAPQLEILAHGATAAFMSHCGWNSTMESMSHGKPILAWPMHSDQPWDAELVCKYFKAGLLVRPWEKHGEVLPAATIQEVIKKMMASDEGLAVRQRAKALGDAVRSSRNDLEDFIAHITRLFKHDKDKKEYEETVNVWSFSLIPRAHRPKHVQLHSPKS

SEQ ID NO: 136454 - protein, 81 aa, Oryza sativa
  Clone ID: PAT_MRT4530_38031C.1.pep
MEEDQGENPDTDPDVENDHEKQTYVNLKDWVFTQTRAYDPDQLIKTGGSLPSSSMEIQWVGGAEDPQTSGWICHLVCEDQK

SEQ ID NO: 136455 - protein, 748 aa, Oryza sativa
  Clone ID: PAT_MRT4530_38032C.1.pep
MNSGDVNQCDSVPENKDALNCDKDLDNCGSKDLDKELLENSQDNLEDKAQSSDNPNNAADEIQSPPSSSPTESTDDISSEDEEYNDKENIAPSTPKDDVNVHEPLQRALAGDSCPDDAILKDFLDVEAEEEDDSDDDMMRFKDNEEDDGSDENEVFNDLIEAGYEEGEIDHEKRNALHQKWLQQQDAAETNKFMQKLKFGHQEQKKVMDQDEDDAEDCEDESENEMSYDLTPTNVVRQNSEKAKQMIARMFTDDNDTYEHSDDEEIEEHLARQRISKREESCAVITESQAAHQFSAFKLSRRVSGGGGGFNLASYKYKDPLLGRGGRSFLFGNTWFLLSTYPARLLHTADRRAPAAFFAAINRTPCVRTHCTGQSLLQRGIVMAACGYAFRRAELGAAKRQPEKDSSVGTRISCVVAMGSAGSTPRPEVSFRHRGVEYCKKVGVSLKCREPWGPSRAFWTNAIGPSYKLSFSVEPWLRDFSTSCVAPYSAGATEHQLSLDEAVQDKQMDNSTVGPDGKPRAPGPLKLVSGSCYLPHPAKEATGGEDGHFICVDEQAIGVADGVGGWADHGVDAGLYAKELMSNSMSAIKDEPQGTIDPSRGIHAVNLGDSGFIIVRDGRTVLRSPVQQHDFNFTYQLESGGGSDLPSSAQTFHFPVAPGDVIIAGTDGLFDNLYSNEISAIVVEALRTGLEPEATAKKIAALAQQKAMDRNRQSPFAAAAQEAGYRYFGGKLDDITVIVSYVTSASAT

SEQ ID NO: 136456 - protein, 249 aa, Oryza sativa
  Clone ID: PAT_MRT4530_38033C.1.pep
IPVDPRVRERRVQLDSIHAESQRLLRETRSVSFKPSAQPVYKPISSVLEKIRLRKLEILKKSATPNDDDDEEEDDVSSDPVSGTAGDLGAPQVKEVDAEGKDPKIDDIENEGGMNSGDVNQCDSVPENKDALNCDKDLDNCGSKDLDKELLENSQDNLEDKAQSSDNPNNAADEIQSPPSSSPTESTDDISSEDEEYNDKENIAPSTPKDDVNVHEPLQRALAGDSCPDDAILKDFLDVEAEEEDDSDD

SEQ ID NO: 136457 - protein, 112 aa, Oryza sativa
  unsure (1)..(112): unsure at all Xaa locations
  Clone ID: PAT_MRT4530_38034C.1.pep
PLIVFVGRVLVGIPTILVVKFCSKALSKWLLPVMCNXLGIPIVSTCYVPALKASEKCKVKSDAKQGGYLQKVFSLFPQKAYDVDTGIRFVQYAXLAWSVVDLVPAIFTHLSL

SEQ ID NO: 136458 - protein, 379 aa, Oryza sativa
  Clone ID: PAT_MRT4530_38035C.1.pep
MLAGGGSRVSGGGGGFNLASYKYKDPLLGRGGRSFLFGNTWFLLSTYPARLLHTADRRAPAAFFAAINRTPCVRTHCTGQSLLQRGIVMAACGYAFRRAELGAAKRQPEKDSSVGTRISCVVAMGSAGSTPRPEVSFRHRGVEYCKKVGVSLKCREPWGPSRAFWTNAIGPSYKLSFSVEPWLRDFSTSCVAPYSAGATEHQLSLDEAVQDKQIPRGPGRPEPVPGPCPLPPPAAAAGGGGGGGCGSGADPGTGVAAGEGGRAAAGADGGHRGGGGGGGGRRAGPAEELAGGGLKGGVRREISEYNEISAIVVEALRTGLEPEATAKKIAALAQQKAMDQRNRQSPFAAAAQEAGYRYFGGKLDDITVIVSYVTSASAT

SEQ ID NO: 136459 - protein, 103 aa, Oryza sativa
  unsure (1)..(103): unsure at all Xaa locations
  Clone ID: PAT_MRT4530_38036C.1.pep
MPNASPLHHLASLLLLALALAPRPAAPAATDRAALLAFRASLPPPSRAALASWRGPLSESWRGVSLHPPAAXGAPDPDPSPYXYGLALRGLNLSGQLPAAPLA

SEQ ID NO: 136460 - protein, 471 aa, Oryza sativa
  Clone ID: PAT_MRT4530_38037C.1.pep
MESSSSGSCPQGTVYHWFVLFAVWLCGSQHVLSQKTPLEPKDKFLLSDPPIGLFDPIEISPSVLPHNANPVEPLSPMYPNYTSYDPVLTGKCHVNFSALSYMMDKTASDCSIPLAPLVADVICCPQVNSLMNIFQATYGAGNNTLVLNQASANACFSDVMSILASKGANTNIPELCTLRPSNLTDASCPVKDISTFEKIVNVSKLLDACSDVDPLKECCRPVCQPAIVEAAVHISSGGANMFGSSSISGSDAGINVVSDCKGVVHSWLSMKLSSEESNTAFRVLSGCKVNKVCPLEFDDPSSVVKACGKASSSTPSCCGALHSYIATRQKQIFVTNLQAINCATMFGSMLQKAGVSNDIYELCDIDLKDFSLQAFSCLLRSLPTDIVFDNATGISFTCDLSDNIAAPWPSSSSVQSLSLCAPEMSLPALPVAPTSGSSVETNGTYVYIPSVFQIYDRLKNACDFHWLQETA

SEQ ID NO: 136461 - protein, 450 aa, Oryza sativa
  Clone ID: PAT_MRT4530_38038C.1.pep
MDEFELEDNLELLLQSIQELIEDQGENNPFGAANHDELIASLLHNNQENPLTDVSVEDVRDGKDMQGIPWEKIVFRRDQYREMKMKNYRNYQNLSYAREEALKDCKKVEKDSPYYDFQYNTRRARPSIVHFQLRNLVWATTKHDVYTVHNQSVTHWSSLDQTSTELINADDCIIPKQRGHGSQSVAMVQVTTMAVDDSLLVIGGFQGELICKRLEDDGVLFSTRVTDDENAITNSLEIYQDPTGSRRLVAANNDCSVRIFDIEYFDLLKHYVFPWSVNILVFNQSVSVSPKGGLFAVLGDHEDGLVVDPKCGKAIGALKGHLDYSFASAWHPDGNILATGSQDTTCRLWDIRNLSESVAVLGGRMGSIRCIKFSSDGRFLATAEPVDFVHIYDSYADYGRSHEIDLFGEIAGLSFSPDAEALYVGIADPTYGGLIEFNRRHQHHYLNCMW

SEQ ID NO: 136462 - protein, 103 aa, Oryza sativa
  unsure (1)..(103): unsure at all Xaa locations
  Clone ID: PAT_MRT4530_38039C.1.pep
ILVYRMIRVLGYVRMMIYVIRHQANRRQELYWFRPLIRIDDXKPHISMGVEKFDDTGKIVVDVFDEISRXLGSVYSGFVNYGGGLFYTVNHLDLYVRLGNIGS

SEQ ID NO: 136463 - protein, 428 aa, Oryza sativa
  unsure (1)..(428): unsure at all Xaa locations
  Clone ID: PAT_MRT4530_3803C.1.pep
MAQAVVPAMQCQVGAVRPAAAAAAAGGRVWGVRRTGRGTSGFRVMAVSTETTGVVTRMEQLLNMDTTPFTDKIIAEYIWVGGTGIDLRSKANQGQXPVEDPSELPKWNYDGSSTXQAPGXEDSEVILYPQAIXFKDPFRGGNNILVMCDTYTPAGEPIPTNKRNRAAQVFSDPKVVSQVPWFGIEQEYTLLQRDVNWPLGWPVGGYPGPQGPYYCAVGSDKSFGRDISDAHYKACLYAGINISGTNGEVMPGQWEYQVGPSVGIEAGDHIWISRYILERITEQAGVVLTLDPKPIQGDWNGAGCHTNYSTKSMREDGGFEVIKKAILNLSLRHDLHISAYGEGNERRLTGLHETASIDNFSWGVANRGCSIRVGRDTEAKGKGYLEDRRPASNMDPYVVTALLAETTILWEPTLEAEVLAAKKLALKV

SEQ ID NO: 136464 - protein, 48 aa, Oryza sativa
  Clone ID: PAT_MRT4530_38040C.1.pep
TKRGFLLKFFLLGGGSLVAKVRGSGSQNLFPIKKGPKLPQTPGPRGKI

SEQ ID NO: 136465 - protein, 241 aa, Oryza sativa
  Clone ID: PAT_MRT4530_38041C.1.pep
WANHGDAISTQYSGTPALKGDFVRYGKRTTQGILNDLWNAMARYYLNNFADGTKQHGHATCRGHRYRTPNTIGDRGGGAAAGATCTRTTVVAVPRPDDHVRDASAVVFSIREHTLDNADGWLTEAADFGRVFVTGDSDGSTIAHHLTMHAGLAMPNLTGACGMMCNRAIDCTERLFTMDKPMELTASERRKKTMRREKKIRAKLPFYAYNLLRDQVFAHTRAYDPELLAKIGAIKRKKLQG

SEQ ID NO: 136466 - protein, 93 aa, Oryza sativa
  Clone ID: PAT_MRT4530_38042C.1.pep
MNVIRDELQLEAAAVGRRPRARVGRRRPPPRHPSLADAASMTPVVPEPAVLHRPSPCHPQAGRHPPRRPLPSRARRRVGCRPRARAEHTRHRP

SEQ ID NO: 136467 - protein, 104 aa, Oryza sativa
  Clone ID: PAT_MRT4530_38043C.1.pep
FLCLMGPQHLGHSVRVKLQGDELPSAPSRCSAQPGIFQSSFPSSSPFSFSFSPPFLSFPCPCFTRQKIGLGRCPLFESSETLEKVVCPLYIPIGFLYYYELSRV

SEQ ID NO: 136468 - protein, 100 aa, Oryza sativa
  Clone ID: PAT_MRT4530_38044C.1.pep
GLGRYGLHQGLQNLHLEVVKKSIEIYKIYIFKERSLVGTTVSSKDMPIMNSFIDIFENFVQYNNEIYFRQWEHSKVSGSINDALNAISQVHNIRESIDYL

SEQ ID NO: 136469 - protein, 453 aa, Oryza sativa
  unsure (1)..(453): unsure at all Xaa locations
  Clone ID: PAT_MRT4530_38045C.1.pep
MMKAAGICSGLAYKARHGQTKTNALIWEFMSLVQRKHTHELSLSGVRSWGSMTLGSGGMAAEEGGGNGEAAARGERCVVVAVEETCCACAQLVVGPPNPMMARYVYAFVFLATNLLAWTLRDFGHPVLAELRRLRGSCQGAGYCLGAEGVLRVSLGCFVSSLQFNSDFSLRFSLHFXGKIAHFGAGAFLVIQLVSVTRFITWLNDCCRSETNLKRXVQVVSIAAYVGSILGVVLMYVWYAPRPSCKLNILFITVTLVLVQIMTGVSLSSKVKAGYLAPGLMGVYIVFLCWTAIRSEPHTEICNKKAEVATSADWVNIASFVIAVIVIVTATFATGIDSKCLQFKKAESEQPEDDDIPYGFGFFHFVFAMGAMYFAMLFVGWNANQTMEKWTIDVGWASTWVRVVNEWLAAIVYISSPVTGEGNASNQQSILSNDKLLLNMQKGQQPLEYTQTS

SEQ ID NO: 136470 - protein, 53 aa, Oryza sativa
  Clone ID: PAT_MRT4530_38046C.1.pep
GNPSKVSWRPPRGPNVLGQRTPPWEPLGLPSFLQPPCALGFLLWGPKRVPFLI

SEQ ID NO: 136471 - protein, 702 aa, Oryza sativa
  Clone ID: PAT_MRT4530_38047C.1.pep
MRRPELFSHGNLLRPCKGVLLFGPPGTGKTLLAKALATEAGANFISITGSTLTSKWFGDAEKLTKALFSFMAAEEGGGNGEAAARGERCVVVAVEETCCACAQLVVGPPNPMMARYVYAFVFLATNLLAWTLRDFGHPVLAELRRLRGSCQGAGYCLGAEGVLRVSLGCFVSSLQFNSDFSLRFSLHFVRDELSFPAFCEFDVLDDGDHQLFFFVMFLSTVRTRKTHDRRNSWHSEWWPAKIVLWMGFTVVPFFLPSPLIQLYGKIAHFGAGAFLVIQLVSVTRFITWLNDCCRSETNLKRCHMQVQVVSIAAYVGSILGVVLMYVWYAPRPSCKLNILFITVTLVLVQIMTGVSLSSKVKAGYLAPGLMGVYIVFLCWTAIRSEPHTEICNKKAEVATSADWVNIASFVIAVIVIVTATFATGIDSKCLQFKKAESEQPEDDDIPYGFGFFHFVFAMGAMYFAMLFVGWNANQTMEKWTIDVGWASTWVRVVNEWLAAIVYKCHFLACSINVADVEQPLVVAIGPVEPKQTPPASEFRVGAADEIRTVEQDGKTIKLQIWDTAGQERFRTITSSYYRGAHGIIIVYDVTDQESFNNVKQWLNEIDRYASDNVNKLLVGNKSDLTANKVVSSETAKAFADEMGIPFMETSAKNATNVEQAFMAMAASIKDRMASQPAASNARPPTVQIRGQPVNQKTSCCSS

SEQ ID NO: 136472 - protein, 304 aa, Oryza sativa
  unsure (1)..(304): unsure at all Xaa locations
  Clone ID: PAT_MRT4530_38048C.1.pep
SATGIGYSSFGVALFKSLKSIHTLTLSFFLITGTSISQRAKSALATLTVLLAGRTSYFYDTSPPPVSFSLVSRSVGRSSGGARSTAVTPSAMNPEYDYLFKLLLIGDSGVGKSCLLLRFADDSYLDSYISTIGVDFKIRTVEQDGKTIKLQIWDTAGQERFRTITSSYYRGAHGIIIVYDVTDQESFNNVKQWLNEIDRYASDNVNKLLVGNKSDLTANKVVSSETAKAFADEMGIPFMETSAKNATNVEQAFMAMAASIKDRXWLANRPLQMQGHRPCRSAGNLSTRRRRAARPKDNQVFPSM

SEQ ID NO: 136473 - protein, 141 aa, Oryza sativa
  unsure (1)..(141): unsure at all Xaa locations
  Clone ID: PAT_MRT4530_38049C.1.pep
RVGGGEGSLPPSLDPPRPGPRPTNPPPPSPLDPSWPVPRPTDLPPSTMXSFFSPPPFVVXSPPPPIAIAVGSTPPGSVASLYCWICPDWARGRWICHRQLCGAPRPPPSSWLPSAPPLHTPLLASGSGSHARRLLISRRAL

SEQ ID NO: 136474 - protein, 167 aa, Oryza sativa
  Clone ID: PAT_MRT4530_3804C.1.pep
LKARAADGRAPRGSHSARPRAAKQAQPVGGGALAPMVAGGGHRHVGVVAERGEGKGEKRRRSTAHPRSTATTKKAAGAEEGGGAARVDGVDGVPAVGERNGGVDEVGKDAAKPQEAAPRWEGVRGDDGGGLELGGDSGERGRRRELDSGEEEGRREAETDGGGAGRV

SEQ ID NO: 136475 - protein, 167 aa, Oryza sativa
  Clone ID: PAT_MRT4530_38050C.1.pep
KMQTPQIAFYHFMPAVDGLYAALSLAAHALLPGATSAGGEVLHLGASWPQSCFRALQSSRDPCISFRCLKHQRHEKPHMMLAASCCPRANHVIEYTRHGGIQKPCFPIMQSIVLASAIRPEFTYALYMIQKVFFVRSNTEKTPSHPKHQCISGNQVLLPIHHHLAVV

SEQ ID NO: 136476 - protein, 71 aa, Oryza sativa
  unsure (1)..(71): unsure at all Xaa locations
  Clone ID: PAT_MRT4530_38051C.1.pep
PWRVAGAPWTKSTRAPARGXTTWQTRGGHDERLSGGGADVVPRGHPHEVAXGGHVDGPDRLGRPIGRPRAG

SEQ ID NO: 136477 - protein, 120 aa, Oryza sativa
  unsure (1)..(120): unsure at all Xaa locations
  Clone ID: PAT_MRT4530_38052C.1.pep
LTQGQSFLVLQDLVSTHGYXNMYTRGHCKSFPRSTQFGTSPPFYLFYFLSSGGTWHLTRGCIGFRSPAKGXALRSVGAGNCIGYIGVVQCCIXVHSTSWISLVWLIYLPTYLSYILVNLV

SEQ ID NO: 136478 - protein, 74 aa, Oryza sativa
  Clone ID: PAT_MRT4530_38053C.1.pep
MALGYHTWMGMRCQLLSRRSRLSSPLPPPLAPSHCLTDSHRSRASVVGSSAATAGVGGSKAHLHMNDRIWIEQQ

SEQ ID NO: 136479 - protein, 54 aa, Oryza sativa
  unsure (1)..(54): unsure at all Xaa locations
  Clone ID: PAT_MRT4530_38054C.1.pep
GKFSFKVVDVSNNDFCGTIFTSGPFGAIPLSNFXKNPRLEGPKLQGLGVYAPPC

SEQ ID NO: 136480 - protein, 27 aa, Oryza sativa
  Clone ID: PAT_MRT4530_38055C.1.pep
FNTDLSDFQLYDNIVSKLHFKFSGVML

SEQ ID NO: 136481 - protein, 94 aa, Oryza sativa
  Clone ID: PAT_MRT4530_38056C.1.pep
HWPLRVPLARRRTAPGHLATAQSDWSTLAVGLLPDHAQVRLRLRRVHGQGRRRRRVPPPHERAEAVVELRDVVGCHGRRAASRGVQAYDAGSRR

SEQ ID NO: 136482 - protein, 111 aa, Oryza sativa
  Clone ID: PAT_MRT4530_38057C.1.pep
GEAHRPLGRKSSASIPPSPSAPSSPPPPLAPSSTMMTTATPPAPLGRDGRPSRRREAADPPAPLLPPPSSPPRLPSSPPSPPTPLLVVDSPPCRRLPPPSSPPTRRRRLPP

SEQ ID NO: 136483 - protein, 56 aa, Oryza sativa
  unsure (1)..(56): unsure at all Xaa locations
  Clone ID: PAT_MRT4530_38058C.1.pep
FFFFFFSKSIQWRPVRCKSSGEPQIYHVXTPNPTPRGINNTSVYTYVHTIPRRRIT

SEQ ID NO: 136484 - protein, 568 aa, Oryza sativa
  Clone ID: PAT_MRT4530_38059C.1.pep
PAGGRVGAAGRCQAEAGASRSHHRPRLPLPAAAPPRRRVHVSCDARRTGGGGGGGGVKREAIPAGTGKAKKQVVFFDAAPPVSQRGGGGGGEGEGEGEGEGKVARRKENAALGLVRRLTKRTLSLLSNLPLAISEMFAIAALMALGTVIDQGEAPSYYFEKFPEDNPVFGFITWRWILTPGFDHMFSSPVFLGLLALLAASLMACTYTTQIPIVKVARRWSFMHSAGSIRKQEFAESLPRASIQDLGVILMGYGYEVFTKGPSLYAFKGLAGRFAPIGVHIAMIFIMAGATLSATGSFKGSVDVPQGLNFVIGDVMKPKGVLSFVPDVFNTEVHVNRFYMEYYDSGEVSQFYSDLSLFDLDGKEVMRKTIKVNDPLRYGGVTIYQTDWGFSALQVKKNGEGPFNLAMAPLKLNGDKKLFGTLLPLENSGSSNVKGISMLARDLQSIVLYDQEGKFVGVRRPSSKLPIEIDGNEIVIEDAIGSTGLDLKTDPGIPIVYAGFGALMLTTCISYLSHSQIWALQDGSTVVIGGKTNRAKLEFSEEMNRLLDKVPELISVNEKKIDSKQSAT

SEQ ID NO: 136485 - protein, 537 aa, Oryza sativa
  Clone ID: PAT_MRT4530_3805C.1.pep
MANFFPMALKGQARGWLMNLPPASVHSWEDLCQQFTMNFQGTYPRPGEEADLHAVQRGDDESLRSYIQRFCQVRNTIPCIPAHAVIYAFRGGVRHNRMLEKIASKEPQTTAELFQLADRVARKEEAWTWNPSGSGVAASAAPGSAAQTGRRDRRRKKRSAHSGDEGHVLAVEGAPRATRKGRPASDKKKEAGTPSRERPASKWCSVHNTSLHGLADCRAVKNLAERTRKWEEDRRQERREGKSAAVPSVKRRSEARQKAPAVDPDDGDDDLGFQEPGATIATVDGGACAHVSRRSFKAMKRELLAAAPTHEATRRARWSEVALTFDQTDHPPCVARGGQIAMVVSPTICNVKLGRVLIDGGAALNILSPAAFDAIKAPGMVLQPSQPIVGVTPGHTWPLGHIDLPVTFGGSANFRTERVNFDVADLGLPYNAVLGRPALVKFMAAVHYAYLQMKMPGPGGPISVRGDLKVALACMEQRADHLAAATKPEGGDERLGTSAPTAPRQRIATYDEVPVKEVALGDGPSKTTRIGGLLDGK

SEQ ID NO: 136486 - protein, 149 aa, Oryza sativa
  Clone ID: PAT_MRT4530_38060C.1.pep
MTRRDADDETRQRALRRRRGGAAAPDPGAASPGGGGGRDDDRAAPARIRPERRARAAAAWFSRHRARQRRRRAAPTRDNPARASTSGVIIAGHPQAPYVTLPPKEGRRSTPAHQASRMLRHLHGCSRLSSSRTMPPHSMAARCLIFTAS

SEQ ID NO: 136487 - protein, 111 aa, Oryza sativa
  Clone ID: PAT_MRT4530_38061C.1.pep
QRSYLIMEIHSTVFISYKYSMSSDYIFLQTKPGKGLQELMKMKAALLMILVVAVSFNLCTCNIPGNMEEEHGMYKDVHAGKDMRKLIDIDGRTAPTGHDYDHVCPRGIYPC

SEQ ID NO: 136488 - protein, 47 aa, Oryza sativa
  Clone ID: PAT_MRT4530_38062C.1.pep
NLNPGGLFKGRSYTFFGRLLRPFLRRKTFAPPCFYKWLMAGGGGVLF

SEQ ID NO: 136489 - protein, 37 aa, Oryza sativa
  Clone ID: PAT_MRT4530_38063C.1.pep
DRSSKCSCVSRVDSSIIISMPSMVEYALCTRWCYSCP

SEQ ID NO: 136490 - protein, 67 aa, Oryza sativa
  Clone ID: PAT_MRT4530_38064C.1.pep
MVASWSSTRTLGMDESGPKYQAELLDERRATGQGIAATRLNELLARWRRIASRGVGFDRLRMPGHPS

SEQ ID NO: 136491 - protein, 169 aa, Oryza sativa
  Clone ID: PAT_MRT4530_38065C.1.pep
MIALRSAQTAYYFQPVHPQIVPDPSSFEKGPFYALIRSKVKRLIASRGIKKRQQSSPTMVSMSESPEPEEASAQHQESALVALTARLCRRSPRIPSASAAAAAPDGYPELQAALEVHHLITASLLRRQHKLPPFAPRAAEQEHDEERGEARLREPSDTVAAHGLDGRAA

SEQ ID NO: 136492 - protein, 115 aa, Oryza sativa
  Clone ID: PAT_MRT4530_38066C.1.pep
MTEGMTSSRTGILKKMMVVLIRIGIKRRVQRIRNRERFQEVQQEINHRLKKTKTKQEWRVKSKVLSADEIEADKAKRLARGKAIASSSVNMVFVLPVEYEANQADVNDVEEASAD

SEQ ID NO: 136493 - protein, 54 aa, Oryza sativa
  Clone ID: PAT_MRT4530_38067C.1.pep
KISPFSPKGLTTFNLLSTDSSHYCSVTQKPSKKQHLCMKSLGIAIWMQNCIFRC

SEQ ID NO: 136494 - protein, 100 aa, Oryza sativa
  Clone ID: PAT_MRT4530_38068C.1.pep
EEELRSALPRESEAARVAFSNGTFSLSNRIVERRSVPFYPLVREELGCVLLTGKKLSFSGKECYKALLWISQGKVNRPMLQWLKERSGGPFPIHSPKIPL

SEQ ID NO: 136495 - protein, 610 aa, Oryza sativa
  Clone ID: PAT_MRT4530_38069C.1.pep
MWPSLRRAAAAAGGARFKNVSHLLPTCSGLMDNNLNGGSLRGLGEIGCQVSCQELPFGYSGTGFPSIRRLSSEPAERPFRNKNDSEILGDDASDQLPDDNLECDDELDQHNVMIDASETKAKNLRSQFPAIDRSGDTKLQNKTYRSYLFQIVLDAPSNSLRHVLDKWIEDGNQLERNDAMLVLFHLKKQHMYRKALQFVEWMERGKLLNFEKRDYACHLDLIARSHGIETAQKYIKRVPLPFRNEVLYETLIVNCVLAGDIQKAEEVFKEIKDLCLRLTVTLCNQMILLYKRIAPGKVASVLMLMEKENVKPSAFTYRLLIDLKGRSNDLAGIEVVLNEMKAYGIEPSTSTQTMVARFYIHGGLTEKAEAVVKEMEAQLSNSKDGRHVIKSLLHLYAALNKPNDVARIWEMCTEPMLEDFLSAIKAWGELGLIEKAEETFEAMANAPEKLSSKYYNAMLNVYAQNKLLSKGKQFVERMCRDGCPNGPLTWDALINLYVNSGEVEKADSFLLNVAEENPDRKPLFTSYFFLMKGYAKRGDIHNTEKIFDRLKNVGYAPRPLHYAVLLEAYVNAKVPAHGFLERMRGDNVRPTKKIVTSLDTLQKGWIAGLD

SEQ ID NO: 136496 - protein, 96 aa, Oryza sativa
  Clone ID: PAT_MRT4530_3806C.1.pep
MSWHRAGVLLLGAQSCLPVPGVPAVGGIGSVLLSMARMGWKLCHVFRPYTVMAGINISAYKYQHLSLGGITTSNYIAICDTITKTLMIPIPIWPQT

SEQ ID NO: 136497 - protein, 68 aa, Oryza sativa
  Clone ID: PAT_MRT4530_38070C.1.pep
LSEVLRPRSEERQRERKCTRHGRRRQVRAAGPPFYLVRGHHIGLLPSHGGLTAHPNFEGGLVLAIQSR

SEQ ID NO: 136498 - protein, 86 aa, Oryza sativa
  Clone ID: PAT_MRT4530_38071C.1.pep
LSEVLRPRSEERQRERKCTRHGRRRQVRAAGPPFYLGPGVTTFGLLGLLPRSPAFPGDAHFNLPSHGGLTAHPNFEGGLVLAIQSR

SEQ ID NO: 136499 - protein, 135 aa, Oryza sativa
  Clone ID: PAT_MRT4530_38072C.1.pep
SPPSPNQNSHLMCTKLVPKRIVFTSIYSNLDNPIPTTSQDSPITAYKQEPPAKGLKVHQKLRPKSTTPKRIRSARGFPRRAVPATPIHETSAPGADRSGIARTAEAPEIAPCCRDLVDFGNEKGRRRRRTRRAFF

SEQ ID NO: 136500 - protein, 34 aa, Oryza sativa
  Clone ID: PAT_MRT4530_38073C.1.pep
DEFSTCIVYRNKAGAYKMHCVHFTALLLNRNILK

SEQ ID NO: 136501 - protein, 105 aa, Oryza sativa
  Clone ID: PAT_MRT4530_38074C.1.pep
GVKDGGGDGTQDLPSWMRSRTEMAVAAPEPSHADGVKDSGGCIWQRRRRLPSLLPWIGPMISATAVAPEAFTEVVDDGGSDSGGRRQCYLSANRFGAEVPNLSAK

SEQ ID NO: 136502 - protein, 54 aa, Oryza sativa
  unsure (1)..(54): unsure at all Xaa locations
  Clone ID: PAT_MRT4530_38075C.1.pep
HASGSCLGDTSKLLXSSSSSIVSTLASXLLRVIVVXHSLQXXKARXTESSRRGR

SEQ ID NO: 136503 - protein, 838 aa, Oryza sativa
  unsure (1)..(838): unsure at all Xaa locations
  Clone ID: PAT_MRT4530_38076C.1.pep
PCSRPSASSTPPGGIDDLXDLIGKTLPSSELVSSELDPRTGKEKETVSAFAHRTMKQDTYEAEFAVPATFGPVGAVLVENEHHREMFVKEICLVTGADDSSAVTFDCNSWVHSKFDNPDRRIFFTVKSYLPAQTPKGIEALRKKELETLRGDGTGERKFFDRVYDYDVYNDLGDPDFKIEHLRPVLGGDEHPYPRRCRTGRPHTEIDPRTEKRRGPVYVPRDEQFSDVKGMTFSATTLRSGLHAMLPALEPLLANQELRFPHFPAIDGLYSVGIPLPAQLAAAGAATATAGGAAASSSTSTNIVGGVIPRLVRMIEDTTDHVLRFDVPEMFERDRFSWFRDEEFARQVLAGVNPICIQLLTEFPIVSKLDPEVYGPPESALTKELLESQIVESVTVEEAMAQRRLFILDYHDVFLPYVHRVRERPETTLYGSRTVFFLTGAGTLSPLAIELARPQSPTRPQWRRAFVHGPDATASWLWKLAKAHVLSHDTGYHQLVSHWLRTHCCVEPYIIAANRQLSRMHPVHRLLHPHFRYTMEINALARESLINADGIIEESFWPGRYAMELSSVAYAATWRFDAEALPEDLVRRGLAVRQEDGELELTIKDYPYANDGLLVWNAIKQWASDYIDFYYKSDEEVACDEEVRAWWEEVRTKGHADKKDEPWWPAVDTRDGLIGVLTTIMWVTSGHHAAVNFGQYHYGGYFPNRPTVMRKKMPVEENKEEEMKKFMEMPEHVLLDTMPSKMQAITIMATLDILSSHSPDEEYMGEHAEPAWLAEPRVKAAFERFAGRMKEIEGIVDERNNDPELRNRCGAGIVPYELLKPFSTPGVTGRGIPNSISI

SEQ ID NO: 136504 - protein, 920 aa, Oryza sativa
  unsure (1)..(920): unsure at all Xaa locations
  Clone ID: PAT_MRT4530_38077C.1.pep
MPPASLVSSPPLACCLQLHRLLRPAALLPSPPRLRLRLRPLRADSSPSPDAFAGWSDGDEQDEQDKSPGPFRGLLGPGLAGLFFLAGLTFAAISFRSNAANGPKAQIDTSSTNSQEAPYSTDNTCKEDGLKDAQVSLPSDSKGETSLDDEAHSSTDPLPVQVNATAEGSTEHETQHPLQNSELVPPDKYVPSEDAGQAHNLVASDGAESLVSPLSNSTEPSIAAYDSPDKLYGVGPSEGTPYVEDTLNCEITLPENQHLGETLTSDTMLGSGDASLIQEISDTAASSDAKDKDTEQNPELHRKNGISPSRMPDYTEYGHADHQEMADQLLSFGSNDVSTEANKPGNGVETLASNQNEGADELENQNSLYESTTPDKSFASSGXTAPTLLSAALQVRTGQIMVPAAVDPAQASALPELQVLKVLDCEALAGXLMSXRDYGRKLLVASNCLSRNTSSKVYPAMYIENVTELAFDDITPEDFDFPFIQGLAEAGLISSKLSRSDMNVHLDVYNFSNLFSPECPVSXSWKMALDKRQLPEVDKTSMYKASGYMDVDKINAAAWPALVADLDAGDQSITALAFGFTRLVLQGXFQPDKPVTKGQVALALSTGDSADVVMEELARIEAEKVAEDAENAHDELIALIEKXIWMAFMRESLKRKDKKLXEETRFELDKLRAETVEENNALMRGIVXVESEMVVLSKWKSSLNGQRQRVLSKKVEISNKKNRISKEQTEIENDRQAVVQSQYEVEVERKALSMARAWAEDEAKKAREHARALEEARNQWERHGIKVVVEGGLEDDASAGVTWANAGKEHQVDEAINRAGSLLEKLKSMSAEIKVRSCHSLERVIQHVRSFISILKQGAEEATQRFTDLGAAAALKAKKLSSEAQDNVYVFGSTIGDKSKRVVEDCKEGLEKFVHRFKTD

SEQ ID NO: 136505 - protein, 58 aa, Oryza sativa
  Clone ID: PAT_MRT4530_38078C.1.pep
LAASLIDSFTVLSYWMQDQFHRSITILVIMFSSRTSKCKNILNGTSKVQHSNIPINCR

SEQ ID NO: 136506 - protein, 62 aa, Oryza sativa
  Clone ID: PAT_MRT4530_38079C.1.pep
MDPPQTCPPRRTSPSRRAYGGRRASPSPAVRPWRSAAAFSAARRAVSAQARTRGRTRGRTRG

SEQ ID NO: 136507 - protein, 162 aa, Oryza sativa
  Clone ID: PAT_MRT4530_3807C.1.pep
MDGRDRSGPRRLTEDELDGVSDDVTPAAAARAAGTARAAHARRRTTARGRKRKAPGRSGRHGELTGDQNDGGRSTDGDGDEEEAAKLFGSTAAMTLRRSSATAKGRTRTATRRRTRRRPSRAMATAGTTAAHGWSGGGGGEARAHGARATPATRGEGEGGGG

SEQ ID NO: 136508 - protein, 896 aa, Oryza sativa
  Clone ID: PAT_MRT4530_38080C.1.pep
RTPSDGRSILMGRYEVGKQLGQGTFAKVYYARNLTTGQAVAIKMINKDKVMKVGLMEQIKREISIMRLVKHPNVLQLFEVMASKSKIYFVLEYAKGGELFNKIAKEGKLSEDSARRYFHQLINAVDYCHSRGVYHRDLKPENLLLDENENLKVSDFGLSALAESKRQDGLLHTTCGTPAYVAPEVLSRKGYDGAKADVWSCGVILFVLVAGYLPFHDPNLIEMYRKICRADFRCPRYFSAELKDLIHKILDSDPSTRISIPRIKRSTWYRKPVEINAKNSEAATTNSISSGVATTSGSAECSTSEENQGSLSLPNLNAFDIISLSTGFNLSGFFEDTHGHQEERFTTRQPVTTVLGKLKELAKRLKLKVKKKDNGVLRLAAPKEGKKGFLELDAEIFEVTPSFLLVELKKTNGDTMEYRKLVKEDIRPALKDIVWVWQGDEHLNSQSILQGEQQQSPLPPELPQDQLQPSLPQQEKQDMPEPPLLPQVNASTGNHNDHWLVHWLMMKPFRFPPPDSVPSTGRDEEEGSSHHGNGSGAARENPENPLPDLALAKSESDRIKAFYQTVLSAIVVFIVAALSGYKDMKPLYSTTNHKKVHLSNLLVIEGFCMIATFICAAVLMMYEFYTCRDLTVLIAVAGAMLVATDTILVVIANRDNAVFAVLFVPVLLLVGMAVYTGASMEEQPPNSPHDGGYDEATKSTFDLATVSTMAALGLQGTIVFGYLKTPEKKSEHDDPPLDLAVCYIASTVCLTVMAFLDGFVVLSVWPEAVALVLYYAAQLCSGRQPGGGVGSRPWIEFVFRIVATAGFTLMAGLYAAFLGTNHYSVYLKAAMLVLLMAVLSSLSRLANPVYMPEIDGALLEFCVAGVALAFPAVSLLVACPLVLKVFVDLYIHHSSL

SEQ ID NO: 136509 - protein, 61 aa, Oryza sativa
  Clone ID: PAT_MRT4530_38081C.1.pep
FDTPPASESLNALKMELAPAALPLLKGMVGTADVLEACTVVNVAAMAGGFPMKDGMERKEV

SEQ ID NO: 136510 - protein, 101 aa, Oryza sativa
  Clone ID: PAT_MRT4530_38082C.1.pep
SGTGRRRAANRRRTHLNRSGTTSRTANGRRFLSAAGASSVLVYAAPPARRSQISSSRLAPNFCGLTPRDLPIPLRSQREVIRRRAARSPTTRRQAGSARPS

SEQ ID NO: 136511 - protein, 115 aa, Oryza sativa
  Clone ID: PAT_MRT4530_38083C.1.pep
MISAISWVPRGAAKLVPVEAEPPTQEEIDEAIKAIAQHTEGGSDADEDADDGEENGNMEVDAAADEEEEEVDEVAQAKAAAKALAKGAVDDVADELKELNMDNYDEEEEGLEIFS

SEQ ID NO: 136512 - protein, 114 aa, Oryza sativa
  unsure (1)..(114): unsure at all Xaa locations
  Clone ID: PAT_MRT4530_38084C.1.pep
CTSSTRTTMRSPARSSQVQGPHRPHRGRRSDAGCDGHDPRRHRQQGQRGVRRSFRAGAAVSRHGCVSLXHRWRSSRRTRRTXXXTMRQPKAPLIWPPLVQWLHWVCRGPSSSAT

SEQ ID NO: 136513 - protein, 138 aa, Oryza sativa
  Clone ID: PAT_MRT4530_38085C.1.pep
LRPPLPPPLPVPQRRTAATPPPTPVLPLAAHSSDSSTAFSSTGETNLAPSPPPPIHRWRHLGEDVVAVAVGTSPLALSPPNSVTPSPRSGDDLPERPYPPRQASPSLININRYLPIPRPPPPQKSGVHMQYLRVKRSF

SEQ ID NO: 136514 - protein, 98 aa, Oryza sativa
  Clone ID: PAT_MRT4530_38086C.1.pep
DPLYFLPFFFFFFFFFFFFFFFLTKTTMSILYILFIRSTLPTRTKKVSAKTTLYRHCRLLKKKSVLLCFFYSLIWFDRRKIQNVNSNEICKNTEHHSK

SEQ ID NO: 136515 - protein, 86 aa, Oryza sativa
  unsure (1)..(86): unsure at all Xaa locations
  Clone ID: PAT_MRT4530_38087C.1.pep
LDDNVHRRPINRTCENLSASNNXCMRCLQLIDAIKHAVEAACSGVASCANIIALAGRDATYFLSGGTVYFDMTXGRWDGSFCKDSS

SEQ ID NO: 136516 - protein, 390 aa, Oryza sativa
  unsure (1)..(390): unsure at all Xaa locations
  Clone ID: PAT_MRT4530_38088C.1.pep
MPATDSSSAAAPLTSFGRSFLSHRRDQIPPPPPDHHSHSHTQHPSSSDLEIDAFHRHAADLLHDLLSDSNSDPSAPDLLSLAWTRRLLDSFLICLEEFRAILFALADSQPLSRPPLDRLLLDFLDRAVKALDLCNALRDGLDLIRQWRKHLAIAAAALATAPAAQRGEAQIRRARKALTDLTILMLDDKDAGGVVGQRNRSFGSASTTXDSLPHGHSHHRRSSSGGSSGSGSGSHLXGLASAVYAMGAVLFVVTWALVAAIPCQDRGLQAHLTAVPRTFPWAGPLITLFDRILDESKKKDRKHSCGLLKEIHQIERCSRQLMEVTDAAEFPLADDKDSEVQEATQELVQVCGSLKDGLDPLERQVREMFHRVVRTRTEILDYLSRPHNAG

SEQ ID NO: 136517 - protein, 425 aa, Oryza sativa
  Clone ID: PAT_MRT4530_38089C.1.pep
MPATDSSSAAAPLTSFGRSFLSHRRDQIPPPPPDHHSHSHTQHPSSSDLEIDAFHRHAADLLHDLLSDSNSDPSAPDLLSLAWTRRLLDSFLICLEEFRAILFALADSQPLSRPPLDRLLLDFLDRAVKALDLCNALRDGLDLIRQWRKHLAIAAAALAPAPAAQRGEAQIRRARKALTDLTILMLDDKDAGGVVGQRNRSFGRAGTTRDSLPHGHGHHRRSSSGGSSGSGSGSHLRSLSWSVSRTWSAARQLQAIGGGLTVPRANDIAATGGLASAVYAMGAVLFVVTWALVAAIPCQDRGLQAHLTAVPRTFPWAGPLITLFDRILDESKKKDRKHSCGLLKEIHQIERCSRQLMEVTDAAEFPLADDKDSEVQEATQELVQVCGSLKDGLDPLERQVREMFHRVVRTRTEILDYLSRPHNAG

SEQ ID NO: 136518 - protein, 50 aa, Oryza sativa
  Clone ID: PAT_MRT4530_3808C.1.pep
ETSAGFCYIIHLYSIQLWPQIYAILYIYNYKLFKVKLLVLALKHIPFSPE

SEQ ID NO: 136519 - protein, 136 aa, Oryza sativa
  unsure (1)..(136): unsure at all Xaa locations
  Clone ID: PAT_MRT4530_38090C.1.pep
KLLYRGPPVSIFSSFSFSSSSSSSSRVLFFSFPSSQHRRRREGAPVPWWPGDDDVGGHACSRATRTXGSCRLAKERREEAGTARGKAYLRRQGEVAVVAYFEGGKEGEVGKWVCLAEAKLVARGFGQWGTGEGDPS

SEQ ID NO: 136520 - protein, 159 aa, Oryza sativa
  Clone ID: PAT_MRT4530_38091C.1.pep
MGWKAAEKLIRHWKILRGDNVMIIRGKDKGESGLIKRVIRSQNRVIVEGKNLVKKHIKQGEGHTGGIFSIEAPLHVSNVQVLDPVTGKPCKIGYKYLEDGTKVRFARGMNASGAVIPRPEILKERRKPRPTSPGPKDTRIEHVLEKTYDAKAGIGMPDL

SEQ ID NO: 136521 - protein, 44 aa, Oryza sativa
  Clone ID: PAT_MRT4530_38092C.1.pep
HINGNFILLLVWICKLIVSDTILDQNLISIIEVLNYSLNDIISG

SEQ ID NO: 136522 - protein, 188 aa, Oryza sativa
  unsure (1)..(188): unsure at all Xaa locations
  Clone ID: PAT_MRT4530_38093C.1.pep
MSALISLFFSLSIFLLPCQLSGINYDRVGNNLPRRMAMSSMLSSLKVGRVWLYDADPANTGVELVVGVPDECLAAVSTPCGAASWCLHEALAQLGLDKQVVITTTHNLGVLATSYPPSSAYFHKDLLPLLCPILDFHARTGSLFLVYAYPXTYAKDPTGVELEYALLEPTYVRRFSSSSSPPPTSASC

SEQ ID NO: 136523 - protein, 320 aa, Oryza sativa
  Clone ID: PAT_MRT4530_38094C.1.pep
MTRRFWSSHHGSTKLCHCHYSGNFSRYLIAIAISVGLPDSVGGVLWGPVSNLATRWGLSDLHCKGMVPIDEDETHEGIKTIRIQKACEFTTSSVLCVCIITWNMNGKMSVEDVTKLVSSNRKFDLLVFGLQEVPKCDVAQVLQETMAETHILLCQKTMQSLQMFLFGAKSSEKYIRELKVDKHAVGGCGDITVWLGDLNYRLQGISSIPARKLIEENRQSKLRGKDQLLQEAEKGEVFNGYCEGTLLFKPTYKYNIGSSNYDTSYKIRVPSWTDRILFKVDHTSGLDAVLNSYEALDCIRSSDHKPVRAHLCLKVHGDSA

SEQ ID NO: 136524 - protein, 132 aa, Oryza sativa
  Clone ID: PAT_MRT4530_38095C.1.pep
MLGDKIGHKVAHGGRTPCEEVFATEFAREAKPIQPFFVAQDDGWISWQGGQAEQAQDKTTAHGIDTMHGQAREIARGMRAQWTRGGKEFDHGAHVEEHAGTHMGGIWCRLFVKRGSRCGKRRGFNPGYFLRM

SEQ ID NO: 136525 - protein, 73 aa, Oryza sativa
  Clone ID: PAT_MRT4530_38096C.1.pep
SQISTIDLWFCGILEFFQAHRGQNSNGVMLLKGIFTDPTCMPAQTYVFKKAPLGHCKFSTHCPALALLQPSGR

SEQ ID NO: 136526 - protein, 95 aa, Oryza sativa
  Clone ID: PAT_MRT4530_38097C.1.pep
MRATGRGAAATGRHGRRLKRENGRRGFHFIAEGNERATGEAWNGGGNGARRPWKVARNGAGVPGNGGCHSRGKLGEIKEDGRGINSPQSILESNA

SEQ ID NO: 136527 - protein, 89 aa, Oryza sativa
  Clone ID: PAT_MRT4530_38098C.1.pep
AIIGAFGFLTAAQPQDKAHVDAGSKPGIGVRNALFVLAGCNLVGFLMTWMLVPESKGKSLEEMSGEADDEEASANGGAPAVNSSGVEMV

SEQ ID NO: 136528 - protein, 128 aa, Oryza sativa
  unsure (1)..(128): unsure at all Xaa locations
  Clone ID: PAT_MRT4530_38099C.1.pep
ERKVQLSREPMTTRFPVPTSTSTVDGDTRRPDIDDSGVHXYEDLRNTTSSKQNTRIILVQAPWKVIALIQLVWDYMIETTDYKGXAELDDTDESVVELVQLDLLATIFDALGPXPGGPLYTAGQLISK

SEQ ID NO: 136529 - protein, 388 aa, Oryza sativa
  Clone ID: PAT_MRT4530_3809C.1.pep
MTRKAKIYCMGGNDLYKKAPNGILLKCVSTDDGRQLLLDIHEGICGSHAAGRTLVGKAFRQGFFWPTDLKDACDIVQRCEACQFHSKHTKLPAQALQTIPLTWPFSCWGLDILGPFPRGQGGYRFLFVAIDKFTKWIEAVPTGEIKADNAIKFIRGILCRYGLPHRIITNNGPQFISADFQDYCIGLGVKICFASVSHPQSNGQVERANGIVLQGIKTRVYDRLMSHDKKWVEELPSVLWAMHTTLTTSNKETPFFLVYGSEAMFPGELRHQSTRVQKHSDENQEKQRDIDVNLLEEHRERVAVRAASYQQALRRYHEKRIRACILSIGDYVLRRVQTQAGQNKLSPKWEGPYTITQVLRPGAFKIADGDDRELANSWNIDQLRKFYV

SEQ ID NO: 136530 - protein, 48 aa, Oryza sativa
  Clone ID: PAT_MRT4530_380C.1.pep
HWRLLNDTTIQHDSNSFLNNHVLSCATFVCMPLSVSHTISLIFKLNLA

SEQ ID NO: 136531 - protein, 102 aa, Oryza sativa
  Clone ID: PAT_MRT4530_38100C.1.pep
MGLLLEVTEAQDNMGPMWLQEDVTGHWLTFPIIGRLQFPRLQILEVYQLQMMHLDFVHFYDMFVSISSSMELFYWYFTVWHARDASTSTAATSWTSSHIVEA

SEQ ID NO: 136532 - protein, 135 aa, Oryza sativa
  Clone ID: PAT_MRT4530_38101C.1.pep
TRPDGSSRCFDRSSLERISPRDSLSLASTSARIDELDDCVEGLSLLHLACRVADVGMVELLLQYGANVNSADSRGRTPLHHSILKGRHMFAKLLLSRGADSQATDRDGRTALQYAIDSGTIDDEEILVLLEDPSR

SEQ ID NO: 136533 - protein, 773 aa, Oryza sativa
  Clone ID: PAT_MRT4530_38102C.1.pep
MFFTRLDDSPMFRKQIQSLEEGSELLRERCLRFHKGCRKYTEGLGEAYDGDIAFASSLEAFGGGHNDPISVAFGGPVMTKFTIALREIGTYKEVLRSQVENMLNDKLLQFVDIDLHDVKDARKRFDKASLLYDQARERYLSLKKGTRTDVATAVEDVTALSNIEAKKRFEFLEAVSGTMDAHLRYFKQVLAYAQQSRERSNYEQAALVERMQEFKRQIDRESRWSPNGINDSPNGDGIQAIGRSSHKMIEAVMQSASKGKAHISAWKFMSYFKSGYTNQRSSAPSEHGSGLLSRWFSSHYHGGVHDEKSVARHTVNLLTSTIKADADQSDLRFCFRIISPTKNYTLQRLLSSPKGSGHNRTASESSSFSSSTELDHSISEDCMLERNSGSGYFDHSGRAIQHHRTSMKPDKPIDLLRKVVGNNICADCGAAEPDWASLNLGILLCIECSGVHRNLGVHISKVRSLTLDVRVWEPSVINLFQSLGNTFANTIWEDMLPSSSSVDHGDNSRADGLENTSHNLIFSKPKHSDHIAVKEKFIHAKYAERDYVRKLNMDDSLVAQQMWENVSSNNKKGVYSLIVGSNADVNLTYGQTSFNSALTLGKALLLQEQPTSPSDGSSRCFDRSSLERISPRDSLSLASTSARIDELDDCVEGLSLLHLACRVADVGMVELLLQYGANVNSADSRGRTPLHHSILKGRHMFAKLLLSRECVNIIKLGIVPGEMISGSWFLQCGSWGADSQATDRDGRTALQYAIDSGTIDDEEILVLLEDPSR

SEQ ID NO: 136534 - protein, 61 aa, Oryza sativa
  Clone ID: PAT_MRT4530_38103C.1.pep
MEMERQHSRWKFEGAAVMDNSMWTSPKAVRIWETIAVGVRSKLAEIWESTIEEVLALMVPE

SEQ ID NO: 136535 - protein, 73 aa, Oryza sativa
  Clone ID: PAT_MRT4530_38104C.1.pep
PRMIPPPPMVPPPPPGAIPPRAPPPMAPPTKNAALGSSKEGGPFFAAPGGWRKVSPPPAKGLKAFKLLVITYF

SEQ ID NO: 136536 - protein, 50 aa, Oryza sativa
  Clone ID: PAT_MRT4530_38105C.1.pep
KMFETHIKKMFTNPKTYNSPETIYYKCPPRLKSFFSNKEAFQLAQASTKN

SEQ ID NO: 136537 - protein, 230 aa, Oryza sativa
  Clone ID: PAT_MRT4530_38106C.1.pep
QHFLQGQCLQNPLAVRCTLLSHKHHRRPYRPHSPSPSPLPQGCTDNCSDPMTTTPIGSPCGCVLPICVIVDLDVAPYLLFMRIAELEVEVAAGTFLKQSQVKIMAAIPSIQDDQKTRVTIYLVPLREQFDGYTASLISDRFWNNKIQINSSIFGDYEVINVTYPGLRSPPPSLPETSHGSDPTGTGEDPITADVHHGKNKKLDSWIIVVVAGSSITLIAACIGLGVLLLK

SEQ ID NO: 136538 - protein, 249 aa, Oryza sativa
  Clone ID: PAT_MRT4530_38107C.1.pep
MLAVFDRAVAPSPEGLRHPGAAGDGAAGLAERFRDARPGAVTVALGPGGANSLAYSSHGQSPLLPRLFAATDEIFCLFQGTIENIAVLKQQYGLHNKGSTEINIIIEAYRTLRDRGPYPADQVVRDINGKFAFVLYDCSNNSVFMATDADGSVPFYWGVDPDSRLVVSDDDEIVNKACGKSSAPFPKGFFFTTSGGLQSYEHPMNEVKPVPRLDSKGEVCGTTYTVDAKAKKDSSIPRVGSAADWSSQY

SEQ ID NO: 136539 - protein, 129 aa, Oryza sativa
  unsure (1)..(129): unsure at all Xaa locations
  Clone ID: PAT_MRT4530_38108C.1.pep
FPQKTVLKMATINGPKPVLWDNKKGSLKVGKKAKMVFVKPLKWSMVPGQDCIAKKVYCMKTKKIXFVMCNGRWIIREKKIVNFNKEEVIASTKKKTRALLGRGGINLPNGKNNLGICKDRLAFCSRAPA

SEQ ID NO: 136540 - protein, 639 aa, Oryza sativa
  Clone ID: PAT_MRT4530_38109C.1.pep
MARALLRITRSYCPLSPSPRLPPPLHHRGAAPPLRFRFLSLSSSSAPSSSAAATANSSDGPGEKGGGGGGWDDYLGMSDDELMGQCEMGTFKASGPGGQHRNKRESAVRLRHRPTGIIAQAVEDRSQHMNRASALSRLRTLIALKGFAITGSPLTEADHHNLQLNAQAMNALFNSLSQEEFDRVNNLETAYEIWNKLSEIHEGTSEYKDAKLHFLKIQYEAFAMMLNAIVNDLKGLEAIYSDIKVAQKMLWALSDKYEHLVTFVINSDMSRMTPEEIALLARMFNDLLGRNERGKGSNSNRRRNRRPNKTFSNFRCFECGEKGHFASKCPSKDDDGDKSSKKKSGGYKLMNKLQKERKKIKAFIGQWDSNEESSASSGFEAEDSDDDASSKKKKMAVVAIKEAPSLFASLYLMAKGSFKLVSMIMRSEKEIVKFKALKKDHASFEVLYEELKTSHERLTISQEKIKEAHDTLLSITQHGAHIDVGISCDLLDDSTTCHITHVASSSISTSCDDLMDMPNSSSCDSICDASLVVENNELKDAEQYAQSEKEEEEEVKGAEEEENDDGNDDGEDDEGPLDPSIQFVLNLRNPTQYTILRHHDQFRVPRDSDDPRFHTVSEGRIIECYEVDVRAYAVFYHSA

SEQ ID NO: 136541 - protein, 191 aa, Oryza sativa
  unsure (1)..(191): unsure at all Xaa locations
  Clone ID: PAT_MRT4530_3810C.1.pep
ARGAYELVATPATRVYGRFRNAHTRRTATGAGITATGGHWSRGEGARRPGPREWGPRGRLTVHGGPXHSARPRAAKPARLAGGGARAPMVAGGGHRHGGAAAEREEGKGEKKRRSTAHPRSTATTKKAARAEEGGGAARVDGVDGVPAVGDRNGGVDEVGEDAAKPKEAAPRWEVGGERRKRTEEERGGFK

SEQ ID NO: 136542 - protein, 594 aa, Oryza sativa
  unsure (1)..(594): unsure at all Xaa locations
  Clone ID: PAT_MRT4530_38110C.1.pep
MSNEVNHVGKAPMFNGTNYSTWKIKMSTHLKAMSFHIWSIVDVGFAITGSPLTEADHRNLQLNAQAMNALFNSLSQEEFDRVNNLETAYEICNKLSEIHEGTSEYKDAKLHFLKIQYETFAMLPHXSVNDMYRMLNAIINDLKGLEAIYSDIEVAQKMLWALSDKYEHLVTFVINSDMSRMTPASLLGKIKTDDVYKLKKKMEEASPSKKCIALQAEVEDKGKSKVNEANDDXQEEIALLARMFNDLLGRRNERGNGSNSNRRRXMAVVAIKEAPSLFASLYLMAKGSFKVTSLSDSESDDDHDDASYDXLVSMIIRSEKEIVKFKALKKDHASFEVLYEELKTSHERLTISQEKIKEAHDTLLSITQHGAHIDVGISCDLXLDDYAICYITHVASSSISTSCDDLMDMPNSSSCDSICDASLVVENNELKEQVAKLNKSLERCFMGKNTIDKILSEXECILNKEGLGFIPKKGKKPFHRATRFVKSNGKYCSKCREVRLNDYPGLSLLXTCMFDSHYMLRKDHDGSIVARYVGFPILGGKKNVIWVSKALVSNLQGPKQVWVELDLLLLFFLDDLSPSSSFEGHLEAKCPFSP

SEQ ID NO: 136543 - protein, 338 aa, Oryza sativa
  Clone ID: PAT_MRT4530_38111C.1.pep
MGAGNGEVRYGGGGAGAGEAAVMADDGTTVFRGTAQPPVRTTVALALWLGAIHFNAFLLLASLFLFPRRVAAMVLATQLFFMFAPVNDMSRLGRKIARFISKCVIGYFPVTLHVEDYKAFDPNRAYVFGYEPHSVLPIALGVLLELVGFMPLPKIKVLASSAVFYTPFLRQIWTWLGLVPASRKNFYSYLKAGYSCVIVPGGVQEMLHMDHDSEVAFLKSRKGFVKIAMETGSPLVPVFAFGQSYVYKWWRPGGKLIVKIARAIKFTPIMFWGKFGTPIPFATPMHVVVGRPIEVKKNAQPTFDEINEVHEQFVVALQELFEKYKTKAGYPNLHLRVL

SEQ ID NO: 136544 - protein, 59 aa, Oryza sativa
  unsure (1)..(59): unsure at all Xaa locations
  Clone ID: PAT_MRT4530_38112C.1.pep
HRNCCRRRCPPRRSVPHRHRSPLKARPPPXPRRKPFCRQVAADAFHAKLLLAATDPCCH

SEQ ID NO: 136545 - protein, 266 aa, Oryza sativa
  unsure (1)..(266): unsure at all Xaa locations
  Clone ID: PAT_MRT4530_38113C.1.pep
WNAPEKTWMGDXTPCDYTNILLFVATTIISLGNESIARFWDSAWLPRRRPKDLAPQVYTTSTRKKXTLKKAFEGETCIQNLDLSVNGDMLVELLDQLVSLXNIVQDVQLVDAELDQITRKLTTHGEYITMSAYKVWFLRSKAXNYTTIIWKSWAPRKCKFFVXLIIXNRVWTSDRLETRXMAEQHPLCXHTLEMAMHLTAECRYTKRIWGLISTXSPTSXIKPANWNNHATGHEWWMGLASNPGVPKKGLRSLILLVSWEIWKEQN

SEQ ID NO: 136546 - protein, 55 aa, Oryza sativa
  Clone ID: PAT_MRT4530_38114C.1.pep
KLCFFKNYCCKYFHKEKKGSKVIRRGGTCVPEATNFLLTLFSHHIIPYKHFLTTM

SEQ ID NO: 136547 - protein, 123 aa, Oryza sativa
  Clone ID: PAT_MRT4530_38115C.1.pep
SVVEKVQSFLTALRALSHKDFHYGSYATSEQVSATGDMCAICQEKMHTPILLRCKHIFCEDCVSEWQPMLMPQLCADKKAGKQAGRCFRCVRLCCSRLRAEQPYVVLNQSPRLPHQLKAKKST

SEQ ID NO: 136548 - protein, 80 aa, Oryza sativa
  Clone ID: PAT_MRT4530_38116C.1.pep
YCLKPNRSSIPTRKIKDLILPENQHGHQKLTKKGARKSLKPIRVKKEARNRTPWFGARRLTSVAKLHHNLLPFSQKRAKL

SEQ ID NO: 136549 - protein, 645 aa, Oryza sativa
  Clone ID: PAT_MRT4530_38117C.1.pep
MAAPPLSSWPWASLGSWVQYVLYGAVVWKVAEEWRQQGAAPVGSWWLHLLLLFAARGLTYQFWFSYGNMLFFTRRRRVVPDSVDFRQVDAEWDWDNFLLLQTLIGATLVGSPAVARQQLLLPSLKQAWDPRGWAIALLLHVLVAEPLFYWAHRALHRAPLFSRYHAAHHHASVTTPLTAGFGTPLESLLLTVVIGVPLAGAFLMGVGSVGLVYGHVLLFDFLRSMGYSNVEVISPRVFQAVPLLRYLIYTPTYLSLHHREKDSNFCLFMPIFDLLGGTLNHKSWELQKEVYLGKNDQAPDFVFLAHVVDIMASMHVPFVLRSCSSTPFANHFVLLPFWPVAFGFMLLMWCCSKTFLVSSYRLRGNLHQMWTVPRYGFQYFIPAAKKGINEQIELAILRADRMGVKVLSLAALNKNEALNGGGTLFVNKHPELRVRVVHGNTLTAAVILNEIPSNVKDVFLTGATSKLGRAIALYLCRKKIRVLMLTLSSERFLKIQREAPAEFQQYLVQVTKYQPAQNCKTWLVGKWLSPREQRWAPAGTHFHQFVVPPIIGFRRDCTYGKLAAMRLPKDVQGLGYCEFADMVGRRSPGNICVQYTMERGVVHACHAGGVVHFLEGWEHHEVGAIDVDRIDVVWKAALKHGLTPA

SEQ ID NO: 136550 - protein, 48 aa, Oryza sativa
  Clone ID: PAT_MRT4530_38118C.1.pep
GSILFKISALYHVHSIPAEITFLKYEALKIQYGIRDTGLVLFSARKHQ

SEQ ID NO: 136551 - protein, 136 aa, Oryza sativa
  Clone ID: PAT_MRT4530_38119C.1.pep
ATLISGRIISSADATTTIDRNCVANLLLAIDKLLKMEESQNTDETESALEALGLIGTTSAGACLMLTDSSNAARHVVEASFGRQARGKQLAALHAFGSISGVDRSEDQIKLDNQAEEPLKRFVYTTVRIQPKLTPY

SEQ ID NO: 136552 - protein, 198 aa, Oryza sativa
  unsure (1)..(198): unsure at all Xaa locations
  Clone ID: PAT_MRT4530_3811C.1.pep
PPPLRPPLPPPLPPPTPPPPFPLPPKRSXPHPVPEPPTTTTMTTETAMRRDAASSRRQCPPPPPTPAPTPPPTPAPRHPPPPRPPPPRYPLPRRRPPPPRSAPXPVHLRPPSIPQPRGRAPNPSPPKRRPQPPEPMAAHAWNPFVPMPPQAPPSEEEEEHSPSEKSMRKSRPLHSDKLKPGSLHMKDEMIHLYLNNSM

SEQ ID NO: 136553 - protein, 138 aa, Oryza sativa
  Clone ID: PAT_MRT4530_38120C.1.pep
MASRLSLLLLLALVLPASGDDAAAAEAAPPPAPAGGASFNVTEILGRFPEFGLFSYLISKTHVDRDINSRNTVTVLVPDNSAVDWLLRRSARLPRAALVELLSVHVVLDYFDAAKIAALTAVKPTVSTTLIQTTGNAR

SEQ ID NO: 136554 - protein, 352 aa, Oryza sativa
  Clone ID: PAT_MRT4530_38121C.1.pep
MKQTKSHICSSDNDKPGTLVPKSSDLNSISVKNLTRESAPAEENAAESSSFQILGKRKLYVTSDSSHGMNSNIKRQRKYICPSDSDSSNEQICNDDVAVPDNQSTGQNVPIEVDSEEEGNARHGGNQQTCQKNVNDTAAQKYLNSVIAYPYPDFDFGKSRDTEETDESIKQYGWAGDMEGKGLVTRSDRVQFSEISQAKSHVPPADNDMPGTLVPRSPDPNSIAVQNLTGESVSAGTNAPGSSSLQILGRRKLCDSSDSSRAMNSNIERKRKYNSPSDADWSNEQICNDDVAVTENQFAKQHVPIEVDSEEEGNEKHGDNQQSHRKDDTDTSSQNSANPFFFGNTLLAYFCI

SEQ ID NO: 136555 - protein, 235 aa, Oryza sativa
  Clone ID: PAT_MRT4530_38122C.1.pep
MESGTGRARMASLVSLAREECGREDAEHELATAYGYTEPRRSRATISRDGRSRNPAVRHRLSPAARESGIVMARGGRNHRVGPAGGTVRDQGGTARAGLRDRAGRASPQRATGLMGAGAGASREGATVPRPHSAGASDPASRESLLPSLSHRRRSPSPVIAPKFVSLSIAAAAADLHGCAAASPLLVAAPCDADEYQVVVFLHGYLASNSFESQLFEHVASHGFVVVGPRFLTPY

SEQ ID NO: 136556 - protein, 742 aa, Oryza sativa
  Clone ID: PAT_MRT4530_38123C.1.pep
MSASKRIHWDEIGIGQALDLTIANSAKDEPLMAAASYFWSNTINAFLFNQWPMTPTLIDIIMITGLDVTSSANPMNLNTKNQYDFKTKSIGGWSVYVAAYMGQGPVTPREHVAFLLMWLEKFLFCGSSCGPTTNWQFVAEALETKRQFPLGKILLGYLYHMLNNASAKLVVGSVVGAVMKFVNRPSVTEAEFPRLEPIVDSDGEERIHRRCTSYGEYASTPTDAGAKLSAKLLKDWFCSFYEGFQKEARVWFLYEDSTLLENPLDFRFEDINHDRYQKPREIFSTAISPCILPVGIHQGRNFQVSYEFYHPMSSARQFGMGQLPIGLFFADKIQCRGEISSTLMMDQLLNLQGPPLGSIDNIELATFRGKAFDRWWGEWKLHTTESSPPRQSNSGRDIKYAPGLIPNGGGPSPPVIGYNAPKTSALLQGLIREPADAGKKRKTRSSAVDILSPAPKKKTKTKKAKPADDLPALDPSIEQALDEEEIEEDVDQAAAEKKKTAVKKKSAAITSKPVPPALADLFSFDIKDYFDEIEEETTSKALAPLDDTVKKTLGDISLRLNSSLDYLVADCGSIRARFTEIQALIPDDLANIITPAVYLEQHQFKLEKAKQRIANRRERKDIEATIQANRQLVHEEKSKHDQLSEGPIKSNIDRLEAQKIELLAQLQECNAKLDIEHKKLADLPKSVEEQKARLKSAIRNVADLTKSLKVIPGTDAQDAQAIEEVEQIRQKAISAIQRYLSQ

SEQ ID NO: 136557 - protein, 538 aa, Oryza sativa
  Clone ID: PAT_MRT4530_38124C.1.pep
MALAAAAAAHHLVAPAAVSPYYSARVSPGFLRLHDFPRSVGLAATAAPRGRKVEDPDTLEKIRLTVINNLLQYHPESSENLAMGEFFGIKAPEKKVDVDVVTHVIVEDDGPKRSMLYIETADRPGLLLEIVKIITDVNVDVESAEIDTEGLVAKDKFHVSYREESPFASLLASDPPPPEALREVLAAGDVHAALRGLPGLARQLFRWAEATPRGFPRCASAYAAVLVPLAEAKHLHAAHPVSVRAIHLGLLLPLVSLLLSFPTTVSLHYLLNLLLRLSTKFNTRARNPAPSTCSTLCLAAFREMAHHGVPPFIKECNLVLRALRDEARWDDMRSVYAEMLQLGIEPSIVTYNTLLDSFFREGRVDQAAKLLREMEARPGGCLPSDVTYNVVINGLARKGELEKAAQLVDRMRMSKKASAFTFNPLITGYFARGSVEKAGALQLEMENEGIVPTVVTYNTIIHGMFRSGNVEAARMKLGDLEEARRFKQEMVEQGCQPDVSTYTILMNGSRKVRNLAMGFDEGQSKHAIQYMENVVLGA

SEQ ID NO: 136558 - protein, 118 aa, Oryza sativa
  Clone ID: PAT_MRT4530_38125C.1.pep
PAGVLSLRWVGFSSPSLPFPPRIGSERRLRKSEERGQRRPAQPHRVDGEDPHNAPSGFPKIVTAEHYEPGVYKKAIMVSNTVRNMLTTPSGFSETSEVEVRSPYISTRIHPARSSRSS

SEQ ID NO: 136559 - protein, 279 aa, Oryza sativa
  Clone ID: PAT_MRT4530_38126C.1.pep
MALAAAAAAHHLVAPAAVSPYYSARVSPGFLRLHDFPRSVGLAATAAPRIFCQSINSADVLGASSTTSDDAIPQPVVLIDQDSDRDATIVQLSFGDRLGALLDTMKALKDLGLDVTKGSVSTESAVTQTKFHIMRSGRKVEDPDTLEKIRLTVINNLLQYHPESSENLAMGEFFGIKAPEKKVDVDVVTHVIVEDDGPKRSMLYIETADRPGLLLEIVKIITDVNVDVESAEIDTEGLVAKDKFHVSYRGAKLNSSLSQVLVNCLRYYLRRPETDEDSY

SEQ ID NO: 136560 - protein, 55 aa, Oryza sativa
  Clone ID: PAT_MRT4530_38127C.1.pep
ASHSRSPPAPLPGHMQKEQDALRPCFHSSFSPPRKRDPRASRRLRGGVATDTMVV

SEQ ID NO: 136561 - protein, 204 aa, Oryza sativa
  unsure (1)..(204): unsure at all Xaa locations
  Clone ID: PAT_MRT4530_38128C.1.pep
MAARGGRERREAAHGGPARREARSAARRGEAVRGGRARRGDTRRPGEEGGGAQRPAEEGGGARRPGEERRRAASGLRETTRGGPARREEEXAVLGSPARRGGARRPGEEXGARRPGDEGQLQPGCDHXGRRRRWPGEEGGGACDYRARRGRAVRLGITGGAAGQPPCSDPAAPLHRPPPLHPRPPCSGPATPLHRPLVAAAPLH

SEQ ID NO: 136562 - protein, 37 aa, Oryza sativa
  unsure (1)..(37): unsure at all Xaa locations
  Clone ID: PAT_MRT4530_38129C.1.pep
SSLNRKRPRLCXSSCTQLYSFSHPSNTDQITTAYEIT

SEQ ID NO: 136563 - protein, 108 aa, Oryza sativa
  Clone ID: PAT_MRT4530_3812C.1.pep
MEEVKPMTVKYIVTRFVEADAAEFKSVVQSLTGKDSTAATASPEEEGSRRRRTGHHRHVVPPPAPRRWLRRNVDDGGFLDAGIIMQPPAKTVIVGGCFITTTSENDLR

SEQ ID NO: 136564 - protein, 306 aa, Oryza sativa
  Clone ID: PAT_MRT4530_38130C.1.pep
MGVVTRAMKRRLDEESSNPELAPRGGEDLISRLPDDIFTSIITILPGKDAARTQMLSRQWRPLWQSAPLNLEAMVDSRTGKLEEVIIENAPLLERLTPPCIRNEGFVIWVTQAPKMKTLGYLSHKISTIELGTMVFQKLVPVSLSNVMCTVKILALDRAPDLDVVIDFLKCFPCVEKLYVVAFIQGNFKNALRYVSLECLDLHLRMVEFINYQGNMLDLNFIRFFVLNARVLECVKLVAAHDKYGRKWMEKQQQKLQLYGRASRGITFDFQADYGSNGSVHMKHISDLTTDDPFDSSFCRCRDEEL

SEQ ID NO: 136565 - protein, 118 aa, Oryza sativa
  unsure (1)..(118): unsure at all Xaa locations
  Clone ID: PAT_MRT4530_38131C.1.pep
EILLVDNVLPETTYRAKKFIHLLGLEIQKIYAXRNNWILYWGDYADLDQCPVCEASRYKCGDIGSNGTMNKKRVLVMVVWYFLIILHLERMLANKKIAKLMRWLLEEREVDAIVGCAG

SEQ ID NO: 136566 - protein, 220 aa, Oryza sativa
  Clone ID: PAT_MRT4530_38132C.1.pep
YSINIIRFLRVKYRKTKEKFSFLHVVERKHRKIFIYSSLLKNSYELGGAEHARCSGILVVVFPNSKSEPKGLSTNELLNTLRELRVDSILLASYSKLIPVELVQAYPRSIWNIHPSLLPAFGGKGYYGLKVHKAVVASRARYSGPTVHFVDEHYDIGRTLAQRVVSMLANDILEQLATRVLHEEHQVYVDVVTALCDDRIVWREDGVPIIRSRTNPDEYT

SEQ ID NO: 136567 - protein, 53 aa, Oryza sativa
  Clone ID: PAT_MRT4530_38133C.1.pep
MAVERCMLHYTVRELLEAYEIYSGVRNVPVAEAIVAVGDLPNSLGWSVHMVAP

SEQ ID NO: 136568 - protein, 60 aa, Oryza sativa
  unsure (1)..(60): unsure at all Xaa locations
  Clone ID: PAT_MRT4530_38134C.1.pep
YSWPYGPPSMAWPKHDRAWAEVSRAGTAQRTXPCQPTGYGHSPGTALVASGRAGLARRPG

SEQ ID NO: 136569 - protein, 95 aa, Oryza sativa
  Clone ID: PAT_MRT4530_38135C.1.pep
PGFPAWKPARTPIAINLRYPPHEAPRVFPFRLPGAYVGEKRDRPPIPPRPRLCPCLPPPLIGPPVGPAGPPPGPRRESRGPPPGPASWACMGGGS

SEQ ID NO: 136570 - protein, 125 aa, Oryza sativa
  Clone ID: PAT_MRT4530_38136C.1.pep
MVKKELERRSRARRPPSSYGSTGRSSRRALKLRSSSERDASMLRSAPTNQGRHWNRGGFGKEIDSKNRVCIGCEGIGWSLHRLRWIGQRTADTADRGDAADSDDDGFKDVSRVDQSASRGLPRWR

SEQ ID NO: 136571 - protein, 402 aa, Oryza sativa
  unsure (1)..(402): unsure at all Xaa locations
  Clone ID: PAT_MRT4530_38137C.1.pep
MEPRVGNKYRLGRKLGSGSFGEIYLGTNVQTNEEVAIKLENVKTKHPQLLYESKLYRILQGGTGIPNVKWFGVEGDYNVLVMDLLGPSLEDLFSFCNRKLSLKTVLMLADQMINRVEFVHSKSFLHRDIKPDNFLMGLGKRANQVYMIDFGLAKKYRDTSTHQHIPYRENKNLTGTARYASVNTHLGIEQSRRDDLESLGYVLMYFLRGSLPWQGLKAGTKKQKYEKISERKIATSIEAAAAGQSSGMSPIANNNRLSATEEGRRSGWSDDPTRRQVPPTGINAGXLSKQKSPVRPDMSTSKDALFSSSTMLGRSSGSLRRPVVSSSRELQSSEAEPSRSRTPDASPGTFQRSAPPRRSSQMLDYSDPRHSSSGRHAANKNYESTIRGIQGLNFDANDRIHY

SEQ ID NO: 136572 - protein, 262 aa, Oryza sativa
  Clone ID: PAT_MRT4530_38138C.1.pep
GLVYTDLTSGVRGDLNRFGGNLPAFHQVLVFVCVKSVPVPYVFPAERYLIGRVGPPGHRSYRCIVRYGYRDVHQDVDSFETELVESLATFIKLDASYRCSDASGGGGDHEPEEERGARLAVIGSSHASYDIQDSVQHSSAASVETTTTRRRSGGGDDDGSPGGGGGRAKQVRFFIDSHVASPEAADNKQVAEELEALAAARDAGTAFILGHSHVQCKPGSSLLKRLAVDVGYNFLRRNCRGPDVALRVPPASLLEVGMVYVL

SEQ ID NO: 136573 - protein, 231 aa, Oryza sativa
  unsure (1)..(231): unsure at all Xaa locations
  Clone ID: PAT_MRT4530_38139C.1.pep
RANQVYMIDFGLAKKYRDTSTHQHIPYRENKNLTGTARYASVNTHLGIEQSRRDDLESLGYVLMYFLRGSLPWQGLKAGTKKQKYEKISERKIATSIEALCRGYPCEFQSYFHYCRSLRFEDLPDYQYLKRLFRDLFIREGFQFDYVFDWTILKYQQSQITSVPPRAIAAAAGQSSGMSPIANNNRLSATEEGRRSGWSDDPTRRQVPPTGIXAGSLSKQKSPVRPDMSTS

SEQ ID NO: 136574 - protein, 54 aa, Oryza sativa
  Clone ID: PAT_MRT4530_3813C.1.pep
LGVVLHAMLAKKEELTAVGNNGSDPCKRLRIGADTGAVAWGPGGDAAEMAQSRG

SEQ ID NO: 136575 - protein, 66 aa, Oryza sativa
  Clone ID: PAT_MRT4530_38140C.1.pep
SYFMICFSIYERNLACEFDVKEHRTEDPVLPELATKCTRGCPNIDLRNISLTARYKRCFSRNTINT

SEQ ID NO: 136576 - protein, 66 aa, Oryza sativa
  Clone ID: PAT_MRT4530_38141C.1.pep
SSFHHNLGWNLASLSLVNRCNSNHLKLFRYCCVILLVDHSSMASGARLHAVTPWVQAGLLNSMYYK

SEQ ID NO: 136577 - protein, 88 aa, Oryza sativa
  unsure (1)..(88): unsure at all Xaa locations
  Clone ID: PAT_MRT4530_38142C.1.pep
NCNTTHYRANWVPGPPSSXFXFFXLNKXKASSHRSRTVYQQGGRXPLTXMXTXXSCTXXXYXXXXXXRLIDGHXIMHDXFXDXXXYHX

SEQ ID NO: 136578 - protein, 95 aa, Oryza sativa
  Clone ID: PAT_MRT4530_38143C.1.pep
MAKPQQEVYFVFMNFDPVYERLRADRSKEGSATLDAYLSHKHDKLLAKLLQPDTYRKKSSLAIVDGFAVEITDAQASILRLAKEVRVVEKNQELA

SEQ ID NO: 136579 - protein, 79 aa, Oryza sativa
  Clone ID: PAT_MRT4530_38144C.1.pep
FVSQGSEGVELPCLLTQMLSICPFTWFLSELGVVIPNQSPIRSASVTVLVYGDIHYSGVDGSSRTVARYADPCVPGCCK

SEQ ID NO: 136580 - protein, 1746 aa, Oryza sativa
  Clone ID: PAT_MRT4530_38145C.1.pep
MTPQEKEEKLKKRRQAYKRKKDLNALANVEEPLHATHSGQAEQEIASQDKDSIPNQEKNAPTRMKYRNMGPDQKKAKREQVNANRALRRNTPSKYSIEMESPTYIALDTSPQVLTRLHRKNVAHEERQALVYRQNESFTIRWDTRTSVSLGEDPSICTQTSNSIDPPKEPSITNTGDEDIFDDDTNESDMFDGQAPSSMLDAGTTSFGSPSPLLDPNIRRRQRDRERYAQMTLQEKEEKLKKRREAYKRNKDLNALANVEEPLHATHSGQAEQEIASQDKGSIPKQEKKALARMKYRNMGPDQKKAKIEQVIANRALRRNTPSKYSIAMESPTYIALDTSPQVPTRLHRKHIAHDERQALVSRQNESFTIRWDTRTSVSVGEDPSICTQTADSIDPPKQQSITNTGDEDIFDDDTNEESDMFDGQDWETHKDVEIKEVVEAIPECSSVPDPCELVYSNIPQCTHMLKPVENCQFCNAKKFEHETKGFCCRNGQTRLAHQDTPPELMRLWTSNDSYAQHFRNNIRFFNGHFSFTSLYCHLDRETSDMRKTGFYTFRAHGQMYHNISSFGTNGSDPKHLELYFYDDDPSLEHRYRRCRQELYEQDQEVVNILTNVLRGNPYAEQFRSLGQIENLEDCRVMLNLDQRLDQRTYNVPISSEVAAVWVEGNERRKTFEKSVILHGNNNDIQGIRSYYGCYDPLSYPLFFPKAELGWHADIPKFGVKVEDIMKARQNRNNSDEDPDSGSRLCVSVRDYYCYKFQMRPGIFNPILHGGRLLQQFAVDTYNKIESSRLDYIWNHQKEIRADLYQSLLDSVNTGENKGSAIGKRTVLASSFIGGPRDKLRRYMDAMTLVRKYGKPDIFLTMTCNPNWEEIIHELKFGQTPQDRPDLIVRVFKAKLEEMKKQLFEKGILGIVQAYTYVVEFQKRGLPHAHFLLIMTKKYKYTHSKQYDRVISAELPNQSKYPELYTMVIKHMMHGPCGELNHYCPCMKNRSSCKNSYPKPFNATTIQEKDSYPVYRRRDDGCTVIVQKCPLDNRWVVPYNPYLLQMFNCHINVEVCSSIKAVKYLFKHNYKGHERESVPVNGVGKEDDIDEIRQYRDARWVTPLEALWRIYGFDLSKVHPSVMQLQLHLPNMHMVKYRGKQDIQEVLNQDGAEKTMLTAYFEANRLNKEADGMLYQDFPEHHTWQTGKKKKFWQKRKRSAILQVGRMVLAHPTEGERYYLRVLLNHVTGATCYEDLRTVDGKILPSFREAAERRGLIEADNTLEECLTEAELLQMPSSLRRLFATILVFCEPSDVRVLWNNHLEAMSEDYRRNCQCPHVVQQMVLINIKDMLRSMGKDIRSFPLPGVDMLHDTTNGVPKEIIEESMIKVDPEDTALCNSLNTEQRAAYDEILATVDHNEGGLFFIDGPGGTGKTFLYRALLATVREQGKIAIATATSGVAASIMPGGRTAHSRFKIPLRIDDGAICTFTKQSGTAKLLQMASLIIWDEASMTKRQAVEALDNSMRDIMDKPNLPFGGKTVVFGGDFRQVLPIVRHGSRGQILDASLRRSNLWGCMRHLQLVRNMRAQNDPWFVEYLLRIGNGTEEINDNGDIHLPDNICVPYTGDDSDLDKLMESVYPTLNDCLADPNYITSRAILSTRNDCVDNINLKMIDRFQGEEMVYHSFDSAEDDPHNYYPPKFLNTLTPYGLPPHMLKLKINCPIILLRNIDPANGLCNGTRLVVRGFQKNAIDVEIVLGQHSRTRVLLP

SEQ ID NO: 136581 - protein, 84 aa, Oryza sativa
  Clone ID: PAT_MRT4530_38146C.1.pep
MAWGRRAPANRRAATVECAAFGRENDPTGSQRPAARAAPAADLLAVAGRRAPRAWWLRITDSRGGFRSLQERYVRGRGARGVQC

SEQ ID NO: 136582 - protein, 152 aa, Oryza sativa
  Clone ID: PAT_MRT4530_38147C.1.pep
SRSRMASKNLLLSAAVLLSVLAIAAAAATASAATTSCQPGMAIPHDPLRGCRRYVLRRACGLAAGGRLYDWSLKERCCQELAAVPAYCRCAALAYFMDGASEGRLLEDLPGCPRETQRGLAAMLTTPGECNLETIHGGPYCLELTDREMPKY

SEQ ID NO: 136583 - protein, 757 aa, Oryza sativa
  Clone ID: PAT_MRT4530_38148C.1.pep
MDLRQDATARRWLNSLRDVAYDAEDLIESAVLQQQGDRYSAVNSVLHPISRYRSAQKVEEIRWRSSSYHIGNNTIFGLEQDTDMIMERLLQPTEHREVIVIVGMGGIGKTTLASLVFNKARGVEERNTWSGQAPPKATDPGSSSKRSHFDVCAWVPVGQDPDTLHLFSTISIQIGANLDLSRDVAEIKHHMFTFLLDKRYLIVLDDVWREETWHELVDAFPMSTNGSKILMTTRSKVIAISADPASYPHELNPLSDEVSFHLFLSKVFPNSNLNQAMSYPPLMEDLGRQLSKKCGGLPLALVVLGGLLSAKEKKHDVWSSILNSMNWNDNEAEKQCLKILALSYDDLPYRMKLCFLYLGAFREESEISISKLTKLWIGDDLIPQQSGRRRKEDTATDYLNELIQRCLVQPVLLKHKQRSTRVIRPFFPLIFRWCRINWQTVWSMPYIRVIEVEGLMMPTDALRSIQSSLIHLRYLCLRNTQLVAFPFNESKFPSLQTLDIRETSVKKLPDTIWALKTLRHLYLNGMEPPSIRCLTNLQTFCGVLVSNDQIAMEFLTLKDLRKLQIELKAWNGYPLLVKSLKLLLALTSFKLSSTEISSEVINKIAHHSPLRKLHLQGMLHPPVLTLSEYFSDYITSITLSASRIGTDQLKTLGSLTCLWELKLKDDALLPCPQHSFPQLGYLKISSLTNLEAFRIERGAFSNLVRFSVHYCSKFRSIIDVLEHTTSLQVLKLKGMELLPDITDSCRNKNVSVITMAY

SEQ ID NO: 136584 - protein, 125 aa, Oryza sativa
  unsure (1)..(125): unsure at all Xaa locations
  Clone ID: PAT_MRT4530_38149C.1.pep
EALMEKIPYXSCCSCPCAFXNGFCTQLQQIFMAHQPNSMQHTNRRPITANNGPQSSTLSIRGSHVXHRPTINLSQHILAQSLTLCIPTEATCTHQDPPVSLHNLCIANAPPIIFGTRGSNPGEIP

SEQ ID NO: 136585 - protein, 125 aa, Oryza sativa
  Clone ID: PAT_MRT4530_3814C.1.pep
MEPRSPRPFPPSPAALSPSRRYKIVPRASLFRFRRSPLALAVGFVLAPCTSLSAVAVDLRFAAAAAPDFLPTRRHLHRLRRVVADPVCLSVSPADHRSTVALVIPNRAAAFLRSVRRLRRPRVSG

SEQ ID NO: 136586 - protein, 62 aa, Oryza sativa
  Clone ID: PAT_MRT4530_38150C.1.pep
WQLLKMIGCSGSHFSSERSVLKWYRGVALGIFCGLSVSCVKLRPRFDLMNAMFYLFTKMMFH

SEQ ID NO: 136587 - protein, 58 aa, Oryza sativa
  Clone ID: PAT_MRT4530_38151C.1.pep
YYPQSISVVTPVYILLNCMIGNAFLNDIGPVARIIEQMLSLLFLWGPGHSQTRKITIP

SEQ ID NO: 136588 - protein, 544 aa, Oryza sativa
  Clone ID: PAT_MRT4530_38152C.1.pep
MWGPHIILYLQPFFLLPSSHMSCVLGRPSAPSLDHPQQPNPPPVAPEKPPAVAKKAAEEEEEKKPPKQARRERHAWSSRSAAAEAVGLGLGGSFANRARGEQVAAGWPAWLSAVVGEAIDGWTLRRADSFEKIDKVRTPALALAIVGGGGRELSSSVLSVAQIGQGTYINVYKARDTVTGKIVALKKMGQVCFLLCKPSYRGDTAAGGRGGRRRQQQQTAALAEEESGMAGGGGGGNRLDLPVVDLASSDPRAAAESIRKACVESGFFYVVNHGVEEGLLKRLFAESSKFFELPMEEKIALRRNSNHRGYTPPYAEKLDPSSKFEGDLKESFYIGPIGDEGLQNDANQWPSEERLPSRRETIKMYHASALSTGKRILSLIALSLNLDAEFFENIGAFSCPSAFLRLLHYPGEVDDSDDGNYGASAHSDYGMITLLATDGTPGLQICREKNRNPQLWEDVHHIDGALIVNIGDLLERWTNCIYRSTVHRVVAVGKERYSAAFFLDPNPDLVVQCLESCCSESCPPRFSPIKSGDYLKERLSATYK

SEQ ID NO: 136589 - protein, 264 aa, Oryza sativa
  Clone ID: PAT_MRT4530_38153C.1.pep
PYAPHLNASTKQQNPARINATRLKKPQKPPEIRSNKHPSRVDLSDATNYYNTNQLNLAKGHHQNQPKNSFKEKTTKHSTEKLKPHGKNKKALPRSAFQPIRTSRGVDGGGGEGIDARGGDTGGGGGAGEGGGEREGEKRLGGRRGEKKIFSGDGGGGGDPRIFDRLACQPLDGRTWPSDGLNEEASASLYLLGNGNRGDVTATKLDGCRSRMGGHWTVKNILLLINLSLITTAQVTNRVSRAVDLRGNIRSASDGPQASTLATS

SEQ ID NO: 136590 - protein, 100 aa, Oryza sativa
  unsure (1)..(100): unsure at all Xaa locations
  Clone ID: PAT_MRT4530_38154C.1.pep
SDQCKTHVLIDDSGEIRSSCRKIHMXDVYVPGNMVYMESRFTTARDTVGAMDSPFGRLGLTGCYDLRFAELYQGPRFKHQAHVLLVPFACTHVTGEAHWE

SEQ ID NO: 136591 - protein, 84 aa, Oryza sativa
  Clone ID: PAT_MRT4530_38155C.1.pep
RADASLVVLAAAVAVAAALFLSLDSRSRSDDVLITVDSSGAVGPESVAFDGDGDGDGPYTGVSDGRVLKWFPLERRWVEHSSAV

SEQ ID NO: 136592 - protein, 98 aa, Oryza sativa
  unsure (1)..(98): unsure at all Xaa locations
  Clone ID: PAT_MRT4530_38156C.1.pep
SLAAERRRGGVPPLPDCRGGRYVPPLAPLLHSPRAACRGAWPXVPISSAEYCSLTVRARAARRTSTTARARAARGTRMTAMAAARRGVRARLDCSLPS

SEQ ID NO: 136593 - protein, 47 aa, Oryza sativa
  Clone ID: PAT_MRT4530_38157C.1.pep
RAESMSDTQCSTVLKEVERRCPFPSFKPRSHRLCHCHTPIIEEERSL

SEQ ID NO: 136594 - protein, 266 aa, Oryza sativa
  Clone ID: PAT_MRT4530_38158C.1.pep
MEASTSLLVLVLAAAAFAAGTVTEAAGDGCSAGCDLALASFYVTPNQNVTNMADLFGIGAANYRSLAPYNPNIPNLDFINVDGRVNVYFTCGCRSLPGSPGVTYLAGAFPFQMSRGQTYTTVAANYNNLTTAEWLQATNSYPANNIPDTAVINATVNCSCGDASISPDYGLFLTYPLRAEDTLASVAATYGLSSQLDVVRRYNPGMESATGSGIVYHPRQRSPWKLPTSEITAASVLCKLIMRLHEGQGASAGAIAGGVVAGVVVL

SEQ ID NO: 136595 - protein, 502 aa, Oryza sativa
  unsure (1)..(502): unsure at all Xaa locations
  Clone ID: PAT_MRT4530_38159C.1.pep
MSLRLRLAFRLLFCYCLLLAAAHPSSRRLLPLLVVSAAERTNVATLPGFDGALPSRLETGYVTVDEENXAELFYYFIESEGDPGADPVLLWINGGNRCSVLSALFFEIGENLNHHRSPAGAPPLTRLCAAGPVKLAIEPYDGGVPRLRYNPYTWTKVASVLFVDSPVGAGFSFSRDPRGYDVGDVSSTLQLTKFVNKWFSQHREFLSNPLYVGGESYAGKLVPFLLQKISEDVEAGVKPVLNLKGYLVGNPGTGESIDYESKVPYAHGVGIISDQLYETILEHCGREDYANPKNATCAQALNRFSELMGEVSEAHILYKKCIYVSPKPDDGTIGRKILEEIVVGNHRPPRPPMDCSTYPNYLSYFWANSNNTRENLGIKKGTVDEWVRCHDDGLPYSQDIESSIKYHQNLTSRGYRVLVYSGDHDSVVPFLGTQAWVRSLNYPIVDDWRAWHIDGQSAGFTITYANDLTFATVKFIGQGGSSGEAHYGRTCHRGPEQALDDY

SEQ ID NO: 136596 - protein, 293 aa, Oryza sativa
  Clone ID: PAT_MRT4530_3815C.1.pep
YALCILFHISDGTIRAWDTRSFKQISLLRGSQELFSFSFGGSSGNLLAAGSNSQVLLWDWRNSKQLACLEESHMDDVTQVKFAPHQHSKLISAAVDGLICVFDTDGDMNEDNHLLSVMNVETSVAKVGFFGNTYQKIWCLSHIETLSTWDWNDGSRELNIDDARSLATDRWNLDHVDYFVDCHYSLPDDKLWVIGGTTAGTIGYFPVRAGLEGAIGSAEAILEGGHTDVVRTVYPAANTHTGQNRGIFGWTGGEDGRLCCWRSGEIAEMNKSWISSSLVSRVQKKAKCRQQPY

SEQ ID NO: 136597 - protein, 51 aa, Oryza sativa
  Clone ID: PAT_MRT4530_38160C.1.pep
LVRYDVTLAVNRALSHTDDRSIYTQVYLVLKENGGCKCGTSCSCTDCKCGK

SEQ ID NO: 136598 - protein, 441 aa, Oryza sativa
  unsure (1)..(441): unsure at all Xaa locations
  Clone ID: PAT_MRT4530_38161C.1.pep
MSLRLRLAFRLLFCYCLLLAAAHPSSRRLLPLLVVSAAERTNVASLPGLDGALPSRFETGYVTVDEENGGELFYYFIESEGDPGADPVLLWINGGNRCSVLSALFFEIGPVKLAIEPYNGGVPRLRYNPYTWTKVASVLFVDSPVGAGFSFSRDPRGYDVGDVSSTLQLIKFVNKWFSQHREFLSNPFYVGGDSYAGKIVPFLLQKISEDIEAGVRPTFNLKGYLVGNPSTGERIDLESRVPYSHGVGIISDQLYEVNSRTRGSQNLIXVLNDSCVIFVNSDCTCIQRLEEGSFLKNISNLTGPSIYREFSHPQVYANYLSYFWANNNFTRRTLGIKKGTINEWVRCHEHDLPYNIDIRSSIKYHRNVTLKGYRALVYCGDHDAVVPFLGTQAWVRSLNYPIVDDWRAWHIDGQGAGHTAPEFEPERCFAMFKRWISSIPL

SEQ ID NO: 136599 - protein, 214 aa, Oryza sativa
  Clone ID: PAT_MRT4530_38162C.1.pep
DYANPKNATCAQALNRFSELMGEVSEAHILYKKCIYVSPKPDDGTIGRKILEEIVVGNHRPPRPPMDCSTYPNYLSYFWANSNNTRENLGIKKGTVDEWVRCHDDGLPYSQDIESSIKYHQNLTSRGYRVLVYSGDHDSVVPFLGTQAWVRSLNYPIVDDWRAWHIDGQSAGFTIAYGNNLTFATVKGGGHTAPEYQPERCLAMFGRWISEKSL

SEQ ID NO: 136600 - protein, 117 aa, Oryza sativa
  unsure (1)..(117): unsure at all Xaa locations
  Clone ID: PAT_MRT4530_38163C.1.pep
MGLHSTLPQRRVENLQPWLFTFASGGRGSNDDHHHGPQWRGRRSRLHHRQVHMLPLVRTPLALATRCSQMSLYYVPGQGGLKCSXGLSPPLHPPQTYCGIRYTHLKHIVGYAATTRD

SEQ ID NO: 136601 - protein, 149 aa, Oryza sativa
  Clone ID: PAT_MRT4530_38164C.1.pep
METNGNRETAPEQAEHPTLPAPLDAPEEASKENINPTDESEEVQNDGDMPAMKFRNYLPHDEQLRGGKVAPVSLPKFEDPISAETTEPKQVENPFGNIAPKNPNWDLKRDVQKRMDKLEKRTQKALAEIALEQQKEKEALGEGSDAAQD

SEQ ID NO: 136602 - protein, 101 aa, Oryza sativa
  unsure (1)..(101): unsure at all Xaa locations
  Clone ID: PAT_MRT4530_38165C.1.pep
QISPARLMAAGPTAPIPSPPAALSPFQPXRPAFSARRDRLPPRRRLLRLRRTAVDPVXHPLAESADRRNAGDPVDPSRAAAFLRXSGRLFRRRRRHYHCFL

SEQ ID NO: 136603 - protein, 85 aa, Oryza sativa
  unsure (1)..(85): unsure at all Xaa locations
  Clone ID: PAT_MRT4530_38166C.1.pep
QLRLVARQSHCQAVSNVQAIVLQXQLQQISGVYFDQTQAQAPPLLTFNLPKICGIYPSYYSAPRSIASVDGVWNLNCTSYNSSIC

SEQ ID NO: 136604 - protein, 59 aa, Oryza sativa
  Clone ID: PAT_MRT4530_38167C.1.pep
MVVDPLRGGSSTPLACGKGEEGRERKRGTLVGTVDAFQPSSKAKRRRARVTTAAQKGES

SEQ ID NO: 136605 - protein, 237 aa, Oryza sativa
  Clone ID: PAT_MRT4530_38168C.1.pep
MSDTALSGAPPAARSEDSWSQQQSYNFSGRVLLTAVVILFVIAVVFAVTRVLLYYLVVRPGGGGGGRRRGGLAGGILRSLNSLGVSGRRGLDASALAALPVTAYRKNGGGGGGGEGSNRGGPGATAADCAVCLSELADGEKVRELPNCRHVFHVECVDAWLRSRTTCPLCRAEAEVPKARASAAATATAQSSSSLGDGGITVVVTIHGGSDEAGGRSTALTGQPGSSNSPSCEAARN

SEQ ID NO: 136606 - protein, 287 aa, Oryza sativa
  Clone ID: PAT_MRT4530_38169C.1.pep
MACATVSPPPGRGVIIGAYAHPATMRFHLLHAAGEAACLVDPGLYVATAFRLRRVGDGAWREVPLPQLEDADARLKMHGARSIRLHGNLHWLVQRGSGSAGKLQVLVFERARERFRLMDAPPRRRGEEEDMARSRICVLSSGKLCAVAVARATSTMEMWVLDDYHHCSDDARISGWRLMERVSLVMWDGDGRRDLSRTFTSETQVEAVHGEVEGEEVIVRNGGEVDAYSLRRGAWLWVRGISSSGGPVLDVALLAHRDSVVHHDVSFGEASRPLRYPDDIHGQRLFV

SEQ ID NO: 136607 - protein, 80 aa, Oryza sativa
  Clone ID: PAT_MRT4530_3816C.1.pep
VQTTLFSLLQQPFFSESYSALISGDLYWYSLLLALASRELQHLAPRFSFRFRCFHLITAFIEASHEFCFCNVYGTNSRPV

SEQ ID NO: 136608 - protein, 50 aa, Oryza sativa
  Clone ID: PAT_MRT4530_38170C.1.pep
IPWLLLTESDCVWTKIRCDDRKNTNIYISYRFYMLNITISFASIKTSQKS

SEQ ID NO: 136609 - protein, 352 aa, Oryza sativa
  Clone ID: PAT_MRT4530_38171C.1.pep
RALQHFSSAMLHVLSTQSLLFAAGLRPTPAQATAVSWILKDGMQHAGKLICSGMGARMDSEPKSWRILADVLYDFGTALEVISPLCPQLFLEVAGFGNFAKGMAVVAARATRLPIYSSFAKEGNLSDLFAKGEAISTLFNVMGIGAGIGLASTVCSTTQGKLIAGPLLSVVHIYGVVQEMRATPVNTLNPQRTAMIVADFIKSGKVSSPAELRYREDLLFPNRLIEEAGSVKIGQPVRRVLSPQRIEQLKATFSKEKFLLSRKDNSAYMVLEQSATGEDALRGWLVAAFASEMERSGVGSGDTVLNVAYERMENVFPMFVAEVKSRGWYTDQFLDGNRSRIAYANPISGSAL

SEQ ID NO: 136610 - protein, 58 aa, Oryza sativa
  Clone ID: PAT_MRT4530_38172C.1.pep
GKRTIGTGLYYQEQSPKAPPQLDEANLEGSPKARPNRKNVIRKGLINKGRKNEGRPNA

SEQ ID NO: 136611 - protein, 66 aa, Oryza sativa
  unsure (1)..(66): unsure at all Xaa locations
  Clone ID: PAT_MRT4530_38173C.1.pep
PGENVPKDISCAEEQVNTTHFAQISYLSCYLDCTPMLPIGGCSMRSRSHTSNNLGFXRSLFCWGGR

SEQ ID NO: 136612 - protein, 568 aa, Oryza sativa
  Clone ID: PAT_MRT4530_38174C.1.pep
MESGQRAALLPESHGPKTEDDSLQVPLLKDKKRGGSKAPAIVLGFECLESTAFNGISTNLVVYLETVLHGSNLASASNVTTWYGTSYLTPIFGAIVADTFLGNYNTILISLAVYLLGMMLVTFSAFLPATAALCAAGATCGTGAAAAQTVAFVGLYLVAVGSGGVRSSLLPFGAEQFDDDSAADRERKAAFFSWFYLCVDFGLIVSGVLLVWIQQNVSWGLGFGIATACIAVAFAAFVLATPMYKRRLPTGTPLKSLAQVVVAAFRKVGMKLPADAELLYEVSDKVDSQPKIAHTSEFTFLDKAAVVSESDLEERPEAASSWKLCTVTQVEELKILLRLLPIWATSIIVSAAYSQMSTTFIQQGSAMDMHIFSVPVPAASLSSFQVLCVLTWVILYSKVIVPALRGFSSSGAAGEPSQLQRMGAGRLLMALAMAVAALVETKRLNAAASGEAINIAWQMPQYFFLAGAEVFCYIAQLEFFFGEAPDTMKSTCTSLALLTIALGSYLSSLIYAVVEAFTATAGGHGWISDDLNQGHLDYFFWMLAAMCTLNFVVYSGFAKNYKLKTVLS

SEQ ID NO: 136613 - protein, 333 aa, Oryza sativa
  Clone ID: PAT_MRT4530_38175C.1.pep
MAAWLGCADDAVEPARRDNEGVGYKRAQFRDRKNTLDHPSAPMGRKRCIGTELENLGATCIGAEFEHLSALQPRMTMFQTAKGKAKPLLANSKTFWNVSSFESPAPKSHPSSSSFLCKQSNPVEHHAPHPSSTSLLRSRSPPPAMVLELQVFIVGWNPMHSQRSMQATMICVDDSVWMLKEDYPPTRLQAQADAANLVFATKMAVRLQPREHGRVPAMAGDRVRVLLALTSDPVKFLACMRGLKVSGEANLTAALEVAELALRNHADKTLSQRIVVFVGRRRAADLITAHSHRGSSSGRGRIGVRLRQRQFRDEEERRRGASSHGSETRRFGR

SEQ ID NO: 136614 - protein, 57 aa, Oryza sativa
  Clone ID: PAT_MRT4530_38176C.1.pep
MGLGTDEPNPIEKGEWPEDSGKESTGFQEAPGKNLRIPEKASRGSELDPEYFGPVQT

SEQ ID NO: 136615 - protein, 92 aa, Oryza sativa
  unsure (1)..(92): unsure at all Xaa locations
  Clone ID: PAT_MRT4530_38177C.1.pep
FLRCPDGLSFGDDDQIEPLHLNNKGHRPTASEXDCVNHSPTAAGAELTHSFLSNENSLTFGTQNTMEPITVEKARFNNSGKASALVQHERRP

SEQ ID NO: 136616 - protein, 83 aa, Oryza sativa
  Clone ID: PAT_MRT4530_38178C.1.pep
KGRVKKIHSHWENSKEPPGNQWNQQHNKVMMNPSTTTQCGKKKKKMEKIWHPNDWSIDQKRKVKNGEKIRSACTLAQCFVLSK

SEQ ID NO: 136617 - protein, 99 aa, Oryza sativa
  Clone ID: PAT_MRT4530_38179C.1.pep
MEAGIGAAAVVGFHRIREREAPVEAGEEKAAGGRVAAAVAARQRRPWWAPPDLDPLGQIWRLTAGTAGARAGTRAMPAAGGGCGERKLATGWAACAEGT

SEQ ID NO: 136618 - protein, 566 aa, Oryza sativa
  unsure (1)..(566): unsure at all Xaa locations
  Clone ID: PAT_MRT4530_3817C.1.pep
MLFAKGFSVLPSSDFQLVLDGQLCEEEDVVNCLPKLRKTAXGSASEVEEAVKPAVKQDKRLRSVKVLSLVSNLSLPFVFPLSLSKPLQQMADNEKGNKVRSQDIGTSSSRVNEAPDTSCVAVVQHLINQNQLLIEILQQHRMPILNPSQMQHQVQLEAVQALTPQVSAPPTSQKAPHAMPHVDPKEASIICFMCDEQGHYARNCPQQKRKAPMRTEDEVRKMIITSTEWPPPGMTKHQRRNSSRGAQQLTEHLLANGGRVSGSEDSDQVSSDDEDAKSPQGFNQNKIELKACSRCGEIGHVASSCASTCVHCEEDHPPDRCPTSRITCFFCEGTDHVPKDCQFSFLLTKKMANQPASSNGEKHQGNTNPRQGHRFSLTPVPGQRNRNEKRKCRVREDICCFNCQGMGHFADKCPKPRNIAAGTSVHATPCNQKLAPQRIVIHASRSSPIARVATAPIPMNALPQGVNAQFQPQPPADKTGASICVVPLEVPIQQLRNQVQDEEPECKKVIVCYNCSEEGHYSKNCPQPRQNRPPHYRQFTRSRHSNRIVVTGANAVPVRPRVNQNP

SEQ ID NO: 136619 - protein, 380 aa, Oryza sativa
  Clone ID: PAT_MRT4530_38180C.1.pep
MASSPAPSPAAPPLLLAALAALAVVASASAAACSAGDRDALLAIRAALSEAHLGVFSSWTGTDCCTSWYGVSCDPTTGRVADLTLRGEADDPVMAPAGRPASGVMSGYISDAVCRLGRLSSLILADWKQISGPIPPCVATALPYLRILELPGNRLTGEIPRSIGSLSRLTVLNLADNLIAGEIPSSITSLASLKHLDLTNNQLTGGIPDDVGDLTMLSRALLGRNKLTGAIPTSVGSLTRLADLDLAENGLTGGIPDSLGGAHVLTSLYLGGNRVSGRIPASLLQNKGLGILNLSRNAVEGAIPDVFTAESYFMVLDLSRNRLTGAVPRSLSAAAYVGHLDLSHNRLCGSIPAGPPFDHLDAASFASNSCLCGGPLGKCT

SEQ ID NO: 136620 - protein, 160 aa, Oryza sativa
  Clone ID: PAT_MRT4530_38181C.1.pep
MWSVTAELLLESSRYLTMEHRRRAPPRIADSPPLESSHKEIQTATTVKGERPDAVRTLCRASVNTTTSPAHATHLQDQGGEVGEHEFNGGGGRAIARGGGKRRSLSSPVGLCMEEDEEPPFSHIATNDVEMEELLGGGGGGCCARKVVAMKELYEEKDWI

SEQ ID NO: 136621 - protein, 198 aa, Oryza sativa
  unsure (1)..(198): unsure at all Xaa locations
  Clone ID: PAT_MRT4530_38182C.1.pep
MLDAGDSKLEPPPPAAPASGGGDAAAPLAKSATKSVGFAPPPLQPPARPAQHPHLQPPARPAQQPPRPPVTQPLPPPPPLHQHQPYQPRHTDALPLPLPLPPPPPPPFSVQQQQLPPPPPXPPPPQHRRNAPPAPRTTAAAVVPASXPPAASSSPDSISSSHTAPTTTPSSASPAPAPPPVTSRRRGREEGESSTLRS

SEQ ID NO: 136622 - protein, 353 aa, Oryza sativa
  Clone ID: PAT_MRT4530_38183C.1.pep
MPDEWENSAAPPGCWRLYSMRPLPGAAVAVAVADSPERALPLHSFLPSPVVVSCGRRRVGSISGGGSSKPAASEAREIAVAALETAAAKLLPKQIATMSSSSRWSQLVSKKKRDASCEESSCSPRSNKTNVEEQLQSLKATITSPAETIETMLDGFSRIGAVYNNIEEIICLPSSQAQLCQNQQRKAVEQELEHSLVLLDLCNSIQESVSKLKTSIQEMQLVHKRRDATVVQANIQYFIRLTKKVQKQSKKISKKSASAEQEGSRVIKLLAEAREVAISMLESSSHLLSKKITTSNSSKWSLVSKAFQKTRLACQEEQLQALEFAIVDLESGVETLFRRLIQIRVSLLNALSL

SEQ ID NO: 136623 - protein, 111 aa, Oryza sativa
  Clone ID: PAT_MRT4530_38184C.1.pep
TKLNNMLCWCGQASTRSDLCVEPIYLRGARLAVHSVVLDADTRYSALAHICNAQHTLEHGSLHGKALYSAILFEMLIGAVDAFSLVLYHRNSSTGLCNESNQQTILTQDHA

SEQ ID NO: 136624 - protein, 829 aa, Oryza sativa
  Clone ID: PAT_MRT4530_38185C.1.pep
MDLTFRGDGEPAPVYRTGCKYFFLEFHHGGFFCGMGVNRTYMDGKVNWFDNVDSREWGRVLRVADFVAMLGYEIGPRLKVYSLLSGKTIVDGLRIVDSEVETNVMNSVSHKIKNFFIYLDHTDHVSGRNHEDIVLTPRAELPEVFSPPRDDHHGSGSAGGQAAAHNDAQVDDTPQVLDEEEGEEINLFEDNDDSSSDSDFVDSDYEWQDDDDDLFDDNVDGEVEDLGLRRKTFNHKKATGSKLKGKKVCAEDCSEQALSDDEGMQLPHNSDNEDDITLNFKSFNPEDINNPIFKVGIVFSSVELLRKAITEYSLKNRVDIKLPRNDRERVKAHCAEGCPWNLYASMDSRVKSFTVKTYVPQHKCKKEWVLQRCTANWLAEKYIETFRKSNPRSSFYLRLDDSKFSSLYFSLDACKRGFLSGCRPIICLDGCHIKTKFGGQLLTAVGVDPNNCIFPIAMAVVEVESFSSLSWFLQILKEDLGIVNTYPWTIMTDKQKMLFKGENLKNQLWACARSSSVLEWNRNMDEMKALNEDAYNWLGEMSPNTWKEAEKWEGPLCPKIKKKLLKFPDQANICYVLPARKGIFQVQERQSTFIVDVVSKHCDCRRWDLTGIPCCRAIACIREERLLEQDLLPFCYSIEAFKSVYANNIMPCSDKAKWEKMNEPQILPPVYEKKVGRPKKTRRKQPTEVHGKSGPKLSKHGVTIHCSYCHEANHNKKGCEMRKKGIKPNIQVRKKAIAGESQEPNLTQSSQPSQLTQQHGPLPDCVFIQQNQPTARPVVLTTASKEGRSKTTKAKKKANVGAKSKRTEVGPTDAGAASRKKKTTSPTKQ

SEQ ID NO: 136625 - protein, 1082 aa, Oryza sativa
  Clone ID: PAT_MRT4530_38186C.1.pep
MALGRSSPPAPEIRSPELDGAEDTDVEEKFDDAFDIPHKNASHDRLRRWRQAALVLNASRRFRYTLDLKKEEEKEMIRRKIRAHAQVIRAAFLFKEAGEKDLREAYTGIKLETASRSFPIELEKLTALNRDHDSVLLQEVGGSLVSTTLFVQVKGLSDLLKSNLEKGISLNADDLLQRRGIFGANTYPRKKRKSILRFIFEACKDLTLIILMVAAAISLTLGMTTEGADEGWYDGGSIFLAVFLVILVTAISDYRQSLQFRHLNEEKQNIQVEVVRGGKRCGTSIFDLVVGDVVPLKIGDQVPADGVLISGHSLAIDESSMTGESKTVHKDKKEPFLMSGCKVADGYGSMLVTGVGTNTEWGQLMANLSEDNGEETPLQVRLNGVATFIGMVGLTVAGAVLVVLWIRYFTGHTKDPDGTTQFVAGTTRAKKGFMGAIRILTIAVTIVVVAVPEGLPLAVTLTLAYSMRKMMRDKALVRRLSSCETMGSATTICSDKTGTLTLNKMTVVQAYFGGTMLDPCDDIRAVSCGATELLIEGIAQNTTGTIFVPEDGGDAELSGSPTEKAILSWGLKFFHFEQIGMDFNDARSKSQILHVFPFNSEKKRGGVAVQSDAGVHVHWKGAAELVLSSCKSWLALDGSVQPMSAEKYNECKKSIEDMATSSLRCVAFAYCPCEIERIPKEDIADWKLPEDDLTLLCIVGIKDPCRPGVKSAVQLCTNAGVKVRMVTGDNIETAKAIALECGILDANGAFVEPFVIEGKVFREMSEAARGDIVDKITVMGRSSPNDKLLLVQALKRKGHVVAVTGDGTNDAPALHEADIGLSMGISGTEVAKESSDIIILDDNFTSVVKVVRWGRSVYANIQKFIQFQLTVNVAALVINVVAAVSSGDVPLNAVELLWVNLIMDTLGALALATEPPTDNLMKRQPVGRRHAIYQIAILLIFDFSGRSILRLQNDSREDAEKTQNTFIFNTFVFCQIFNEFNARKPEERNVFKGITKNHLFMGIIAITTVFQILIIEFLGKFFKTVRLNWRLWLVSVAIGIISWPLAYLGKFIPVPVRPLQDYFKPTCWRRASRRDEEESGQS

SEQ ID NO: 136626 - protein, 896 aa, Oryza sativa
  unsure (1)..(896): unsure at all Xaa locations
  Clone ID: PAT_MRT4530_38187C.1.pep
MTTPLKTPASKHRLHFPAMTPRNGGGGGAAAGGTEHPVEVIGRIRNLAAGAGGASALEIAGGGTAVRVRGDAGGCRDFTLDGVSVSEEEDLEGFYRRFVRSRIEGVRVGAKCTVMVYGPTGSGKSHTMFGCAKQPGIVYRALRDILEGGGGGGGGVSGGGGEGDGRGEDDAGFGMGLFVQVAVLEIYNEEIYDLLVGSGANAKGNAPKARLEVMGKKAKNATYISGNEAGKISREVAKVEKRRIVKSTLCNERSSRSHCMIILDVPSVGGRLMLVDMAGSENIEAAGQTGFEAKMQTAKINQGNTALKRVVESIANGDSHVPFRDSKLTMLLQDSFEDDKSKILMILCASPDPKELHKTVSTLEYGAKAKCIIRAAHAATPRDKMSSEESSTMLNSRIVAMNQFIYNLQKENKLREKERNEAQSVLRKKEEELAQLRDKQKIGXIFRRAAKEEEINSKVMEKTQSLRTELMKMEEKMLRQQQELLALQQRLKEVEREKPVQQDIIGGRLLARLSEMSARADQSMSMDMSIDFDMGDQPAAQDVKVIKEDTRKQGQIWSQANTAGSCTSAVEQEDDVVRLSGYPEKVVLSTVFEEGDEEEDKDSGVEEEVCKEVVEESYVMQQPLAEPEDPATRNNRIQNIFRLCGNHRELAKKVQSPAKKAFGDENNEPAKQTFGDENKQQPAKRVFGDENKDPSAWGAIEPPMCDVRVTDSPVSSQLSPIVCQVVDDAKLPVSEQLKSCNALEAADENKENNASGQDGLLEVYIKWESGHLIKGLKLLSNSCLSDLRKLLEDHFEEAGSKQQQQFTFLLLGDPSGAPVSREKEAGVPISKLPSCNNQPNSYLACLRAVKKQPATEQMPFSPLESKLNSALNDVHLAALSPKVNPMSPNYIRELRA

SEQ ID NO: 136627 - protein, 249 aa, Oryza sativa
  Clone ID: PAT_MRT4530_38188C.1.pep
TEVAKESSDIIILDDNFTSVVKVVRWGRSVYANIQKFIQFQLTVNVAALVINVVAAVSSGDVPLNAVELLWVNLIMDTLGALALATEPPTDNLMKRQPVGRREPLVTNIMWRNLFVQAIYQIAILLIFDFSGRSILRLQNDSREDAEKTQNTFIFNTFVFCQIFNEFNARKPEERNVFKGITKNHLFMGIIAITTVFQILIIEFLGKFFKTVRLNWRLWLVSVAIGIISWPLAYLGKFIPVPCKTSPGL

SEQ ID NO: 136628 - protein, 348 aa, Oryza sativa
  Clone ID: PAT_MRT4530_38189C.1.pep
MAARHRVALPWAQTAAATGPCPYPAAAAVPHPDACGSNGGGSRRDGGGLGRRRRSLRRHDDSNRVRRRRDDGSRERRQAILGSRSFIMIMNCFVGTWKHSKNGICNTKSAYKEIMKSDQIHNFQQLWKARNDLKFQGILKEPTQVESQEEENKRRMETISEGNRCYIDAAWENTFIGIGIFFHMPMTHNALFIKRFALAELVALQLAMEIAKFFNFAGTSFLTDNSVIADTIKKRDFNNEPGHWSLRPLWSQIQRDIAENLFQVAWIPWKINKVADKVKVKVYLKYEEAYTSSRMGENLFMYLICTDTKVYARLRNLARLESTCIVLLAFVAHVGFVIALVKICTLYS

SEQ ID NO: 136629 - protein, 106 aa, Oryza sativa
  unsure (1)..(106): unsure at all Xaa locations
  Clone ID: PAT_MRT4530_3818C.1.pep
SHRPNSKTLVEVVPVMVEELYIRKVDDEALPYKAMAAAVLANVVESSIDPDTTVVNKEGHVLTSKXSIYDFIHMLKCFIPDKLXPRTPIRSPPWSRSSGRTTGATP

SEQ ID NO: 136630 - protein, 51 aa, Oryza sativa
  Clone ID: PAT_MRT4530_38190C.1.pep
FRERSFMHLYEHSNHSNAHMPLAGILLFTDMFSVPYSVFVVHDFSAAKASI

SEQ ID NO: 136631 - protein, 266 aa, Oryza sativa
  Clone ID: PAT_MRT4530_38191C.1.pep
MAAGLGVKAAPFTYVAHALAVAAAVMVLVWCISFRGGLAFEADNKNLIFNYAAITIMLYESIVTRYCNKLDEYMVCKLYQVHPVLMLIGYIILGSEAIMIYKIFPKLNHDTTKLIHLILHAIAIVLGAVGIYCAFKFHNESGIANLYSLHSWLGIGTISLYGIQWIFGFVAFFYPGAAPHVRRGALPWHVLFGLFVYVLTLATAELGLLEKLTFLQSSGLDKYGAEAFLVNFTGLVVALFGAAVVVAAVAPAHVEEPEGYAPIPVN

SEQ ID NO: 136632 - protein, 61 aa, Oryza sativa
  unsure (1)..(61): unsure at all Xaa locations
  Clone ID: PAT_MRT4530_38192C.1.pep
TNKIXNXFHILYSMXXDSQXLLQMSMXRTXRXLVDHLRKLSSYPRSAGIAMGSFAGXALMC

SEQ ID NO: 136633 - protein, 76 aa, Oryza sativa
  unsure (1)..(76): unsure at all Xaa locations
  Clone ID: PAT_MRT4530_38193C.1.pep
TDSADQNKMGIVDAKASEPRNNGXEADETNARLEPDMLNRVDFGMACLKNAIYKGAKWSEPYCCYADLYMRYLREA

SEQ ID NO: 136634 - protein, 102 aa, Oryza sativa
  unsure (1)..(102): unsure at all Xaa locations
  Clone ID: PAT_MRT4530_38194C.1.pep
GFYPEKTLEGELNKGPKNNPFKKGNGPQGRXPLLTPKGEQNFPLEAPLNQSIPXGEPPKGPRPPGGPAKCTPPGQKADAKPPHPHLREPPDLGKGTKTGRPP

SEQ ID NO: 136635 - protein, 95 aa, Oryza sativa
  Clone ID: PAT_MRT4530_38195C.1.pep
MHRQLSLSPGPKQQQHDDGGNIGIGSDAAEVMAVPEESSAAKGRSVREERTIHLIPLLTFLCFLLLFLFSHDPSSADMSSFRDGGNGGNRRLRML

SEQ ID NO: 136636 - protein, 122 aa, Oryza sativa
  unsure (1)..(122): unsure at all Xaa locations
  Clone ID: PAT_MRT4530_38196C.1.pep
NAPSAQPMAPVSAPALAPRQQVVQPIQQTPPIQQVVQPAQQTPXRRQVLQPIQQTPLRQQVVXPIQQQGLMNASAGFATPGGQPSPQVQYQQAGSAQPQFVPQYNQFEPMPQQSQGTPQQRP

SEQ ID NO: 136637 - protein, 147 aa, Oryza sativa
  unsure (1)..(147): unsure at all Xaa locations
  Clone ID: PAT_MRT4530_38197C.1.pep
CQAAEHPCRRRRTPKPICAKQPPPPLLPLLTGSVAPTLREQSSSHRAPPSLVLLPPRRTSPPPHRLRRPAGAKSIAHTFRRRQMRRVRASATPDPSPRRRXSPDPPCRRRPPPPRRRAATAAPLPRRATAIPPTPPHHRAATTPPPR

SEQ ID NO: 136638 - protein, 140 aa, Oryza sativa
  Clone ID: PAT_MRT4530_38198C.1.pep
FRSRHFATHHHSETMKLALFALLGMACTLQLANASNTLESNSEVDEFNVAGSDSFQDFDDQDISLEEFCEQVLFEKRGDVEIPEFLIDQVRNLGKDKKKDEKKKDEKKDGKKKDEKKPKQTSSPSGGGGGKNKKRNRRRI

SEQ ID NO: 136639 - protein, 95 aa, Oryza sativa
  Clone ID: PAT_MRT4530_38199C.1.pep
VDSSLGKRLKPAPWLLACYAPLIKLLVHPPVLELVLLSYSVPLSIKRGQCYVAKIYFIGFVICVAPCSPLYVCKILFQPYAYGFLIGGFFLVRGP

SEQ ID NO: 136640 - protein, 354 aa, Oryza sativa
  Clone ID: PAT_MRT4530_3819C.1.pep
MAHPGAMVATEEAAGAEGGGGVARVDGVDGVLAVGDRNGEVDEVGEDAANPKEAAPRSEAVRGDDGGGPELGGDGGERESDVASSNPARRMGGERRKRTEEVNGIGVAVAGEPWHNNANGGHREVEKATAILTNTYATTDSDGRWPTTSFEGRRGTVHGGDVSAIFGEEKPMAGLHLAPANPMESTATEGDDGRRRTARLKMEQIGFTVTTVLRWISASGRWLPGFSSLLRCRQWIRRGPATTESTAKLRRRSKHGNGSAFTVTATSGGVRRKRTGGRGRDLHCEAEGGGGADRRRPGRRRMAAGAAAGGGERGRARGERFRRRRRTGLEGIGRGRLGGPLYSHGRPGSKLGKV

SEQ ID NO: 136641 - protein, 188 aa, Oryza sativa
  Clone ID: PAT_MRT4530_381C.1.pep
MPPPPCCRRSAASLPELCRSSAGLLLGAAAGAGLGPSSTSLPRPTSRLPDHHLLQHHIVALDFCLIAVTETFINPRWPWYHDAAVIADTIPVMSCLMLNHEGFSKSWKLSNSTRQSSCRNGEKYGEAAVKLLAATLRDQWALADKRMHINNNWWRQKRRLVKSASCNYVTGNLFAKHSIYCSAIASQK

SEQ ID NO: 136642 - protein, 155 aa, Oryza sativa
  Clone ID: PAT_MRT4530_38200C.1.pep
RSRRRWFPRMRVRRPFPVAGVRPSPLVLPFRSSTASTSTATAGPPPPASASSTSPHGAPPPLATCSTECNRETAFNLDRVSYHWTVLPTEYSSAAGLQGGTTTTCSRCPNPNFASCLFLVIQFAFANAIYRAVLVVLLAGISPLVSTLLMSSSSL

SEQ ID NO: 136643 - protein, 149 aa, Oryza sativa
  unsure (1)..(149): unsure at all Xaa locations
  Clone ID: PAT_MRT4530_38201C.1.pep
MATSPLLLLLLLLVAAAAAAGDEASLSPSNAAGAGGAGGARXVGGRTEIRDVGGNKAVQSLGRFAVAEHNRRLRHGSCGPADPVPVKIAFARAVEAQKQSRSCVAYYLKGVARGPRGGAAPRELVFDSPRGVKDLFIVQRDLLLSSSWL

SEQ ID NO: 136644 - protein, 497 aa, Oryza sativa
  unsure (1)..(497): unsure at all Xaa locations
  Clone ID: PAT_MRT4530_38202C.1.pep
WNKKPHRRRRRSHRTRRTTPPRRXLARLPLRDDAVTTALSSRWPRVFSTLPRLRLGPTTFNSRASLDIGYCDDDDRWVDALDRVLDGRLSPVAAFEVDADMDLLEGYDDWFYSFFRTLCRSGGLQELAVRNKHVHECYVVPSPVYACATLTSLELDACHLRVPGKLTGLRAVRSLVLLRVVATDVGLRRVVSRCRAVERLVLDDCHRVRNVVIRGSSLKQLEIHSYRPLCVALKKAPHLESAKLSLGYGVAEVSWSIYNNSDSEIESKRGSLQLYEFEAQERREQRKTDEATNMVTFLSGLNCAKELYLYLPYEYAKILRNSADWLRSGFKEYQHLITNEVAQKMLLAWAAEAYPLSEHNDGAIAQVVSCLQNSSPNLKVLEIKNDFFDDRRASTDVPDFWEKNMGAAECVQNHLSTVTFYLNSECFQGRSYIDLSKLLLMRARAVERLSIKYRRLEDQDRYSAELESVQSELPLWPRASPGALVEIRAVDRLPSWY

SEQ ID NO: 136645 - protein, 93 aa, Oryza sativa
  Clone ID: PAT_MRT4530_38203C.1.pep
WRTIIPGSALEMDRAPAPGGAAGGEPDEDAGGDLPLVARDGYTRPAPTSKTSSPTFSSQRPPSLTRYTQAYAHTPYTTCVKSCNVCMYPEVIN

SEQ ID NO: 136646 - protein, 75 aa, Oryza sativa
  unsure (1)..(75): unsure at all Xaa locations
  Clone ID: PAT_MRT4530_38204C.1.pep
MPTTGSRMLLIGLRRHLMRNQSLWVPCLVDGGDAAVFRPEEYYXERWTHGGGVPALKEVVQLCAGWQPVPRPPGE

SEQ ID NO: 136647 - protein, 100 aa, Oryza sativa
  Clone ID: PAT_MRT4530_38205C.1.pep
MAVDEMVGGGVGRWIHEKTTAAAGTVSAGRWCRTMAPGESCGAASSTTTKRRWVAGKKKQQRPRMASPGSDKGERRELRARGGDERGTVAPSESTRQPRE

SEQ ID NO: 136648 - protein, 361 aa, Oryza sativa
  Clone ID: PAT_MRT4530_38206C.1.pep
MGASASSSAGRSKPPPPPPCSSSGVAVSTSRGYHLFEIRNHSRIKSMTPLGRGETAEAADYAAVYLDYVIDSYPPKSVTAYFLLRLVDKVSNDLMDPPPDDDVRAAAVHEFSAGQNSWGYYAFWKKDELESSGRIVDDVLTIRCDVGVVGRYATAKTDAAAAAASVASSVHVPPADLGHQLGALRSRAVGADVTFQVGAGSGARRFGAHRCVLAARSPVFEAELYGPMVERDAGRVIRIDDMDPQVFDALLDFMYTDALPGMRKRDAVAMSQQLLVAADRYDLKRLRLLCEHELCKHVNKGTVASMLALVEQQRPSCQGLKKACFEYLRKTPKVLREIMATEAFDHLVNELLLSNKLAIRE

SEQ ID NO: 136649 - protein, 57 aa, Oryza sativa
  Clone ID: PAT_MRT4530_38207C.1.pep
VQISQILLKHERSFYFYLYHRMRHWLICSLSRCMLHSIGVMPPAMRLALSAALWAPG

SEQ ID NO: 136650 - protein, 56 aa, Oryza sativa
  unsure (1)..(56): unsure at all Xaa locations
  Clone ID: PAT_MRT4530_38208C.1.pep
RXSALPALSPLAAPRSTPKKREERKEKRKEKKKGYRPTFLFIPLTCGPRLLTRMPR

SEQ ID NO: 136651 - protein, 99 aa, Oryza sativa
  unsure (1)..(99): unsure at all Xaa locations
  Clone ID: PAT_MRT4530_38209C.1.pep
NPVTTQATFLSSNRIPSSPRFFTGFHTLRRLCSTLFSLMLSPSGGGLLMSCFLRASTTGMSLQFTXGGLQVXLPLSSPTGDILSPXDMCADAYAACVPC

SEQ ID NO: 136652 - protein, 56 aa, Oryza sativa
  Clone ID: PAT_MRT4530_3820C.1.pep
FFFFLAVAAKTAPASLFSISYTLERLYKIKFCLLKNTTSLSNIYSIYIFEPCRILS

SEQ ID NO: 136653 - protein, 59 aa, Oryza sativa
  Clone ID: PAT_MRT4530_38210C.1.pep
ERELDTSSTHGMSSNPFFPGMTYPCHTVGTTQYEISQTFTGRTRDLQYIKRSTYNLQPK

SEQ ID NO: 136654 - protein, 178 aa, Oryza sativa
  unsure (1)..(178): unsure at all Xaa locations
  Clone ID: PAT_MRT4530_38211C.1.pep
MAESGRWARRGRVWQERGVAAEGVALEAEGVLAGAEGVVACDEDAAVEALGAGXAADLGEVEPNYEDEVAALVEVDTGTTRAISASAAGLPDELRLRRRSSESVRLLRYQPSERVDLVWGMTGWEEYSLIKDPSRXSSPSAIPTCRSPTTPASSVRIEPCMPRLISRSASIKKRVGPI

SEQ ID NO: 136655 - protein, 79 aa, Oryza sativa
  Clone ID: PAT_MRT4530_38212C.1.pep
YTKQTDSYVELWPPARLQLACSCRRRRASSSAGRRRRRPAAPQEPSGLPLGSRRRRWRRPSPGAVVVAVPPSPAPPALV

SEQ ID NO: 136656 - protein, 357 aa, Oryza sativa
  Clone ID: PAT_MRT4530_38213C.1.pep
MPQFFGLHVLKMMRLGRAPCCYCFTEPHPAGGVAAAVRLRLLPPARAANTSSEPAARLRAVLEQVDEELRKGNDEAALSLVRGSQGADGGLRFFGAARQVPQRLYTLDELKLNGIDTSAFLSPVDLTLGSIERNLQIAAVLGGLSVSAAFELSKLQVLFLFLGLLSLWSVDLVYFGGGVRNLILDTIGHNLSQKYRNRVIQHEAGHFLIAYLLGVLPKGYTITSLDTFIKKGSLNVQAGTAFVDFEFLQEVASGTISATMLNKFSCIALAGVATEYLLYGYAEGGLADIGQLDGLLKGLGFTQKKADSQVRWAVLNTVPALRRHKKARSQLAEAMSSGKSVGSCIGVIEENINSEDI

SEQ ID NO: 136657 - protein, 78 aa, Oryza sativa
  unsure (1)..(78): unsure at all Xaa locations
  Clone ID: PAT_MRT4530_38214C.1.pep
YRGDGNEESADSXTDEEDEQEQDDDDEKGFXNGDRRGEPLESIALEFGVKPYDWLCFLDEMAAEDEKRLYEDYQRDPS

SEQ ID NO: 136658 - protein, 60 aa, Oryza sativa
  unsure (1)..(60): unsure at all Xaa locations
  Clone ID: PAT_MRT4530_38215C.1.pep
FFFFFFISTAXNWYXNGXGGXYMSIFITPPSPQXLVNTTAKTNSIWHHIIPHSSFMHQCT

SEQ ID NO: 136659 - protein, 113 aa, Oryza sativa
  Clone ID: PAT_MRT4530_38216C.1.pep
ASREAIGHSYGHACWRHSHVRYNVISSSEEGTGDDRERWGSYSLLTLAAPGYSSPRITTPPPFPPSPGSGAVGLPTIAPASGPGSVCAVAGHGSGGFRGSLCTIPTRGSNPQL

SEQ ID NO: 136660 - protein, 543 aa, Oryza sativa
  unsure (1)..(543): unsure at all Xaa locations
  Clone ID: PAT_MRT4530_38217C.1.pep
KGVEIAERFAYHGVSANLISYLTGPLGESTAGAAAAINAWSGVSQLLPLLGGALADSWLGRYRTILLASLLYILVNXIPPKRHCFFFLFFSXSVSLLDIEKKREKKNSLAMLAFSTLISTGGNQCSSAAVAGGKTCPPSTLRVAFFYISLYMVAVAQGGHKPCVQAFGADQFDPSDPEESVSRSSFFNWWYFGMCGGTAVTLVFLSYVQDNIGWGLGFGIPCVVMACALAVFLLGTRTYRYYVSGSKKGVVARAGEALAAWRNRAKSIPLLPPASQDKAGLVEQAKGIVRLFPIWATCLIYAVALAQSSTFFTKQAGTLDRRIGDHIQVPPAALQSFISITIVAIIPVYDRVIVPVARRYTGVPSGITMLQRIGAGMVLSLVSMVIAALVETRRLRAARDAGLVDKAGVPVPMSLWWMVPQYVLFGAADVFTMVGLQEFFYDQVPDKLRSLGLALYLSIFGVGSFISSALVSGIDRATAARGGSWFSNNLNRAHLDYFYWLIAALSALELLAYGYFAVTFKYKNKNKGALLATSNGDGGGCSF

SEQ ID NO: 136661 - protein, 1662 aa, Oryza sativa
  Clone ID: PAT_MRT4530_38218C.1.pep
MEEKYSAKPFVFDGHNFVIWKARMEAYLQSQGHNVWNKVKSPYTVPDDADITPANMAQVDFNYRARNAIIGGISSGEFNRVQHHKSVHDMWTALCNFQGNNDIQLVRQNQFHKEYQRFEMHPGESIDSYFKRFGEIVSKLRSVGKEFSDNDNARHLLNCLYYGVWEMKVASITESAPLSDLTMDKLYSKLKTHEMDVFHRKGLKHSVALVADPFGSTSSNDSAFVCGGFSLAALHSVTEEQLEKIPKDDLALFARKFSRAYKNVRDRKRGKTNEPFVCFECGEPNHIRVNCPKLKKKSDKMTKKTEGQGRKGRKDLMKKAIHKVLAALEEVQLSDIDSDDDDQEKGDKDFSGMCCLANNEDFINLCLMALKDKDDSSEHPEVCLDDIPSLDGSLCDDSCSDNDSVDDELSKERMAHLMIEISDKYRSSKYKIEKLKSENDGMELEIARLRSMIPKEDTCSTCASYLSEIYLLKDKLKSCALGAGNPSSASATCSTCYEMKVDMGLLEMELKELKEKFVHDRIGRCENCPILTSDNDELRQQVDMLRTKNDLLESFATKEPVHSSCANCAILETEQKDAKTVIDSIKSIDSCSSCISLKVDLESAKRENSYLQQSLERFAQGKKKLNMILDQSKVSINNQGIGYDFAYDFAESLRIGTHEILGVRWDDRTSSKTYNLQVCSWLERLEKNDKNVLGLGELLESLGGSSVRVIVVQVVYLAFLAEMCTLDVTQQGWGKTDMDFGVGRSNSWLVDSGCSRHMTGEAKWFTSLTRASGDETITFRDASSGRVMAKGTIKVNDKFMLKDVALVSKLKYNLLSVSQLCDENLEVRFKKDRSRVLDASKSPVFDISRVGRVFFANFDSSAPGPSRCLIASENRDLFFWHHRLGHIGFDHLSRISGMDLIRGLPKLKAPKDLVCAPCRHGKMTSSSHKPITMVMTDGPGQLLHMDTVGPARVQSVGGKWYVLVVVDDFSRYSWVYFLESKEKTFGFFQSLVRRLALEFPGALQAIRSDNGSEFKNSAFEYFYDSSGVEHQFSSPYVPQQNGVVERKNRTLVEMARTILDEFTTPRKFWTEAISMACFISNRVFLRTILHKTPYELRFGHRPKVSHLRVFGCKCFVLKPGNLDKFESRSVDGIFLGYATHSRAYRVYVLSTNKIVETCEVTFDEASPGARPEISGVSDESIFVDEDSDDDDDDSFPPPLDSTPPVQETGSPSTTSPSGDAPTTSSSAAEEIDGGTSGPTAPRHIQNRHPPDLMIGGLGERVTRNRSYELVNSAFVASFEPKNVCHALSDENWVNAMHEELENFERNKVWSLVEPPLGFNVIGTKWVFKNKLGEDGSIVRNKARLVAQGFTQVKGLDFEETFAPVARLEAIRILLAFAASKGFKFFQMDVKSAFLNGVIEEEIYVDDIIFGGSSHALVAQFSYVMSREFEMSMMGELTFFLGLQIKQTKEGIFVHQTKYSKELLKFDMADCKPIATPMATTSSLGPDEDGEEVDQHEYRSMIGSLLYLTASRPDIHFSVCLCARFQASPRTSHHQAVKRIFRYIKSTLEYAEAEYVAAASACSQVLWMISTLKDYGLSFSGVPLLCDNTSAINIAKNPVQHSRTKHIEIRYHFLRDNVEKGTIVLEFVESEKQLADIFTKPLDRSRFEFLRSELGVIHPYGLI

SEQ ID NO: 136662 - protein, 1811 aa, Oryza sativa
  Clone ID: PAT_MRT4530_38219C.1.pep
MEEKYSAKPFVFDGHNFVIWKARMEAYLQSQGHNVWNKVKSPYTMPDDADITPANVAQVDFNYRARNAIIGGISSGEFNRVQHHQSAHDMWTALCNFHEGNNDIQLVRQNQFHKEYQRFEMHPGESIDSYFKRFEEIVSKLRSVGKEFSDNDNARHLLNCLDYGVWEMKVTSITESAPLSDLTMDKLYSKLKTHEMDVFHRKGLKHSMALVADPSGSTSSNDLAFVCGGFSLAALHSVTEEQLEKIPEDDLALFTRKFSRAYKNVRDRKGGKTNEPFVCFECGEPNHIRVNCPKLKKKSDKTTKKLEGQGRKGKKDLIKKAIHKVLAALEEVQLSDIDSDDDDQEKGDKDFSGMYCLANNEDFINLCLMALEDKDDSSEHHEVCLDDIPSLDGSLCDDSCSDNDSVDDELSKERMTHLMIEISDKYRSSKYKIEKLKYENDGMALEIARLRSMIPEEDTCSTCASYLSEINLLKDKLKSCALGAGNPSSASAACSTCYEMKVDMSLLEMELKELKENFVHDRISSCENCPILTSDNDELRQQVDMLRTKNDLLESYATKEPVHSSCANCVILETELKDTKIVIDYVKSVDSCSSCISLKVDLESAKRENSYLQQSLERFAQGKKKLNMILDQSKVSINNQGIGYDFAESLRIGTHEILGVTDGMIELAQKPITFKSAGFIGNTSSSTPKTSEPKMVPMTSKSKSVELPRPKNPKQVEHKQNQKQTKPVEKTKYECTYCGKAGHLVGFCFRKARKKRQERLRTRRAARVPERFECACHCHSSGVSRFPRRDVHPRCDLAGLGQNRHGHLAYNYAHNTKDACTPRMDFGVGRSNSWLVDSGCSRHMTGEAKWFTSLTRASGDETITFGDASSGRVMAKGTIKVNDKFMLKDVALVSKLKYILLSVLQLCDENLEVRFKKDRSRVLDASESPVFDISRVGRVFFANFDSSAPGPSRCLIASENRDLFFWHRRLGHIGFDHLSRISGMDLIRGLPKLKAPKDLVCAPCRHGKMTSSSHKPVTMVMTDGPGQLLHMDTVGPAQVQSVGGKWYVLVVVDDFSRYSWVYFLETKEETCGFFQSLARSLALQFPGALRAIRSDNGSEFKNSAFESFCDSSGVEHQFSSPYVPQQNGVVERKNRTLVEMARTMLDEFTTPRKFWTEAISTACFISNRVFLRTILHKTPYELRFGRRPKVSHLRVFGCKCFVLKSGNLDKFESRSLDGIFLGYATHSRAYRVYVLSTNKIVETCEVTFHEASPGARPEISGVPDESIFVDKDSDDDDDDSIPPPLDSTPPVQETAFVASFEPKNVCHALSDENWVNAMHEELENFERNKVWSLVEPPLGFNVIGTKWVFKNKLGEDGSIVRNKARLVAQGFTQVEGLDFEETFAPVARLEAIRILLAFAASKGFKLFQMDVKNAFLNGVIEEEVYVKQPPGFENPKFPNHVFKLDKALYGLKQAPRAWYERLKTFLLQNGFEMGAVDKTLFTLHSGIDFLLVQIYVDDIIFGGSSHALVAQFSDVMSREFEMIMMGELTFFLGLQIKQTKEGIFVHQTKYSKELLKKFDMADCKPIATPMATTSSLGPDEDGEEVDQREYRSMIGSLLYLTASRPDIHFSVCLCARFQASPRTSHRQAVKRIFRYIKSTLKYGIWYSCSSALSVRAFSDANFAGCKIDRKSTSGTCHFLGTSLVSWSSRKQSSIAQSTAEAEYVAAASTCSQVLWMISTLKDYGLSFSGVPLLCDNISAINIAKNPVQHSRTKHIEIRYHFLRDNVEKGTIVLEFVESEKQLADIFTKPLDRSRFEFLRSELGVIHPYGLI

SEQ ID NO: 136663 - protein, 246 aa, Oryza sativa
  Clone ID: PAT_MRT4530_3821C.1.pep
RHRSLHPPGTPLLGLGKIEQDGSTGVGPTRQPHGPRWTGCTRLAPAGAVGPTRQPHPRTRAADGRVPHGSRGARPKTASPARPTGGGAPAPRWSPAAAIGAAERRPREEREGGNEMAVLGSPRVDGDDGNGDRSGERRRRGSGRRGRRRSGGRRAKRRGGRGRRGRGEAEGGDAEAGGGPRRRWRRTEARRRRRRERMTARARFRRGEKAARVGNGGGRHGECLNSVGSERGRPEGKETGAAISAP

SEQ ID NO: 136664 - protein, 2337 aa, Oryza sativa
  Clone ID: PAT_MRT4530_38220C.1.pep
MEEKYSAKPFVFDGHNFVIWKARMEAYLQSQGHNVWNKVKSPYTVPDDADITPANMAQVDFNYRARNAIIGGISSGEFNRVQHHKSAHDMWTALCNFHEGNNDIQLVRQNQFHKEYQRFEMHPGESIDSYFKRFGEIISKLRSVGKEFSDNDNARHLLNCLDYGVWEMKVTSITESAPLSDLTMDKLYSKLKTHEMDVFHRKGLKHSMALVADPSGSTSSNDSAFVYGGFSLAALHSVTEEQLEKIPEDDLALFARKFSRAYKNVRDRKRGKTNEPFVCFECGEPNHKRVNCPKLKKKSDKTTKKPEGQGRKGKKDLMKKAIHKVLAALEEVQLSDIDSDDDDQEKGDKDFSGMCCLANNEDFINLCLMALEDKDDSSEHPEVCLDDIPSLDGSLCDDSCSDNDSVDDELSKERMAHLMIEISDKYRSSKYKIEKLKSENDGMALEIARLRSMIPEEDTCSTCASYLSEINLLKDKLKSCALGAGNPSSASAACSTCYEMKVDMGLLEMELKELKEKFVHDRIGRCENCPILTSDNDELRQQVAMLKTKNDLLESFATKEPIHSSCANCAILETELKDAKTVIDSIKSIDSCSSCISLKVDLESAKKENSYLQQSLERFAQGKKKLNMILDQSKVSINNQGIGYDFAESLRIGTHEILGVTDGMIELAQKPITFKSAGFIGNTSSSTPKTSEPKMVPMTSKSKPVELPRPKNPKQVEHKQNQRQTKPVEKTKYECTYCGKAGHLVGFCFRKARKERQERLRTRRATRVPERFECACHCRSSGVSRFPRRDVHPRRDLAGLGQNRHGHLAYNSAHNTKDACTSRMDFGVGRSNSWLVDSGCSRHMTGEAKWFTSLTRASGDETITFGDASSGRMMAKGTIKVNDKFMLKDVALVSKLKYNLLSVSQLCDENLEVRFKKDRSRVLDASESPVFNISQVGRVFFANFDSSAPGPSRCFIASENRDLFFWHRRLGHIGFDHLSRNSGMDLIRGLPKLKAPKDLVCAPCRHGKMTSSSHKPVTMVMTDGPGQLLHMDTVGPAQVQSVGGKWYVLVVVDDFSRYSWVYFLESKEETFGFFQSLARSLALEFPSALRAIRSDNGSEFKNSAFESFCDSSGVEHQFSSPYVPQQNGVVERKNRTLVEMARTMLDEFTTPRKFWTEAISAACFISNRVFLRTILHKTPYELRFGRRPKVSHLRVFSCKCFVLKPGNLDKFESRSVDGIFLGYATHSRAYRVYVLSTNKIVETCEVTFDEASPGARPEISGVPDESILVDEDSDDDDDDSISPPLDSTPPVQETGSPSSTAPSGDAPTTSSSAAEEIDGGTSGPTAPRHIQNRHPPDSMIGGLGERVTRNRSYELVNSAFVASFEPKNVCHALSDENWVNAMHEELENFERNKVWSLVEPPLGFNVIGTKWVFKNKLGEDGSIVRNKARLVAQGFTQVEGLDFEETFAPVARLEAIRILLAFAASKGFKLFQMDVKSAFLNGVIEEEVYVKQPPGFENPKFPNHVFKLEKALYGLKQAPRAWYERLKTFLLQNGFEMGAVDKTLFTLHSGIDFLLVQIYVDDIIFGGSSHALVAQFSDVMSREFEMSMMGELTFFLGLQIKQTKEGIFVHQTKYSKELLKKFDMADCKPIATPMATTSSLGPDEDGEEVDQREYRSMIGSLLYLTASRPDIHFSVCLCARFQASPRTSHRQAVKRMFRYIKSTLEYGIWYSCSSALSVRAFSDADFAGCKIDRKSTSGTCHFLGTSLVSWSSRKQSSVAQSTAEAEYVAAASACSQVLWMISTLKDYGLSFSGVPLLCDNTSAINIAKNPVQHSRTKHIEIRYHFLRDNVEKGTIVLEFVESEKQLADIFTKPLDRSRFEFLRSELGVIGVDLGQRRIGTRLREELRSKAIKDAGEAKPIQPFHVAQDGEWLGSAGLHRPSSDGPRRRPMAHGLRRCRQLACARTRAEKPYAATPVSRDSIGGGCRSAGPTRDFASARGSGSAGRVAASGWLGAGERALRKRRRNAHDAAGQRGKFGFVKTESTRIHQQEDHALPVHFMTVLQLPKWAVKDIERKCRGFLWKGQEKVNGGHCLVSWRKLCMPIEKGGLGVMDLDLFGQALRLKWHAKSLEQKGRPWTLVGSLSAAALCEFFQLWDEVRNTTLQNGDDSIRWKVSPDGQFSASATYNFFFTTKEDCPVGDLLWHSRAPSRVRFFMWLALKGKCLTADNLAKRNWPHEDHCVLCQREEEDCQHLFADCSFTSAVWGLIRSRVNFNFPIPTEENCPLMCWWLQPRARCRQLANRTVYTSAAQITVIRRGSITYGICQQSYLGVVMLDATRADQTNNKNRLQDTQHVHTYE

SEQ ID NO: 136665 - protein, 1737 aa, Oryza sativa
  Clone ID: PAT_MRT4530_38221C.1.pep
MPGDKIGHKVAHGGRTPCEEVFATDFAREAKPIQPFLMAQDDGWISRQGGQAEQAQDKTTAHGIGTMRGQAREIARGTRAQWTRGGKEFGACGRGVHAVSSGSEAGVVLGPTRDFASMRGSSSAGHVEALDWMRAAMEEKYSAKPFVFDGHNFVIWKARMEAYLQSQGHNVWNKVKSPYTVPDDADITPANMAQVDFNYRARNAIIGGISSGEFNRVQHHKSAHDMWTALCNFHEGNNDIQLVRQNQFHKEYQRFEMHPGESIDSYFKRFGEIVSKLRSVGKEFSDNDNARHLLNCLDYGVWEMKVTSITESAPLSDLTMDKLYSKLKTHEMDVFHRKGLKHSMALVADPSGSTSSNDSAFVCGGFSLAALHSVTEEQLEKIPEDDLALFARKFSRAYKNVRNKKRGKTNEPFVCFECGEPNHIRVNCPKLKKKSDKTTKKPEGQGRKGKNDLMKKAIHKVLAALEEVQLSDIDSDDDDQEKGDKDFSGMCCLANNEDFINLCLMALEDKDDSSEHPEDFGVGRSNSWLVDSGCSRHMTGEAKWFTSLTRASGDETITFGDASSGRVMAKGTIKVNDKFMLKDVALVSKLKYNLLSVSQLCDENLEVRFKKDRSRVLDASESPVFDISRVGRVFFANFDSSAPGPSRCLVASENRDLFFWHRRLGHIGFDHLSRISGMDLIRGLPKLKAPKDLVCAPCRHGKMTSSSHKPVTMVMTDGPGQLLHMNTVGPARVQSVGGKWYVLVVVDDFSRYSWVYFLESKEETFGFFQSLARSLALEFPGALRAIRSDNGSEFKNSAFESFCDSSGVEHQFSSPYVPQQNGVVERKNRTLVEMARTMLDEFTTPRKFWTEAISAACFISNRVFLRTILHKTPYELRFGRRPKVSHLRVFGCKCFVLKSGNLDKFESRSLDGIFLGYATHSRAYRVYVLSTNKIVETCEVTFDEASPGARPEISGVLDESIFVDEDSDDDDDDSIPPPLDSTPPVQETGSPSTTSPSGDAPTTSSSAAEEIDGGTSGPTAPRHIQNRHPPDSMIGGLGERVTRNRSYDLVNSAFVASFEPKNVCHALSDENWVNAMHEELENFERNKVWSLVEPPLGFNVIGTKWVFKNKLGEDGSIVRNKARLVAQGFTQVEGLDFEETFAPVARLEAIRILLAFAASKGFKLFQMDVKSAFLNGVIEEEVYVKQPPGFENPKFPNHVFKLDKALYGLKQAPRAWYERLKTFLLQNGFEMGAVDKTLFTLHSGIDFLLVQIYVDDIIFGGSSHALVAQFSDVMSREFEMSMMGELTFFLGLQIKQTKEGIFVHQTKYSKELLKKFDMADCKPIATPMATTSSLGPDEDGEEVDQREYRSMIGSLLYLTASRPDIHFSVCLCARFQASPRTSHRQAVKRIFRYIKSTLEYGIWYSCSSALSVRAFSDADFAGCKIDRKSTSGTCHFLGTSLVSWSSRKQSSVAQSTAEAEYVAAASACSQVLWMISTLKDYGLSFSGVPLLCDNTSAINIAKNPVQHSRTKHIEIRYHFLRDNVEKGTIVLEFVESEKQLADIFTKPLDRSRFEFLRSELGITLKALKTLKFVIGVDLGQRRIGTRLREELRSKAIKDAGEAKPIQPFLMAQDDGWISRQGGQAEQAQDKTTAHGIGTMRGQAREIARGTRAQWTRGGKEFGACGRGVHAVSSGSEAGVVLGPTRDFASMRGSSSAGHVEALDWMRAVVAIEVAIYSSVKIHYRYNDRYKSYLLPRL

SEQ ID NO: 136666 - protein, 120 aa, Oryza sativa
  Clone ID: PAT_MRT4530_38222C.1.pep
MAQACLFCGKPKEDASAHLQQFLESYSTYTVRRVRLQLLPFSLLRRAEQWFYINRATLSLLMKRLDNNEKDAKQGTVKALDFNTTCEVYGNTGHSGMDCPKTRENVMLMNNNNGNHPQGD

SEQ ID NO: 136667 - protein, 54 aa, Oryza sativa
  Clone ID: PAT_MRT4530_38223C.1.pep
ELFLMDFHLPPDQKLPFCFHTNVHLFKVTYIATIQVCCLVGCEQNYSKHSRTEA

SEQ ID NO: 136668 - protein, 1232 aa, Oryza sativa
  Clone ID: PAT_MRT4530_38224C.1.pep
MEKAVITAFVNTVMPPLFKVLSGSCKMVMNVIDDSDSMRRKLVLLAASMDDDLRRTKNPTAAAKVFGDQLRELTHDMEDCIERFLHRVSCAEGASRARRLGRFLLTICTRYRFGDKIKALNRRLEELTNERLCQFVYDKPPPPPPLAPAAAQQREHVQLNPVGVEGAKGDILAMLEESPEELRVIAIVGFGGSGKTTLAKAVFRSTDDDRIRGLLVDDEQYLQAQLMDYLRGRRACLLYLSIFPNDVPLEKKVIIRRWIAEGFARSEDVDIDDQTIARCDICAKTTVVWFMWVQVIGVDLGQRRIGTRLREELRSKAIKDARPIRPVQLGSSVGPSTLLTQDGEGQAEQTLDMTTAQLGSANAQACACARGGGRSYGTWRRGGLLFVKEAETRGNVVFASARRSGSAGGTATWRLLTCGAQARMEAYLQSQGHNVWNKVKSPYTMPDDADITPANVAQVDFNYRARNAIIGGISSGEFNRVQHHQSAHDMWTALCNFHEGNNDIQLVRQNQFHKEYQRFEMHPGESIDSYFKRFEEIVSKLRSVGKEFSDNDNARHLLNCLDYGVWEMKVTSITESAPLSDLTMDKLYSKLKTHEMDVFHRKGLKHSMALVADPSVTEEQLEKIPEDDLALFTRKFSRAYKNKKSDKTTKKLEGQGRKGKKDLIKKAIHKVLAALEEVQLSDIDSDDDDQEKGDKDFSGMYCLANNEDFINLCLMALEDKDDSSEHHEFPGALRAIRSDNGSEFKNSAFESFCDSSGVEHQFSSPYVPQQNGVVERKNRTLVEMARTMLDEFTTPRKFWTEAISTACFISNRVFLRTILHKTPYELRFGRRPKVSHLRVFGCKCFVLKSGNLDKFESRSLDGIFLGYATHSRAYRVYVLSTNKIVETCEVTFHEASPGARPEISGVPDESIFVDKDSDDDDDDSIPPPLDSTPPDRQLPDTSRTDIRLGERGFTQVEGLDFEETFAPVARLEAIRILLAFAASKGFKLFQMDVKNAFLNGVIEEEVYVKQPPGFENPKFPNHVFKLDKALYGLKQAPRAWYERLKTFLLQNGFEMGAVDKTLFTLHSGIDFLLVQIYVDDIIFGGSSHALVAQFSDVMSREFEMIMMGELTFFLGLQIKQTKEGIFVHQTKYSKELLKKFDMADCKPIATPMATTSSLGPDEDGEEVDQREYRSMIGSLLYLTASRPDIHFSVCLCARFQASPRTSHRQAVKRIFRYIKSTLKYVFYCSINS

SEQ ID NO: 136669 - protein, 201 aa, Oryza sativa
  Clone ID: PAT_MRT4530_38225C.1.pep
MAQACPFCGKPKEDASAHLQQFVESHSTYTVRRIRLQLLPFSLLERAEQWFYINRATDHLDAAAGGTFFSRIVRCQPIEKMVSNMGWSEERLQTRQCGMYTVKRTEMLAAQLDLLMKRLDNNEKDNKQGTVKALDFHTTCEVYGNTGHSGMDCPKTHENVMLMNNNNGYRPRGDQGWSISPWGRSRMDQTQGGQSKTPKDG

SEQ ID NO: 136670 - protein, 829 aa, Oryza sativa
  Clone ID: PAT_MRT4530_38226C.1.pep
MDTVGPARVQSVGGKWYVLVVVDDFSRYSWVYFLESKEETFGFFQSLARSLALEFPGALRAIRSDNGSEFKNSAFESFCDSSGVEHQFSSPYVPQQNGVVERKNRTLVEMARTMLDEFTTPRKFWTEAISAACFISNRVFLRTILHKTPYELRFGRRPKVSHLRVFGCKCFVLKSGNLDKFESRSLDGIFLGYATHSRAYRVYVLSTNKIVETCEVTFDEASPGARPEISGVPDESIFVDEDSDDDDDDSIPPPLDSTPPVQETGSPSTTSPSGDAPTTSSSAAEEIDGGTSGPTAPRHIQNRHPPDSMIGGLGERGFTQVEGLDFEETFAPVARLEAIRILLAFAASKGFKLFQMDVKSAFLNGVIEEEVYVKQPPGFENPKFPNHVFKLEKALYGLKQAPRAWYERLKTFLLQNGFEMGAVDKTLFTLHSGIDFLLVQIYVDDIIFGGSSHALVAQFSDVMSREFEMSMMGELTFFLGLQIKQTKEGIFVHQTKYSKELLKKFDMADCKPIATPMATTSSLGPDEDGEEVDQREYRSMIGSLLYLTASRPDIHFSVCLCARFQASPRTSHRQAVKRMFRYIKSTLEYGIWYSCSSALSVRAFSDADFAGCKIDRKSTSGTCHFLGTSLVSWSSRKQSSVAQSTAEAEYVAAASACSQVLWMISTLKDYGLSFSGVPLLCDNTSAINIAKNPVQHSRTKHIEIREAKPIQPFHVAQDGEWLGSAGLHRPSSDGPRRRPMAHGLRRSAGPTRDFASARGSGSAGRVAASGWLGAGERALRKRRRNAHDAAGQRGKFGFVKTESTRIHQQEDHVRVRIDEVAIIWSFSFE

SEQ ID NO: 136671 - protein, 103 aa, Oryza sativa
  unsure (1)..(103): unsure at all Xaa locations
  Clone ID: PAT_MRT4530_38227C.1.pep
TTRLPECHELKPVRVFIHHVCFCLIGFTSLFSLLNKHVFSPVQQGTCSITQHSPFSSCLPHYTRAHKFSARAVTDLXTGILWQMQDDGNSLKSSLPGLISSGS

SEQ ID NO: 136672 - protein, 2055 aa, Oryza sativa
  Clone ID: PAT_MRT4530_38228C.1.pep
MMSSSPYTRTCHVVPATNVHCISWHMMEVISSHSTTVIGVDLGQRRIGTRLREELRSKAIKDAGEAKPIQPFLVAQDDGWISRQGGQAEQAQDKTTAHGIGTMRGQAREIARGTRAQWTRGGKEFGACGRGVHAVSSGSEAGVVLGPTRDFASMRGSSSAGRVEALDWMRADPASLIAAVLARMEAYLQSQGHNVWNKVKSPYTMPDDADITPANMAQVDFNYRARNAIIGGISSGEFNRVQHHKSAHDMWTALCNFHEGNNDIQLVRQNQFHKEYQRFEMHPGESIDSYFKRFGEIVSKLRSVGKEFSDNDNARHLLNCLDYGVWEMKVTSITESAPLSDLTMDKLYSKLKTHEMDVFHRKGLKHSMALVADPSGSTSSNDSAFVCGGFSLAALHSVTEEQLEKIPEDDLALFARKFSRAYKNVRDKKRGKTNEPFVCFECGEPNHIRVNCPKLKKKSDKTTKKPEGQGRKGKKNLMKKAIHKVLAALEEVQLSDIDSDDDDQEKGDKDFSGMCCLANNEDFINLCLMALEDKDDSSEHPEVCLDDIPSLDGSLCDDFCSDNDSVDDELSKERMAHLMIEISDKYRSSKYKIEKLKSENDGMALEIARLRSMIPEEDTCSTCASYLSEINLLKDKLKSCALGAGNSSSASAACSTCYEMKVDMGLLEMELKELKEKFVHDRIGRCENCPILTSDNNELRQQVAMLRTKNDLLESFATKEPIHFSCANCAILETELKDAKTVIDSIKSIDSCSSCISLKVDLESAKKENSYLQQSLERFAQGKKKLNMILDQSKVSINNQGIGYDFAESLRIGTHEILGVTDGMIELAQKPITFKSAGFIGNISSSTPKTSEPKMVSALERLEKSDKNVLGLEELLESLRGSSDFGVGRSNSWLVDSGCSRHMTGEAKWFTSLTRASGDETITFGDASIGRVMAKGTIKVNDKFMLKDVALVSKLKYNLLSVSQLCDENLEVRFKKDRSRVLDASESPVFDISRVGRVFFANFDSSAPGPSRCLIASENRDLFFWHRRLGHIGFDHLSRISGMDLIRGLPKLKAPKDLVCAPCRHGKMTSSSHKPVTMVMTDGPGQLLHMDTVGPARVQSVGGKWYVLVVVDDFSRYSWVYFLESKEESFGFFQSLARSLALEFPGALRAIRSDNGSEFKNSAFEFFCDSSGVEHQFSSPYVPQQNGVVERKNRTLVEMARTMLDEFTTPRKFWTEAISAACFISNRVFLRTILHKTPYELRFGRRPKVSHLRVFGCKCFVLKSGNLDKFESRSLDGIFLGYATHSRAYRVYVLSTNKIVETCEVTFDEASPGARPEISGVLDESIFVDEDSDDDDDDSIPPPLDSTPPVQETGSPSTTSPSGDAPTTSSSAAEEIDGGTSGPTAPRHIQNRHPPDSMIGGLGERVTRNRSYDLVNLAFVASFEPKNVCHALSDENWVNAMHEELENFERNKVWSLVEPPLGFNVIGTKWVFKNKLGEDGSIVRNKARLVAQGFTQVEGLDFEETFAPVARLEAIRILLAFAASKGFKLFQMDVKSAFLNGVIEEEVYVKQPPGFENLKFPNHVFKLDKALYGLKQAPRACGIDFLLVEIYVDDIIFGGSSHALVAQFSDVMSREFEMSMMGELTFFLGLQIKQTKEGIFVHQTKYSKELLKKFDMADCKPIATPMATTSSLGPDEDGEEVDQREYRSMIGSLLYLTASRPDIHFSVCLCARFQASPRTSHRQAVKRIFRYIKSTLEYGIWYSCSSALSVRAFSDADFAGCKIDRKSTSGTCHFLGTSLVSWSSRKQSSVAQSTAEAEYVAAASACSQVLWMISTLKDYGLFFSGVPLLCDNTSAINIAKNPVQHSRTKHIEIRYHFLRDNVEKGTIVLEFVESEKQLADIFTKPLDRSRFEFLRSELGITLKALKTLKFVIGVDLGQRRIGTRLREELRSKAIKDAGEAKPIQPFLVAQDDGWISRQGGQAEQAQDKTTAHGIGTMRGQAREIARGTRAQWTRGGKEFGAVSSGSEAGVVLGPTRDFASMRGSSSAGRVEALDWMRAGERGIHAVERALSRAEA

SEQ ID NO: 136673 - protein, 1570 aa, Oryza sativa
  unsure (1)..(1570): unsure at all Xaa locations
  Clone ID: PAT_MRT4530_38229C.1.pep
MEEKYSAKPFVFDGHNFVIWKARMEAYLQSQGNNVWNKVKSPYTVPDDDDITPANVAQVDFNYRARNAIIGGISFEFSDNDNARHLLNCLDYGVWEMKVTSITDSAPLSDLTMDKLYSKLKTHEMDVFHRKGLKHSMALVADPSGSTSSNDSAFVCGGFSLAALHSVTEEQLEKIPEDDLALFARKFSRAYKNVRERERRKTNEPFVCFECGEPNHIRVNCPKLKKKSDKTTKKPEGQGRKGRKDLMKKAIHKVLATLEEVQLSDIDSDDDDQEKGDKDFSRMCYLANNEDFINLCLMALEDKDDSSEHLEVCLDDIPSLDGSPCDDSCSDNDSVDDELSKERMAHLMIEISDKYRSSKYKIEKLKSENDGMALEIARLRSMIPEEDTCSTCASYLSEINLLKNKLKSCALGAGNPSSASAACSTCYKMKVDMGLLEMELKELKEKFVHDRIGRCENCPIFTSDNDELRQQVAMLRTNNDLLESFATKEPVHSSCANCAILDTELKDAKTVIYSIKSIDSCSSCISLKVDLESAKRENSYLQQSLERFAQGKKKLNMILDQSKVSINNQGFIGNTSSSSPKTSEPKMVSALERLEKSDKNVLGLEELLESLRGSSDFGVGRSNSWLVDSGCSRHMTSEAKWFTSLTRASGDETITFGDASSGRVMAKGTIKVNDKFMLKDVALVSKLKYNSLSVSQLCDENLEVRFEKDRSRVLDASESPIFDISRVGRVFFANFDSSAPGPSRCLIASENRDLFFWHRRLGHIGFDYLSRISGMDLIRGSPKLKAPKGLIWTGXLLHMDTVGPARVQSIGGKXSLARSLALEFPGALRAIRSDNGSEFKNSAFEFFCDSSGVEHQFSSPYVPQQNGVVERKNHTLVEMARTMLDEFTTPRKFWTEAISAACFISNRVFLRTILHKTPYELRFGHRPKVSHLRVFCCKCFVLKPGNLDKFESRSVDGIFLGYATHSRAYRVYVLSTNKIVETCEVTFEEASPRARPEISGVSDETIFVEDDSDEDDDDSIPPPLDSSPPVQETGSPSTTSPSGDAPTTSSSAAEEIDGGTSGPTAPRYIQNRHPPDLMIGGLGERVTRNRSYELVNLAFVAYFEPKNVCHALSDENWVNAMHEELENFERNKVCWSLVEPPLGFNVIGTKWVFKNKIGEDGSIVRNKARLVAQGFTQVEGLDFEETFAPVARLEAIRILLAFAASKGFKLFQMDVKSAFLNGVIEEEVYVKQPPGFENPKFPNHVFKLDKALYGLKQAPRAWYERLKTFLLQNGFEMGAIDKTLFTLHSGIDFLLVQIYVDDIIFGGSSRALVAQFSDVMSREFEMSMMGELTFFLGLQIKQTKEGIFVPQTKYSKELLKKFDMADCKPIATPMATTSSLGPDEDGEEVDQREYRSMIGSLLYLTASRPDIHFSVCLCARFQASPRASHRQAVKRIFRASSATSSLHLSTSSVAQSTAEAEYVAAASACSQVLWMILTLKDYGLSFSGVPLLCDNTSAINIAKNPVQHSRTKHIEIRYHFLRDNVEKGTIVLEFVESEKQLADIFTKPLDRSRFEFLRSELGVIHPYGLI

SEQ ID NO: 136674 - protein, 986 aa, Oryza sativa
  Clone ID: PAT_MRT4530_3822C.1.pep
MEEEKEAGSFLDVPKDIPIAATKSLTIRTNGGFSSSSDRSNPISPAISITPHLYSPSPPSSAFVSALQSPYISPRVLEPPTPAAAPPPPQEAAAPSPPASYSNSEDTDAPSASRTPPSERYDSGGIDPATKVSDCGGGVQPRVSFSFPVPRVSFTRGSVASPSSNAKLRSCDVYIGYHGNGSLGRFCKWLKSELELQGIASFVADRAKYSDTQSHEIADRIICSVAFGVIVVTMSSFLNPFSLEEIRFFAQKKNLVPILFDTEPPEIAGLFDGKLEDKEGKEAFEGLMRCHEFKLEANETNWRSCVSKTVTLLRSKLGRKSIAEKESEGPEGMPFPRNRHFVGREKELSEIEGMFFGSTVDIQEVDCPRGSAANDRSSGVSDGFADEESDTVRTSNARYISLEMRKCKEPTLEAWIDPVIELSSGKGRNLQKQRSKHRRSRFRCNSKGYGSASVLCITGSSGIGKTELALEFAYRYSQRYKMVLWIGGEARYLRQNILNLSMNLGLDISAEAEKERGRIRSFEEQEFDAFQRVKRELFRDVPYLLVIDNLESERDWWEGKDLHDFIPRNTGATHVIVTTRLPRVINLEPMQLPQLSYNDAMILIKGKQKNDYPPEEMEVLRKLDERLGRLSFGLWIVGSLLSELMITPSTLFEAVERISLNESLFPLGANDDGFCRNNSFLIKVLVFCFALMDRAKGGSLTSKMIIAGSWLAPAPVSSTLLAATASKLPMKGSMHLLGESLKTAFLCGTHCFLAPHGRKAEVESALLLVKLGLARKATRHPGCWIQFHPITQLFGKIRGGLAPTTAAVNGVMRAGNPSVYSDHLWASAFLVFGFKSEPPSVQLKAVDMVHFIRKTALPLAIDSFMTFSRCGSALELLKVCTNVLEEVEKSYASRIQDLNRGSLCWRKKLQPNHRVDEFVWQEVTLLKATLLETRAKLLLRGGLFDTGEELCRTCISIRTVMLGHGHAHTLAAQETLAKLVRYRSKI

SEQ ID NO: 136675 - protein, 1221 aa, Oryza sativa
  Clone ID: PAT_MRT4530_38230C.1.pep
MEEELVYMHWHVHMQAWTVVLRLCMRAHGRMPCTGARHACVHEELASPLVHVSCDWLAGRPSQSSPSSWLKMMDGSAGREARPSRPKTRRRPTALAPCAGKRGRLREARARSGHAAARNSARAGVGVHAVSSGSEAEVVLGPTRDFASMRGSSSAGRVEALDWMRADPASLIAAVLARMEAYLQSQGHNVWNKVKSPYTVPDDADITPANMAQVDFNYRARNAIIGGISSGEFNRVQHHKSAHDMWTALCNFHEGNNDIQLVRQNQFHKEYQRFEMHPGESIDSYFKRFGEIVSKLRSVGKEFSDNDNARHLLNCLDYGVWEMKVTSITESAPLSDLTMDKLYSKLKTHEMDVFHRKGLKHSMALVADPSGSTSSNDSAFVCGGFSLAALHSVTEEQLEKIPEDDLALFARKFSRAYKNVRDKKRGKTNEPFVCFECGEPNHIRVNCPKLKKKSDKTTKKPEGQGRKGKKDLMKKAIHKVLAALEEVQLSDIDSDDDDQEKGDKDFSGMCCLANNEDFINLCLMALEDKDDSSEHPEVCLDDIPSLDGSLCDDFCSDNDSVDDELSKERMAHLMIEISDKYRSSKYKIEKLKSENDGMALEIARLRSMIPEEDTCSTCASYLSKINLLKDKLKSCALGAGNSSSASAACSTCYEMKVDMGLLEMELKELKEKFVHDRIGRCENCPILTSDNNELRQQVAMLRTKNDLLESFATKEPIHSSCANCAILETELKDAKTVIDSIKSIDSCSSCISLKVDLESAKKENSYLQQSLERFAQGKKKLNMILDQSKVSINNQGIGYDFAESLRIGTHEILGVTDGMIELAQKPITFKSAGFIGNISSSTPKTSEPKMVSALERLEKSDKNVLGLEELLESLRGSSDFGVGRSNSWLVDSGCSRHMTGEAKWFTSLTRASGDETITFGDASSGRVMAKGTIKVNDKFMLKDVALVSKLKYNLLSVSQLCDENLEVRFKKDRSRVLDASESPVFDISRVGRVFFANFDSSAPGPSRCLIASENRDLFFWHRRLGHIGFDHLSRISGMDLIRGLPKLKAPKDLVCAPCRHGKMTSSSHKPVTMVMTDGPGQLLHMDTVGPARVQSVGGKWYVLVVVDDFSRYSWVYFLESKEETFGFFQSLARSLALEFPGALRAIRSDNGSEFKNSAFEFFCDSSGVEQQFSSPYVPQQNGVVERKNRTLVEMARTMLDEFTTPRKFWTEAISAACFISN

SEQ ID NO: 136676 - protein, 39 aa, Oryza sativa
  Clone ID: PAT_MRT4530_38231C.1.pep
VVCRFRIPDRKTVSKHNPLLGSIAHSVGTTRLSVLNSEQ

SEQ ID NO: 136677 - protein, 72 aa, Oryza sativa
  Clone ID: PAT_MRT4530_38232C.1.pep
MHQQPATYINHRQNAASLAPLHFFTSSLLELYYSHSSVQRTGCLLSACSAAAGSDWASVEQEDRKTAAPLIT

SEQ ID NO: 136678 - protein, 91 aa, Oryza sativa
  Clone ID: PAT_MRT4530_38233C.1.pep
KKNNQRGGCKKKQITLPQLHVGKQASLGHVSPIMGFWGRIIFFCVSAFFRLFFYRFRSNRPIVFPLAPYMYFINAQKTPRPICVFKKTPAQ

SEQ ID NO: 136679 - protein, 223 aa, Oryza sativa
  Clone ID: PAT_MRT4530_38234C.1.pep
MGNGMSPCLCSPPVHGEEAAAEAAAARLVFWGGAASQLVASAATTAGDVMAELPGHLVCAGDSFFIGLPIPALPAGEELAAGRTYFVLPAARFSCQQALTAASLASLSPSPAAKVSLAGGASSPFEYVTGDDGMALIRVLPEFIERAITCVARVAGGGKAGGEAAADDQLCSTPELRKHYMQLVGARQQRPWSPGLETISEAEKRRRRRSPVRLVALAKAASR

SEQ ID NO: 136680 - protein, 50 aa, Oryza sativa
  Clone ID: PAT_MRT4530_38235C.1.pep
RIGAGLKDFGEPVGPCHLAAAHSVSIRSPGEKSVFRKEDTKRYCTVIMCV

SEQ ID NO: 136681 - protein, 79 aa, Oryza sativa
  Clone ID: PAT_MRT4530_38236C.1.pep
MKSNVICRDTPPDIDFRDRHGYSPTVSPNTIRRYESAISDLAGHGLEEEDYPVVDDTGKRHLPRAKEEAPPWRRPHHRH

SEQ ID NO: 136682 - protein, 99 aa, Oryza sativa
  unsure (1)..(99): unsure at all Xaa locations
  Clone ID: PAT_MRT4530_38237C.1.pep
RKSYRYNSCSGMGNAELYSIAISAMCEIFXLFQTGTSIRDTWGWMRLVELHPEHHKLSSCKTKEPWSLFCLQFPLARAISFXGQQVGYHLQDVSAKKWF

SEQ ID NO: 136683 - protein, 232 aa, Oryza sativa
  Clone ID: PAT_MRT4530_38238C.1.pep
MEGSTSQDHVIGIPVSNTAYGIEEPDFAAEETTTPDHAGFVVGSFQFNNDANSPTTTTTTTDRASKYGRKGDKIAQGIKEHVTLGPKLSETVKGKLTLGARILQAGGVEKVFRQWFSVDKNEKLLRASQCYLSTTAGPIAGMLFVSTERVAFRSDRPLAVSAPGGDKVRVPYKVTIPLRKVKAAKPSENKHKPEQKYIEVVTNDGFEFWFMGFVSYHRSLHHLEQAVAQARR

SEQ ID NO: 136684 - protein, 99 aa, Oryza sativa
  Clone ID: PAT_MRT4530_38239C.1.pep
VDFDAMQILANALLDTSSIAVRVAPTRTWVANEVQAPRISIFSSRGPSPYWPQFLKPDVAAPGSNILAAVKDSYKFKSGTSMACPHVSGVTALLKALHP

SEQ ID NO: 136685 - protein, 379 aa, Oryza sativa
  Clone ID: PAT_MRT4530_3823C.1.pep
RARRHSQVAAGAGEGGDRARSASSLLGPCGCHLSSPVPNGVDWEHVAAGWPRWLTQVATEAVRGWLPRKSDSFHKLHKIGEGTYSSVYKAHDLENGKVVALKKVRFANMDPESVRFMAREIHVLRRLDHPHVVKLEGLVTSHMSSSLYLVFEYMEHDLAGLAATPGIKFTEPQVKCYMQQLLSGLDHCHSHGVLHRDIKGANLLLDNNGTLKIADFGLATFFNPNQKQHLTSRVVTLWYRPPELLLGATNYGAAVDLWSAGCILAELLSGRPIMPGRTEVEQLHKIFKLCGSPSEEFWASLKLSRATVFKPQHLYHRCVNNVYKGFSSSALELLDQLLAVDPASRGTAASALESEVSFTKPRWCNAPRHVSAKYLDGWG

SEQ ID NO: 136686 - protein, 169 aa, Oryza sativa
  unsure (1)..(169): unsure at all Xaa locations
  Clone ID: PAT_MRT4530_38240C.1.pep
MGWHAWEFSITLLILGEEDLLILFCCGKFRKIRCVKTAWSSNKLRVTYPVRLXRSGDQATFLYINRAAASTQHTXNQSRVCLLLCTAPSLVDYSIPLAGMQRRSGXHVSGTSAFHVLHREKAAIRFLGSASHDCSLFVHDGSSFCLLAXCTPLSTPATASNSCCATGLP

SEQ ID NO: 136687 - protein, 133 aa, Oryza sativa
  Clone ID: PAT_MRT4530_38241C.1.pep
MSAWFDGETHALCYKEGYDLYSRFIGTTTTTTSPAAPSLSQTEVLSWDCKIPLPVTPQSLPSCKWDIYAGYRPGLLSPLTFASQQINDDDDDEDDESTSFVHNLLCALRHQKSLKRQPPMPTDHTNAKRRVCS

SEQ ID NO: 136688 - protein, 691 aa, Oryza sativa
  Clone ID: PAT_MRT4530_38242C.1.pep
MALADHLQAPWDPGGSNLVTLLHVRKDRQQPPPRPLQIVFPIGLSVYHWVLSSTGRLDGVLAGTLRGYVWWPSICDGHGGDARHFEFWSLDFHNNSSISDGRDWIHLSTARGLPLCPPLRSPAAYRRRSGVRMRESREEEEGQPRGTSSAIYITELFKVDTNRGLEECRVHNAENKTMFYQMLAAILQALLIAQMIHGQSDKEVLVQLKNFLQVQNPINHGAYVSWSESEASPCHWKGVGCDDAGHVNSLDLSNSNIAGPLFRNFSRIMRLTHLNLSSNSITGELQDDLKQCQSLQHLNISNNLIGGILDLSSLTNLQTLDVSQNRFQGRIDRNFPGICGNLTFLSVSSNSFTGRIDKLFDGCPKLKHVDLSWNGFTGMVWPGIERLRQFKANNNNLTGRISPGMFTEGCKLRSLNIAINSLHGSFPSSIGNCSNMKFLSLWENSFYGSIPPGIGSIARLEELVLASNSFDGIIPMELTNCTNLKYLDISDNNFGGEVQDVFGKLTCMRSLLLQENNYTGGITSSGILQLPNLIVLDLCYNQFSGDLPSEISSMKNLKVLMLAENNFSGKIPPTYGQLLRLQVLDLSFNSLSGEIPPDIGNLSSLLLLILAGNQISGNVPSSGQLSTFDEQSFLGDPLLSLNVTAVDSKNRGVGDGIWGDPQARHFIEYLEGRIQVTDANKPLEQECRMLR

SEQ ID NO: 136689 - protein, 221 aa, Oryza sativa
  Clone ID: PAT_MRT4530_38243C.1.pep
MGGGTHGGARRETRRGTGRQREATAAGATTASAAQLDVPLGHHDGLSFASEDVVLSIRKRPNRKTEPKRPRPRPRNSVINSVLGSERPNFVRSIRLVSSDRKDRKTKDRDRNFRLDRMPTPTSPFQVIKLSSIAHIHINVNESRHTYMSRLGMKTERIVSICSGKKRIQITFGSDNSDTDTNTDIFFRIRIRIWYRSFRRIRIIIRISAEAMRHTPFFITI

SEQ ID NO: 136690 - protein, 49 aa, Oryza sativa
  Clone ID: PAT_MRT4530_38244C.1.pep
MAIAVLGAGAGQITPYTGMNKTHTATRFSFRPSSTATRKKFQLGVIQLR

SEQ ID NO: 136691 - protein, 71 aa, Oryza sativa
  Clone ID: PAT_MRT4530_38245C.1.pep
NSIYLFLQEVRHGEMHQNRAFWKEEAVLTRKVDTKDYKLFSIGTVESADREVLHVIGILGNWWIYRASYGK

SEQ ID NO: 136692 - protein, 100 aa, Oryza sativa
  Clone ID: PAT_MRT4530_38246C.1.pep
KTNCISRFFDGLHELQLEHEVVSAEVYAGQDISGRSSTYRWWIQFLSSGASEKHVGTASTSVATVAADNSGILPTLSTLLSSYSSTEYSTIEPLIIQPHA

SEQ ID NO: 136693 - protein, 69 aa, Oryza sativa
  Clone ID: PAT_MRT4530_38247C.1.pep
LCINIYYSTIVPALEVSVTVKGNNQHATDTMASTIPSRTDTMASTAPSTTTMYHLGQIRWHRPHHLLQQ

SEQ ID NO: 136694 - protein, 196 aa, Oryza sativa
  Clone ID: PAT_MRT4530_38248C.1.pep
MHRKEAIKTVYREVGGECKDGSTIGIDMNSHNTSVKECLSKTEVVTTDSCPDRVIIPDPTPKLNPDYSKADTNDIYKLIHLLCLPEMKIFMDTTRLLAKHTNDLVGEICNYIKHGKLLQTAVLLLAAQEHIRGSKRNGLVKLLVNAFKGIQSSRYDCPLPSGLILDEFGTTVATHLHAGKEKGTESTDFVPSGLDS

SEQ ID NO: 136695 - protein, 97 aa, Oryza sativa
  Clone ID: PAT_MRT4530_38249C.1.pep
PFYRRRRLDAVDAVDRHRTVVYLPQIYLRALPATAPPTLPNRAPRAARGRGRREEAPPTDDVMLSFSLAVLMGETVALCEVALPPPGSSPEAAGTLL

SEQ ID NO: 136696 - protein, 363 aa, Oryza sativa
  Clone ID: PAT_MRT4530_3824C.1.pep
MANSTPKRKVTDKADDPEMQKENPVPEVPPEIALPEAAMEISPPETAMEIPVPDVPMEITVAEPEVQFVASVGSDKEEVPGLEWDGTKPEIFEDPSPMKDPDVPRVLRSHDSKSKDENKEKFIVTVFRGGKERAKLRDDNPQKAAELAGPTYFATDDCPEKYEHGKALLPEWALKEALWEMRRMQYMDAKKKKEPISFLYPTRICQTQHTVMLAPGSNQLKGKNPKEIAEYKKGLHKEKLITVAYDHYICLLIHPKDGTMVVLDPLDYSHKQYKEFLTILQYAYQYYKFKGGEQTRTREKLLLPRLECRTSFDDTGITNVQRDLCHFIHHECCHVKGDFFDPEGALAASDEFKDLREWNTAMP

SEQ ID NO: 136697 - protein, 63 aa, Oryza sativa
  Clone ID: PAT_MRT4530_38250C.1.pep
MTLLVHVPAKAEEEVHPSSARMVMERGDAGTAIVVVVVVHGGGFSSEVITQGEAGSGYVVYRC

SEQ ID NO: 136698 - protein, 350 aa, Oryza sativa
  Clone ID: PAT_MRT4530_38251C.1.pep
MASLPVPSVPRVRAAIGIDHVPPRYLRPTDADEPVASDGGEAEIPVVDFWRLQLGDGDELARLHIACQDWGFFQLVNHNVPEDVVEGMKASIKGFFELPAETKKQVVQEPGQLEGYGQLFVVSEDQKLDWADILYVKTQPLQDRNLRFWPDQPAGFRMALDRYCAAVKITADGLLAAMATNLGVESEVIAERWVGGVQSVRVQYYPPCGQADKVVGISPHSDADLVTILLQANEVDGLQIRRGGAWLPVRPLEGALIVNVGDIRQVFTNGRYKSVEHRVVVDGKKERLSMATFHSPSKNAIVGPLSEMVEHEDDAAYTSMDHDELLKLFFAKKLEGKNFLNPIKKLKNSG

SEQ ID NO: 136699 - protein, 166 aa, Oryza sativa
  Clone ID: PAT_MRT4530_38252C.1.pep
MASTSPEPSTAAAVAETGCSVQIRRLEATDHEKGFVALLSQLSACPDLTASEFAACFADLAALGDDHVILVAEDPAAPESRILATGCLFVERKFLRGGGKVGHVEDVVVDAAARGRGLGLRVVRRLVEIAKEAGCYKVILDCTPELRAYYAKCGFVEKGVQMAIYF

SEQ ID NO: 136700 - protein, 46 aa, Oryza sativa
  Clone ID: PAT_MRT4530_38253C.1.pep
ARQQCRRRQLVTAICSLESGVRLILLAWLAPFGRVTTKTQREAAPF

SEQ ID NO: 136701 - protein, 273 aa, Oryza sativa
  unsure (1)..(273): unsure at all Xaa locations
  Clone ID: PAT_MRT4530_38254C.1.pep
HGTHTALAGEDSAWVLGGLESPLPRLAVGMVTQICAYFFFASGVPRFTSDSANAALAPLAPAPIADSATAAAANITARRPSAPAPPLHPHPSPQWCASCWHSALPAAALATASEPRRGAAAAARPGATAERDAIMVSDAIAAAAAAASSTAACDAVSXGGGGAGGASAAFAESDVKRGTPDAKKKYAPSPSSPHHTQQWKKQQQQQQQVASLTMMASLSAVAPGRAAACVRRGAARWRWRGRPPAGPSASTRRTTAARGAGAGAAPAPRAAAP

SEQ ID NO: 136702 - protein, 183 aa, Oryza sativa
  Clone ID: PAT_MRT4530_38255C.1.pep
GNWNSSSSARVGLVLASQIIVRLGRRREVRHDDSTKRMVIVELDVAVEAEAAAVPRPPVGVGAHAVQPRRLLVGGPANLEVVAAATAGRLRLLRPAVEPPRLLRVGVPHTDLDRWAVVVRCTHRHGGGGGDHQVAGDDDDEQEEGEGEAVKPSHCLNPASHLIDLALVLGLKLCHVRNSCSPG

SEQ ID NO: 136703 - protein, 100 aa, Oryza sativa
  unsure (1)..(100): unsure at all Xaa locations
  Clone ID: PAT_MRT4530_38256C.1.pep
XXRYASSIRXYWPLHILLGSXSLDRLAYXEFHGATISIRSRSHNAEGARIWLIGGXXGGPRVYSWAITRCFRGXXGGHRAHGAAYPGFXPGGPWXXLXXS

SEQ ID NO: 136704 - protein, 82 aa, Oryza sativa
  unsure (1)..(82): unsure at all Xaa locations
  Clone ID: PAT_MRT4530_38257C.1.pep
MAKEPMRVLGTGSEXHIGYALVPMVARCVMLVADHPVILHMLDIPPDTESVKGLKMELVEARCTLLKGIDEATDDSEACTDV

SEQ ID NO: 136705 - protein, 74 aa, Oryza sativa
  Clone ID: PAT_MRT4530_38258C.1.pep
MERKSLGKNPVPRFNGHGRPALLTRSSISSEPHRLLIMRRVAEWDYRGQGLCFVLEQGLCEKLVRIVSIHFGRS

SEQ ID NO: 136706 - protein, 106 aa, Oryza sativa
  unsure (1)..(106): unsure at all Xaa locations
  Clone ID: PAT_MRT4530_38259C.1.pep
DDGAATGGTTVDGTGAAGGTVAGAGAGAGAGVGSGGGRXVGFARHWMNSSSNKNRCLASLGSGAGIASGSITQQAPAKRAAAAGGAAAAAAYSAFPFALALRRRGQ

SEQ ID NO: 136707 - protein, 466 aa, Oryza sativa
  Clone ID: PAT_MRT4530_3825C.1.pep
FSPRPPKRKVTDKADDLEMQKENPVLEVPPDIALPEAAMEIAPPETAMEISVPDVPMEITVAEPEVEFVASVGSDKEEVPGLEWDGTEPEIFEDPSPAKDPEVPRVLRSHDSKSKDASKEKFMLTVFRGGKERAKLRDDDPQKASELAGPTYFATDDCPEKYEHGKALLPEWALKEAPWEMRRLHNFYMEASKKGLGNITARSPADCFGEEGYVWLDFSYLYAIYRRDKMDVNYVGVWCMMQYMDAKKKKEPIDFLDPTRICQTQHTVTLAPGSDQLKGKNLKEIAEYKKGLHKEKLITVAQYIGRAFLHFQNKRVVMAAYNFNDHYICLLIHPKDGTVVVLDPLDYNHKQYKEFLTILQYAYQYYKFKSEEQTRTREKLLLRTYWPCHKQPQGTVLCGYYACEFLINAEDLPRLECRTSFDDTGITNVQRDLCHFIHHECSHVKGDFFDPEGALAASDEFKDLWE

SEQ ID NO: 136708 - protein, 69 aa, Oryza sativa
  unsure (1)..(69): unsure at all Xaa locations
  Clone ID: PAT_MRT4530_38260C.1.pep
RNASLCAPCMQVIXXLARLLFKIXTVLDLLMWSKTHLHNTSXEHMYHAFXXGSXQVHXVLIALGGVRHG

SEQ ID NO: 136709 - protein, 89 aa, Oryza sativa
  Clone ID: PAT_MRT4530_38261C.1.pep
GQEGRGRPEEQGPEEALLLLLHSPRHRSRSRSRSRRRHAMIIIHPSIYKAHLLASIYTHTYLHCRYQSHLLPFIVGVHIYVGWIMSHRM

SEQ ID NO: 136710 - protein, 920 aa, Oryza sativa
  unsure (1)..(920): unsure at all Xaa locations
  Clone ID: PAT_MRT4530_38262C.1.pep
MDLQSLAVVLRAALSHVPEERKAAEESLNQFQYAPQHLVRLLQIIVDGSCDMAVRQVASIHFKNFVAKNWSPNDPEESQKISESDKLMVRENILGFIVQVPPLLRAQLGESIKTIIHSDYPEQWPVLLHWVTHNLESENQIFGALYVLRVLSRKYEFKSEEERIPLYHIVEETFPRLLSIFSKLVQIVNPPIEVADLIKLICKIFWSSIYLEIPKQLFDPNVFNAWMSLFINLLERPVPVEGQPLDPDVRKSWGWWKVKKWTIHILNRLYTRFGDMKLQKPESKAFAQMFQKNYAGRILGCHLQILNAVRTGDYLPDRVINLVLQYLTNSVTKNSMYQLMQPQIDIILFEIIFPLMCFNDNDQKLWDEDPHEYVRKGYDIIEDLYSPRTAAMDFVSELVRKRGKSNLQKFIHFIVDIFRRYDEASIEIKPYRQKDGALLAIGTLCDKLKQTDPYKAELERMLVQHVFPEFNSHVGHLRAKSKNCNFEGSAVIYLKPDKLYSPENLNEIRPILPQLLDEFFKLMNEVENEDLVFTLETIVDKFGEEMAPYALGLCQNLAAAFWRCMASQEADDEADDSGALAAVGCLRAISTILESVSSLPHLFIQIEPTLLPIMRRMLTSDGQDVYEEVLEIVSYMTFXSPSRSLDMWSLWPLMMEALNDWAIDFFXIFLFHWTTMFPGDRTIFXACKNPDYQQSLWSALSSIMMDQNMEDSDIEPAPKLIEVVFQNCKGNVDQWVEPYLSLTIDRLRRAHKPYLKCLLVQVNKSKRVVYEPILRESKKQDDADGDDMDGFDADEDEDDDEVESDKEMGLDEEDADEVNSLHLQKLAAEARGFQPADASDDSDDDFSDDEELQSPIDEVDPFILFVETVQGLQASDPIRFQSLMQTLDFRYQALASGIAQHAEERRVEIEKEKLEKANAQ

SEQ ID NO: 136711 - protein, 62 aa, Oryza sativa
  Clone ID: PAT_MRT4530_38263C.1.pep
RHEAKPVLGKYYKEPEKSAPLPFHLLGVLAKSLNSDHYVSDTGDVVYYQTDLKTSSSAQSSD

SEQ ID NO: 136712 - protein, 74 aa, Oryza sativa
  Clone ID: PAT_MRT4530_38264C.1.pep
RMHRGIVLLSNRYTGTQKWKESKIPCATNSDVYISLIMHGQALNITVLGMQNYISLVYRFTFIRDIFHVAGEKN

SEQ ID NO: 136713 - protein, 91 aa, Oryza sativa
  unsure (1)..(91): unsure at all Xaa locations
  Clone ID: PAT_MRT4530_38265C.1.pep
RXSXSHXXDVDGGNTXXGKVGGGIRPXXFAKKGTLXRGKPRXVDKPKEXYAHCRXLGXXPKTRPTSSPQLFPPXMKLPKLVTIQRHXFTXA

SEQ ID NO: 136714 - protein, 846 aa, Oryza sativa
  Clone ID: PAT_MRT4530_38266C.1.pep
MSTSANPSAVPSAEYAEHLSILVAVPSLFHDHQYFLGPIGSLDPYEFISAETNMIPFRLANPNLNHLKNTFKSWPSLEKSNPEKSWPVWYKRVSASKQAHWDEIGIGQALALTLANSAKDEPLMAAAAYFWSNTLNAFLFIQGPMIPTLLDVTMIIGLDVTSSANPISLNTKNTFEFKSKSIGDWSGYIAACGPTTNWQFLAEALETKRQFPLGKILLGYLYQMLNNASAKIAVGSVVGAGGPRWLLQTWLNLVAMKAINRPAVTVVEFPRLEPITDNDGEERTHCRCMSYGEYASTPANAGAKLSAEFLKDWFFSFYDGFQKNARVWFPYADSTDLDLLAEFRFEDINHEKYQKSREIFAATISPCILPVSIHQGRNIQVSYEFYHPISSARQFGMGQLPIGLYFADKTQCRGDISSSLMMDRLLNISRPPLGSIENIELASFRSRAFDRWWSEWKLHLFHQPASMYMTDLFPDVIPQTTESSPPRKSNRDKDIEYALGLIPDRGGPSTPIIGYHAPKTSSLLQGLIREPGRCWQEEKYQDPSIEQALDEEEIGEDVDQAAAELSDLGEKTPSAPPKKTPPTPAAPTHFTRKKKIASKKTSAKASSKPVPSPTPPPSPPVQPMSSGRTPMVMGSHHIEEEQQPAAPAIPVLADLFSFDIKDYFDEVEEDTTSRSLAPLYEDVRRSLEDICHRLEASLDSLVTDCGSIRARFKTIQTSIPYDLSNVLTPAIYLEQHQLKLEKARQRLADRREKKDIEATIQANRQLVHAEKIKLDHLAKEPIKSTIDQLKSEKIELLARLEECNAKLAMEEQKLADLPRAIEEQKSKLRSATKNVADLTKSLKVIT

SEQ ID NO: 136715 - protein, 126 aa, Oryza sativa
  unsure (1)..(126): unsure at all Xaa locations
  Clone ID: PAT_MRT4530_38267C.1.pep
KKKRPPPPTDPPSDDADAVGAVTVEADGEREREXRGRDGRLCRTPPSLRRVGETGRRATAATAASVGKVATAATASVGEVRRLCHTPPSPRRASEKGGRRAGKRRRWWERRPAGGRGXGGRWGEGA

SEQ ID NO: 136716 - protein, 97 aa, Oryza sativa
  Clone ID: PAT_MRT4530_38268C.1.pep
MASSDMLGNKNDKPSGPLEMLPKLNLSMGDSCSSEPTYEPPVEEKLAAEAVKISGEEKMLIKADKEYPTPPVSPPRSFGIGVCGYDLNETPEEIDEP

SEQ ID NO: 136717 - protein, 103 aa, Oryza sativa
  Clone ID: PAT_MRT4530_38269C.1.pep
NFLKNGKKKRGFWTSVQNFPQKSSRTFGSREVKNLWPCEILTRGKKNLGTQRGPKTHLAPGPPKKKKGPKTFSPKKKGPTPFKNLPWGKKKPPPPEGKIGENP

SEQ ID NO: 136718 - protein, 41 aa, Oryza sativa
  Clone ID: PAT_MRT4530_3826C.1.pep
SSENHPKCQNRDEDPPVSHPAKAGGLLGRPRFGRTLAASSQ

SEQ ID NO: 136719 - protein, 72 aa, Oryza sativa
  Clone ID: PAT_MRT4530_38270C.1.pep
MGELEKRGPTISFLHVCVAPAGRGQEDDRQCFVTINTLTMAIVLYLLVGDLIGVGVVNNGRVVSNTFVGMLL

SEQ ID NO: 136720 - protein, 69 aa, Oryza sativa
  Clone ID: PAT_MRT4530_38271C.1.pep
IDISKSLFAPGVTVPLKKEATGEKVQLKHFVVRCNILIIHLDVMRNLRNFVLKLIKKIKLFCSGRPLAI

SEQ ID NO: 136721 - protein, 55 aa, Oryza sativa
  Clone ID: PAT_MRT4530_38272C.1.pep
MTVLSTIHCDPKDSFPLLSRHGFLRTSTFPPLRNPTDGDTTVDTRLAVLPMAAPP

SEQ ID NO: 136722 - protein, 105 aa, Oryza sativa
  Clone ID: PAT_MRT4530_38273C.1.pep
MLHGREQGPRQARRVTALLPPSGKREGERGLHVGLRDVDGSHLLLVDVAAAGPTRLANVVPRVLIRSPTPGDESYRVWFNRGPKSGIDGEGQGHSEGVSLIHDWK

SEQ ID NO: 136723 - protein, 477 aa, Oryza sativa
  Clone ID: PAT_MRT4530_38274C.1.pep
MASKNSCACHGVVVTLASCLLLVAAAVSVSVLAAHVAVGRVWSPAGAAAAAGHHHSLSPAWVPSPSSRHAHHARELVNRRVQVGRMEAGLVQARVSIRRASRTRSCTPDDGGGFIPRGAVYRDAYAFHQSYIEMEKRFKVWTYREGEPPVVQKGGAAFAGNDGIEGHLIAELDSSGGGGRHRARHPGEAHAFFLPISVASIAGYVYRRDMIDFWDPQLRLVAGYVDGLAAMYPFWNRSRGADHFLVSCHQWAPILSAAKAELRGNAIRVMCDADMSDGFDPATDVALPPVVASARATPPQGRVASERTVLAFFAAGGGGGGAVREALLARWEGRDDRVVVYGRLPAGVDHGELMRRARFCLCPCGGGEGAAAASRRVVEAITAGCVPVLVDDGGYSPPFSDVLDWARFSVAVPAERVGEIKDILGGVSDRRYGVLRRRVLRVRRHFRLNRPPAKRFDVVNMVIHSIWLRRLNLSLPY

SEQ ID NO: 136724 - protein, 94 aa, Oryza sativa
  unsure (1)..(94): unsure at all Xaa locations
  Clone ID: PAT_MRT4530_38275C.1.pep
YIWTSSAPPRVKFFGWLLAMNRLPTRVNPXITSMDLLHTNTMVGPIPALQSNTFFILRCWRLWNHRNEVVFQNQPPSMARLIRSCIXDAQLWAH

SEQ ID NO: 136725 - protein, 223 aa, Oryza sativa
  unsure (1)..(223): unsure at all Xaa locations
  Clone ID: PAT_MRT4530_38276C.1.pep
FVPRQSSAAQEQLIQLHSLLQHTSLTLCEDKIECSLKHKNNLISSLALYQKMMENFQVWPHWTYIWTSSAPPRVKFFGWLLAMNRLPTRVNLHKKTILSSPTCELCKSCPEDTDHLFLNCPLVSAFWDMIQVAPSITSMDLLHTNTMVGPIPALQSNTFFILRCWRLWNHRNEVVFQNQPPSMARLIRSCIXDAQLWAHRFKPLHKAVLPLWLSLFNSSLALL

SEQ ID NO: 136726 - protein, 108 aa, Oryza sativa
  unsure (1)..(108): unsure at all Xaa locations
  Clone ID: PAT_MRT4530_38277C.1.pep
AAAPITLLXLSLLLLAVAAXTXATFPTTVNAYTPATGSADXXRRPAXAAGXNAXRTXXXXRGXHGXGXXGLGGANIGAYIPEPGTTXGKLXDNGWXWTRXWKVFRGSX

SEQ ID NO: 136727 - protein, 76 aa, Oryza sativa
  Clone ID: PAT_MRT4530_38278C.1.pep
FLPFGFSILGGMSCFVFACPPFKVRACVSPFCVFSASSPFHVLLPACVCVVLFCLRTGYACIMQAAICIYLSLLYC

SEQ ID NO: 136728 - protein, 187 aa, Oryza sativa
  unsure (1)..(187): unsure at all Xaa locations
  Clone ID: PAT_MRT4530_38279C.1.pep
ISRRQEGARVPVVVVVAVDLPDHAEYQIETSRPPPLVRPPPPPPLSSPTLSAAAIATTHGTRRRHSGSARGSAVVSASAGGGTGGGGGGDNTXRRLRLSPLPSGPYTPPPPLMSPITSVXPPSPALLSSPLSTWRGRRHRFSFLRRCRRSGARPLPLQPPMLPAAGRRREEKKKEREKGGRRKGDRG

SEQ ID NO: 136729 - protein, 113 aa, Oryza sativa
  unsure (1)..(113): unsure at all Xaa locations
  Clone ID: PAT_MRT4530_3827C.1.pep
SAGEGRIDARXQLETYVXNMXNTVGXKDXLADKLEXDEXXKVEXALXEALPMAGLXPXXPSKDXFXXEXXLXVXAVCNPXXSXVXXRTGXAPGGXADSXGGLXHXXDXLYMMI

SEQ ID NO: 136730 - protein, 90 aa, Oryza sativa
  unsure (1)..(90): unsure at all Xaa locations
  Clone ID: PAT_MRT4530_38280C.1.pep
ALLAIDACIAYARLDALSQRYRQYQLQSHLLLQKQVLNPCSEIVREQXSILATQFWQPATXQLINNQSMQEQWXNSSRVVAQQSYYQGHL

SEQ ID NO: 136731 - protein, 73 aa, Oryza sativa
  Clone ID: PAT_MRT4530_38281C.1.pep
PPVLSGQRTDSFLRNANGCPAGPPCPVGRNKRKRFHFFYQPWFGPIWIVGYTRTGVSSNFLGLGNFKILYKGD

SEQ ID NO: 136732 - protein, 130 aa, Oryza sativa
  unsure (1)..(130): unsure at all Xaa locations
  Clone ID: PAT_MRT4530_38282C.1.pep
XXXYXXFXPXYXXFXXSSSQAPSPPPLSLQHSQPLDPSHLLTTPPPHRPQPHPHHYYPWLSLLFAAACGAMLTFFLLFVWYSLLATRRPVAPVTTSDSDVVYEKIVLVGAKDDDAPAATTPSPDVAGNNN

SEQ ID NO: 136733 - protein, 435 aa, Oryza sativa
  Clone ID: PAT_MRT4530_38283C.1.pep
MEGSNPPGNMTQGPSYGSLDLHGISKQMHPPNSGNQGFNQPQIPGNFTIPMDRVTEPDNISDGVQLGQHGKIAHHHHHHRHHSKNHGSDEEEHDMNEDAADGKDKKGSPWHRMKWTDSMVKLLITAVSYTGEDPGADLGGGRRNYSMMQKKGKWKAISKVMGERGCHVSPQQCEDKFNDLNKRYKRLTDILGRGTACNVVENHSLLDHMDISEKMKEDARKILNSKHLFYEEMCSYHNNNRISLPEDPALQQSLQLALRCKEDNDFMRHASGDAELDDDQSEDSDYEENEEEHRAVDTNIRGPSMHKRMWHVVDHGDVGFVTSCSNDGSGRSDPYDVLDINKPFPDGCDLALVQKDLALKAAEIQKHRLQIETKAVQLAKQRLKWEMFRKNKDLELEKLALENEQMMLQNKRFELDLRHKELELEIKIKGNANHP

SEQ ID NO: 136734 - protein, 72 aa, Oryza sativa
  Clone ID: PAT_MRT4530_38284C.1.pep
SSSPLTESPIDRVLELPPSRKSSGSPLLSSDHSRILIRPKILVGFTQTKSMLCSISSASNRGNGAEIEVALQ

SEQ ID NO: 136735 - protein, 198 aa, Oryza sativa
  Clone ID: PAT_MRT4530_38285C.1.pep
MGFIGDTIESIRSMQVRQVLAQIISLGEFLWEWSILSSVGFDFAGMIVTSALIIWKGLIVVTGSESPVVVVLSGSMEPGFKRGDILFLHMSKDPIRTGEIVVFNVDGREIPIVHRVIKVHERQESAEVDILTKGDNNFGDDRLLYAHGQLWLQQHHIMGRAVGFLPYVGWVTIIMTEKPIIKYLLIGALGLLVITSKE

SEQ ID NO: 136736 - protein, 180 aa, Oryza sativa
  Clone ID: PAT_MRT4530_38286C.1.pep
MGFIGDTIESIRSMQVRQVLAQIISLGMIVTSALIIWKGLIVVTGSESPVVVVLSGSMEPGFKRGDILFLHMSKDPIRTGEIVVFNVDGREIPIVHRVIKVHERQESAEVDILTKGDNNFGDDRLLYAHGQLWLQQHHIMGRAVGFLPYVGWVTIIMTEKPIIKYLLIGALGLLVITSKE

SEQ ID NO: 136737 - protein, 111 aa, Oryza sativa
  Clone ID: PAT_MRT4530_38287C.1.pep
MEAQEVGIKAVPANRSNNGAVSRVCPSLQSTPSPSSSPARGDASPQRGSLPVPCPKLMKLHGPLLGIVTLCEGAVRAELADIFGFGRGETTLQCGALAVALQRSSSRDAVT

SEQ ID NO: 136738 - protein, 71 aa, Oryza sativa
  unsure (1)..(71): unsure at all Xaa locations
  Clone ID: PAT_MRT4530_38288C.1.pep
WRVEARPEVTEAGTVRGGGGAAGGCGAVYGARRLAGGGRRCSGPTCRQRLDGGGAXGVSRGFAGGGFLLPS

SEQ ID NO: 136739 - protein, 88 aa, Oryza sativa
  Clone ID: PAT_MRT4530_38289C.1.pep
MDRRKQLYRKKYNSLRSISVIYETYTVTFGNGERGRAVEHLLGDAGAEGVEGGEALVAVVAGLGRAVQQRKRLLRAHRLRRRRRRRIH

SEQ ID NO: 136740 - protein, 57 aa, Oryza sativa
  Clone ID: PAT_MRT4530_3828C.1.pep
LSAAGYFKLLLVEILFSRGAIKPCKNHNFLLVVISVARGEFLPFSKTLIGMCETKQS

SEQ ID NO: 136741 - protein, 62 aa, Oryza sativa
  unsure (1)..(62): unsure at all Xaa locations
  Clone ID: PAT_MRT4530_38290C.1.pep
IXKLIXXTXXXFXXPXXSSVRGXXNXXTKTINSXXXLXXNLXVVXVTXXQPQLXXXXAGXGG

SEQ ID NO: 136742 - protein, 268 aa, Oryza sativa
  Clone ID: PAT_MRT4530_38291C.1.pep
MPISERATTTPSSSYYSLELDPLLSDLAEKKLSLRRSLAWLDAELKDAKIKLASKEQLLAQESENRKKFAESRARSMEEEVKKLHKCLQDKDEQLRTSICSTEQQYLSSYKLDILRSQISVAQATAEASAESAMLARLQCLSLSGGHEKINSLGECELRVKKVEEQLDLVQKFLEAKELSQLEKNQMTTVHELKKKVLKLECTLKVSRAQLRKLHKMVERRDKPLKKLQSRLPLKQQTACDKQKLWESSGFRIIASMSILALAMLSKR

SEQ ID NO: 136743 - protein, 58 aa, Oryza sativa
  unsure (1)..(58): unsure at all Xaa locations
  Clone ID: PAT_MRT4530_38292C.1.pep
FNCQNIHSLPSIKTPFIVFSQXPIHSNGNSKWRFPGPSNSNAARHAVVHNYSESHTXA

SEQ ID NO: 136744 - protein, 109 aa, Oryza sativa
  unsure (1)..(109): unsure at all Xaa locations
  Clone ID: PAT_MRT4530_38293C.1.pep
VDGIHGSLASGGDDEXGGXXLCDXLPALXXYFSVXREXSXPXMCXXTXXXPSPTSSXSSSSXLGXXSXPGCXXXPSPXXYXWKIXXPSDXXHLXNTRLRHWAKGSGLFI

SEQ ID NO: 136745 - protein, 701 aa, Oryza sativa
  Clone ID: PAT_MRT4530_38294C.1.pep
MAAPAAVLAVLRWRQRRWLVELVALLLLLARGGAAAVDQFLFPGFSGDGVATSGAAAVTSTGLLQLTNETKEVFGHGFYPKPVSLRNASTGAAASFSTTFVFAIVPKYPDAHGHGLAFALAPSVAVPGAVAGKYLGLFNTSDSTGQIKNKIVAVELDTARDDEFADIDDNHVGIDDNSLKSVNSSPAGYHDAATGGKLASVNLIGGEPLQVWIEYDGDSAWLEVTVSPAGMLRPAAPLVSCTVNLSSAVAGDTYVGFSAANGAAASSHYVLGWSFRLGGGGRAQDLDLAKLPRLPSPSKPKKTLPPLIILTILLLSVVILLLAAAAVAALVVRSRRYAEEEEEWEIEYGPHRISYKDLHGATKGFRDVIGAGGFGSVYHGVLPRSGVEVAVKKVSHDSRQGLREFVSEIASMSRLRHRNLVQLLGYCRRRGELVLVYDYMANGSLDKHLFAGGERPALSWEKRGKIVRDVAAGLLYLHEGWEQVVVHRDIKASNVLLDADMNGKLSDFGLARLYDHGANPQTTRIVGTLGYLAPELSKTGKATTSTDVFAFGAFLLEVACGRRPMEFTVDDDSPGLVELVLEHWKAGEITAARDPRIGDCDEDDLEVVLKLGLLCSHPDPRRRPSMRQVVQILEGAAPAPETLPEDLECGVGQFYDESFDEFVTGFPSTSEITTSTTQSTDEQQRLVGCVQLSTADFLKTT

SEQ ID NO: 136746 - protein, 74 aa, Oryza sativa
  Clone ID: PAT_MRT4530_38295C.1.pep
GPSILFINTCSIRSTAIYLSCNSVSCIGQPLLPGEILHHVIFSYNYHCIYSINYMVISSFFFFFLLKCYAHIAC

SEQ ID NO: 136747 - protein, 42 aa, Oryza sativa
  Clone ID: PAT_MRT4530_38296C.1.pep
PRFTQDSSTPLILDFEKSHYSSETTWTPKVIFKKFGSRLKRI

SEQ ID NO: 136748 - protein, 94 aa, Oryza sativa
  Clone ID: PAT_MRT4530_38297C.1.pep
MEEALRPALPDVFTCEIKFSTTAILATLKGKEEATQGPYRRRIILNAVVVRVLIDDRIYDTKMPILLSVTASNMPRNSGPSQGSDLNRAEKVPD

SEQ ID NO: 136749 - protein, 73 aa, Oryza sativa
  unsure (1)..(73): unsure at all Xaa locations
  Clone ID: PAT_MRT4530_38298C.1.pep
MGPSVPTASDCLALRRLLSTADDEAEAPDGDPAAXKGLAXKGPKTAVLAGDEKDARXLYRRFSALGGAKVRER

SEQ ID NO: 136750 - protein, 78 aa, Oryza sativa
  Clone ID: PAT_MRT4530_38299C.1.pep
GLVGKPEENKKNPPRMQIPWQALQETPEGRLFSQPGVCKLLTKKRIVFNIIFIFPRRSTRSKGINPRTFLNTGGPTGH

SEQ ID NO: 136751 - protein, 108 aa, Oryza sativa
  Clone ID: PAT_MRT4530_3829C.1.pep
MSVQIGNRDSDGICRTWQWQLASVLTRTVTTEARTDTGRQNRESVRPGVAAIGSGGSLSSNALQPADTPPIYCAAHDQIACEAAPSVRRRDSLAVAGASPAAGRSSDE

SEQ ID NO: 136752 - protein, 178 aa, Oryza sativa
  unsure (1)..(178): unsure at all Xaa locations
  Clone ID: PAT_MRT4530_382C.1.pep
PPPGPSSSPPPGPASSPSPPTRPASSLAPPPPXAAAPPHPRRSSAGAPPDSYSEPPPEQASAPHQTSIAISLAQCKASDFSDQRLIAKWSDPAAPLPRPPPRDRVDLAAPPPRPSTLSPSAMSPQQAPLLCSPPGPLTARSQSTPPCSRCTVPLRSFAAEANAQVARPPPSSTPYCGP

SEQ ID NO: 136753 - protein, 97 aa, Oryza sativa
  unsure (1)..(97): unsure at all Xaa locations
  Clone ID: PAT_MRT4530_38300C.1.pep
MVGCGYMVLMVVLMTIKDRFASYCCETLTVPITSXHGQRLYLLYGMFHCGAPDYEVVISSWGSLGSPYLXIFKGVIMIQERCTVLSCIMRRVLSQSL

SEQ ID NO: 136754 - protein, 109 aa, Oryza sativa
  Clone ID: PAT_MRT4530_38301C.1.pep
MPRPPSPWNLTSRPGRTSWPRHLPWMTAVASSLPPATKNHRPLAAKNPPPPLPRTAGRRPPRTRRPPDILLLLHTAAACIVGEEAPPPPPPPRPPGLGAPPPASPRCIG

SEQ ID NO: 136755 - protein, 113 aa, Oryza sativa
  unsure (1)..(113): unsure at all Xaa locations
  Clone ID: PAT_MRT4530_38302C.1.pep
XVXXXXXNXXIKXXYGPXXXXPLXXXXXLXNNXTXNTQXXNNPWKKKAXRLEXYXSGMVXXHLCPSXRXXRCLTTLXYVLVVVVXPQVGLADFAXSATTSIXIHXDDXXRXIL

SEQ ID NO: 136756 - protein, 55 aa, Oryza sativa
  Clone ID: PAT_MRT4530_38303C.1.pep
EALKAHRQDYRVGTWLTHLRNWDNNLNDMGNHGYQPQNFPKKGNVRPYGHWFNMK

SEQ ID NO: 136757 - protein, 297 aa, Oryza sativa
  unsure (1)..(297): unsure at all Xaa locations
  Clone ID: PAT_MRT4530_38304C.1.pep
MEPARRSTAASDGGGGSSAAGSDGEDDRYLSASSALGTPSSLATLLPSSDLWDHQMDLLLLDDPVAGFPKAHQLTRLHPPPEPPRPDPPAPAAAGDAVLPRPPEPDPTQEDEATKCDWVFNYIGISDMFVDPDVLRSYPIHSLLVGKANGNDLKXFRDGSTTASTSGTDDAYVYPLPHHPSKIDWVEVVGAKQRTGDVSFGERMVGVREYTVYLLKVKSGEDDWEIERRYREFYALYQQLKLLFAEKGFSLPPAXRNVEKXSSKLFGNASPDIVNERSSLIQDCCXLCLSLVSIXTX

SEQ ID NO: 136758 - protein, 563 aa, Oryza sativa
  Clone ID: PAT_MRT4530_38305C.1.pep
MERENSWLRRTKFSHTVYTRLDHQRAPIAPLGRDVEQKLQRFISMGKSVSMPVNRDEDAAAAFKHSVSLPTARSSLQIDKEKANKQKADFDIPSSPPVNSVNSKGLKARSLVKSPSSAMLLSYLNKAHPNRDSNLKKTDRPQHKLRSKSPLPNVAPSDVFREARASSRRFTSPPPKRRGSERSIYGKSFDRQLSDMSQSPDLCSTPVSSDKHKSLKDSSWTRRYFDNGGRRRVSAVDATEVRRNRGVSMAQAVQTTVDWTLDPSKLLVGHKFASGAYSRLYKGLYDDKPVAIKFIRQPDDDDNGKMAAKLEKQYNSEVNALSHLYHKNVIKLVAAYKCPPVFYIITEFLPGGSLRSYLNSTEHHPIPLEKIISIALDVACGLEYIHSQGVVHRDIKPENILFDENFCVKIADFGIACEESMCDVLVEDEGTYRWMAPEMIKRKAYNRKVDVYSFGLLLWEMISGRIPFDDLTPLQAAYAVATRHARPVIPPECPMALRPLIEQCCSLQPEKRPDFWQIVKILEEFHSVLSQGGCLDSLKSSNSQDQKKRLLHWIQKLKPSHST

SEQ ID NO: 136759 - protein, 348 aa, Oryza sativa
  Clone ID: PAT_MRT4530_38306C.1.pep
MAQRWRSRARRDPDVDDEEGSPPERRRRGARSGSDDEEAGNEDLSLEIVARAARRRRRREASAGFAADAFSSGDEIDEDAVVELGEADPSSRKRRKEKKKRRKEKRKQRKGAPPEGSPSTAAADKESQVAGTQEGQTGTAQSVLTEDGPDVPLSDNIVLRKLLRIPRYFDPGETLLETCFNCGEEGHVAVNCPMEKRKRPCFVCGLFGHNSKQCTQGQDCFICKKGGHIAKDCPEKHNRNTQQSTFCLRCGESGHDMFGCANDYPRDDVKKGHLCCADFSDICPKEVSCYNCAQPGHTGLGCAKQRREASTAATPTLCYKCGEEGHFARGCTKNTKSEKRQRQERFWH

SEQ ID NO: 136760 - protein, 505 aa, Oryza sativa
  Clone ID: PAT_MRT4530_38307C.1.pep
MDPSSSSSSSSPFSTPFHSISSTSTLRPQLAIAIVATPSVCGRNEIEQQPSMVRKEMGGGGGRLAAEYQGLEVKVPTFFRCPISLDVMRSPVSLCTGVTYDRASIQRWIDSGNTTCPATMLPLPSTDLVPNLTLRRLIALWASTAAPSSPAAPSAVGPTPAAAAAELLRRVAAPGVDPCPALRKLAAFLSDDDVDEFDKNALARAGGAAETVASVLRRRGKGDDDDGGVEAVEAAVRVLAVLATSDCIEEENRRRVAAALAAGGAAPSVAASLARVMRSGSGLEARVDAARLVESLLRDGARGATAPGVRAAVAESEELVAELIRLVGPTDEKGSLDAQAVDAGLSCLAAIVAATRRARAEMVRLGAVPAAVRVLATDHHGGSHAQALRVLEAAVGCAEGRAAVCEVAEAAIPAVVSRMMRCGGMGGAEAAVSVLWAVCHRYRDRRAVEAAAASEGGLTKLLLLMQSGCSPAARQMASELLKIFKVNAKSCLAGYDSKTTHIMPF

SEQ ID NO: 136761 - protein, 37 aa, Oryza sativa
  Clone ID: PAT_MRT4530_38308C.1.pep
RGNIRLNGLISEIQTVQPINLTATIYHHKYSDQFLQP

SEQ ID NO: 136762 - protein, 418 aa, Oryza sativa
  Clone ID: PAT_MRT4530_38309C.1.pep
MRQSYSYHAGTLKPSSSTIPCSSVTRSDDLLLLLVLMMLRNQATVGSVVTATATSGGGGGEARKMLWVDKYRPKTLDKVTVHDQVAQNLKKLVAEQDCPHLLFYGPSGSGKKTLVMALIKQMFGAGADKVKMENKTWKIDTGSRNIEIELAMLSSAHHVEMNPSDAGFQDRYVVQEVIKEMAKNRPIDAKGKRAFKVLVLNEVDKLSREAQHSLRRTMEKYSASCRLILCCNSSSKVTEAVRSRCLNVRVNAPSEDQIVQVLEFIGKKENLQLPFGFAARIAAQSNRNLRRAILFFETCKVQQYPFTSNQVAPPLDWEQYVSEIAADIMKEQSPKRLFAVRQKFYELLVNCIPPESILKKLLAELLKKLDSDLKHEICHWAAHYEHKMRLGSKAIFHLEAFVAKFMSIYKEFLVSTFG

SEQ ID NO: 136763 - protein, 704 aa, Oryza sativa
  Clone ID: PAT_MRT4530_3830C.1.pep
MAAAAISHLRRGAPRHARALLYLSTRRFSSSSAAGVAPLAAVAASARRLLSTSVDSGASSTGESYKPPLFDPFRAASLASSAPPLESPPIEELPDDATPPPEEEPGLPAPEKDPVATACQHELEGLKAWVETVRSRKESTEEKEAWSLLGRSVVSYCGTAVGTVAANDPSTANQMLNYDQVFIRDFVPSAIAFLLKGEGDIVKNFLLHTLQLQSWEKTVDCYSPGQGLMPASFKVRSIPLDGNSEAFEEVLDPDFGESAIGRVAPVDSVTDGSCMIDRRMGIHGHPLEIQSLFYSALRCAREMVSVNDGSNSLIRAINYRLSALSFHIREYYWVDMKKINEIYRYKTEEYSHDAINKFNIYPEQIPSWLADWIPEKGGYLIGNLQPAHMDFRFFSLGNLWAIISSLATQRQAEGILNLIEAKWEDIIANMPLKICYPALEYEEWRIITGSDPKNTPWSYHNGGSWPTLLWQFTLACIKMGRRDLAQRAIEVAEKRLSEDKWPEYYDTRTGRFIGKQSRLYQTWTIAGYLSSKMLLDCPELASILICEEDLELLEGCACSVNKSARTKCSRRAARSQLTESPEVMRARHAVQLLHPALFRSKQSWVKLSVVKTRLQSRSEIAPFFFTDAPSLTSLIAPCILCHLKEQEPGGSWNCEVSLAETNKIQARSLALQLDQLNTVVGEQKSIQQNLEDVKKKKLKYANIC

SEQ ID NO: 136764 - protein, 55 aa, Oryza sativa
  Clone ID: PAT_MRT4530_38310C.1.pep
PDDSVSFEFQHNVCGRSIYAEGSVDAAMFLHRKVRSNDSKRIYDMIDVLREGSMR

SEQ ID NO: 136765 - protein, 72 aa, Oryza sativa
  Clone ID: PAT_MRT4530_38311C.1.pep
MAIVQDIGGRVVMVDGDRRWRGYGRRAVTLGGAVGNGRRGEPATSNFEPATEIGGCVADGMGCGGGRGTRRS

SEQ ID NO: 136766 - protein, 71 aa, Oryza sativa
  Clone ID: PAT_MRT4530_38312C.1.pep
GRGFFFFFFAQIGLKVTHNYFDGFYKQGDITSSQGIKTVPYQRTMHCYKHFASASPRTKNSSLQLEFPYVL

SEQ ID NO: 136767 - protein, 502 aa, Oryza sativa
  Clone ID: PAT_MRT4530_38313C.1.pep
MAAAAASSSSSPWAGRMAAAFGAPFLWLVCLIYFIQGFRSFVWTAVSYQMKDMMKLSPSTSQFLVSVAYFPWSIKPVYGILSDCIPIKQRKRTPYLIISSCLSLFPWLILGMSEPLRSSSNFLTALLIVQNLGSAMADVVIDAMIAEAVRSAGPEFAGDLQSLSWSSMAVGGIFGSLLGGYALSNLPIHVIYIIFSALPLFQLISCIFVEESPKGFESRMDNAAPKHVEDQTIDASPGKSSSESYKYEDTRRRKGARRNNKRKSLSKRPEDHDKNKSTNLRPYLSLKSAFFSLCTAFKQPTILRPMAWFFFSNVAIPNISTVMFYYQTEVLHLEASFLGTARVIGWFSLMLGTYIYNRYFKHKKLRNILMFAHVGLAIIGVLDILLVLRLHVHYGITDKYMVLWGSALADAINQFKMMPFLILSGQLCPPGIEGTLFALFMSINNFGSTLGSFLGAALASALSISSAQFDNLALGLGVQLIGTLLPVGFLFLIPKEVTGLTS

SEQ ID NO: 136768 - protein, 44 aa, Oryza sativa
  Clone ID: PAT_MRT4530_38314C.1.pep
PVDTQSSGQRKYSPLNLTMSAQIDNGSCTTVDLVKNLKSTLRNF

SEQ ID NO: 136769 - protein, 144 aa, Oryza sativa
  Clone ID: PAT_MRT4530_38315C.1.pep
VYCDLPQPKSRAIRRHRHRHRRQLDPPHSGGIWNRRMVANKVVAAASVVEEPAPSSAAAADPMRLASWRTYPAKRRADVARDGCGASAARAEHYQQVGPLSRRSHTDRMSVSNLTVNQHGHDFRVRQSNRRATTRRTKYYFQMG

SEQ ID NO: 136770 - protein, 363 aa, Oryza sativa
  Clone ID: PAT_MRT4530_38316C.1.pep
MGKAARTGLPPRRRGLPEEIVVWEILVRLPPKPLLRCRQVCRAWRRLTSTGDFLLTHHRHQPTLPLVDRYKCNEEFLLGIVSLDRRAAAARLQPVAQLDDTCYMMSADASCDGLLLLSIGGIWWFICNPITRQFGALHLLCGFMVMGFYKHPPTGDYRLLLYRNQELMSEHLIPGDRNTCYVYTLGSSDVPRCIGWPETSASGATVVLHCSLHWYQRSQDMILVFDTTAESFRWMRAPSDRMKCTLDSGNLFDMDDIWVLQDYKREIWSLKYQVELPVPEIRGMLGGAYHWSAMVLSQEGDVLVLVSCDRWLFYIDTEGNLLASFQHYGDGLFTIGLKLKPSLVQHAFFPLLDSYAVNASPFI

SEQ ID NO: 136771 - protein, 133 aa, Oryza sativa
  Clone ID: PAT_MRT4530_38317C.1.pep
QCKSSWARKMIRVLLVEDEEINRVVARAALKAAGGGDVVDEAENGEVAVQRVRDAAAPYDLVLMDKQMPVMDGHERATRRIRGMGVTTPIVAVSSDGLPADVDAFITAGADDFTSKPLSKEKLGVILAKFRLA

SEQ ID NO: 136772 - protein, 59 aa, Oryza sativa
  Clone ID: PAT_MRT4530_38318C.1.pep
RLCSLSVSFFNAILSPFIFYNLWKLNFIFLEKMNITPIMFPHFNFFFCVSLCKLCTFTC

SEQ ID NO: 136773 - protein, 838 aa, Oryza sativa
  Clone ID: PAT_MRT4530_38319C.1.pep
MVKAISEAADSRLITNTNLLHWLMRLHAAAQEAKDVLDEFEVDGSNIARKRKASDLILSSRSLKNLVIADESLKRIKIPSIIFKISRNGKFFSKLSLKNLVIPDESLTRLEHVVKTLTQLCATSATFIELIKMDDSKTNQLHKAAEASSHLPVDVPVFGRDEVKEFILNVIYNHARVKQHFEHRAWVYVSEDFTIKRTLQEILHSFQGHGGAIFNGDESMEATITKLRIKISGGCKFFLVLDNMWEEMCQEWSVLLTALSDEAPLPWESFWPLFQYHTFGGVEVPQQDDNRNMLLIAQGIAKKLDGLPLAAKVIGNLLRCRFSWDNWRRVAESDWWNLEEALQGILPYLRDRVVQMWLAHDFIQWNEIADVMRPDDVGRQLFDELVERSFFQPTFVSNNNSVSLHQCFFHGERSTGVSSLAPGNIRHLALQVNSLEQCQELHKYRNLRTLLIFGRCESDAFFNLLDGMLEKSPSIRVLDLLIRGKPDLLDVGPRHSPDASPPGWVWPKDARPLRKLRFLDLSFTKITKLKDLPTNLQVLHLRGYDADRVPQSITKLTNLRHLYVDGSALSKIQSIGQQTELQELESFIARKGQGFMIRELKNMREFTGRLCIRGIENIRSKDEAMEARLMDKKHVGALVIEGKRVPKFALEGLQPHTNIQELTIKFFQEQDFPDWVCPDNLVNLLQVNLESYHFLSTIPPLGHLPLLKLLTLRKLPSVKHANGTSFGGFPSLEEFELHSMEKWEEWTEPDAAAHAYGLSLFLGHLRKLHLAYCPSLRRFPHLPCFICIERAEDLQAWKLDPGITSMFSSLVIPNNLGSRVLQPQRCNVRATVQVPRKY

SEQ ID NO: 136774 - protein, 124 aa, Oryza sativa
  Clone ID: PAT_MRT4530_3831C.1.pep
MGEEGGGLQSKPRRCEPNHCHHRRDPRAGAHTVRAVRCSAPPDPTARSGDRWRSRDCHRCGSSAPLSVSPAIGFGLEFSARAWRPVRASRSPGPNLVRRWCPVKPSRRGRCLADAVDEFSWPPA

SEQ ID NO: 136775 - protein, 79 aa, Oryza sativa
  Clone ID: PAT_MRT4530_38320C.1.pep
CISGIPLVRFQIQKMNYQNWSRVDKGSPIASSNITSGTIAVASFRKACREECQVTCGRFRANHVDISVFQLDHIFTSSI

SEQ ID NO: 136776 - protein, 52 aa, Oryza sativa
  Clone ID: PAT_MRT4530_38321C.1.pep
MFPALCAWPRRPHAALRLRLGVVFTLLPPRGHGRMCCDANVGSTSSCARPTP

SEQ ID NO: 136777 - protein, 97 aa, Oryza sativa
  Clone ID: PAT_MRT4530_38322C.1.pep
MAGHDLWLSEQDGGMRHGPREFDDLYNRKGITDIRYFTNSKMHFAEDFLMPTLNLCITNAYIYNDRATAATSMASSKLMLLLERINSLTTNINPLFG

SEQ ID NO: 136778 - protein, 223 aa, Oryza sativa
  Clone ID: PAT_MRT4530_38323C.1.pep
MANPEVEKFLDEEKIEEAIDEAATESSEAIAKAPPASTPAPQRTPPAPIHLTYQPRPIHSPTPIQHETSEHTPSARGSHHIEDQPIPAIPALADMFSFDIRQFMDEEEETSSKAQAPLADDLKTILKDIAHRLESSLDALVVDCGPIRARFEEIQDQIPDNAAEVISPAVFLEQYRYKLERARQRIADRRERKDLEATIQSNRQSINEEKAKLDALISGPNPI

SEQ ID NO: 136779 - protein, 131 aa, Oryza sativa
  unsure (1)..(131): unsure at all Xaa locations
  Clone ID: PAT_MRT4530_38324C.1.pep
ATTTTGAAAAHGWTSGGDGGAQVLAEAALQAAASXSEGGDGGXRAATEAHGGRRRRWKVRVRGREMNSIRDRIHRFPNDFSRXFQKRKGRGDPGDHFPSIDLAGEGKGQWAPPVSGRESARAGGCELTWAG

SEQ ID NO: 136780 - protein, 181 aa, Oryza sativa
  Clone ID: PAT_MRT4530_38325C.1.pep
MMSSRERKKAAALQEKLQILRSITHSHALSNTSILMDASKYIKELKQKVVRLNQEIACAQDALRQNRVTVETLRHGFLVNVFSGKSCPGLLVSILEAFDELGLSVLEATASCTDTFRLEAIGSENLMEKVDEHVVKQAVLRAIRSCSGSGGDHHDDDDDDDDDGWSREQAWSPVGEHRVAG

SEQ ID NO: 136781 - protein, 312 aa, Oryza sativa
  Clone ID: PAT_MRT4530_38326C.1.pep
MVPHGRVHPAAAASSSDFSGEMNQSAASSDPSSSPPYSFHFEKPLPPTAAAPPPADARRYQQLLPAPQPGTYVVQMPKDKVFRVPPPENARLFQHYTRRARRRARCSCARVCSWLLLALVLLAAALAASAAVVYLVFKPRQPDYTLLSLAVSGLGGILGNASSTAAPAPVSFSPEFDATVRADNPNGKIGVHYEGGGSHVAVSYGGVRLADGAWPAFYQGPRNVTVLVATAKGLGIRFSERLLGDIAAAGRLRSVPFDVDVKVPVRLQVGGVRTWAVPVRVRCAVVVDRLAADAKVVSKSCRVKARFLFWKD

SEQ ID NO: 136782 - protein, 371 aa, Oryza sativa
  Clone ID: PAT_MRT4530_38327C.1.pep
MESLWKLSYLLEPASLALILTAVSVAYASASRALDHGREMERNLDFSEASITLARSQALMIPLASSCSLLLMFYLFSSVSHLVTAFTAVASAMALFFCLSPYVNCVRSRLGVGDPFVSRCCSKPFTRLQGLLVAICVGTVVAWLVSGHWLLNNLLGISICIAFVSHVRLPNIKICALLLVCLFVYDVFWVFFSERFFGANVMVSVATQKASNPVHTVANKLSLPGLQLITKKLELPVKLVFPRSLMGGLAPGSSPGDYMMLGLGDMAIPGMLLALVLSFDHRKIKDMSVSQDMPPSKQRKYVWYALTGYGVGLVTALAAGILSQSPQPALLYLVPSTLGPVMYMSWLRNELWELWEGSRPIINDKAHLLEV

SEQ ID NO: 136783 - protein, 1040 aa, Oryza sativa
  Clone ID: PAT_MRT4530_38328C.1.pep
MGPDRLPFGLGFDRVQASGGYRCSEQYEWQRLALRQREAAREKPHCGATLNYPLLSHRRDRIEDSVAATEIPVRFRGHDLLHSHGKTLNDRSCSHSFREEETKDLVSSSHDDAETEKNFAIWDQPLDRTGLLESKRHRRSSSPRYCMKSYPFGNKIDGYHGEGRACPRDSSKWGNHSLSPDHAPTSCLRTEGEVPSLNRVSEYAKGADGHMRTTERLGDFFSSNQGSCTQNRSYQEVQRLPTEVNFPNAHFSAIDKARHRSYMEKFQTCKKHQGTCSKDLMFNISDHSLVGRTCHRFEVGRAHTSKAFDEFHAFHHEQLHQSPRDNFRDQLGSSRNFRNVHKGKMSRRQCTKHDLKKKNSNVAFHSTYGRNSDRKWHGNHLDGHRAKRNMPSENQSKESCYPNMKDWQSYSHGDVRQSGDNQEGNTKKIKKGGQNGEKGNYHRNNNIPTVVCSGSKSNENSEDMKSDEVSNGKLQDAPVTYVENGVKESDNASPSELLRDCLIIWRRLKKDNCAEAENVKKTNTNRTVQTSKVSVSERLRNGRPSSGFDDENSSTSGSASVSSESDDESNSPSEDSKQCRGVMSSSEAQKCSKGRTERESEEPFKSLSGDNRMKSPQNTIAEKGLMFYQDVPPETNPSEVMQQKEQDDLSCCWNGCSDTSTKPVADSHPESSVHQKFSQQGAIEGHSNARSRHELVVGCDIENTLEADGAKSGEQSTVPELLDKKAAVLCSMDDDSVKVVNVSACSNQDSDTTPCGVTKLDKGTANKFLEKPVNLSTGSNFRVIQWGAVDCNIVRIKQENSQHADSEQDTHHKESGEPSQALKVASNQQIPHQFDSDRDNPCTTRQADWDSCSSIPDLNCLPNMNTDDELEPVENVTFQVNEDGTNPQNNIKSLSASSCKPTLQKEQSKQPEPIELTGGICERKDGNRFQSPNSHSGPSQQSIVEESSMSIDVFKCNLCEFIKNIIKPLWEDGLLSREVHKIIVRKAVEKVTTVLGSKVPLTEIDACRFLLEESQNLEKLVQGYLDLYVGREVLKKKHDR

SEQ ID NO: 136784 - protein, 279 aa, Oryza sativa
  Clone ID: PAT_MRT4530_38329C.1.pep
SKGWTSKRLSVTEFIRDKFIPIPASVDRLYHETGKTITVGGEGGTVAWVDLWRGIFLCDVLDEFPALRDIPLPCPARSNRDLFLIQYDPSYFRDVTISRNRDSIKYIEMEMWSPKEPMNTTSTPVSYVDCVLNNTRKSQVIRDDWKATTWSMPMPVIGSSCEHWHRDCEVGVKDITLGASNPCRSNLSFSEIVEMFKELPMVNPTISMDDDVVFLLSRTSPSPMDKLHLVFAIDVRKRTLQGLTKLDVQPQNSVCMSQAKHLMNWKLALKLARTKKRVR

SEQ ID NO: 136785 - protein, 59 aa, Oryza sativa
  Clone ID: PAT_MRT4530_3832C.1.pep
MASKNNFSKLVLTTTTNGCPSHQAPLGMTFVLFSLMIPVTLNACSEETKEAGTRRISRA

SEQ ID NO: 136786 - protein, 166 aa, Oryza sativa
  Clone ID: PAT_MRT4530_38330C.1.pep
MEAVGRRGPGEEGRERRRFGGGVRRWRARSPRAPPAARLARLREEGRPVGGEEASELRRERRSDSFRPTTGDADDDAGARGPTPMAVGDAATAVSTLSCRAPRPRRSSEVMARHGGVGADATAAVARTTQPTGISRRRGRHEHHQGPSGAEEPVPVQEEQNAGDRG

SEQ ID NO: 136787 - protein, 106 aa, Oryza sativa
  unsure (1)..(106): unsure at all Xaa locations
  Clone ID: PAT_MRT4530_38331C.1.pep
VLNNTRKSQVIRDDWKATTWSMPMPVIGSSCEHWHRDCEXSPSPMDKLHLVFAIDVRKRTLQGLTKLDVQPQNSVCMVTLCTSEICRYLRNITVTGEALNELEISS

SEQ ID NO: 136788 - protein, 466 aa, Oryza sativa
  Clone ID: PAT_MRT4530_38332C.1.pep
MAAPTVPYRTTAPPLPESDGHEDGSSGGMVLLDRWCLIADLPNASTGVGTTSTGLRIQATFHPARPPLLSRFCVHCPGLDFRRVVPKIIASDADLVLLCVPVNPDSIANARGLDYFVYRPRAHRLDLLPNPHPVYLHDSMTALLSRQDGAWYAVAALGLGPPVYKGGAPVSWDFYLHLYRSTSSSKGWTSKRLSVTEFIRDKFIPIPASVDRLYHETGKTITVGGEGGTVAWVDLWRGIFLCDVLDEFPALRDIPLPCPARSNRDLFLIQYDPSYFRDVTISRNRDSIKYIEMEMWSPKEPMNTTSTPVSYVDCVLNNTRKSQVIRDDWKATTWSMPMPVIGSSCEHWHRDCEVGVKDITLGASNPCRSNLSFSEIVEMFKELPMVNPTISMDDDVVFLLSRTSPSPMDKLHLVFAIDVRKRTLQGLTKLDVQPQNSVCMVTLCTSEICTAFYVTGEALNELEISS

SEQ ID NO: 136789 - protein, 136 aa, Oryza sativa
  Clone ID: PAT_MRT4530_38333C.1.pep
MVVGSTREVATKCVANRGGLEVADEPLKGTETNYRGRGRVENEGGLGVPRHTPQAREACCPEALTRPPRGGADRTGGSAPTSYPMSGGVGAGMPRPIGTLPSVPPVYDESTKVSIHLRGNDRDVPRVRWRTALGPT

SEQ ID NO: 136790 - protein, 51 aa, Oryza sativa
  Clone ID: PAT_MRT4530_38334C.1.pep
MAVSDEVLNRDFGTSPLRLLLMSLSTWRDELFAKDSGDSIPVAEIQGCVAP

SEQ ID NO: 136791 - protein, 100 aa, Oryza sativa
  unsure (1)..(100): unsure at all Xaa locations
  Clone ID: PAT_MRT4530_38335C.1.pep
AAGPLPAVACSSGRKVNAGDPSSSWASLHEDLVSLIGXRVAAGDFRDYIRFRAVCAQWRSGTICPRRRGILDPSLHPCGWMLLPEGXGLHPGHGKLRGHV

SEQ ID NO: 136792 - protein, 124 aa, Oryza sativa
  Clone ID: PAT_MRT4530_38336C.1.pep
FAGFFAFSAVGGGGLKKMQNGRKEDKEGYRCMGQANDGARPPTDRIHARTDRQAGCSGRLRGGRPMEVRATIHLSDASFSRVESGTGIPTQYITYPIVTTSCCERITAYTAVVGTCKQSTILNV

SEQ ID NO: 136793 - protein, 425 aa, Oryza sativa
  Clone ID: PAT_MRT4530_38337C.1.pep
MAAAAAATFLPHTPTPRRRLAVAVHSPTRRRLSLVFSGPPDGALSVAAAEEKADAGEEAAAAVSAPRGGGGGGGKERRRVVRKAWEKLVRWSRSWRRRNRSDVVETTRKVVVLGGGSFGTAMAAQVAAKKADLEVSMLLRDDLVCRSINHSHINCKYLRDHRLPENITATTSASDALAGADFCFHAVPVQFSSSFLEGISTHVDPKLPFISLSKGLELNTLRTMSQIIPQALGNPRQPFIVLSGPSFAIELMNKLPTGRNLIVIKLYMAAMVVASKDKKLAAAVQQLLASPNLRISTSNDVTGVEIAGALKNVLAIAAGIVEGMHLGNNCMAALVAQGCSEIRWLATKVAEGVSTAGAVIALAQKYHVKMPVLTAVARIIDNELTPKKAVMELMNLPQVQYLSENILFIQRKLAHGELENIEINE

SEQ ID NO: 136794 - protein, 395 aa, Oryza sativa
  unsure (1)..(395): unsure at all Xaa locations
  Clone ID: PAT_MRT4530_38338C.1.pep
MGVKWKGGGALLLLAAGLLLVAVAAAAAEEEGRRDPKEELRWCKKQCRWEAGQDQRQLRECEEQCLQRQQEDDDDDENTHGGGGKECRRECRGYRDEPWRKQECMRQCEWRRHEQHHHGGGHGGSRPDCREQCEHQQDWWEKQRCLMDCRHRRQEVDADDDNHHGRDPCYKQCRHHHDQWKKQQCMEECRYHQRQQDAGVDVDEEXADNHGGDRXRKQCQHXHDQWKKQQCIQDCRYHHRQEDDVVEEEDGHGDQQCRKQCQHHHDQWKKQQCMQDCRQWRRXRRRKRPPSTRKKTTTTAARESNTAASDASTTTTNGRGSNACRTAGTGARRKTTSSTMTTTTAAAAAMAATTAGGNASTTASGTRGSGACETATSAAMDGPRWPPKPSSRQCN

SEQ ID NO: 136795 - protein, 76 aa, Oryza sativa
  Clone ID: PAT_MRT4530_38339C.1.pep
KKMVVNLHRWYNQSRIFQYHIHQIGFLKSNTYKWDLLQVSFGLMMFTIPWMVIAKILTKDVPTSKTQRSHTIKLNL

SEQ ID NO: 136796 - protein, 600 aa, Oryza sativa
  Clone ID: PAT_MRT4530_3833C.1.pep
MAAGAPPLAGVGDRGSSSSSSHPPPPPPPKILLAKPPLPPPSSSGADDDGGGGGGAGRSRQATQPGSLSLVSDAWEVHTDKILPYLTENNDFMVIGVIGPTGVGKSTIMNELYGYDGSSPGMLPPFATQTEEIKAMAKHCTAGIDIRISNERVILLDTQPVFSPSVLIDMMKPDGSSAIPILSGDPLSADLAHELMGIQGINDLSMWDLILTVDLLKHNIPDPSLLTSSTTQDKENKNDNQSGIEDYIADLCFVHARLREQDFSPSKLMVLKRVLEKHFKSSSFSIGSSGATPQVSDSSVPSSMKIEDLSSNQQDIYLLPLRTPDNSTNFEYRTCPSMLGMLRDQILSRPSRSFSKNLTERDWLRSSAKIWDMKPEAMLKDSETRNKFSRNHQGTDRDEPPSSSMAASDLTHRPGLAIVIMGVSGCGKSTVAALLAETLGCSFIEADDYHSQANKAKMSKGIPLTDGDRIPWLEALRDAVRERLDHGEDVAVSCSALQQKYREILREGDCSFRSGSGSYSSCRVKFVCLEASAEVIADRIRRRSMEGEHFMPASLLQSQLDLLQIDEAEGITVVDATVRPNAIVHDTIARFREQLASTVC

SEQ ID NO: 136797 - protein, 178 aa, Oryza sativa
  unsure (1)..(178): unsure at all Xaa locations
  Clone ID: PAT_MRT4530_38340C.1.pep
STRQRCLSLSAATAPLPFSLPHRWRCSPSQHRWRRSISPXPSRFVHTALHRRVLDGGKSATTTTLTSPLPIGLDGGATGRAILLSFSHLPPSRRRAPEDGAXGVEGEGADAVGEAVSVAVPGGRDHDRSAVDGDGDELRSTGSGDIKLAHLCDFFLSFFSFFLGFSMRISVRIDSFFT

SEQ ID NO: 136798 - protein, 304 aa, Oryza sativa
  Clone ID: PAT_MRT4530_38341C.1.pep
MSATMKSSSSSSSRISRGRNSSSSPSSSSSSSPASSNVAYGQRWPSARDFHSPTLSCRGGARGASPGEGGGRWRRPPRRRRGTNGWPGGCGGRRSRRAWCPRAAPASSSSSAARSRTSATSSAPSSTPPRASLSSSPTSLRDAARATHDGLYTDIDVFLKVYLLSVASERAEGGEEDRKISSLMDVKKLSKEACIHAAQNNRLPLRVVMQVVFFEQLRAAAGASPAAATGGIARRLVEEEDEDDDVSRGGGDWSKSRALPTPTSSTRERSPWPPSSQEERRGRWILIEGLGTSVCMSAAICPCA

SEQ ID NO: 136799 - protein, 55 aa, Oryza sativa
  Clone ID: PAT_MRT4530_38342C.1.pep
VACIRVVSKVNPPGISLQMHLHAKHKIRCCLAGSKSPRQRNYNKPNPRQNKLSLH

SEQ ID NO: 136800 - protein, 337 aa, Oryza sativa
  Clone ID: PAT_MRT4530_38343C.1.pep
MSPKKDAGLSPPVAAPPPLSLAGVPVLTGSLRPAECADLLGLVAGVKRPLEDVVADFLARIQPERRLRFGAAINFVLKDKMMLRPAERLVAFTILHQGYSSQLENPFVPLIIHAACDETSDKPEQLFLQLLLNSTNGDNDREILKHSAADYLEESAYASQVLLTREQLERQYTCNEVQPQPSTGSFREATVRSVIPDPDISQSCTDSSEISITKSNRDNLVTCLLQQTSLDGIGPQWIRPPPPRLEILDGELQWLNLDNNHELLWDSSMCADTSRGAAIRDLVGKACKGPLSPAQQEQVLVELAKDWKLVYHCGMTPQKLPDLVEHNPLVAVEVLSK

SEQ ID NO: 136801 - protein, 1395 aa, Oryza sativa
  Clone ID: PAT_MRT4530_38344C.1.pep
MMGSRGPSPIGKRLRKARKGKWWRQVAEREIDRCSCRPAIDRALGVSFHLGIKYTDFPSISEGSRLKYIADNQHELRSESVQGISDAIDHGLASGDSVGKKYVLPTSFTGGRRYMVQNYQDAMAICRVFGAPDLFVTFTCNSKWQEIYDALLFEPGQVPSDRSDMIVRVFNMKVDEFISDIKEGKTFGPVLAVLYTVEFQKRGPPHIHCLIWLPASTIDFSAPIVDGFISAEIPDIFTDPLGYALVDEFMMHGPCGNQNKSCPCMKKGECSKHFPKSFQDETIMDEFGFTIYKRRDNDRYVLKNGVKIDNQWVVPYNMELLKKYQAHINVEWCNKSNMIKYLFKYVTKGTDRSKAYYEVNSKLPSQLSENNSAPQNDTSKKTPNSNSTPRNEIQEYIDARFLSTCESLWHAFEFDIHYRVPSVERLTVHLPYQNFVRYKKGADLNSLLTSPAAQKMMLTEWFEANKKHSAARTLTYCDFPKEWTWDNSSCSWHPRTPCEKIGRGALSYADVRTYDGVVYTTFREACEARGLLESDNEWYLLFDKAIISASSSQLRQLFVTIVMFCSVGNVRSLFEKYWLYFTDDIQRRLRIALLNPSYLVPHERLMSLLMKEVQTAFSNSGGTIDDYDLPRPAIYSDDVVGVASLLLPRGRTAPSRFKIPIEIDETSICAIKRGTMLAELIQKTSLIIWDEAPMTHRKHHLLDRTLRDLLSEQKPSNGRLPFGGKVVVLGGDFRHILEVIRKGSRASIVDASITNSPLWRHVTLLRLKINMRLLQNGLNERTRRDLEEFGNWILDLGDGMLPTTKKNDESEPTWIDIPNDLLIKTPGDKVKAIIDEVFPDFPSSYTDHSYLACRAIVCPNNSTVDEINDCVVKMIPTEAKEYLSCDTISKACDHMPDFDILYPTEFLDSINVNNFPSHRLTLKKGVTVMLLRNLNQSMGLYNGTRLLVVSLGHRLIECVILTGSNIGEKAFISRIALTTTSSKWPFTLQRRQFPATLINRLEPSLGNPTIRVRVSRFWAFRDQNDESNLHHLGLVLLDRTGASIAAQIFPPLDELFQPQITEGKVYDLTFYRVRQCTSQYRPVSNMQSISFTKWSTLEECNDVLEDFPNIKGNYEPIKYIDLPASSDAPNNAEQKKIIEIKDLHPFKFKCANHHPTSGKQKHQFLVTVVIRKINMDSSWWYTACDICNKTAKRFGSGYRCGDPTCPPVISASPGFKLSVLAGDDTADTSFIIFGRLAQRLIGRSVETLLQQNPATTDFIPKEITDLLEKEFSSNVSIIENTAFTGNVAFQVNRILGGASSHGLPLLQSPSASQASSLPASMALSPTPSVGLSDAQTGPTSPSTAVSKKKELDIECVSKTHADVQDEEDVEDEGADHASLPQKSPPSGTKQSASKS

SEQ ID NO: 136802 - protein, 79 aa, Oryza sativa
  Clone ID: PAT_MRT4530_38345C.1.pep
MPMIHDLLIELRKINPWWICLASKGMGDSKEFAGELFVALARRRNLEPEDGITKEQLKEFWEEMTDQNFDSRLRIFFDM

SEQ ID NO: 136803 - protein, 175 aa, Oryza sativa
  Clone ID: PAT_MRT4530_38346C.1.pep
RPGPPPSAPRTLPSPLLSLAHPPPPLSPPLSRTPAAGAAGGVDPTSIPIFRSTPPAPPHAASTHAARTLSPRLIDLRQHRRAPPPISAARTTFLRLIDLLRRYSDSINLQINKAVASVEVTIHNRQRQRDAAAPSRSTATYPYSRHRSSSTKRFRAPCNTPTLCLICLHYPDKNP

SEQ ID NO: 136804 - protein, 169 aa, Oryza sativa
  unsure (1)..(169): unsure at all Xaa locations
  Clone ID: PAT_MRT4530_38347C.1.pep
HHQWPAQVGNLAGDWMVGCGFGAHVHVEDDKTNATVLTNTSNDHRRRPATRGDGGGGSDLAGGELRRSAAERRGWPSFPTAWRSPRQXRRPTAMANAAARRRRRXAGGDGEQSXVATRLRSTGRLGSWGKRKRRTRGSYLXPWIEEIGLLPQEISSGNQKLGFGDKLKN

SEQ ID NO: 136805 - protein, 875 aa, Oryza sativa
  Clone ID: PAT_MRT4530_38348C.1.pep
MAAATAPVAGAAERQQQQQQQQRGGAASASGNAVFKSGPLFISSKGIGWKSWKKRWFILTRTSLVFFKSDPNTLPQRGGEVNVTLGGIDLNNSGSVVVREDKKLLTVLFPDGRDGRAFTLKAETSEDLFEWKTALEEALAQAPNAALVMGHNGIFRREKRPIKSLVVGRPILLALEDIDGSPSFLEKALRFLERHGIKVEGILRQAADVEEVDKRMQEYEQGRTEFAQDEDAHVIGDCVKHVLRELPSSPVPASCCTALLEAFRLESKESRINSMRAAISETFPEPNRRLLQSLSTTGQILNKLVKPFFGRILRMMHTVASHTAENRMTASAVAACMAPLLLRPLLAGECEMEDDLDMNGDSSAQLIAAANAANSAQGIVTTLLEEYEGIFYDEHLRCSLSPDSQIEDSGSEESTDDETVDIKDSGFHDAENDADQELDDSERILSGKLSETSACTAGDLYDYKVADDDSDGEPSTEDKALETKVDVNDAQHSHLAENVSVNVQRSPNEKDPPNMVSSQDSPLSMGDILSSLDAGISLPGPGPEYSVDRQSIKSNGTQMHVKRSNFWGRNNGRKSQQSELADSSGEEELAIQRLEITKNDLQIRIAKEARGNAILQASLERRKQALHERRLALEQDVSRLQEQLQAERDLRAALEVGLSMSSAHISSSRSMDSKTKAELEEIALAEADVARLKQKVAELHLQLNQQRQHQYGSLADANDRYQHLPNHLPQNFVQSGFDMNLAFCNQEKKQRNEGPAGASHWRSIKQHVLPHGSSRPFSRKHSMDASSSDSREASTSMPADGNSMSVNIPKATEGVEYGRQAPVASSTLVELTTRLDFFKERRSQLMEQLHSLDLGNGSANHGFPYKSSSPWNSPR

SEQ ID NO: 136806 - protein, 95 aa, Oryza sativa
  Clone ID: PAT_MRT4530_38349C.1.pep
MERKAEHEVNLLRPPALLHWDGCDGGEQPPPLNERRRIVQRWIEYENRKGPRRFDYVSGGWLQRLDEPRGGSCGRFLRRRSSARCPLHLPELRWL

SEQ ID NO: 136807 - protein, 646 aa, Oryza sativa
  unsure (1)..(646): unsure at all Xaa locations
  Clone ID: PAT_MRT4530_3834C.1.pep
CWCRCGRRRRWSTHGHLSRNASASAPAHTPNSTATTDKGCLGNTPASSSWSTTSGEGXAVRTFLFLGTGAAAAAAAAGGGIGIKIASSAAAGGATAGAAAAAAEAPGASVDDTTGAIMSFGSSDGADAGAGAGAAEGGGGAPTVTTAGVSXASAPTPTAATGNGGIGNTSAAACTSTSALSTAXERLEAVRSFLFLSAAGAAAVLAAAGNGGGGITSAAAGAGAGANAAAAEALAASTGEITELGAGAGADTNAFAGAAAGVRACGGGAPTVTAVGARLAPLPRPRPRPATAAFAMATHPRSPPLAERDAGAAGGGGASASRAAGAGAGAGAAXAGAIDAGETRASGSTDSAGACAAADAGASVGAAAPAAGVGTGGGGATTVTAVXRSAFASAPTPATATAPKSTAATNTGTGAASPSTNXAASSDPDDVGAGTCTGTGTRATSDDGGAGTCTGTGDASDNVGAGTGAASDDGGTGTCTITGDASDNSVAGTGAASDDDGGAATCTVTGDTSDEGGGAGSNRRGAGAGASLASASAAAAPRSSTTRSRRARARSKNASMDRISAESGDGVCAGSPKLVAAASPRSTRAAASYAHAPCSAVSNVPSHSRPAPVGLWISATYLVPNLTLTPRYFVSGSISSHSSAAA

SEQ ID NO: 136808 - protein, 274 aa, Oryza sativa
  Clone ID: PAT_MRT4530_38350C.1.pep
MAEQGILRRWKRFFPAFASIHAAIEAAEPGISRKEFRDATDKVVAMLCSATDDEAVAEELRVVLDEMMVEALLTLELVPAMPKMLASTDLAQDVGALRNHPSERVRGLATGIVRAWRASVKDELLKAAAAMEKLSQALEPDEADDHHAKILQPSPPKKTANSSQPSFPKKQSAPVAGGSHVTMAKMEPPREKLPAAVGSFRRESAASCGTDEKAMNAAKRKLREGYQEAEDAKRQRTIKVIEAPKQQQRKRHPIVQERNRSRVASHTSSLRRRF

SEQ ID NO: 136809 - protein, 84 aa, Oryza sativa
  Clone ID: PAT_MRT4530_38351C.1.pep
MSSSSPLSIQTHVATLMPLKHPDPCNELQRAATRIMLQQVPASIYGNRGGERAPMLAAAAVEEYILPVCAQDRVAVGCPECCVL

SEQ ID NO: 136810 - protein, 157 aa, Oryza sativa
  unsure (1)..(157): unsure at all Xaa locations
  Clone ID: PAT_MRT4530_38352C.1.pep
VPGFIPYADHTLXKXXXPXRHHASQFMVXSFFTRSGQPGHPLTGPDMPISSHPIITVAFGEKNATTNXHTQQQQHQTHHTGHPGIISFLNRGPPPQHQFHQHCAIMQSAHSGVLARRHCCFGALHHAFIAPXIHSQTQQPKGCLPASILQSTPTRHP

SEQ ID NO: 136811 - protein, 124 aa, Oryza sativa
  Clone ID: PAT_MRT4530_38353C.1.pep
GITRRSESAASPSASSAGGGPPSRTSSSRPQPPWRSSPRRWSPTRPTTITPRSFSHRRPRRRQTPHGHSRLSPRSRVLVRWSAAAVSPRWPRSIRHRRRRRRRLRLEAPTTARASCRAVPTRRP

SEQ ID NO: 136812 - protein, 104 aa, Oryza sativa
  unsure (1)..(104): unsure at all Xaa locations
  Clone ID: PAT_MRT4530_38354C.1.pep
KNKKKKKIKEKIYIRNNKKKEKKNKNKNXEKNNKKKEKKKKKKDXNKKKKKKNKKXKYKIEKLNRXKKINKEKKKKRKKKNKNKKRINXKKKKKKKNKKNKIKR

SEQ ID NO: 136813 - protein, 64 aa, Oryza sativa
  Clone ID: PAT_MRT4530_38355C.1.pep
MSILNEIIIRNRKTWACTTHIETSKEIIMQNKTKFEGSNARGHLNTTVRFAGLRRHPPWPETKI

SEQ ID NO: 136814 - protein, 803 aa, Oryza sativa
  unsure (1)..(803): unsure at all Xaa locations
  Clone ID: PAT_MRT4530_38356C.1.pep
MAGRARPQPQPQPHSPSASTRRRERWLVVLGVALHAVYMLSIFDIYFKSPIVHGMAPEPPRFSAPPAKRLVLLVADGLRADKFFEPDERGRYRAPFLRGVIEEKGRWGVSHARPPTESRPGHVAIIAGFYEDPSAVTKVVETANPVEFDSVFNQSRHIISFGSPDIVPIFCSSLPHSTWGTYPHEYEDFAXQFQGLLNRSFEDAKLRQLLLQDKLVIFLHLLGCDTNGHAHRPYSNIYLNNVKVVDQIAESMYNLMESYFNDNQTAYVFTADHGMSDKGXTLVGLPCPLNSVGSLPTHYLKLXEMKQSSSLYFKPFKPLANYSLVLDQIEDLISAKDYENAMKHSEELRSMALAGLHYFQTYDWFMLMTTITLGYIGWMVNLILHVLQSYTSFPANLQKRTQVYAKNTSVKVYIVGCFIMGFSSIILLLEKSPLLYHAYLFMTIFLWTRIVQNFEFIKAVWRELSNMPFKYTMNLLNISVIALFILEFLVMSFFDRKLYTWCFLILGILASSCVAIFIQASSALAVYVWLSCWFLSLFTLMPAEIPENNNLLHPLHQMINWLIAGFAMVLPLFSPSSVLSRLTSGFLGFAPPFLLLSIGYEAVFYSAFAMVLMGWIFVESANLYCSEQNGSARRSSIVEGSIFGYDERCLQLSDLRIPLLFTILFNVAFFGTGNFASIASFEISSVYRFITIFSPFLMAALLIFKLFIPFMLVICTFSAITKVVRIPRLGCYFLVILLSDVMTIHFFFLVRNTGSWMEIGNSISHFGIVSAQVVFVLLLFALTNIFTKDIEVSSRQLSSRKVM

SEQ ID NO: 136815 - protein, 367 aa, Oryza sativa
  Clone ID: PAT_MRT4530_38357C.1.pep
MESEPLASSSSREKTMMSSNSLFQRLAKWCPWLLRDEPKKPVKVLVTGAAGQIGYAIVAMIARGLMLGADQPVVLHLLDLPVAANALNGVRMELIDAALPLLRGVVATSDEAEAFKGVNVAIVIGGWPRRDGMERKDLISKNVTIYKSQASALHQHAAPNCKVLVVANPANTNALVLKEFAPAIPAKNITCLTRLDHNRALGQVAEKLNVHVGDVKNAIIWGNHSSTQFPDASHATVSTDRGERPVRELIADEIWLREEFVTDVQQRGAAVIKARKQSSSLSAASAACDHMRDWILGTPKGTWVSMGVYSDGSYGVPEGVFFSFPVTCEKGEWSVVQGLEIDDFARSKMETSATELKEEKSIAYEFL

SEQ ID NO: 136816 - protein, 54 aa, Oryza sativa
  Clone ID: PAT_MRT4530_38358C.1.pep
FQDRALFSWFHEQTPKPLRSFTFPNFLGPTNPFLTGFFLEFFKGLAMFFSHDFW

SEQ ID NO: 136817 - protein, 80 aa, Oryza sativa
  Clone ID: PAT_MRT4530_38359C.1.pep
QQIRLELHQYQFLAFSSVQTVVQHLQLQQVGVVSFGQINAQVQFLLAPNPPPRWGIYPIRCIHCRSIPSVAGVWYQCAIV

SEQ ID NO: 136818 - protein, 59 aa, Oryza sativa
  Clone ID: PAT_MRT4530_3835C.1.pep
DMITIVVCKVVLLRGFTRNLCENLHSAKYGRHGTIIQKIQCVFFIPMHLALFPSMHEHL

SEQ ID NO: 136819 - protein, 131 aa, Oryza sativa
  Clone ID: PAT_MRT4530_38360C.1.pep
PISLLITVGYGETIEADKSSSDIGEVSKMILGKQPPKGSAIREVRDMFFPYWKSVLSRRLQLKIVPSCQLSRKDLLSAEASTKGTKSIDHPCNPIKSMGNLGSMGWPPLSSESRRMLYTVASMSRKVFKRT

SEQ ID NO: 136820 - protein, 72 aa, Oryza sativa
  Clone ID: PAT_MRT4530_38361C.1.pep
KHVACAVCMDITFFLGGGGDCVDRDSVVLLHSCICYVENHIKSAFWGTHTFVDSSCKMESCSFVLSSVSFAA

SEQ ID NO: 136821 - protein, 62 aa, Oryza sativa
  Clone ID: PAT_MRT4530_38362C.1.pep
RFDQTTSTFRLEETDDLHYFALVTLYAACYTFNFLSPGKHVLRTKEKCHQTSQHCNLLHIPF

SEQ ID NO: 136822 - protein, 745 aa, Oryza sativa
  Clone ID: PAT_MRT4530_38363C.1.pep
MPECPARERFSALRGARWRADLGVLPDCASVSTEEFRRAAADSRRRYANLRRRLLIDPHLSKDEENAPDLAVENPLSQNPESTWGQYFRNAELEKMLNQDLSRLYPELGNFFQTTICQSMLGRILLVWSLRYPELGYKQGMHELLAPLLYVLHADVHYFKQVRELHDELFSDDFDGQTFPDRIKLNRSDRTNTIEGSAAKIRSLDDLDSDTRDLFLINDAYGAEGELGIILSEKFMEHDAYCMFESLMHGSMNGAQGVVAITDFYSLSPAPESSTGLTPVREASSAIYHLLASVDSPLHSHLMELGVEPQYFALRWLRVLFGREFSLDNLLFIWDEIFSSPNHSYCADIKNQSDYQFKILCSHRGALILSMAVSMMLHLRSSLLGSEHATSCLVRLLNFPGDTDLKSLIDKAKLLQPFALEANLPSSPLRGKSPLNPPNYWEETWKILQMSEEKRSGGSINRMKVRGLFRRSSPNTESNVSRTKDANFEDSNSTSGTQSTADEHHRSGIVPVNLVNGTLHTPIRERTSHVEQCTAENMITTSNNVLEAGQPEVHRSSSVDVRDALGVACGNLSRDSSTSLSCGTEYDHETHHADEPCASHDDKVVSEPDPLPVHNDKIDEVTIAAIQTCALVDYQQSQQNKPCSVNGKSEVKYQQNFAVHEVGRKETFELGSSSDVADKELLGTLRLLGESMVENIEVIDLLFQPNLHSTSLDKSEEIVLGSIEQAKAKAALEGLKKISELLRRI

SEQ ID NO: 136823 - protein, 80 aa, Oryza sativa
  Clone ID: PAT_MRT4530_38364C.1.pep
TAGSRCWGCWSRTTRPARPAAAGTASSASPRWTPPRRRRRRGPPSRPLLRLPTASPPPPPCRAPTAPPAPPPRRSPAPTS

SEQ ID NO: 136824 - protein, 130 aa, Oryza sativa
  unsure (1)..(130): unsure at all Xaa locations
  Clone ID: PAT_MRT4530_38365C.1.pep
VASHYGGPLLIHTPPPRVQAHNSSAPSPRPYPCPPLPXQPQLPPPXTPPHPPTPPPHALAGPRRGDAGPGRPPRPPPRAQPPPPRRPPXPPRRPPSPAAPPRRDVGRPGGAADARPRGAPPPPRAAPPPL

SEQ ID NO: 136825 - protein, 30 aa, Oryza sativa
  Clone ID: PAT_MRT4530_38366C.1.pep
SNIFCESICWIIYLIGLFEKQNFHSLEISI

SEQ ID NO: 136826 - protein, 1145 aa, Oryza sativa
  unsure (1)..(1145): unsure at all Xaa locations
  Clone ID: PAT_MRT4530_38367C.1.pep
MAATNPFGGNTISEKLAKNNYALWKAQVLASVRGARLEGHLTGTTAAPAITISVPGEKEGDKATRVANPAYDEWVATDQQILGLLLSTLSRDVLAQGDLSITEYVAKMRALGDDMTAAGKVVDNEDLISYIIAGLDDTYEPVISSIVGKSEPMSFGEAFSQLLSFEQCNNLRHGGESSANLANRGCGTTGGNGGQRGRGGNNRGRGGNGGNNSANRGKGGRGNGGFNGGRQGGGVDTRPKCQLCYKRGHTVINCWYRYDEDFVPDEKYAGSAATSYGIDTNWYVDTGATDHVTGELEKLIVRDHYKGHDQVHTASGAGMEISHIGHSIVKTPSRDIHLRNILHVPKANKNLVSAQRLVSDNSAFMELYSKYFNLKDLATKKLLLRGPCRGCLYALPSTPPHAHSTKERRQRVINCLILYHLVYLVILWNLFILMFGVLPPLLLEANSIIPSTGRVYXSHDVIFDENVFPFASLHPNAGAKLRSEILLLPSHLDIPIIPGVQQMSTTVANVPTNPANQISGDELSLQENSAANNAAPDGADAATAATKDPAADSPHTSDAASSSVLQRRVEATAESSCSPDRLHVELTPAHSPVAMQSPDATSPTASSNSQEPSTSLDASVAGEADTQHQQHHVISRPATTLQSAIPHEKPYTDGTVTYGTTVLPETGEPNNLKAALKPLIGKNPPGAEKQDGSLDRYKARLVAKGFKQRYGIDYEDTFSPVVKAATIRIILSIAVSKGWCMRQLDVQNAFLHGVLEEEVYMKQPPGYEDSSLPGYVCKLDKALYGLKQAPRAWYSRLSKKLYDMGFQGSKADTSLFFYNKGDLIIFVLIYVDDIIVTSSRQEAVPALLRDLQKEFALKDLGDLHYFLGIEVTKVSGGIVLTQDKYVNDLLRRVNMFDCKPVSTPLSTSEKLSINEGDPLGPNDATHYRSVVGALQYLTLTRPDIAFPVNKVCQFLHAPTTHHWAAVKRILRYLKQCTRLGLKLSKSRSMLVSAYSDADWAGSLDDRRSTGGFAVFLGDNLVSWSARKQATVSRSSTESEYKALANATAEIMWVQTLLAELQVESPSMAKLWCDNLGAKYLSANPVFHARTKHIEVDYHFVRERVSRKLLEIDFVPTGDQVADGFTKALSVRQLENFKYNLNLGKL

SEQ ID NO: 136827 - protein, 371 aa, Oryza sativa
  Clone ID: PAT_MRT4530_38368C.1.pep
MPVRRRWYPPSSTAAQPSPDGGDVNTDDADACPSSRQQRPPSLPQHSAPIHHRRRVINSIDASGEVMEYGSSNDQRMQDMEIWPSDGGGVEEYDPWTAWLYKPHTVSVLLAGACLLIWASGVLHPEITSSHDKVIPIKRGVWAMIAVFLAYCTLQAPSTILIRPHPAVWRLVHGMAVVYLVALTFLLFQNYQRDHMVLTAETLFDEFVIAHVLGWWGKAVMIRNQLLLWVLSVGFELMELTFRHMLPNFNECWWDSIILDIMICNWFGIWAGMHTVRYFDGKTYEWVGLSRQPSIMGKKSGCLVCSLVSLIPEFLSNWFILRKLVKFTLSSLVNHFHCGRNPLVVYRLILWWLIAIPAIREYNTYLQDRSS

SEQ ID NO: 136828 - protein, 1379 aa, Oryza sativa
  Clone ID: PAT_MRT4530_38369C.1.pep
MAATNPFGGNTISEKLAKNNYALWKAQVLASVRGARLEGHLTGTTAAPAITISVPGEKEGDKATRAANPAYDEWVATDQQILGLLLSTLSKDVLAQVATCGTAAAAWSMLEEMYTSMTRARFINTRIALSNTKKGDLSITEYVAKMRALGDDMTAAGKVVDDEDLISYIIAGLDDTYEPVISSIVGKSEPMSFGEAFSQLLSFEQRNNLRHGGESSANLANRGRGTTGGNGGQRGRGGNNRGRGGNGGNNSANRGKGGRGNGGFNGGRQGGGVDTRPKCQLCYKRGHTVINCWYRYDEDFVPDEKYAGSAATSYGIDTNWYVDTGATDHVTGELEKLIVRDRYKGHDQVHTASGAGYQKFSFAQRLVSDNSAFKELYSKYFHLKDLATKKLLLRGPCRGRLYALPSTPPHAHSTKEVYGVSKPSFERWHSRLGHPSSPIVEKAKSHQLPYSISSSISSHPLELIYSDVWGPAPTSVGGKQYYFKSEVIQKFHEFQALVERLFNRKILAMQSDWGGEYEKLNSFFTKIGITHHVSCPHTHQQNGSAERKHRHIVEMGLALLAYSSMPLKFWDEAFTSAVYLINRTPSRLLKYATPLERLFKQTPDYNILCVFGCACWPHLRPYNARKLQFRSKQCTFLGYSPLHKGFKCLDPSTGRVYISRDVIFYENVFPFASLHPNAGAKLRSEILLLPSHLDIPIIPGVQQMSTTVANVPTNPANQISGDELSLQENLAANNAAPDGADAATAATKDPAADSPHTSDAASSSVLQRRVEATVESSCSPDRLHVELTPAHSPVAMQSPDATSPTASSDSQEPSTSLDASVAGEVDTQQQQHQVISRPATRLQSGIIRKEKVYTDGTVKYRTTFLTVTGEPENLDDALKDNNWKKAMDAEFMALQNNKTWHLVPPQKGRNVIDCKWVYKIKRKQDGSLDRYKARLVAKGFKQRYGIDYEDTFSPVVKAATIRIILSIAVSKGWCMRQLDVQNAFLHGVLEEEVYMKQPPGYEDSSLPGYVCKLDKALYGLKQAPRAWYSRLSKKLYDMGFQGSKADTSLFFYNKGDLIIFVLIYVDDIIVTSSRQEAVPALLQDLQKEFALKDLGDLHYFLGIEVTKVSGGIVLTQDKYVNDLLRRVNMFDCKPVSTPLSTSEKLSINEGDPLGPNDATHYSSVVGALQYLTLTRPDIAFPVNKVCQFLHAPTTHHWAAVKRILRYLKQCTRLGLKLSKSRSMLVSACSDADWAGSLDDRRSTGGFAVFLGDNLVSWSARKQATVSRSSTESEYKALANATAEIMWVQTLLAELQVESPSMAKLWCDNLGAKYLSANPVFHARTKHIEVDYHFVRERVSRKLLEIDFVPTGDQVADGFTKALSVRQLENFKYNLNLGKL

SEQ ID NO: 136829 - protein, 46 aa, Oryza sativa
  Clone ID: PAT_MRT4530_3836C.1.pep
MELDAWVRLVSGVEVEVDAGVGFGLTGVGVGVGVGFGQISSLGNRG

SEQ ID NO: 136830 - protein, 409 aa, Oryza sativa
  Clone ID: PAT_MRT4530_38370C.1.pep
MPRPGTEATTTTTSGCEADCGVPAMKATLMMMSCRSRSRSGRAHWMLLLFCLLLAFPSHGPRAVEAFPGGYGINYGRIANNIPSPDKVVQLLRASKIRNVKIYDSDHSVLDAFKGSGLNLVIAIPNELVKDFAANESRSIDWLNENVQPYLPQTRIVGITVGNEVLGGQDTSLAEPLVQAVKNVYNGLKKFHLQDKIELFTPHSEAVFATSYPPSACVFKEDVMVYMKPLLDFFQQIGSPFYVNAYPFLAYISDPEHIDINYALFKPNPGIVDPNTSLHYDNMFDAQIDAAYAALQAAGYRDMEVRVAETGWASSGDQTEAGASVENARTYNFNLRKRLFLRKGTPLKPKRPVKAYIFALFNENSKPGPSSERHYGLFNADGRIAYDIGYEGLLPSSAPSYFLSLRENV

SEQ ID NO: 136831 - protein, 1247 aa, Oryza sativa
  Clone ID: PAT_MRT4530_38371C.1.pep
MAATNPFGGNTISEKLAKNNYALWKAQVLASVRGARLEGHLTGTTAAPAITISVPGEKEGDKATRVANPAYDEWVATDQQILGLLLSTLSRDVLAQVATCGTAATAWSMLEEMYTSMTRARFINTRIALSNTKKGDLSITEYVAKMRALGDDMTAAGKVVDNEDLISYIIAGLDDTYEPVISSIVGKSEPMSFGEAFSQLLSFEQCNNLRHGGESSANLANRGCGTTGGNGGQRGRGGNNRGRGGNGGNNSANRGKGGRGNGGFNGGRQGGGVDTRPKCQLCYKRGHTVINCWYRYDEDFVPDEKYAGSAATSYGIDTNWYVDTGATDHVTGELEKLIVRDHYKGHDQVHTASGAVIQKFHEFQALVERLFNRKILAMQSDWGGEYEKLNSFFTKIGITHHVSCPHTHQQNGSAERKHRHIVEMGLALLAYSSMPLKFWDEAFTSAVYLINRTPSRLLKYATPLERLFKQTPDYNLLRVFGCACWPHLRPYNARKLQFRSKQCTFLGYSPLHKGFKCLDPSTGRVYISHDVIFDENVFPFASLHPNAGAKLRSEILLLPSHLDIPIIPGVQQMSTTVANVPTNPANQISGDELSLQENSAANNAAPDGADAATAATKDPAADSPHTSDAASSSVLQRRVEATAESSCSPDRLHVELTPAHSPVAMQSPDATSPTASSNSQEPSTSLDASVAGEVDTQQQQHHVISRPATRLQSGIRKEKVYTDGTVKYRTTFLTVTGEPENLDDALKDNNWKKAMDAEFMALQNNKTWHLVPPQKGRNVIDCKWVYKIKRKQDGSLDRYKARLVAKGFKQRYGIDYEDTFSPVVKAATIRIILSIAVSKGWCMRQLDVQNAFLHGVLEEEVYMKQPPGYEDSSLPGYVCKLDKALYGLKQAPRAWYSRLSKKLYDMGFQGSKADTSLFFYNKGDLIIFVLIYVDDIIVTSSRQEAVPALLRDLQKEFALKDLGDLHYFLGIEVTKVSGGIVLTQDKYVNDLLRRVNMFDCKPVSTPLSTSEKLSINEGDPLGPNDATHYRSVVGALQYLTLTRPDIAFPVNKVCQFLHAPTTHHWAAVKRILRYLKQCTRLGLKLSKSRSMLVSAYSDADWAGSLDDRRSTGGFAVFLGDNLVSWSARKQATVSRSSTESEYKALANATAEIMWVQTLLAELQVESPSMAKLWCDNLGAKYLSANPVFHARTKHIEVDYHFVRERVSRKLLEIDFVPTGDQVADGFTKALSVRQLENFKYNLNLGKL

SEQ ID NO: 136832 - protein, 441 aa, Oryza sativa
  Clone ID: PAT_MRT4530_38372C.1.pep
MDISKANEGYASYGSISSASARTYHCSISPSLYCHSLQKPTLEDQIREAQESDEEINTIKENMKKDKAISFSIDEKGVVLFGKRICVPNKKELKDLILREAHESAYSIHPGSTKMYLDIKPYYWWSGMKRDIVEYVALCDICQRVKVEHQKPAGLLQPLKIPEWKWEEIGMDFITGLPRTPAGYDSMWVIVDRLTKVAHFIPARQPIQKIVSDRGTQFTSHFWKKLHEAMGTNLNFSTAYHPQTDGQTERVNQVLEDMLRACALDFAGTWDLCLPYGEFSYNNSYQASIQMASNEALYGRKCRTPLCWTDVDEKKIFGPDILKEAEEQIKIIRERLKVAQSRQKNYADNRKRDLEFQEGDHVYLRVSPYVERKDSKCLRIPEEQVPLEAISVQDDLTYKEQPIRILEGKDHCTRRKTIKFYKVQWSNHSEDEATWEREDRL

SEQ ID NO: 136833 - protein, 1449 aa, Oryza sativa
  Clone ID: PAT_MRT4530_38373C.1.pep
MAATNPFGGNTISEKLAKNNYALWKAQVLASVRGARLEGHLTGTTAAPAITISVPGEKEGDKATRAANPAYDEWVATDQQILGLLLSTLSKDVLAQVATCGTAAAAWSMLEEMYTSMTRARFINTRIALSNTKKGDLSITEYVAKMRALGDDMTAAGKVVDDEDLISYIIAGLDDTYEPVISSIVGKSEPMSFGEAFSQLLSFEQRNNLRHGGESSANLANRGRGTTGGNGGQRGRGGNNRGRGGNGGNNSANRGKGGRGNGGFNGGRQGGGVDTRPKCQLCYKRGHTVINCWYRYDEDFVPDEKYAGSAATSYGIDTNWYVDTGATDHVTGELEKLIVRDRYKGHDQVHTASGAGMEISHIGHSIVKTPSRDIHLRNILHVPKANKNLVSAQRLVSDNSAFMELYSKYFNLKDLATKKLLLRGPCRGRLYALPSTPPHAHSTKEVYGVSKPSFERWHSRLGHPSSPIVEKVISKNNLPCLVESNKQSVCDACQKAKSHQLPYSISSSISSHPLELIYSDVWGPAPTSVGGKQYYVSFIDDFSKFTWIYLIKFKSEVIQKFHEFQALVERLFNRKILAMQSDWGGEYEKLNSFFTKIGITHHVSCPHTHQQNGSAERKHRHIVEMGLALLAYSSMPLKFWDEAFTSAVYLINRTPSRLLKYATPLERLFKQTPDYNILCVFGCACWPHLRPYNARKLQFRSKQCTFLGYSPLHKGFKCLDPSTGRVYISRDVIFYENVFPFASLHPNAGAKLRSEILLLPSHLDIPIIPGVQQMSTTVANVPTNPANQISGDELSLQENLAANNAAPDGADAATAATKDPAADSPHTSDAASSSVLQRRVEATVESSCSPDRLHVELTPAHSPVAMQSPDATSPTASSDSQEPSTSLDASVAGEVDTQQQQHQVISRPATRLQSGIIRKEKVYTDGTVKYRTTFLTVTGEPENLDDALKDNNWKKAMDAEFMALQNNKTWHLVPPQKGRNVIDCKWVYKIKRKQDGSLDRYKARLVAKGFKQRYGIDYEDTFSPVVKAATIRIILSIAVSKGWCMRQLDVQNAFLHGVLEEEVYMKQPPGYEDSSLPGYVCKLDKALYGLKQAPRAWYSRLSKKLYDMGFQGSKADTSLFFYNKGDLIIFVLIYVDDIIVTSSRQEAVPALLQDLQKEFALKDLGDLHYFLGIEVTKVSGGIVLTQDKYVNDLLRRVNMFDCKPVSTPLSTSEKLSINEGDPLGPNDATHYRSVVGALQYLTLTRPDIAFPVNKVCQFLHAPTTHHWAAVKRILRYLKQCTRLGLKLSKSRSMLVSACSDADWAGSLDDRRSTGGFAVFLGDNLVSWSARKQATVSRSSTESEYKALANATAEIMWVQTLLAELQVESPSMAKLWCDNLGAKYLSANPVFHARTKHIEVDYHFVRERVSRKLLEIDFVPTGDQVADGFTKALSVRQLENFKYNLNLGKL

SEQ ID NO: 136834 - protein, 157 aa, Oryza sativa
  Clone ID: PAT_MRT4530_38374C.1.pep
MAKVITLILVVITVSTMLASPVECTKIPGAFPIGMSPYNFTTMIDIFKVAMLVPTEDCTSNVEMCISETCSYIRKALDGVVDAAPPAKQAETKEATAKMAGIAATMLDTAMASGEKRQVAAVSIAFMLAADAIDASAPADKFRVMDETFKAAASPIA

SEQ ID NO: 136835 - protein, 85 aa, Oryza sativa
  Clone ID: PAT_MRT4530_38375C.1.pep
MSACVECYRLCKLTGSWARCALLLLHCFPRFFLSSELLLEYVLTVVLQASKNRFFLERKSTWEKVFPTHRIRNETTGRGFCPRIN

SEQ ID NO: 136836 - protein, 462 aa, Oryza sativa
  Clone ID: PAT_MRT4530_38376C.1.pep
MAIVLDVFASYVGNLLKQVAKDELNLLFGVSLEIATLHDKLRILKDYLADADRRRITDLSVQGWVTKLKHTIRIKALNARLDAICKSAATFSFLKLESYEDMVAPRRFSVANRRTDPVLEQSAVVGEKIKEDTRALVRRLTDGKHKKQDAVMVVAMAIKEASDKKIWLSVTQDVNEVNLLRTAIKSVGGASDGRESNKSLLVLALVDAIRDKRFFLVLDDVWSERSWDNLLKAPFSHGAAGSHLLITTRHDEVTQRMEAMQPFHHVDKLYPQYAWLLLKKQVASSDDMEEVEIDDTLKDIGMEIIKKCGGLPLAVKYLEIEFENLVRLPNSLVKLGRLRHPSLVKLGRLRHLDLLGVSINGIPRQFCGLTNLRYLCGFPAQADGLQDVSPMHLVLDCNLELLTSIALGESGPEWGKLSHVQHIKAYADQRDDERKWHMLYTREPYSFETNIGDNSSSSTGVN

SEQ ID NO: 136837 - protein, 73 aa, Oryza sativa
  Clone ID: PAT_MRT4530_38377C.1.pep
LEPWTPLALPPISHPDGSRPFKRPEDPRVPSSNSPYSESYYNSLAVVLQRRDWENPGVTQLNRLAAHPPFASW

SEQ ID NO: 136838 - protein, 329 aa, Oryza sativa
  Clone ID: PAT_MRT4530_38378C.1.pep
MAFALKASTASAAAASTASASASSLSVAAAAPGRRGGAAGRVSFRGVPAPMVAIRAEAAAVGEDERVISGTFAKLKEQGKTAFIPFITAGDPDLATTAKALKILDACGSDLIELGVPYSDPLADGPVIQASATRALSKGTTFEDVISMVKEVIPELSCPVALFTYYNPILKRGIANFMTVVKEAGVHGLVVPDVPLEETNILRSEAAKNNLELVLLTTPTTPTERMEKITKASEGFIYLVSTVGVTGARANVSGKVQSLLQDIKQVTDKAVAVGFGISTPEHVKQIAGWGADGVIIGSAMVRQLGEAASPEEGLKKLEELAKSLKAALP

SEQ ID NO: 136839 - protein, 58 aa, Oryza sativa
  unsure (1)..(58): unsure at all Xaa locations
  Clone ID: PAT_MRT4530_38379C.1.pep
TSAVAXYADRTASATAVHRAPATAGRLRPARSRMVKVGSTTNGRGSGRRSDRRPESGK

SEQ ID NO: 136840 - protein, 189 aa, Oryza sativa
  Clone ID: PAT_MRT4530_3837C.1.pep
MAVTTTCRGGHHAAVMPRPPPPLFGQAGQDQRRRYLGLCTEGLGSESSESSGGDVDLGTGGGDDTGNDGVGRALPCKRQHRPIDDEEEEEEKTVVPAALAPPLPAWTRAAFPPPISVIGAGGKPWLYLRAHRGDGRLVLREVRIPSRELLHGRREDGRFKLHFAHPDEQLQQQQLLLLADDQDPAEKNE

SEQ ID NO: 136841 - protein, 464 aa, Oryza sativa
  unsure (1)..(464): unsure at all Xaa locations
  Clone ID: PAT_MRT4530_38380C.1.pep
MNKHSIKNTHEQTSRTHMNIRTQLEHMLLPPSRPPSPGNLCRLHAIRPLPPDLAEGRTSWRRLRPGGVPPPGCRLGNPAPLEVSQPALKGFSVVVSFQLGMLYDTVQPSALSSLMGGFSKEETLFAIRQMDRNNAPGPYGFGPSFYQATWHLLSTEVMNLLERFSLQHVYLERINRPYIVLILKPGKENTPDGFRPISLQNCSMKIITKVLANRLHRILQELIHFDQRGFLKGRSITKNFIFATELMQTCFVRKCPTLILKLDFAKAFDSISWDSRLQILTARGFNTTWNTWIQNILSTSKLVILLNGVSGRWINCKHGLRQGDPLSPHLFILVADVLQRLLLHNXISHPMCPDSPCVTIQYADDTLIICNAWVTGXQINEILNCKKESFPLSYLARTTSVSPHKLRAQDLNPTIAKVYKYLAGWEASLLSYAEHIVLINLVLNNIPVFAMFSSKLPGCKTTHC

SEQ ID NO: 136842 - protein, 72 aa, Oryza sativa
  Clone ID: PAT_MRT4530_38381C.1.pep
MSATGTATGGGSATASDGRGGFAFVGLGAANLPHFFLFIVDPAAATTDLAAVASGGSDLPPPDLGAEAAGFD

SEQ ID NO: 136843 - protein, 1828 aa, Oryza sativa
  Clone ID: PAT_MRT4530_38382C.1.pep
MVGGGGGAGEKPPASNGVHGSGKARFTLLYGLLLYVVMPVLFLYMLVAAATPFYNPRCSPESNAAMARFVVAMPNASSVNGSSPSSSSPPPTPVRPMRSADEAPTGLRHIAFGIGASSALWKSRKEYIKLWWRPGRMRGFVWMDRPVEEFYSKSSRTGLPPIMVSSDTSKFPYTHGAGSRSALRISRIVSETFRLGLPGVRWFVMGDDDTVFLPENLVHVLSQYDHRQPYYIGSPSESHIQNLIFSYGMAFGGGGFAISRALAEELAKMQDGCLHRYPALYGSDDRIHACMSELGVPLTRHPGFHQCDLWGDVLGLLGAHPVAPLVTLHHLDFLEPVFPTTPSRAGALRKLFDGPVRLDSAAVAQQSVCYDREHHWTVSVSWGFAVMVVRGVLSPREMETPMRSFLNWYKRADYTAYSFNTRPVARQPCQKPRVYYMRDSRMDRRRNVTVTEYDRHRGKQPDCRWRIPDPAALVDHIVVLKKPDPDLWKRSPRRNCCQVVSSPTKAGKNRTMTIEIFVPAPDDCPLATNTRTQHIALAPFVRIHRRSHHDVAAGPGNDELTASRGPRLPSPVPATPLGVVRMAAIVLLLFLVVGLMPVSNGQTTPFSPRFSVYLACGAGGNVVVTSDSPQRTFVPDDGELSGKSARFSNPDASPPSPLYAAARAGTSGFSYRLSYAADAAPDGNTTLVLRLHFFPFASQSGDLLSARFSVSAMGRYVLLPPSFSPPRAGVVREFLLPSDGSGEFDVAFTPESGGLAFVNAIELFPAPQELLWKFPLTAVNTDVSPSHQALETLYRLNVGGPTVTPTGDTMWRTWLPDDSYLSPATVSAVASIQGQIIFDRAQGYTQMVAPDAVYKSQRTTNSTTSNVTWTFAVDGNSSYVVRLHFCAFEELSSVIGEGVDFNVYLMQAMGTRELKAKDYATLSSPTQAFYMDYVAVVPTAGENLTVSIGRAASSDSKKAILNGLEIMKLRAVDMTPASSSGKTSKRRATLPVPEEEEKESVGTPWSPFTPDGEGSFGSAVVTPRRMNMKLHIPLAEIMVATGDFDDANILGVGGFGNVYRGVLRDGTRVAVKRAKRASRQGFPEFQTEILVLSSIRHRHLVSLIGYCNERSEMILVYELMAHGTLRSHLYGSDAAAATPPPLSWKQRLEICIGAAKGLHYLHTGHSDNIIHRDVKSTNILLGDGFVAKVADFGLSRVGPSTGQTHVSTAVKGSFGYLDPEYFKTRQLTDRSDVYSFGVVLFEVLCARPAIDQSLPPDEINLAEWAMQWSRRGRFDKIVDPAVAGDASTNSLRKFAETAGRCLADYGEQRPSMGDVVWNLEYCLQLQESQPSTETALDLDDSGAHLPRDIVVARRVAPLAPDASADAAGDDMSWSETASFTATGNVFSQIMSRDDRSRAPRTSYLLGLMDQKGFDGDRSESRLYVGNLDFRVSESDIIKMFSPFGKIIAEDFLWHTRGPKRGEPRGYAFVQYTTKEEAQLAKEKMNGRLVCGRPVVVHLASEKCFVDSGNSHRAMKDKKLAGSSDTLLVLVILLKRSPTTCTDQATIATTTKALAALATLAMEASPSRSDSFSHGWLRRKARPAAAAASFERLVGGEGDAVDVDGDLGHSFNGSVVSFIDMDPAELFSMRWTSLTAAAEEEEDHDDDDFDFGMPCVAGAQCSSPLLVGAGRALSDGHHHHLLLPCEPGVVVARDRTASYADAPSPSPSSPLFHSALSTPASVITTASSRRAGAGSGKARAPLLATRRILLRYLRFLVPLCRKVRSLPLRVLSPRSAKGSLAAASSSASPARRSTSSSYASAAEYWCHGNADTAVRDAILYCKKSIGQDM

SEQ ID NO: 136844 - protein, 561 aa, Oryza sativa
  Clone ID: PAT_MRT4530_38383C.1.pep
MHDQAEICSLPIDIAFGRLQEWLVDRKRVPQDWRKRLAGIRARLAAAFASLPRDLDPSLLALGPDGTGGLAAPTIYRILLPPSPPSLATSTPPSSPSSRTKLGILKQRKYTASFLESNPESRNIFGRLTGSRPYQRKQMQKTQQQLAELDRREADIKRLAALSATRYAEACQELGLQGINVRQELIESAKTLPSTFTKILEVLNSDPVSIATEYYTTFVRECHTEDKENCKSVLQNLKQLQANPPSLHISVCNEVESSLGETSKALESNVTGAENIDSNISADDIDWDISLDDNGIDWDIGAVEQPVEESGNGFGSYEIIDANVELAGSENYNFGISDDPSVNKSSSSEPGICWDITDVNPEENASIQNAPESGQSQSLAEERSQLLEKEYRNNILDDLLEVRAFLTQRLGEMRNADTSSLQHQVQAVSPFVLQQYAPENLENMLAEVSSAISLLSNQKTLDLIMILNSKRFLDRLVSTLEDKKHHEVKLREGLGDLSVKRMELQNALSSSWPKQEAAITKTRELKKLCETTLSTVFDGRPVHIIGEINTLLSSSVSQLAG

SEQ ID NO: 136845 - protein, 113 aa, Oryza sativa
  Clone ID: PAT_MRT4530_38384C.1.pep
AGDASTNSLRKFAETAGRCLADYGEQRLSMGDVVWNLEYCLQLQESQPSTETALDLDDSGAHLPRDIVVARRVAPLAPDASADAAGDDMSWSETASFTATGNVFSQIMSRDGR

SEQ ID NO: 136846 - protein, 160 aa, Oryza sativa
  Clone ID: PAT_MRT4530_38385C.1.pep
MGTRELKAKDYATLSSPTQAFYMDYVAVVPTAGENLTVSIGRAASSDSKKAILNGLEIMKLRAVDMTPASSSGKTSKVVVVAVTAAVLGAAVLAGVALCVLLVRRRQRRATLPVPEEEEKESVGTPWSPFTPDGEGSFGSAVVTPRRMNMKLHIPLAEIM

SEQ ID NO: 136847 - protein, 104 aa, Oryza sativa
  unsure (1)..(104): unsure at all Xaa locations
  Clone ID: PAT_MRT4530_38386C.1.pep
AAAGIVSTESIKIHATQVRKRAISNRRRTRRRRYHRCVAHHACLTAAFDSTMIFKLIXGGCRGGARRRGRGRHGDGRDDGGCVQDPGCHGSNNNTARERKICVL

SEQ ID NO: 136848 - protein, 845 aa, Oryza sativa
  Clone ID: PAT_MRT4530_38387C.1.pep
MRRRGRMIPPALLLAAAVAAALATAVSGQGRPVTESGAQTAPTPSTFTPKDNFLIDCGSTSPVTTGGKVYKTDAQSNSLLSAKDAIKVATTDADVPSPLYLTARIFRDEAVYSFPLTVPGWHFVRLYLFPLKNSDFDLTTATFTVSTDTNVLLHSFTAENKPVMKEFLVNATENHLAVKFYPLKGSAAFINAIEVVNAPDELITDMAMGIAPVGEMTGLAEAAYQVVYRINVGGPAIAPDKDTLGRQWGVDAPYVQSKEAVKDVSVPVGNIKFPDGTSKLVAPAQVYASCAKMADAGVGSPSFNMSWKMEVDPAFGYLVRLFFADIVSKSMNDLYFNVFVNGRKAISGLDLSTVTGELSAAYYKDIVVNSSIATDKLSIQVGPMGEDTGRVDALLSGVEVLKMSNSVGSLDGEFGVDGKKADDGSGSRKAVAAVGFAMMFGAFAGLGAMAVKWYKRPQDWERRNSFSSWLLPIHTGQSFTTSKGGSSKSGYTFSSTLGLGRFFSFAEIQAATKNFEESAIIGVGGFGNVYIGEIDDGTKVAVKRGNPQSEQGINEFNTEIQMLSKLRHRHLVSLIGYCDENAEMILVYEYMHNGPFRDHIYGKDLPALTWKQRLEICIGAARGLHYLHTGTAQGIIHRDVKTTNILLDDNFVAKVSDFGLSKDGPGMNQLHVSTAVKGSFGYLDPEYFRCQQLTDKSDVYSFGVVLLETLCARPPIDPQLPREQVSLAEWGMQWKRKGLIEKIMDPKLAGTVNQESLKKFAEAAEKCLAEFGSDRISMGDVLWNLEYALQLQDANPPEGADKPADHDGAGAAPATSSGSGVSTVPDVSTTAAGEMFAQLADMKGR

SEQ ID NO: 136849 - protein, 186 aa, Oryza sativa
  Clone ID: PAT_MRT4530_38388C.1.pep
MEEAQFVESKDGTISVASAFAGHHEAVQDRDHKFLTKAVEEAYRGVDCGDGGPFGAVVVRNDEVVVSCHNMVLKHTDPTAHAEVTAIREACKKLGKIELSDCEIYASCEPCPMCFGAVHLSRIKRLVYGAKAEAAIAIGFDDFIADALRGTGFYQKANMEIKKADGNGALIAEQVFEKTKEKFQMY

SEQ ID NO: 136850 - protein, 86 aa, Oryza sativa
  Clone ID: PAT_MRT4530_38389C.1.pep
QGSAGSSVTGTVFGTSSIGWSFTFLLHALLSKGGFRRGLLYRLQCPSECARSSDSGRPAGWQNISPSFSTRTPSSLMFFCHLLSLK

SEQ ID NO: 136851 - protein, 339 aa, Oryza sativa
  unsure (1)..(339): unsure at all Xaa locations
  Clone ID: PAT_MRT4530_3838C.1.pep
GEQAEGEGARTGSTGVGPTRQPLGPRWTGSTRLAAAGAVGPMRQPHPRARAADARXPPGSRXGAPKGGLAGTVDGRXARPRPDGHRRRPPARRIGARERGGKGEANGAVHGSPRSTATTGTAAETQEGVGAARYDEDDGAPTVGGRNGGADEVDGDAAKPKKVTPSREEVRSDDGGEPKLGGDGGENMRRRERDSDGESEWRTSETEEEGTGVAXLGLGVREGGRGVGNXGAEVPAAIDCAGVVCGYDSGRFXGRVRGTIGGIDRGIRGVYFPLLYCARGRRETPSFASAAALGPGRPAGPARVGGCQLGPPRQRGCWPGPLVSGARAGGTRWAAGESR

SEQ ID NO: 136852 - protein, 723 aa, Oryza sativa
  Clone ID: PAT_MRT4530_38390C.1.pep
EGMEEEVNDHPIEEVRNTVPVTDDPSEPCLTFRVWVLGLSSCVFLAFVNEFFMYRTTQLSIGTVVVQIITLPIGRLMASTLPARRLRVGGWSFSLNPGPFSLKEHCLIIIFAGAGASGVYAMNIIAIVKVFYKRQISPYAAMLLAQTTQLLGYGWAGLFRKYLVDSAYMWWPSNLVQVTLFRAMHEEEKRNKGQLTRLQFFIMVMTCSFAYYIVPSYLFPAISTISVLCWLYRDSVTAQQIGSGASGLGVGSFGLDWNTVVGFLGNPLASPAFAIFNVMAGFALSTYVAVPILYWTDTYNAKRFPLVSSHVFNAAGGRYDTARILDPATFTLNLREYDAYGRINLSILFAINYGIGFAGLMDIWGLWRKATAEQANGGGKERQDVHTRIMKRNYKAVPQWWFHLMLAIVMALSLYTCEGFGRQLQLPYWGLLLACAIAFTFTLPIGVISATTNMQPGLNIITELIIGYLYPGKPLANVVFKTYGYISMTQALTFVSDFKLGHYMKIPPRSMFMVQLAGTVVASTVHFATAWWLLTTVRNICDVDSLPLGSPWTCPGEDVFYNASIIWGVVGPLRMFGRLGNYWQMNYFFLVGVLAPVPVWLLSRRYPRSALLRDINLPLVLAGASGLLPARSVNFVMWGLVGFVFNHVVYRRCRAWWMRHNYVLAAGLDAGVAFMGVLTFVSLGYFDIYGVQWWGGAADDHCPLASCPTAPGVFARGCPPVPS

SEQ ID NO: 136853 - protein, 386 aa, Oryza sativa
  Clone ID: PAT_MRT4530_38391C.1.pep
MAGGGAAASALSTPWRSLLQRALDGNAHLKHSTFFQLATVGGGGRPANRTVVFRGFQEQSDKIQINTDARSNKIGEIRNCSFGEICWYFTDTWEQFRISGFIDVIDGSNPEPVKLQLRERAWFGSSVKSRLQYLGPCPGLPIPDDDLIKDAHLDPSAGPVDAFCLLVLDPEKQSFDPAIVILYLGRLFELEKQSKLQICLWIYHGMLFSENANPSSHFLAGYELAELQLPVASERTNFHVQVFIFYKTREPFLKFPYKHLNLFRSTSTSLFRANFRGTVMCTRVPDLPKGSDKQRFGRSHDTNRSGFLNAHALEPRNRSTTSIRFPYRNVNAIPWMLSWPSRLVCCVNVNELLFHPNRDWTATSSSNHLRAACDISLLSGSPLQLR

SEQ ID NO: 136854 - protein, 109 aa, Oryza sativa
  Clone ID: PAT_MRT4530_38392C.1.pep
PFLDPGPSLLSPRFDFFASLGPPGFFPQGSAFSLVCPCFRLPPHTENWLPPGFRGAFTGPPPGVPGFPSGPGRVSPGRTGGFCLLDSALLRKPPLGKRPPLLGFSPLFN

SEQ ID NO: 136855 - protein, 73 aa, Oryza sativa
  Clone ID: PAT_MRT4530_38393C.1.pep
MLVNHSLSHVSFVLTPCRYAMTGQLTQKSDVYSFGVVLLELLTGREPVDHTMPRGQQSLVTWVSILCVNYYNI

SEQ ID NO: 136856 - protein, 281 aa, Oryza sativa
  unsure (1)..(281): unsure at all Xaa locations
  Clone ID: PAT_MRT4530_38394C.1.pep
GLGTPVVLVAASGGRGGYGIVYKGRMRCLEGQPEVAVKEMQKXWSSQGDKDDFYNELNTISEARHKNLVKLEGWCCHINAWNLCDFLCWYRQKHNITFFLVYELVRNGNLDDHLYGKKGTLQWPKRDIKPSNILLDEGLNAKLADFGLARITENAKGKLLIVAMGSIDQYIAPEYKIHGELELISSTDVYSFGLVLLEIACTRKDREQIWNDMYMNHAGVAAVADPNKLKGEFDKRQMERVIILGHWCSMKDPIKRPTMSDAMDVLQQYDYRNLPDFNSLR

SEQ ID NO: 136857 - protein, 83 aa, Oryza sativa
  Clone ID: PAT_MRT4530_38395C.1.pep
MAAHTDADRSTRCASDPSRSASSAAGRGGGGGRAIRAPPELAKKVATATATAAEGIGGRRRRSSARSMVWLRCGNSSSSCRCS

SEQ ID NO: 136858 - protein, 714 aa, Oryza sativa
  unsure (1)..(714): unsure at all Xaa locations
  Clone ID: PAT_MRT4530_38396C.1.pep
MEGGAFLARAAAMALELSSSSAEPAVGALRLLQLLGQQPIWVVAAADVPAGRRGCQTRCGNLDIPFPFGIGDQCAIHGGFGLDCKNDSGTYRTFIGPFEVTKISVPDAKAWMKMGISWQCYDPVTKQMNDSMVGQNFTNTPYRFSYEDNKIFVIGCNTMAYMRGVSVAYPHARMNQQXGSCSGAGCCXCGYLVVMEKAAFRYSTTYIPSINFWNDYNGTVPAVMDWVIRRETCEEAKRDMSSYACVSDNSDCHNSTNGHGYLCKCSKGFDGNPSIADGCKDINECLDDTTYPSSGICHNTMGGNDCSFXKDNIRWRMSVFQIRKNSTQKSSWEMPVVEAELQHATNKFDKNQILGHGGHGTVYKGLLKDNTELAVKICMARVEQHKKEFCKEMLILSQINHINIVKLLGCCLEVQVPMLVYEFIPNGTLCNLIHGNHGQNISPVTRLRIAHESAEALAYLHSYASPPIIHGDVKSSNILLDVNFMAKVSDFALDLIELLTRKNVFNLDAPENEKSLSMRFLSAMKENKLENILDDQISNNENMEFLEEVADLAKQCLAMCGEDRPSMKEVAEKLDRCGGGREDDNDDEGGAYGGNGKGEQAFVVLMVSSAAASASTSATDLNLAFPHHHGRALQSPEFTAFPSLESSNMCNPGGNMAVANGVGGRGSVAVGFHLGEFRMPPPPQQEQQQAQTVLGFSQDTHNAGAGDGSGVFGG

SEQ ID NO: 136859 - protein, 353 aa, Oryza sativa
  Clone ID: PAT_MRT4530_38397C.1.pep
MENLECTVGKDGLNFQCNLCDSDVVHSMAEILLRGLATASVDSTTGDIFKSPSSVAVGMKSELAEYLIQGSMTLVREAVDGGEDHSEQLIKASTMPTEFLSDLIDGFVASKRNLLSHVSGFLSSETRLNKIKDFIQKLEMENFWAPDVREATAGTILKSIDMKCIIHCPERFDTQDKLAEHRNLCRFRIVNCKNDGCLASFSANHIEKHDSVCPFKVLPCEQLCEQHVMRCEMDRHCASVCPMKLINCPFYQVGCESAFPQCVLDKHCSERLQIHLMYILELTTRHDAFVNDMNQRLHLLEKVSIKLSGALDNRTLTLTAKEQEAKIKKLEQDLKVQETKLKKLESEALQMLR

SEQ ID NO: 136860 - protein, 361 aa, Oryza sativa
  Clone ID: PAT_MRT4530_38398C.1.pep
MAYSTNQIMILQHAWMLVGEANSQLIISTVAHSWYQSNSIEVVLWWFWSRIAQTPTEYGFFGQAMACRTDEENDDDPRALEHLDPLSMQQLAESLANELFNQPQEQQEEQHGYHNPSLRVLPFVGDINKPEGHTPAAAAIRDSFFSLTNGSSSSLNFSALEQQQDSGPMTKFCSPLSEMKRGGRRATSSMQEHVIAERKRREKMHQQFTTLASIVPEITKTDKVSVLGSTIEYVHHLRERVKILQDIQSMGSTQPPISDARSRAGSGDDEDDDGNNNEVEIKVEANLQGTTVLLRVVCPEKKGVLIKLLTELEKLGLSTMNTNVVPFADSSLNITITAQIDNASCTTVELVKNLKSTLRNF

SEQ ID NO: 136861 - protein, 119 aa, Oryza sativa
  Clone ID: PAT_MRT4530_38399C.1.pep
PAVMDWVIRRETCEEAKRDMSSYACVSDNSDCHNSTNGHGYLCKCSKGFDGNPYIKDGCKDINECLDNTTYPCAGLCQNTMGGYDCSCHQGQHKVEDVCVPDQKNQKSSWEMPVVGMYV

SEQ ID NO: 136862 - protein, 716 aa, Oryza sativa
  Clone ID: PAT_MRT4530_3839C.1.pep
MAWRMLRRKDFHTGLVNLASRVDHGGAKNFSSGTFGKLADFVLSDTHTPIVKGAANCTAYKHCTIRNFHAGVYMLAWSRKREEVAGLKAPKKEKRVKRETRTQPPVEAPYVAPKQKIAIKSSPDKTVDIFDGMTLLDLSKRTGASIGALQDILTDLGEKVESEFDAISIDLAELVAMELGVNIRRMHTGEGTLEPRPAVVTIMGHVDHGKTSLLDSLRQTSVAAKEAGGITQHIGAFVVEMPSGASITFLDTPGHAAFSAMRARGAAVTDIVVLVVAADDGVMPQTLEAMSHAKAANVPIVVAVNKCDKSGADPERVRIQLGSEGLLLEDMGGDVQVVEISAVTKLGLDKLEEALLLQAEIMDLKARIDGPAQAFVVEARVDRGRGPLATAIVKAGTLVSGQHIVVGAEWGRIRSLRDTAGKITESAKPAMPVEIEGLRGLPMAGDDVVVVDSEERARMLSQGRKKKQEKDRLRKIDEDMTEEAEIGEETPERVEMPIIVKADVQGSVQAVTDALRSLNSPQVFVNIVHVGVGPISQHDIDLAQACRAYIVGFNIRTPPSAITLAATQANIKILLHKVIYHLLEEMGREIVEKAPGTPETQVSGEAEVLNIFELKGRSKSKGPDIKIAGCRITDGHLSKTGTMRLLRSGDVVFEGPCASLKREKQDAETVDKGNDCGLVIQDCNDFQVGDIVQCLEQVIRKPKFISTQSGAVRIEC

SEQ ID NO: 136863 - protein, 41 aa, Oryza sativa
  Clone ID: PAT_MRT4530_383C.1.pep
RIKAPLNPLKKYTFGKHIVARVEKLVPPGEKRVGLQPSTAA

SEQ ID NO: 136864 - protein, 1056 aa, Oryza sativa
  unsure (1)..(1056): unsure at all Xaa locations
  Clone ID: PAT_MRT4530_38400C.1.pep
MTMGVVSREVLPACERLCFLCPSLRTRSRHPVKRYKKLLSEIFPKSQDEEPNDRKIGKLCEYISRNPLRVPKITVYLEQKFYKELRVEHFGSVKVVMAIYRKVICSCQEQLCGGGREDDNDDEEGGAYGGNGKGEQAFVVLMVSSAAASASTSATVSSSVPVGLAAKNLKSMHKGAQDLNLAFPHHHGRALQSPEFTAFPSLESSNMCNPGGNMAVANGVGGRGSVGMPAEYAAVGFHLGEFRMPPPPQQEQQQAQTVLGFSKDTHNAGAGDGSGVFGGPLFANSLLNIVEALLEQNRQDDLRTIACRTLFYFVNNQVDSTYMFNLESQIPKLCQLAQEMGEKEKISIVHAAGLQALSSMVWFMGEHSHISAELDNVVSAVLENYESPYANSDNDAAIEDRRTQWVSEVLKAEDHXTFREESESPNFWSGICLHNLARISREATTVRRVLEAIFRYFDNNNLWSPSKGLAFXHLEHKNVLKQTDKILDIIEVTTRLAEHSKAQSSTALMAAISDMVRHLSKNMQLLVSDVGPGDGMVMNDRYGKATDECLVQLSRKVGDAGPILDALAVVLENISSTTPVARSTIAATYRTAQIIASLPNLLYQSKAFPEALFHQLLLAMVYPDCSSQTSKIGIKRTLSRTTSVFSSSAALFGKLKRDVFSFRENSRLDGTNLIPISENSDQINGNDPKLFKSQTIQRMYSAKDSFVTSSSEISNLSGTTQETALSPENVPRNYEAISHTYCLMLLFSEDKKSCLEVLVGSFQLAFSLQSISLQAGFLPPSRRRSLFTMATSMLVFFSKAFGIPSLIPLVKDLLTTSIVDPFLRLVEDCKLQSKQASVSLILDSLKDLSEAELSTIRKQLLEEFSADDACPLGSHSNESTSQSPAYNAKLHQKSLEVIPVGFIFEDDTLVEPANSLAEPQLQQPLDNGLIDVNQLLESVVETSRHVGRLSVSTNLDLPFKEVANRCEALLIGKQQKLSVCMSVHQKQVSDLQKDHRQLEMSTVKKMKMVQNTICGMGQLDYVEWVQPMHSLLLTQDTVQATTRSQPWGMQQNEPKY

SEQ ID NO: 136865 - protein, 359 aa, Oryza sativa
  Clone ID: PAT_MRT4530_38401C.1.pep
MAGNEMQRQGLEKRMSNMQDHLFSIGDQLLKSFTSLHQLALPCGVESSVSTHPDVTSLTSALAELATKMEVILPNHAAKVSKEISNGIHTGVCHVLACVKLTLPDTDLKEILSKGAADASCKDVMFDVVDLGETALLIFEECVDPEDVQQGERPNVAMADWSLSAEMPTGDVVMDVVVPEGIDTARDSLSLGVVGLLQENSDLKDANTERDRQVVFWRTKFEVAELERSVVIVKKDQAIETLRGCEVWLNSYLKSCCSAMMEICRQLKIERAEPEETTVGYLSWMRGACAQLEGVGQRIDNCLKEECCRASRYAGGAAPPSRGSRAASDRRAALAGGRRKAAAGRQAKDGGLFCFFENL

SEQ ID NO: 136866 - protein, 506 aa, Oryza sativa
  Clone ID: PAT_MRT4530_38402C.1.pep
MAGTRQTTSVPMDNAAVVDAKPLRTLTPMFPAALGLHTFTAKENSSSIVCITPFGPYAGGTEQAMPASIPPMFASPAAPADPNQRQPYAVHLNGAAPANGTANNTGVIPDLQIAVAGTVESAKRKRGRPKRVQDSSVPSAHLVPSAPGGNITAVQTPPSATTDESGKKKRGRPKRVQDVPVLSTPSAPQTPSAVTLPEDGKRKRGRPKRVPDGALIPLSHSDDPRESVDNVLMMFDALRRRLMQLDEVKQGAKQQHNLKAGSIMMSAELRANKNKRIGEVPGVEVGDMFYFRIEMCLVGLNSQSMSGIDYMSAKFGNEEDPVAISIVSAGVYENTEDDPDVLVYTGQGMSGKDDQKLERGNLALERSLHRGEVIDRNSIIGEDDYIFETPSSEQNLRWNYAPELLGEPSLSDSILYDHGDEGYPHIAFFAIKHIPPMTELTYDYGQSQDPAALYLGGKLTWHMGAGRTFLGAMNFARGPLAVFCLGGKGPPCKICKGGKGPRCKKN

SEQ ID NO: 136867 - protein, 109 aa, Oryza sativa
  unsure (1)..(109): unsure at all Xaa locations
  Clone ID: PAT_MRT4530_38403C.1.pep
LEEESEADLPQRGTGDGSGGWHGARGTTGGGGGRLGARGTXDSGRPDWRERRVRGWRRLTRRDEARPAXRRRPRCKEKLPVGVARSSMHKGRPVGAPVQWSHMSAEVER

SEQ ID NO: 136868 - protein, 812 aa, Oryza sativa
  Clone ID: PAT_MRT4530_38404C.1.pep
MAGTRQTTSVPMDNAAVVDAKPLRTLTPMFPAALGLHTFTAKENSSSIVCITPFGPYAGGTEQAMPASIPPMFASPAAPADPNQRQPYAVHLNGAAPANGTANNTGVIPDLQIAVAGTVESAKRKRGRPKRVQDSSVPSAHLVPSAPGGNITAVQTPPSATTDESGKKKRGRPKRVQDVPVLSTPSAPQVDSTVFQTPASAVNESVTRKRGRPRRVQDGADTSAPPIQSKYNEPVLQTPSAVTLPEDGKRKRGRPKRVPDGALIPLSHSGVSIDDDSGEIITGKRGRPRKIDVNLLNLPSLFSDDPRESVDNVLMMFDALRRRLMQLDEVKQGAKQQHNLKAGSIMMSAELRANKNKRIGEVPGVEVGDMFYFRIEMCLVGLNSQSMSGIDYMSAKFGNEEDPVAISIVSAGVYENTEDDPDVLVYTGQGMSGKDDQKLERGNLALERSLHRGNQIRVVRSVRDLTCPTGKIYIYDGLYKIREAWVEKGKTGFNVFKHKLLREPGQPDGIAVWKKTEKWRENPSSRDHVILRDISYGAESKPVCLVNEVDDEKGPSHFNYTTKLNYRNSLSSMRKMQGCNCASVCLPGDNNCSCTHRNAGDLPYSASGILVSRMPMLYECNDSCTCSHNCRNRVVQKGSQIHFEVFKTGDRGWGLRSWDPIRAGTFICEYAGEVIDRNSIIGEDDYIFETPSEQNLRWNYAPELLGEPSLSDSSETPKQLPIIISAKRTGNIARFMNHSCSPNVFWQPVLYDHGDEGYPHIAFFAIKHIPPMTELTYDYGQSQGNVQLGINSGCRKSKNCLCWSRKCRGSFG

SEQ ID NO: 136869 - protein, 907 aa, Oryza sativa
  Clone ID: PAT_MRT4530_38405C.1.pep
MEDTGISVEELLEYQQIVSKTFNSEDEGIHFYNKYAWDKGFSIRKSYAERRNAAKEAVVDEVCLTYLSSGYDIGVFDPEKPWHVQMLEKEFIEWNVPQHLRSTNDLVVGGVLIAYTIDKEDDKSEEGGSANLINGKMSFLVEDKPHDILCSFLLVDSLATAESYQSCSLKVNHKRVAKAYFIGYNRSLCKYFVCYERLNRFSFKEDRIDHQQSSSEKKQQPKQRWRKNISEIFEALEALHVAGYGNNYMNSTITFAYGQGNDQDKLLKIVGGCPLPCDDTRTKKSQRVKFCTFLRKIGAENTLGYQAFKVTVQYGDDVEVIMKHPYILASDKERVAAIEPMNERLYDLAESKRVDLNTSLKQNFRDWVWQSMLKERHDYVPPEDFITRVLPPEAFADSRDIPEYEVAFIRVPLYELRDPVDKGLMRKRIEEQRRREAERRRQLEKDMRRWEEEEEEEEAWPWEDDDDDFLRMSQQLSVICSESRGKRGDWPNMKATRRGRRRTHALTPDNEEEEENLSELELAVENTRRRIHHCNCNHIPRHTLFTSHADVEELFLPFKLEEPYLCFASRCQKSAPSYAHFFPDFNRSPRITSDWLRPSTFEGDLQYILFFHKLMDTVECGNTEDTVLAKAITIATQSYQKMLYFQIEAAVQDCLELLKEMERMNDRYDFYHFIASEILFNNKSYEDVLKLIRDGHVELHYTLKEFSTPHADHHMDDLVHRLVGRTRAYMPTDAQRECGMFKDWVCQQVDKEYGSLGYLYMHFLDNKMRAWFAPFPEVLKDLKYSETHEWVSVEGDYATIGISDHAQDHLGYVASVELPEVGQSVSQGNKFGVVVSVKGTTRGINSPVSGEVVEVNDQLSDLPGLVNARPYETGWIIVVKISDSGELNSLMNDEDYSKFCKGEKDKY

SEQ ID NO: 136870 - protein, 33 aa, Oryza sativa
  Clone ID: PAT_MRT4530_38406C.1.pep
TNSSLLERHSRCRVDLTRRSVSEHTSSYWVSID

SEQ ID NO: 136871 - protein, 112 aa, Oryza sativa
  Clone ID: PAT_MRT4530_38407C.1.pep
MRITTRLALLHVQLGIETKGNTKHAFPSKETRDPTKTDSDSDLARSDRLHTCGQTGPTSQSDRPHTCGLTGPEPTTCFSLSIAPRHLVPGAYTVSALDLEEKKGRRKGERSV

SEQ ID NO: 136872 - protein, 109 aa, Oryza sativa
  Clone ID: PAT_MRT4530_38408C.1.pep
FLFHTCSTSIHNHNIYSDSSCALGIVQEIKVIIFPFAVRFIYVLALADGELIECRQLSECPSQVKRETYNFPLSRLHQAKTPQRDAKSPGKKERRNKLEQIGRHALAAD

SEQ ID NO: 136873 - protein, 55 aa, Oryza sativa
  Clone ID: PAT_MRT4530_38409C.1.pep
STLLYETNLRYYIPQFHHNHQLPIYYLHSSLDRKPLGSILFYIFIFFHPYTICVT

SEQ ID NO: 136874 - protein, 294 aa, Oryza sativa
  Clone ID: PAT_MRT4530_3840C.1.pep
MVREKTFSGSIGENPYLHLQDFELKRPPTKVNSNEPLDKSMLKETVKRLTIIMSNKWLREGELLSESIQIRCPSSTIMCHIGGNSVRALYNPSVGANIMSATFAFDCLGDRSLEPTVRTFRISTNSTTEGLGIISGVPTRHNSVEVILDFHVFEIYDFDILIGHPIEKLLDVPETGVLNLKIGRIATSVPMLQSTNSLMESLPVPEPIEGVMAISPFETLESIFDESIEEFNEGEDETGETMDLPKTDLPSRAPIELKPLPSSLSYAFLNSDAESLVIISDKLLRGRWPDLSPF

SEQ ID NO: 136875 - protein, 34 aa, Oryza sativa
  Clone ID: PAT_MRT4530_38410C.1.pep
PFPACLLSFHVVYLLIAELKQGPSYILTTNMIRS

SEQ ID NO: 136876 - protein, 61 aa, Oryza sativa
  Clone ID: PAT_MRT4530_38411C.1.pep
KNSLLSWFCFKYIFLKKNEVMPLAATGIDLEIIILSEVNQGERKKYTTYMWNLIKVIQKNL

SEQ ID NO: 136877 - protein, 90 aa, Oryza sativa
  Clone ID: PAT_MRT4530_38412C.1.pep
RGGVVPKGGGVVTLFWKKKWSIGQFFFSVFRLPRFVILKFAEKTCEIGSFFRVRSLEFEVSHCSLAGLCVLSMFYIGHGFYRYLFICVSA

SEQ ID NO: 136878 - protein, 183 aa, Oryza sativa
  unsure (1)..(183): unsure at all Xaa locations
  Clone ID: PAT_MRT4530_38413C.1.pep
DNSYRSLLVSCSRACHCSDECTNKPFRRQKKIEIVKWNTSXTQYCGWGSRALEAIEKDDFVIEFVGEVLEDETCEERLEDMRRRGDKNFYMCKVKKDFVIDATFKGNDCRFFNHSCEPNCQLQKWQVNGKTRLGVFASKAIEVGEPLTYDYRFEQHYGPEIECFCGAQNCQGNMSTPYILNFE

SEQ ID NO: 136879 - protein, 81 aa, Oryza sativa
  Clone ID: PAT_MRT4530_38414C.1.pep
GQKETWNPFITHEHCLPFFHYAREKKYPLGYSFTSIKILGNIYQLLPWGWPMRSLIRFHGSFTSGNILDSAEIHLGLGLGL

SEQ ID NO: 136880 - protein, 61 aa, Oryza sativa
  Clone ID: PAT_MRT4530_38415C.1.pep
MPVMELGILLIPLTLVFVPCRRIVLFLKRLQEFHRSITHPSFTSADMLSRFSSFNSMALML

SEQ ID NO: 136881 - protein, 187 aa, Oryza sativa
  unsure (1)..(187): unsure at all Xaa locations
  Clone ID: PAT_MRT4530_38416C.1.pep
MEKFFPTSLVLRVPPPLFLRCRILPWFCSPARTGVRDEQXCLRNSVRLRTCTGRRAIKFLGSTSSATAPVLRRQRCIFLCFCFTIASTGENKGDNINRGNTNSSTSSAPLLIIYMFTMLXHRISILCEYQRCLYLFYLKHLITRSFLIVYAIFIVIIFWIKIYRIMTKFSTIYSNKNTSSSSGFSFE

SEQ ID NO: 136882 - protein, 72 aa, Oryza sativa
  unsure (1)..(72): unsure at all Xaa locations
  Clone ID: PAT_MRT4530_38417C.1.pep
LGLXPFGWGRVNQVFCFPPPPLLIFVVSGFTPSRQGGVFAPGQGLGPPPPRRRGFLVIFRGDAPRLVGHFLP

SEQ ID NO: 136883 - protein, 115 aa, Oryza sativa
  unsure (1)..(115): unsure at all Xaa locations
  Clone ID: PAT_MRT4530_38418C.1.pep
VFSRGVGAGVLAATASLWALVPQARAXPKLWGVPMVXPWLPSASIAINVFLLGSIDXXSFMRFGIWTAARAXYYLFVGLHASYDTAKALRRRRRRRQGGGRRRQDQRAAHVTLSL

SEQ ID NO: 136884 - protein, 60 aa, Oryza sativa
  Clone ID: PAT_MRT4530_38419C.1.pep
GLISWPSTTLQRYNRERQKSQPQQRPTFTMKIEFFSKRENKGQIQRLHAPRLWKIESIPV

SEQ ID NO: 136885 - protein, 301 aa, Oryza sativa
  unsure (1)..(301): unsure at all Xaa locations
  Clone ID: PAT_MRT4530_3841C.1.pep
GRAPRGSHSARPRAAKPAQPAGGGARAPMVAGGGHRHGEAAAERGEGKGEKKRRSTAHPRSTATTKKAAGAEEGGGAARVDGVDGVPAVGERNGGVDEVGKDAAKPKEAAPRWEMVXGDDGGGPELGGDGGERERRRELDSGGERERRVAETDGGGWRLGGGPRRRHRYAGDPRGRRASEAQGGGGARRPTAQRGGLRRRRGREQRGGPRRWRDRERRRGPRQGAARRPAAAARQGVSMRFTTVRWSQVAARGPGGAELREGRGGGEARGGGSGAATTGSGAQHRPRGEWRLDPASPLPDL

SEQ ID NO: 136886 - protein, 51 aa, Oryza sativa
  Clone ID: PAT_MRT4530_38420C.1.pep
MENFQAKDKFETSTLEDANSTNEHESLSFKVPQDTCSHKESPDMMSQWLSL

SEQ ID NO: 136887 - protein, 78 aa, Oryza sativa
  unsure (1)..(78): unsure at all Xaa locations
  Clone ID: PAT_MRT4530_38421C.1.pep
MAAVAGGAARSLMQAEQDVQMMLVADVXSGTKNCDFQMERYVYKRRSDGIYIINLGKTWXEKLQLAARVIVAIENPQD

SEQ ID NO: 136888 - protein, 303 aa, Oryza sativa
  unsure (1)..(303): unsure at all Xaa locations
  Clone ID: PAT_MRT4530_38422C.1.pep
QRLRALVHGGSGPRTGEKGRTTSRTRGTHAXRPRGGHAAAELTAPIYPWVDRTAAESERPARASGSSRPGAMARRRRGTGGDRWTAARHWRTAXGEERGDGDRRQGATEGGRQAADGVRDDRRAAGMRLRRRISTGEGWTRWTSATQTRXRRRHGAAASLAAARSGRSSGSGGGGWVHGAGAMESSGEAGEKKKSEEEDAGMDFIGAERSGTAGGGPISPADVGEVEVEREAGFEFRIPAISGAGAGEREGEWVREVRRMRGRGRRGPEEAGMWARRRLRAARRGREVGDGPDRWAPPVGDPG

SEQ ID NO: 136889 - protein, 44 aa, Oryza sativa
  Clone ID: PAT_MRT4530_38423C.1.pep
SDILARALTIQRCYLNLLAVDGSKLRPWSGCHIDDGQSVTQADR

SEQ ID NO: 136890 - protein, 302 aa, Oryza sativa
  Clone ID: PAT_MRT4530_38424C.1.pep
MAVVSGGKRALLVGVSYKGDTSRELTGAAEDVKNMNSLLKKFLFPEESIHMLTEELGAKDPLKAPTRENIMKEMRWLVEGCRAGDSLVFHFSGHGRQRKDDNGDEVDGRDEELCPVDYKVSGNILDDDINDAIVKPLTQGVKLHAIIDTCHSGTMLDLPYLCRFNRMGLCSRYKWVGQTRWRLSPKKEWAMVPVGGHAISISGCKDYQNSLEPDNTAGGGVMTWSFLEAVGSRRTMTYGELLDSMRAKVHHRLQQSSSGKCLVTGCLGSLAAKCLPCCFLSVQEPQLCSSKEFNVYEEQFIL

SEQ ID NO: 136891 - protein, 760 aa, Oryza sativa
  Clone ID: PAT_MRT4530_38427C.1.pep
MATRGGGGGGGGKEAKGKVMGPLFPRLHVNDAAKGGGPRAPPRNKMALYEQFTVPSHRFSGGGGGGGVGGSPAHSTSAASQSQSQSQVYGRDSSLFQPFNVPSNRPGHSTEKINSDKINKKISGSRKELGMLSSQTKGMDIYASRSTAEAPQRRAENTIKSSSGKRLADDDEFMVPSVFNSRFPQYSTQENAGVQDQSTPLVAANPHKSPSTVSKSSTKCYNTVSKKLERIHVSDVKSRTPLKDKEMEAAQTSKNVEVEKSSSFHASKDMFESRHAKVYPKMDKTGIINDSDEPHGGNSGHQATSRNGGSMKFQNPPMRRNEISSNPSSENTDRHYNLPQGGIEETGTKRKRLLEQHDAEKSDDVSRLLEQHDAENIDDVSDSSVECITGWEISPDKIVGAIGTKHFWKARRAIMNQQRVFAVQVFELHKLVKVQKLIAASPHVLIESDPCLGNALLGSKNKLVEENLKAQPLLVATIDDVEPSLQQPEVSKENTEDSPPSPHDTGLGSGQRDQAATNGVSKSNRRATPVASDNKQNNWGVQLQPPQNQWLVPVMSPLEGLVYKPYSGPCPPAGSILAPFYANCTPLSLPSTAGDFMNSAYGVPMPHQPQHMGAPGPPSMPMNYFPPFSIPVMNPTAPAPVVEQGRHPSMPQPYGNFEQQSWISCNMSHPSGIWRFHASRDSEAQASSASSPFDRFQCSGSGPVSAFPTVSAQNNQPQPSYSSRDNQTNVIKVVPHNSRTASESAARIFRSIQMERQRDD

SEQ ID NO: 136892 - protein, 262 aa, Oryza sativa
  Clone ID: PAT_MRT4530_38428C.1.pep
MGYVEDDKDYAEEDSAHSQPAAFYTNKKMVYAATAQLPRLMRPSQSRDGKHGIHDWKEGQFSCTILCGLVPDCGSVIARFDGSESRGLRIILTLTTWSHPTLVGIKLVIPDRGSMIARCDGSESGRLRIVLTLTTSSHPTLELIVIFGIKGLSTIPKHEKDDNIRVVSGSLSVVSRLLGIIIWGYILRIRGIGDEDKIEAESKMEIIPETEQESAKVRIGYDQDRQSSSRRRDKFGQKSAAKTYGILEFVRDESRVRHGHIL

SEQ ID NO: 136893 - protein, 206 aa, Oryza sativa
  unsure (1)..(206): unsure at all Xaa locations
  Clone ID: PAT_MRT4530_38429C.1.pep
MIVSSQKFSRIIDGSLMNALRAKCFPGPRGPSGWACPWRPGQSRRPSADGGGHAASWWRTTTMTAAGRKKREEEEEERTARWPAARCSPPTAAGGSVRGQARDARRHWIRAEDDRRHRIRAGDSPAEPVARHCRSPSPSXSPHPSPSTSHSRRGEGGRLLCFVAVTSQVWHPLPHGGGGRRTGRRWWRRWKRGGAAWLTAVYGRAR

SEQ ID NO: 136894 - protein, 412 aa, Oryza sativa
  Clone ID: PAT_MRT4530_3842C.1.pep
MEQPTIQNLSAPRVDLFEPSCSSQPILSDGYEISPGFIASEAIPEVEIIHEEPLHVESESDSTAESSSQSQEPEEKEIHPPENPFNSRRIFLMIVGTPRIIPTTRDHRPRCMMSIFSDMIEDIMEVFMDDFSVYGKTFDQCLENLDMVLQRCQEKDLVLNWEKCHFMVREGIVIGHQISERGVEVDRAKIKVIQQLPLPVNFKGVRGFLGHGGFYRRFIKDFSKIARPLTTLLAKDVPFDFDDESVLGQTKDRKHHAIAYASKTLTGAQLNYATTEKELLAIVFAIDKFRSYLVGAKVIVYTDHAALKYLLTKKDAKSWLIRWILLLQEFDIEIKDKKGVENSVADHLSRMQITNMQELPINDYLRDDMLLKVTYSDPWYATIVSFMVAGHVPPGENKKRLIYESHRHLWVR

SEQ ID NO: 136895 - protein, 164 aa, Oryza sativa
  unsure (1)..(164): unsure at all Xaa locations
  Clone ID: PAT_MRT4530_38430C.1.pep
MKFRWEHFSGPRGPSGWACPCRPGQSRRPSADGGGHAESWWRTTMMTAAGRKKREEEEEERTARWPAARCSPPTAAGGSVRGQARDARRHWIRAEDDRRHRIRAGDSPAEPVARHRRSASPSPVXHPSPSTSHSRRGEGGRLLCFVAVTSQVWYPLPHGGVREG

SEQ ID NO: 136896 - protein, 146 aa, Oryza sativa
  Clone ID: PAT_MRT4530_38431C.1.pep
PNALLGRRTGAARRGLGFCAAAARPAPPCDADLTSNGGARRIPAPTAARRRPCSSRPAAARPAPRLPSPFWLRPASTADCQSLMCVDLDRRTELEETDEQDNGNGGSFENALEIVEKGRIRIQEKGSDFAAWLELEEHKPKSCLSA

SEQ ID NO: 136897 - protein, 146 aa, Oryza sativa
  Clone ID: PAT_MRT4530_38432C.1.pep
MADSLGSVRHIAELALKIRQAVETVRQNKQECVQIRRRVVRVSSILSQLEDTVIIRSNPAMAAALEELDSTLRHAHTLIAACQERNIVCLFCAATALSKKLRRVQDDISDQMMEGMLATSVHVTIVLARIQDDVDYTRRPPRLIMD

SEQ ID NO: 136898 - protein, 139 aa, Oryza sativa
  Clone ID: PAT_MRT4530_38433C.1.pep
MAATVRLLESRDCFKIGQTDWHARISSRFGPALKLSRSPRPVHRRSCRLPNVREEGHSYSVRIPADSANPSYNLQEPALHCHGPNIKEDYRVFFQHVCPVGNGGFVLEHEGKVIRYYASGATVSWDESPGGSGGGGYEE

SEQ ID NO: 136899 - protein, 376 aa, Oryza sativa
  Clone ID: PAT_MRT4530_38434C.1.pep
MAAAAEEPEPKPEIETPPPAREPPTEPPAAAPAPAAAASDRPLQPWEQHAAVINLPRYDYRASGSLLLRSHSGFLITCPIKREKSATKEAISILENSIGHANSYSSEKSEPSDTEVSAKKRKICSETPDIENSGDAVTYEKGDASETTGSVEKDSVSPHSKTSKNVDDTSNLSLVKLSRSGLLFFSFPSGGLRVVQMLTQMFHSLHSGKLKSPQWCHRIFPIQETCVLSEAELHTTVSKLFLDFVKSKEDQDEPIKFAVGYNRRGIDETEMKGQKNGNEGSKQQTLMDRDQCFKVVAGAVKSVAENSIVDLRSPEHVYFWMQQMSVAVLVEMLPISGVSLGSSVAGVSVLPSELISTKPRLCVKALVPDAKAAKKK

SEQ ID NO: 136900 - protein, 67 aa, Oryza sativa
  Clone ID: PAT_MRT4530_38435C.1.pep
HRTSCRCFLLIQLVQCLAPVHPCATAPVPYSTSSVLSAACQPAMRCATDVRHASMWASSIMHLAVFY

SEQ ID NO: 136901 - protein, 119 aa, Oryza sativa
  unsure (1)..(119): unsure at all Xaa locations
  Clone ID: PAT_MRT4530_38436C.1.pep
MKPSSKKSSSSAAAATGTTGSXEIERIDQLFYTYADSXSGMIDPEXIQTLCSHLEXPXTDVRILXLAWXMGCEKQRYXSXXXMAVRLXLCXXDXXHKLKKXFPQLVQETPISISTCLSF

SEQ ID NO: 136902 - protein, 198 aa, Oryza sativa
  Clone ID: PAT_MRT4530_38437C.1.pep
LDTFPYAGTTTTCESLYMGVPCVTMAGSVHAHNVGVSLLTKVGLGRLVAKSENEYVSLALDLAADVTALQELRMSLRGLMAKSPVCDGENFTRGLESAYRNMWRRYCDGDAPALRRLDLLQEEPCSNNNKQDFDDNQVAKLADLKAQRVDAAVDGDKQSQLTAHAAVVGEVQQAPIMVNGVSSPVSSGKVEANGHISR

SEQ ID NO: 136903 - protein, 246 aa, Oryza sativa
  unsure (1)..(246): unsure at all Xaa locations
  Clone ID: PAT_MRT4530_38438C.1.pep
VKKPGEKKPGRKNQVCPIKKPERKKKSDQKKKEAKKTQKKRTESNPEKRAKKQNKPDGKNQVCPIKKXKKEKENKDRKVHKRKKKSRTKKKKIKKNNNNKLAKKTVDPTEKKSDSYKRKKKVVTKKKXRSESFKNKKKSDSYKGKKHLKKFIRFPKKMVKKWFVKNKKXSYKIKNAREKKMERAKQKKSKKELSKKTSKKTCEKTRKKNTREKKSKKREKNMVFFISKKSKKKHGRKKLLERNVPF

SEQ ID NO: 136904 - protein, 580 aa, Oryza sativa
  Clone ID: PAT_MRT4530_38439C.1.pep
MDLDKSTSTNASLKKLQDDGALPGRGTMERETGGTEPEPVLSRMVAVEDYILCSFLPPPSEFLLLVLNFYGLSLLHLNPNSIAFLSIFSCLCEAYIGVEPFVDLFRFYYELRWMEPKKVSGCVGFRLQDGLKSRFIPFQCPSSRSKWRARWFYLQIENSDPVFVVPEEQPDKISEWTAKPALTPSFQSFIDIIDDLRIRGLSGYEVATDFISRRIQPLQARAHPAFDYSGPEDTTWVSHRGIFLVFQISFFMCMFLLTYRVLVLDPTGLNSETVECCVSQVMISGPTTASNAPVPLCEKGTAEREAAINALPLTDVIGPLADHQTATSLKEGVAKEASDIAAAAATTSGSNVPKKGRKFSSVLGNRRKAETVGKRLLRRAARAKAAQDGSGATSSVSPMAASTDVVVTTRDREATPSGPAGDLVPARGPPVDALTWRELQAEMERILQGLEHRMSEFENNLPEIRGSLRVSYTTLHQLAGECGVTTTIPATLDEFSLTSSLVELVVAMDEIPSKHAARIGEDTSNGIYTGACHVLACVRLAYPDLDLQRILDQGAANDARKDMMGEVDDLGESILHLFEE

SEQ ID NO: 136905 - protein, 165 aa, Oryza sativa
  unsure (1)..(165): unsure at all Xaa locations
  Clone ID: PAT_MRT4530_3843C.1.pep
SKACTRCGEIGHVASMCLTLCTHXEEDHPPGECPTRKVTCFLCEGTNHVPKDCQLSVLLTKTAEIQRTTLRLSHQLVSSNSNIDDIIHSTNAPPSSAINHSNNTFSTNHSLHRQPQQRIVVDGRSCVSPRPTPGRAKGNQPPEGDTKQKTVIRFNPQSEGSFSCE

SEQ ID NO: 136906 - protein, 58 aa, Oryza sativa
  Clone ID: PAT_MRT4530_38440C.1.pep
LEDPQSFNLFYFPLQTFEIGHLLLQCRHINPEFVELLRTRWIPEPRIEPCSDTFVRIR

SEQ ID NO: 136907 - protein, 86 aa, Oryza sativa
  Clone ID: PAT_MRT4530_38441C.1.pep
TFASHLAKNVPGANLKGGVPPYFCSRSLWNLGSHKFLNPLVVPPKNFVSKIVQRGWAICIISPFGKPFKLFFVTWGLPQSIITMFF

SEQ ID NO: 136908 - protein, 69 aa, Oryza sativa
  Clone ID: PAT_MRT4530_38442C.1.pep
SLRKKATIYFHGPKFQPGITGYRVLNSKIWTLTFIGFFILKKLDLNLYSIKTHPHRLPGWKGTSPVGFW

SEQ ID NO: 136909 - protein, 93 aa, Oryza sativa
  Clone ID: PAT_MRT4530_38443C.1.pep
IEIQYELNSDRDPNRSPTGLGGPSDESYIFVRGVTGGGIASPWEYGEENAQGGEGRAGAIDYFLYIDARYYARVPSTSQRLLPLHSALSGNDL

SEQ ID NO: 136910 - protein, 188 aa, Oryza sativa
  unsure (1)..(188): unsure at all Xaa locations
  Clone ID: PAT_MRT4530_38444C.1.pep
IRVLNIKAQVPVTLNVAAANYTQRHGLFLVALGKYALTDHVLSNSFHFDCVDWIQMDCVVLAXLFSIISTNLLQDVLTVDTTARIVWQEHEHQFLGNCEQHALNLKSEFHMLQQGDLTVSKYCRKYEGPCRGDLGEPVRARTLVLNTLNGLSNKFIHLRYLIPMQHGSRQLCESKVRDLWGEINVKKD

SEQ ID NO: 136911 - protein, 55 aa, Oryza sativa
  Clone ID: PAT_MRT4530_38445C.1.pep
RSVRIAAIHVKNTFVKFDLHSVYQLIYIVGWLYGLPSVCVLFSMILNRLWLFVCL

SEQ ID NO: 136912 - protein, 458 aa, Oryza sativa
  Clone ID: PAT_MRT4530_38446C.1.pep
MAYQKGNVKQGKLPDGRVIAVKQLSQSSHQGTNQFVTEVATISAVQHRNLVRLHGCCIDSKTPLLVYEYLENGSLDRAIFGQNSFNLDWATRFEIILGIARGLTYLHEESSVRIVHRDIKASNILLDIDLTPKISDFGLAKLYDENQTHVSTGIAGTIGYLAPEYAMRGRLTEKADVFAFGVVWGLYEKDQALRIVEPSLKDFDKDEVFRVICVALLCTQGSPHQRPPMSKVVAMLTGDVDVVKKLVFVLLPDDAGGRVNGEDVLKEVGGDDAEQLREDDAVHLDPINAVEVEGVGEDVIRQRVLAEGNQEQAMPLSVVGGGNVERDGDLGLDVEDADCLGMEGSYAVGESRRGEEGGEGWRMSRRLGKISGGHRGLEYGDRRGRGAGGGGQCSRRQEEPTEDGGESHGAPSEARVAVESETVFVVVGTISRPGGIVMVARTASATASAVELIAAKVD

SEQ ID NO: 136913 - protein, 46 aa, Oryza sativa
  unsure (1)..(46): unsure at all Xaa locations
  Clone ID: PAT_MRT4530_38447C.1.pep
LHLLRYXNKVLIKKFXKNTRFTSEPELKIPQFISCKGDTTVTLHQR

SEQ ID NO: 136914 - protein, 315 aa, Oryza sativa
  Clone ID: PAT_MRT4530_38448C.1.pep
MGFAKTTTETDIKLFLMGPCGASKQNNSKRGGSRTVARAEASSNDSSQEARRLFGACHVRESANPHARVPMYMAAAAAGASTPFNFCRHGSHAEYDAVFSGSWMARRPSAAPHGGGASGSGSGSGYGAASYVAPTFGAAFRQQHLDLLDYLSDDQGVPAPPPAAVPSASYVTPAPAMAPAEPVVPDAVAAAGGYPRSVAAAAAAVAGEGRDRTTTDKIAFRTRSDDEILDDGYKWRKYGKKSVKNSPNPRNYYRCSTEGCNVKKRVERDKNDPRYVVTMYEGIHNHVCPGTVYYAAQDAASGRFFVAGISHPDLN

SEQ ID NO: 136915 - protein, 66 aa, Oryza sativa
  Clone ID: PAT_MRT4530_38449C.1.pep
PTQGFFRFKGKKAPPTYRGRQALQNMAMGGRRPGTIRDSAHGHFMGFDGTYREKAWGGKGGAIGLV

SEQ ID NO: 136916 - protein, 379 aa, Oryza sativa
  Clone ID: PAT_MRT4530_3844C.1.pep
MAISPLEPPESIFDESIEEFNEGEDEYGETIDLPKTDQPSRAPIELKPLPSGLRSYLVGAKELPINDYLRDDMLLKVTDSDPWYATIVNFMVTGHVPLGENKKRLIYESRKHLWDAPYLYRNLAPDARLHRLSISGEGDQTDWHARISSIFGPAQELSLQGRAADAKHARWMFHEIIFPRFGTPRMKTEMGKAWKNKLLDALWAYRTAYKTPIGMSPYQLVYGKTCHFPVELEHRAHWAIRTWNMDLKGAGQHRKMQLSELEEWRDKAYHNAKIYKDRTKRWHDKRIKHEFKVGDKVLLFNSRAKLFGHGKLQIKWMGPYTVVDASSHGAVTLRDNEGNIFKVNGHRLKVFLDPLEVDRDLDVVNLVSFSFYPESLGPP

SEQ ID NO: 136917 - protein, 287 aa, Oryza sativa
  Clone ID: PAT_MRT4530_38450C.1.pep
ARMPCHPHSLELHCCWLLLRAMDMETAQERETRAWRWPLDTMACGLGDTGRFLFEWVPQLRCFGLGVVGVGAAGDPIPHGHGHTPHGRELELELFFPKCRVSPAPHAVVTGLPAHQDTMVMYDEFDELLQSFRDGNEEQQLVGFDSSCFLNEKNSDVTCFLDYDGDDLPLALSSVSPMEPLDNTVGQPQAELEHPPSSASSHGNVGPHASDTGASADKDCSSKRPATPEGNETASSKRSRTTAAPPPLSGAGTSVVYPFAVVKPIGLDGGATLADINARILTRPPRP

SEQ ID NO: 136918 - protein, 53 aa, Oryza sativa
  Clone ID: PAT_MRT4530_38451C.1.pep
YFARSNLSIMVAMFLNNHVLTYSCLQSAFSPQISMNGLLRAVVPSCAHMDPPM

SEQ ID NO: 136919 - protein, 318 aa, Oryza sativa
  Clone ID: PAT_MRT4530_38452C.1.pep
MSQDPSVPCMVGCKQKLSKTPCANSNTILFVLLPFIGSERKAKQVGGSGRAAAGEHGSGAAGWWFAARLRHGGRGGETQPAAELGWRRRERGRERRSSRRRRLERKKGGDWRDNEFGGGEEGYGEAGRLLVVTISHRERMKMESSNQGKRKVRDFDLNKEPSPDPVPVNAGKEAEGKNVIKQADNALVEKSAADEEQPAGGRTPGYRMCLKHITESRECLRRWRQLKKKLLKASAAESETAVVSTKTVAGGGGRKDQVASTAMASASASSSRPILNGATKKKRMAVPTSGEDATGGSSSGGESSTNSSSPAPAPALAP

SEQ ID NO: 136920 - protein, 155 aa, Oryza sativa
  unsure (1)..(155): unsure at all Xaa locations
  Clone ID: PAT_MRT4530_38453C.1.pep
HEGSLGDDSPPLPLLLPLPGGVAPAPPTGGAAHPPPTGGAAPSPFLPPDRRSPRPLSCLSRDGSGDGYRGWIRSRWWRVRTNPAPAAPSDPSRLPPAADLMAVAASAPSPVXRRGRERQWAREPVAAEGSDADNGNDDGGDGRRQRSXRRRRRRP

SEQ ID NO: 136921 - protein, 59 aa, Oryza sativa
  Clone ID: PAT_MRT4530_38454C.1.pep
DKPDEPQKLFKLKKVPVTASSESEDKKPAAVPEEVAASSEKTADVAVAGAEASTATGQQ

SEQ ID NO: 136922 - protein, 207 aa, Oryza sativa
  Clone ID: PAT_MRT4530_38455C.1.pep
MPPPPPPHPLPSPCRRRRCLLLLLLSRLLLSSASSLEEGRVLTVGEELMGETMPLRHGSRLYRLDGTRPSAWYEVKISYPASIPSSFSIRLVDDPHSVEDLGSMNRRLLNTEKIIFKAQSSRPVYVLVTVEPEGVVAKPNVPERELAMFNIVCDELMLGIPHFAWWVGIGSLFCIALASVAPYFLPLHKLLNYEATELSDDFAAKLS

SEQ ID NO: 136923 - protein, 94 aa, Oryza sativa
  unsure (1)..(94): unsure at all Xaa locations
  Clone ID: PAT_MRT4530_38456C.1.pep
TLEDQQRRPIHRIWEHGIAWKPPSQLLLPPXLVFRLDHTEEVDADDNCLFTAANKPGERDLRHNIARLFAQLCPWRGPANARDLALPGFYIDLY

SEQ ID NO: 136924 - protein, 133 aa, Oryza sativa
  unsure (1)..(133): unsure at all Xaa locations
  Clone ID: PAT_MRT4530_38457C.1.pep
MGKLFCDDSATTITKALRRSHAPARPFLTWPTLTSCWAAVITLEDQQRRPIHRIWEHGIAWKPPSQLLLPPXLVFRLDHTEEVDADDNCLFTAANKPGERDLRHNIARLFADVYAAQITRQNQQPPPQHTHLV

SEQ ID NO: 136925 - protein, 82 aa, Oryza sativa
  Clone ID: PAT_MRT4530_38458C.1.pep
MAIWAARHGTAQARPCLGRGLSGRHGPTDAPGRAVPAHGRHKRPRHGPILVGPCRAGPKARWAIVLTHRKSLYLVPQLCGLM

SEQ ID NO: 136926 - protein, 357 aa, Oryza sativa
  Clone ID: PAT_MRT4530_38459C.1.pep
MMKESYMEVLPPAPAHYFVGQAAAAGGWFLPDRRGGGGAWSQEENKVFEQALAALDRNDPERWERVALLLPGKTVADVMTHYDDLENDVCFIEAGLVPFPHYGAAGGGGGSGFTLDWDGGDDPAGLGFKRSCYMVGGKRARGPDQERKKGVPWTEEEHKLFLMGLKKYGRGDWRNISRNFVTSRTPTQVASHAQKYFIRLNSGGKDKRRSSIHDITTVNLPDDDHGNPSPSPPPSVLTAHSSSSAAAVSEQFGVLVDGKPPPPPLGRGAGHHHFMPHPYAQVKIEAGNSHVAGGGRLDDSVLVQMQCGQPQSKENRKTVSALSTGAPLVQPANTPLSPAGVIAKRPAPIALPNSCAA

SEQ ID NO: 136927 - protein, 174 aa, Oryza sativa
  Clone ID: PAT_MRT4530_3845C.1.pep
RTWVEAHLRPLSAAALLLSPAAPLPTADAASARRASPGGRRRSSVRASAGGGGWLSGLLGGKGGGGAPTAMTVTPGTVKAGDPVLHEPAQDVAPGDIPSEKVQGVIDRMVAVMRKAPGVGLAAPQIGVPLKIIVLEDTQEYISYAPKKDIEAQDRRPFDLLGIINPKLKTTSKK

SEQ ID NO: 136928 - protein, 84 aa, Oryza sativa
  unsure (1)..(84): unsure at all Xaa locations
  Clone ID: PAT_MRT4530_38460C.1.pep
LXXQLVAXXKFQGSXPQVLXSXXXDXXXRLVXXILXXPPGXXXKXFLTXRAXVEEVXIXXXXXGPWFRXXCXXXXXXWWRWKSL

SEQ ID NO: 136929 - protein, 139 aa, Oryza sativa
  unsure (1)..(139): unsure at all Xaa locations
  Clone ID: PAT_MRT4530_38461C.1.pep
PSSPPTSPTTGRCRTRPPRTSPPTTALAVVPEHAFREPHGREQHHTDHDAGHEPAYGVGSTHHVGILCENPETPLPFYKDLLGLKVKPATPTDKLXYRGAWLWVRSDIIHLMELXNPDPSTGRPDHRGRDLDTLMAIKD

SEQ ID NO: 136930 - protein, 890 aa, Oryza sativa
  unsure (1)..(890): unsure at all Xaa locations
  Clone ID: PAT_MRT4530_38462C.1.pep
MLRPQLNPSSHTTTTSSSSSTQLFASSSCIASLRRPSSSSSSVVAAARRTRGQGSSRVVVVCASSSATASRGDSSSDMAAAAAVRVKAVATIKVTVGELINRSIDIRDLIGRSLSLELVSSELDAKTGKEKATVRSYAHNVDDDDHSVVTYEADFDVPSGFGPIGAIIVTNELRQEMFLEDINLTASDGAGNSTVLPIRCNSWVQPKSVGDEGTPSKRIFFANKTYLPGQTPAGLRSYRKNDLQQKRGDGTGEREADDRVYDYDVYNDLGNPDSNGDLARPVLGGNKQFPYPRRCRTGRPPSKKDPKSETRKGNVYVPRDEEFSPEKEDYFLRKTVGSVLQAAVPAAQSXCSSDKLKWNLPFPSFFVIDKLFEDGVELPGVDKLNFLESVVPRLLEHLRDTPAEKILRFETPANIQKDKFAWLRDEEFARETLAGINPYAIELVREFPLKTKLDPAVYGPAESAITADLLEEQMRRVMTVEEAINQKRLFMLDFHDLFLPYVHKIRSLDHTTMYGSRTVFFLTDDGTLQLLAIELTRPASLSQPQWRQVFTPSVDAGRLGXWLSTHSPDEEYLGGEQTRPWNSDAAVQAAYPGFTARLKEIEGVIDGRNKDRKLKNRCGAGILPYQLMKPFSDAGVTGMGIPNSTSXMGGHLLAIDRSCHHKWLLLMLFIENLMNNVFFYXEAKSIAGDEELQAFWTEVRTKGHGDKKDAPWWPKLDSPESLAHTLTTIVWVAAAHHAAVNFGQYDFGGYFPNRPSIARTVMPVEEPVDGAAMERFLDNPDQAXLRECFPSQVQATVVMAVLDVLSSHSTDEEYLGGEQTRPXGTATRRLQAAYDGFAARLKEIEGVIDGRNKDRKLKNRCGAGILPYQLMKPFSDSGVTGMGIPNSTSI

SEQ ID NO: 136931 - protein, 42 aa, Oryza sativa
  Clone ID: PAT_MRT4530_38463C.1.pep
KGLVTACLLATRGLIRDVALCMPVPNVDKAYYPNNANSVHIL

SEQ ID NO: 136932 - protein, 120 aa, Oryza sativa
  Clone ID: PAT_MRT4530_38464C.1.pep
NVFLSNSAGYATLTRTARDAQARNQLERFTECLERESCETFQDCITCDRLKLAEYMYTRVKHLTYTTTEDAVTSSGAPFWSAPNRLPRPLEFLTSDPRQLNFFLDAAILRLETFGIPIPD

SEQ ID NO: 136933 - protein, 393 aa, Oryza sativa
  Clone ID: PAT_MRT4530_38465C.1.pep
MIRLRERILSLLLQPASPRPIAGIFPPPCPLRRLLSTTAPVSPKPFAVDEYLVATCGLTRAQAAKASEKLSNLRSPSNPDAVLAFLSDLGLSRPDGIAAAVAADPRLLCADVGSSLARRVDELGGLGLSRSQIARLLPLAGRCFRSSSLATRLAFWHPVFGSFENILKALKMNAALLGSDLDKVAKPNLAFLAQCGINASDVTRTTLSLYSCRLFTVNPRFLQDAVARVEELGVARGWRTFHRVLSTVAFLSRETIASKMQLLDDLGFSQDDFLVIVRRAPQVLRLSDGRIRRSVEFLIRDVGLEQSYIAQRPTLLAYSLERRLLPRHCLLKVLKAKGLLNCDLSYYCIAAMSEEKFVQRFVDPFKDKIQGLADAYTSSCSGEANGVRSLVCL

SEQ ID NO: 136934 - protein, 116 aa, Oryza sativa
  Clone ID: PAT_MRT4530_38466C.1.pep
MDGAHRCAAADAATPLRIEDAHAVACLASRPSRLPLLAAAQVRWSPAPRLVRQGGGDNGGGGVGWPARLLTTGGASPLSPSSPRGGVGEVEAGAEDGAASAGEVEAGAEAGVARWQ

SEQ ID NO: 136935 - protein, 75 aa, Oryza sativa
  Clone ID: PAT_MRT4530_38467C.1.pep
WLGESGGGAGGAASCGVHARKFQASGEDYSLIRGSAWIEPQYTAIHEQPNAHLGQMWELIQAWAAFHGRAVRSRT

SEQ ID NO: 136936 - protein, 163 aa, Oryza sativa
  Clone ID: PAT_MRT4530_38468C.1.pep
MEAKKEAPADAPKHPPKIDIRQNRREKRPPHAIRFSRPHPDRSHLRRPDPTFAGRRRTSLSSLFTWRGGGVACSIAADAAGGGDGGGGRRRWPAAKAAAVGDDAAASESGGDWIDSQGRRGWQPRAVRAAVGWRGGAWRLGGGGTAYAGGRGSSRVDLQACKL

SEQ ID NO: 136937 - protein, 72 aa, Oryza sativa
  unsure (1)..(72): unsure at all Xaa locations
  Clone ID: PAT_MRT4530_38469C.1.pep
LLTLSSLQAVHYFGSERWALVGDGEGEMVAEGGGRRGSVPEKKGTHLPPPHRCLLPSQSQXISALPDAVATR

SEQ ID NO: 136938 - protein, 527 aa, Oryza sativa
  Clone ID: PAT_MRT4530_3846C.1.pep
MVMASCLSVVVSGGLPGDLFAHSVASKLRVDRDTTARASSDFGRIVAAAPEAVLHPATPAEIAELVRFSASSPSPFPVAPRGQGHSARGQSLAPGGVVVDMRALAARRGRVNVSAGGAGAAPYVDAGGEQLWADVLRATLEHGLAPRVWTDYLRITVAGTLSNAGIGGQAFRHGPQIANVLELDVITGRGDMVTCSRDKEPDLFFAVLGGLGQFGIITRARIGLEPAPKRVRWVRLAYSDVVTFTRDQELLISKRASEAGFDYVEGQVQLNRTLTEGPKSTPFFSRFDIDRLAGLASESVSGVIYFIEGAMYYNESTTASVDQKLTSVLEQLSFDKGFVFTKDVSYVQFLDRVREEERILRSIGMWDVPHPWLNLFVPQSRILDFDTGVLKGVFVGANPVGVILMYPMNRNMWDDRMTAVSGNDDMFYVVGLLRSAVVPGDVERLERENEAVLAFCDNEGIGCKQYLPHYASQDGWRSHFGAKWSRVTELKVKYDPYGILSPGQRIFSSPSLSLISPSPELSSKASE

SEQ ID NO: 136939 - protein, 290 aa, Oryza sativa
  Clone ID: PAT_MRT4530_38470C.1.pep
MQLLFFSFLFLLLARETSAVAADGCSRRCGGLVVPYPFGFSGSCPIMLSCNVDGGSNSTAALILQGNDATTTDRSYTVVDGSFNSTASTFTVSVPPSCNRTVSDARRWLSGANYGVSSRTGLFLRGCRNATSSDCSVPVETMLRTTRCSGGGGNETASSSLTCIASLSPATPAERGLGGLFAQWEKVEEPRCENLLTSVYGDTREGVFSLEFAAAEMGWWVNGSCGGGVDDLGRCAANATCIPMQTPSGNWGHRCECLPWMAGDGFAAGEGCYAGINCEFLISPILLFSL

SEQ ID NO: 136940 - protein, 96 aa, Oryza sativa
  Clone ID: PAT_MRT4530_38471C.1.pep
GSAARVPMMSRQETTSCIVVSISRIIDLHHWAMQFKEHFTILVFISWCLRESWIQGPQYNFLQISSPWQPLDKCFVLKTRLDRRFPVSKSEQGLIQ

SEQ ID NO: 136941 - protein, 137 aa, Oryza sativa
  unsure (1)..(137): unsure at all Xaa locations
  Clone ID: PAT_MRT4530_38472C.1.pep
RPSSARFPXXAAEAGQLRERDDHRPAADERPVLGIAGRGGDHHHQRRRLVVRRRRSSSSGAGRRRGPGHDDDEAAGRLGEGGRVAQEDVEQRGSSSYVTLLAVAADDVRVVDVGVCVSVAAGRWQWRPDCTRSLSPR

SEQ ID NO: 136942 - protein, 89 aa, Oryza sativa
  Clone ID: PAT_MRT4530_38473C.1.pep
MEEIDEEIKQSERCGHWWALSCWWFCSWWLGSSGRAGKGRGCTDSGTGIEIGRGGAPRSITSVETVTKEITAGSRSYRRNLGGPCHAPN

SEQ ID NO: 136943 - protein, 137 aa, Oryza sativa
  Clone ID: PAT_MRT4530_38474C.1.pep
MAGQTVYYAGQTVPTIAGHATTHIPNAYNDPNRGYPHDIGYGQYNNIVPQQPLFRPPNPPRPETMEDRTRTIIRENFGIKGSSVESKVAMHTYQRPYPEYVDYVPYPQGFEVLNFTKFTGEDTRTTIEHIGQFIEQM

SEQ ID NO: 136944 - protein, 48 aa, Oryza sativa
  Clone ID: PAT_MRT4530_38475C.1.pep
FYMLLQYIEQVLLYFELHATKHLTLLYIQLKVLERRFKALKALLSSHI

SEQ ID NO: 136945 - protein, 81 aa, Oryza sativa
  Clone ID: PAT_MRT4530_38476C.1.pep
VKDRIESQNEVRAKEKEEKDLVAQQNMYAQLLPLALPAPPGMGGPPPPMGMPGMPPMGGMGMPPMGPGPMPAYGMPPMGSY

SEQ ID NO: 136946 - protein, 67 aa, Oryza sativa
  Clone ID: PAT_MRT4530_38477C.1.pep
PKIQLSGNSIQIIQRVLLLPIEHFWNVLLCHSMILEQTCGICLSNQTFQQHGLNIYDRIQIRSVKHL

SEQ ID NO: 136947 - protein, 123 aa, Oryza sativa
  Clone ID: PAT_MRT4530_38478C.1.pep
MGSSAPETETVRGLHILIKHEGSPPKASWKDSGGRVISVTTGAEAPGGLADLRDQILSGGANFGDLAARHSDWSPAGRGGDLGPFGRGQMQNPFENGTFAFKVGEISDPVAPARGGHIIRGPA

SEQ ID NO: 136948 - protein, 310 aa, Oryza sativa
  Clone ID: PAT_MRT4530_38479C.1.pep
MPSSPWIPTAGAPPPRAAPAVVYSWLSERHPVKVSCLPLSDQREVETREHEEKVNKYQAVLAARLKAKYFSGKAFGKENVFEEMTIQSETILLSRCPFSSLFADPAKFCREKSCTKEDIYPSLTNASFAKHNHLSLVREDSSNTNIPGPPLPIIPVHLSTYMASFICKCPWNHGGQMYDQTHLNCICSHSYLRATVPANLHQLFPHICKRDLHCHHRETLHGALVLLPPCAAQGQGPCPFNHCLLGSCDVSVQLWWGLSPSGSHVVPWTGHPLADTALAMANASPVSRFVFFSSDLVHSCRSYLQQHNLQ

SEQ ID NO: 136949 - protein, 691 aa, Oryza sativa
  Clone ID: PAT_MRT4530_3847C.1.pep
MGMGDENGQLRVSTLLRRLIEHTRVSCPPHLAWRGQTIFGGYAEVPYNRRIPTVELAHGLYGYEIGPGFIAMVREQTFSGGISGNPYLHLRDFELVCSCLSIVGMTHETLTWKLFPFSLRDDAKQWYTLSVNKFHGEWEELKCNLCLTFFPLTCVINLRLDILSFRQNEKESLGAAWARFSLLTQSGPDLSLPDHVLLQHFRYGLDKESAENLDISAGVSLAHKTTTEGRELLDLILENDSFGRSKAIPKVEIIHEEPLHVESEPDSTAESSSQSQEPEEEEIHPPKIPFQFEEDLFEDYGNTSNYSCEKRPPTKGVCSFLGHAGFYRRFIKDFSKITRPLTALLAKDVPFDFDDECLKSFKLLKESFISAPIIQPPDWLLPFEIMCDTSDFAMGAVFGQTKDRKHHAIAYASKTMTRAQLNYATTEKELLVVVFAIDKFRSYLWELRCQKHGGITARDAMPLIYNLQVELFDVWGIDFMGPFPKSYDCEYIIVVVDYVSKWKIVNEMGKAWKNKLPDALWAYRTAYETPIGMSPYQLVYGKTCHLPIELEHRAHCAIRTWNIDLKGAGQHRKMQLSELEEWRDKAYHNAKIYKDRTKRWHDKRIKLKKFKAGDKVLLFNCWVKLFGHGKLRSKWMGPYTVIDASSHGAVTLRDNEGNIFKVNGHHLKVFLDPIEVDQVSFSFYPESLGPP

SEQ ID NO: 136950 - protein, 106 aa, Oryza sativa
  Clone ID: PAT_MRT4530_38480C.1.pep
PAPGKIAPMRDGMLRCSCTFQMFRHICKRDLHCHHRETLHGALVLLPPCAAQGQGPCPFNHCLLGSCDVSVQLWWGLSPSGSHVVHWAGHPLADTALAMSKCITGL

SEQ ID NO: 136951 - protein, 150 aa, Oryza sativa
  Clone ID: PAT_MRT4530_38481C.1.pep
MAEDEAASAKKLFSASDVVGHASRKDCWVVIHGKVYDVTKFLEDHPGGEDVLLHASASGDATEAFEDVGHSTSAISMMNNYLIGSIKDYVPPSASEATTIGGNDVPPNFRRMPQKKGPPAPNTFLDFLLPLFVLGLAFAAWYYLTFIAKA

SEQ ID NO: 136952 - protein, 163 aa, Oryza sativa
  Clone ID: PAT_MRT4530_38482C.1.pep
SSPAFQMPSSPWIPTAGAPPPRAAPAVVYSWLSERHPVKEAGAGAGASNAQESRPRVSPAENSEVETREHEEKVNKYQAVLAARLKAKYFSGKAFGKENVFEEMTIQSETILLSRCPFSSLFADPAKFCREKSCTKEDIYPSLTNASFAKHNHLSLVREDSSK

SEQ ID NO: 136953 - protein, 34 aa, Oryza sativa
  Clone ID: PAT_MRT4530_38483C.1.pep
RCWRKPYRAFGRFDNGAPVGVVSLLGGVVMALFH

SEQ ID NO: 136954 - protein, 61 aa, Oryza sativa
  unsure (1)..(61): unsure at all Xaa locations
  Clone ID: PAT_MRT4530_38484C.1.pep
WRPEEEEGVNSVVGVTRKSTAGWADNNFMVLPXSLANSAAAFFAYSSSSSTSTPFLHLHPH

SEQ ID NO: 136955 - protein, 718 aa, Oryza sativa
  Clone ID: PAT_MRT4530_38485C.1.pep
MDSSLLKFNLSLGVNHWNTVNLDTTDDQDGYNFYEAVFVAWASWAPVCLINIGQGIPFVSTVELRLLGTLPYPAIIGNQSLSLYVRRSIGSSADDDMRYPDDQYDRYWIMGETTGAADMSNISTPTIIPPSVPFAVPSPILQKAVVPADNSMKLNNKSREFTVSIDSGVQSGPFSPPYLKVLSITTDWSSDTEGKYNFTLTATSTSSLPPILNAYEVYGRIIHDNPMTFSQDFDAIMAIKYEYGIRKNWMGDPCFPPEFAWDGVECSSDGKTMRIISLDLSNSELHGLISNNFTLLTALKYLNLSCNQLNGAIPDSLRRKNGSMVLNLSGNQLSGTIPSSLFQSKKRSAILALAVVIPVLVAAILILAYLTWRARRKPNSAYAVLLSKTCIYINHWDHMQKTENRRFTYEELEKYTDNFERLIGHGGFGQVYYGCLEENIEVAVKMRSESSQHGLDEFLAEVQSLTKVHHRNLVSLVGYCWENDHLALVYEYMSGGNLCDHLRGFSVGESLNWATRLRILLEAGQGLDYLHKGCNLPIIHGDVKTNNILLGQNLKAKIADFGLSKTYHSDTQTHISATAAGSVGYIDPEYYNTGRLMESSDVYSFGVVLLEVVTGEPPIIPGHGHIVQRVKQKIVTGNISSIADARLDAYNVSSMWKVVDTAMMCTADVAAQRPVMATVVAQLKEGLALEEAHEERVDLENIASDIVSSVSTFGPSPR

SEQ ID NO: 136956 - protein, 492 aa, Oryza sativa
  unsure (1)..(492): unsure at all Xaa locations
  Clone ID: PAT_MRT4530_38486C.1.pep
MVDTRRSAAAKRPAAEEDQEEEKAAAAPAPAAAAAGEGAGAPASAGRRPAKRGKAVAVEVDSGKEDEEAASASGVASAADATPVVVGGGGAAVPPLDTAGLQALTGAVDRLEAILRPGEAVSNSAGHKRSALAKDLQAKLKEVKDLADGVAKKRLPPVANRRQEPWCRLISQHAKNPSIPINASHFTVGYGAHHNLRLEGSYTNSLVCRLKHAKRGALLEIYESKVVRVNGKSFDKTNKVTLCGGDEVVFNTPIFEQLPEEKSSTSPFSSTWCSVQPGQHSLIKDFKDIFSSKEAKVTSFYFGKSRPPLMPVEKDANVSIIAGSSSDPDLVSSLCKTMEDQFNSEENTPFAWCQLLEEDLKNATIDPSEISETFDSCPYYLSENTKSALQSSAYVNLHCKDYIKFTKDISSLSQRVLLSGPAGTDIYQQYLVKALAKHFGARLLTIDSSMLFGXDRVRYIGSLQSTGIILDGESHKLVLASRCFYYWFSCTS

SEQ ID NO: 136957 - protein, 149 aa, Oryza sativa
  Clone ID: PAT_MRT4530_38487C.1.pep
GREILIEPIFAQWIQSAHGKTTYGFELLLSSTSGPAFNAGRTLWLPGWLNAVNENSNSLSLPVGPGDFLVHHAIALGLHTTTLILVKGALDARGSKLMPDKKDFGYSFPCDGPGHGGTCDISAWDAFYLAFEIDVRVITYIMFRMHLNT

SEQ ID NO: 136958 - protein, 140 aa, Oryza sativa
  Clone ID: PAT_MRT4530_38488C.1.pep
MGFKRYILNLRGMGAHYGEVEVWEESGWHEGEDGGDEVGEEWRRREMGFKRSIKPQTSMRTSVKVHKLTTEDAMNYILTIKNKFLRHPEKFHAFIHTMIDFSRGRINTHTVIERVKILFDGYPDLLLAFNKFLPRGINAI

SEQ ID NO: 136959 - protein, 38 aa, Oryza sativa
  Clone ID: PAT_MRT4530_38489C.1.pep
DVHFHPIHPFINELPVPLHMPCTSSLVCMQVLNLLLAS

SEQ ID NO: 136960 - protein, 128 aa, Oryza sativa
  Clone ID: PAT_MRT4530_3848C.1.pep
RRATPPPRGTGDLRDHLNGRREARRARDNENRSRHHVSSRRCENEQRGGRSNEDRHHDNRHNRHDRDDHEHWTPDDTGRGHRHDGDDNGSRCQDNNGGRRQDSREPERRPRNRTPELSNPSSSSSSSS

SEQ ID NO: 136961 - protein, 97 aa, Oryza sativa
  Clone ID: PAT_MRT4530_38490C.1.pep
MHRVALPLVRTAARRPSLAWIHADPAVVAVSGADDGRGGGGRVRRRRDDGGQERRRVIPGLGRYNFTALDNRLSRAVHLNRSHGKKNFLCGARTWKY

SEQ ID NO: 136962 - protein, 142 aa, Oryza sativa
  Clone ID: PAT_MRT4530_38491C.1.pep
IFMPRSLKFNRPGGDFLGEEGDGAAAEAAAGGGDGCRRRRGGGAAGAGGRDRAGVLAAGLRRPPQLLARVQAMVPRLRGAARGVEKGVHGGLEPVWSLRQAAAAAAMPDLLKLDQNPARPVFLRTAAPSIPCPAIFTKAKHL

SEQ ID NO: 136963 - protein, 1050 aa, Oryza sativa
  Clone ID: PAT_MRT4530_38492C.1.pep
MVSPTLFLPVHWCRLPAATRRVEFNTRSGTFPHMPRRRHPLGADEDRAWRGHHDAYADGQAIVRWEAQRKRDGLRLLHQAHGLLLAMALLAVALLAAALHADAAPASAAPGSSFPDAYGDRARAAQLPPRKQQPQVAYALRRASATSSAHLHGATSRSFTGVATEDLVARHGGVGEAGLREENGDRSSVEASGGGHWPTIVKLASSIGTVVPVALSIVPYFYQVYTGNFERTIEVYGAPAMLAGSINSIIWLTYSIMASKKDLNLALILMHALLCMSTFTYLMCICACKRATKEGSVPKRSQKVATGFDLILSCITNLVTFIITFHDHPEHTTSLITSGVGFVLNVVEIVLLVIVTIMVRGLLPDFAMLFVEVIQRTMMRIERDHYIQILLQASGIAGQEPDASPSIRGRKRGGSVPLLVYYRCAAVLDVDTARAQAGETPLLLVATFGHTARRGGRPTYLLERAAGPSTPDPDVRRRHHNAAAASCLALQAPSKQAMSPMAMPAANLPGAPRRVVSESAARRRAGLGMGCRTRENGLHNCIVVYSFVSGENVTNGSSSSEMNVLCPSSSAATPPPPAPAAGAPGVGVAVGGEAREEERRRQCYYYRCAGALLRAAVLGDLHHLARMAAEVDAAAPGGGEGAGGVRSRCGRGALHLAAANGRTHVCRFLLERLGLPVDALSASGAPPSRPAAAARSSHVSSMLAERLISCFVFDAAAHAGETPLLLAATFGHTSTAAYLLDRGADPSTPDPNGGDTPLHWAAYNGDRELAKLLLLRGADVGAANPRGTALHVAAARGHAAVVSVLLNHGADVRGRAQQDCQYRLHTVGFFTFGGIIGMHEVAHSACSRTGSIGFIKCLVESGADPNIPDELDRLPIEIAAIHAEREVIEVLLPLTHQVPTLLDWSVGGIIRYVKYPAYKEWARNASCKRKDELKLQGNSSFNNEDYDAAILLYSMVTTFAHSRFFMLMFGCKCFFSSKGAKYCFAMKFDNTDAKLYSNRSACWLNLGIGDEALSDAQICSKMQPDWAKGYYRQGMAFSLLQVTIMYHPCS

SEQ ID NO: 136964 - protein, 351 aa, Oryza sativa
  Clone ID: PAT_MRT4530_38493C.1.pep
MALDAIQRLEMVQKQRQLTSTELSLRTALKHRLLGLAVIERARKRHASRITNIKEEGTNTRGDLESHKCNAVDKAPGPDGFTVNFFKTCWGIVKLHSIHDQRCNDLNLLNSANTVLLPKKEGVESSTDNRPISLIHSIVKILFKVLALRLHLVMQSLISVNQSAFNRGRSIHDNFHYVQNMWGFPQKWRDWVAALLSTSCSKILLNGVPGRADNITGEKCRANWARTCMPTAYEGLGVFNLEKFARALRGVGQPHAKFPQDQSMVLRIGPPGARPLRLGVRHRRRHRRLRADRSGSVAPGDDEHSPPGDHGQLELHMIMIRLAARDGGGHDDEQQHQHDGGAHQRRPQCAG

SEQ ID NO: 136965 - protein, 81 aa, Oryza sativa
  Clone ID: PAT_MRT4530_38494C.1.pep
TILLPTLFSQRSSRGWPTAQHSTACTAVPAGQQEPRGGRRHVNGARHRRRRRRRARVDFEFQVKWEQVVEPRAEFGTRPRA

SEQ ID NO: 136966 - protein, 57 aa, Oryza sativa
  unsure (1)..(57): unsure at all Xaa locations
  Clone ID: PAT_MRT4530_38495C.1.pep
VYIFNYPCPQRCTPPLGIIDFFLFYVFISDILIYNKYTLSSIIPPSPXYTDFQKKKK

SEQ ID NO: 136967 - protein, 129 aa, Oryza sativa
  Clone ID: PAT_MRT4530_38496C.1.pep
MAGGRALSGGGGARARAGAAVAAASVRGVRWEAGRRKGKGRLVGVRCDAAITEKPTGEEEAASEEFEYQTEGSEDASGLRMLLVLWRAGGHVIRQRRGIATASPNRSCGLAAATVVPVAAAVFAPPPRP

SEQ ID NO: 136968 - protein, 609 aa, Oryza sativa
  unsure (1)..(609): unsure at all Xaa locations
  Clone ID: PAT_MRT4530_38497C.1.pep
AEHQSTEPYCDETEYLCNPNPMYEHVGVDDEGLYIDMGPNQPPPPTNPQNQGGTEEREGESSGDDDDEIKDKEPENMPDAFYDKNDPPMTVGTVYSDMDAFKIALASHAIKHEFNYDIEKSDTGRYRVKCAQRSDGCKWRLHASTGKNGNTVKVKKVPLPHKCQSTRRQGICVGVTQFWVCSQVIDWLKEDGNIGPTELQRRLKEHHKIVVPYKRVYKGKYLAMDKIYGPWTXSFNNLYRLKAQLEESSPGSFLVIDHHTINKKIRGQLCIACAVDGHNWMYPVAVGVIESETNENWIWFMERLKEVIGTPDGLTFSTDCGQAIMKGETHKKLWTRSQYRTASKVDYVTNNLAESFNNWFNGKILPHILQRLKEESYNLDIEVIIASPEGVAELCAKGSNGSRFRYVVSLKDRTCSCRVWQGSGIPCKHAIAFITSIAGEKLEDHVDDYFSVNRFRAAYEGSIPSIPDKSMWPKATHDFFMHPPLLKSTAGGRHKNRMKSALEGGSSSQKKSSKKHEAFPHVPAPCHPSRRRMTVFAGRRRAASPSSEPVDGTASTPSGLQCPHPPPIRRCSPELVGCRAPSDLRARFPSPLIMPARMSRPKTTLKYIL

SEQ ID NO: 136969 - protein, 479 aa, Oryza sativa
  Clone ID: PAT_MRT4530_38498C.1.pep
MTIQRREAILGITMDGIGTNKHRRFPISKNRGSYKDIDDEIKDKEPENMPDAFYDKNDPPMTVGTVYSDMDAFKIALASHAIKHEFNYDIEKSDTGRYRVKCAQRSDGCKWRLHASTGKNGNTVKVKKVPLPHKCQSTRRQGICVGVTQFWVCSQVIDWLKEDGNIGPTELQRRLKEHHKIVVPYKRVYKGCRPYLAVDSTFLTGRFRGQLCIACAVDGHNWMYPVAVGVIESETNENWIWFMERLKEVIGTPDGLTFSTDCGQAIMKGEANTGTASKVDYVTNNLAESFNNWIKLKKGKHLDDLLDTIRQKILIKWNQRKKVAKKFNGKILPHILQRLKEESYNLDIEVIIASPEGVAELCAKGSNGSRFRYVVSLKDRTCSCRVWQGSGIPCKHAIAFITSIAGEKLEDHVDDYFSVNRFRAAYEGSIPSIPDKSMWPKATHDFFMHPPLLKSTAGGTHNNRMKSPLEGGSSSQKKS

SEQ ID NO: 136970 - protein, 908 aa, Oryza sativa
  unsure (1)..(908): unsure at all Xaa locations
  Clone ID: PAT_MRT4530_38499C.1.pep
MAWNGAGGCPDWFLDGMDPDSSFNLEIRIVARNCRARWFSLNQVVDADRTQFRDLLANLVEKYPHEYGDKVSLFFFCTETKSHIPVCNDQDLVEMFAKHRAIKTCLLNVAYHSPSSEPPVIPDWDCSNQSTVNPVQPPFTPSIACPSLVEATSGTLNQSAEHQSVEPHCDEIEYLCNPNPMYEHVGVDDEGLYIDMGPNQPPPPTNPQNQGGTEEREGDSSGDDDCHETDFDYESSDEEVEDIDDEIKDREPENMPDAFYDKKDPPMSVGTVYSDMDAFKIALASHAVKHEFNYDIEKSDTGRYRVNCAQRSDGCLRRLHASTGQDGHTVXVKKVPFPHECQSTRRQGICVGVTQFWVCSQVIDWLKEDGNIGPTELQRRLKEHHKIVVPYKRVYKGCRPYLAVDSTFLTSRFRGHLCIACAIDGHNWMYPVAVGVIESETNENWIWFMERLKEAIGTPDGLTFSTDCGQAIMKGVSEVFPRAEHRECMYHLVQNFKKRYSGKVFDEHLWASSYSWSPYMFEKHYQAMAAAKPEAMKYLQETHKKLWTRSQYRTASKVDYVTNNLAESFNNWIKLEKGKHLDDLLDTIRQKILIKWNQRKKVAKKFNEKILPHILQRLKEESYNLDIEVITASPEGVAELCAKGSNGSGFRYVVRLKDRTCSCRVWQGSGIPCKHAIAFITSIAGEKLEDHVDDYFSVNRFRAAYEGSIPSIPDKSMWPKSTHDFFMHPPLLKSTAGGRHKNRMKSALEGGSSSQKKSSKKHECPICHLLGHHRYTCKNGNPEDIAAMEAERGLPKKRLKKALPCNTETSIVLANPSQMVFPANEAVANATHKKRKTSSSSGANKKKKGSSTITTTTTTTTTSEPISVSNITRSATGSNDPVLLQCVAPCPDETIEQDTQPLQVVLPP

SEQ ID NO: 136971 - protein, 137 aa, Oryza sativa
  Clone ID: PAT_MRT4530_3849C.1.pep
LVFHDGLIFAWRGVIEIKNLWNTTKRRKQRCGSPLHPEYMLSQLSHKDMDCETPGESHGKKRSNECSKEKVVDVQELVDELIVFEHLDYGKDTVFPTRPLKCHASTSSVQIPGAIEKTFCPTDLKLCNDKESVGACW

SEQ ID NO: 136972 - protein, 56 aa, Oryza sativa
  Clone ID: PAT_MRT4530_384C.1.pep
EDLRTWTYPQYKLFELITIQMNLPYGIQNYRTRVPIFLLLTDIRGPGLLILGYKSG

SEQ ID NO: 136973 - protein, 90 aa, Oryza sativa
  Clone ID: PAT_MRT4530_38500C.1.pep
MRMEWRRRQPGGGDEEAAAQRGFPLFLSGVRADGRTRAAASPTCTAGQLLRGCCLPPTQIPRRRWTPAAGYRDLSSVLDRRRLQGPLLRP

SEQ ID NO: 136974 - protein, 66 aa, Oryza sativa
  Clone ID: PAT_MRT4530_38501C.1.pep
MPEDGRRDGDNTSKRTRGKGRGCRWTDGVAAVTVDEWERSGTGTSTGRWKGMRAAADRGTTTRTDD

SEQ ID NO: 136975 - protein, 57 aa, Oryza sativa
  Clone ID: PAT_MRT4530_38502C.1.pep
FKLWFWGGGGTFVKSLQCLGPRFVICFTSPLQCTTPFHPLNSKVPESGVANVAPVFL

SEQ ID NO: 136976 - protein, 51 aa, Oryza sativa
  Clone ID: PAT_MRT4530_38503C.1.pep
MKGTTHGFRKAENIKFPLEHQMVFFARLVGPFKVADGIPPIKIANFDDPPL

SEQ ID NO: 136977 - protein, 68 aa, Oryza sativa
  Clone ID: PAT_MRT4530_38504C.1.pep
KNSQQLYDIYMEADFKAEASSVGHHKWPVSEDAGESNDTVEKYPFFADHGTYVSEKGKFFLPWYSVKQ

SEQ ID NO: 136978 - protein, 71 aa, Oryza sativa
  Clone ID: PAT_MRT4530_38505C.1.pep
MIKTRLMLQRECKGARVYRNGFHCGYQVVVTEGVTSLYKGGFATFARLGPQTAITFVVCEKLRELAGMTAI

SEQ ID NO: 136979 - protein, 96 aa, Oryza sativa
  Clone ID: PAT_MRT4530_38506C.1.pep
MTTTDTTVAHIMEKHDDIKIKSSKCWNPIRPPATLLNSIGRRICIQPPFLTRGYLMESSRSPLSNGSGLISKFHLSHPQMKKQGIRLICTGKINNL

SEQ ID NO: 136980 - protein, 49 aa, Oryza sativa
  Clone ID: PAT_MRT4530_38507C.1.pep
NRKKEEEIPTSCLGVLIWTAVSTTQAQGITRNVRLSAPESGFQHLFKDK

SEQ ID NO: 136981 - protein, 93 aa, Oryza sativa
  Clone ID: PAT_MRT4530_38508C.1.pep
HTTSPEYTFRCQDTTQVRVVPRGIAAFCSPICCPFFVQVFSGCPRAWPSFGGGLTRPFLVLCRGSPPGARVLVWSRDCGEAWPFSSLGALGPG

SEQ ID NO: 136982 - protein, 77 aa, Oryza sativa
  unsure (1)..(77): unsure at all Xaa locations
  Clone ID: PAT_MRT4530_38509C.1.pep
FFFFFFWDNTHXFQSNXTXISXHTPGGGYTQQLVPTQVAIXTPECPHGXDTKIXVKSTSLHPLGAIQYHITQLNXLS

SEQ ID NO: 136983 - protein, 894 aa, Oryza sativa
  Clone ID: PAT_MRT4530_3850C.1.pep
MAQEKTFSGSIGENPYLHLRDFELHEKESLGAAWARFSLLTQSGLDLSLPDHVLLQHFRYELDKESVENLDISARGSFAHKTTAEGRVLLDLILENNSFGRSETVPEVEIIHEESLRVESEPDSTAESSSQSQEPEEEEIHPLEIPFQFEEDLFEDYGNTSNYSCEKRPPTKVNSNDPLDKAMLKETVKKLTTIMSNEWLREGELSSEAIQIRCPSSTITCLIGVNLVHALYNPSVGANIMSATFAFNCLGDRLLEPIVKTFRISTNSTTEGLGIISGVPIRHNSIEVILDFHVFDIFDFDILIGHPIEKLLDVPETGDLNLKIGRIATTVPMLQSTNSLTEPLPVLEPIEKVMAISPFKALESIFDESIEEFNEGEDETGETMDLPKTDLPSRAPIELKPIASGLCYAFLNGDAESQDIMEVFMDDFSVYGKSFDQCLENLDRVLQRCQEKDLVLNWEKCHFMVREGIVLGHQISERGVEVDRAKIEVIRQLPPPVNVKGVRSFLGHVGFYRRFIKDFSKIARPLTALLAKDVPFDFDDESVLGQTKDRKHHAIAYASKTLTGAQLNYATTEKELLALVFAIDKFRLYLVGAKELPINDYLRDNMLLKVTDSDPWYATIVNFMVAGHVPPGENKKRLIYESRRHLWDAPYLYRIIKKCHAALYGGHYGAFRTHAKIWQSGFFWPSMYDDTKEFIRRCTSCQKHGGITARDAMPLTYNLQVELFDVWGIDFMGPFPKSYDCEYILVAVDYVSKWVEAMPCRAADAKHARWMFHEIIFPRFRTLRMVISDGGSHFVDKTFRNFLKELGARHNSATPYHPQTSGQAETSNKQIKNILQKTINEMGKAWKNKLPDALWAYRTAYKTPVGMSPYQLVYGKTCHLPVELEHRAHWAIRT

SEQ ID NO: 136984 - protein, 68 aa, Oryza sativa
  Clone ID: PAT_MRT4530_38510C.1.pep
SMKIFLFVCLVCSCCSLEERAMFFCVQNDVFFFHVFVSKGQILAKHRAMLQKFEKIRFFLNHVPLKSA

SEQ ID NO: 136985 - protein, 49 aa, Oryza sativa
  Clone ID: PAT_MRT4530_38511C.1.pep
YSPVFEELCKLKPQDVLPMVWGKLRMCLWMDGVMAHMFHLPQKKKKKRA

SEQ ID NO: 136986 - protein, 660 aa, Oryza sativa
  unsure (1)..(660): unsure at all Xaa locations
  Clone ID: PAT_MRT4530_38512C.1.pep
MAAASISRSLLRRSRCGGGEHHLLLLARGFVTAECHRPVVLHKRGSDILHDPWFNRGTGFSMTERDRLGLRGLLPPNVVSSQQQIDRFTPTLKYQYKFHSEIQHIDAKGLALNYLNISPAICESSQYCVNADKYARDGPSDTYPLAKWRILNRLHDRNETMYYKAEVLIDNIEEHAPIVYTPTVGLVCQNYSGLFRRPRGMYFSAEDRGEMMSMVYNWPADQVDMIVVTDGSRILGLGDLGVHGIGIAIGKLDLYVAAAGINPQRVLPVMIDVGTNNEKLLKDPLYLGLQEHRLEGEEYVAIIDEFMEAVFARWPNVIVQFEDFQSKWAFRLLQRYRKTYRMFNDDVQXTAGVAIAGLLXAVRAQGRPMLDFPKQKIVVAGAGSAGIGVVNAASRTMARMLGNNEVAFESARSQFWIVDAHGLITEERTNIDPDARPFARRKSELGHQGLSEGASLVEVVKKVKPDVILGLSAVGGLFSKEVLEALKDSSSSRPAIFAMSNPTKNAECTPEEAFSILGEKIIFASGSPFSDVDLGNGKIGHSNQGNNMYLFPGIGLGTLLSGARVISDGMLQAAAERLASYMKEEEVLEGIVYPPISRIRDITKEVAAAVVKEAVAEDLAEGYRDMDARELARLSEEETVXYVQQNMWSPVYPTIVYKKD

SEQ ID NO: 136987 - protein, 180 aa, Oryza sativa
  unsure (1)..(180): unsure at all Xaa locations
  Clone ID: PAT_MRT4530_38513C.1.pep
QGPATVASSPPPVIVDSPLAASSPPVTIMPSLADPVPPPSDPMPPPVTSTPLLPATVAPTPGIAPPPWTATSPSGTATRTSSITVPPPXPPPHAAPTRASPSSVRRHLTAAAATRHAHSQRAGGAPPPPPASSPPPPSWPRPAWPRAAQAPRQAAWRRATPSPPARVPPLSPSTLRAPLP

SEQ ID NO: 136988 - protein, 104 aa, Oryza sativa
  Clone ID: PAT_MRT4530_38514C.1.pep
MALALSTSAAAAAAAAARALAARVTTTRGYAASRRPPHKRAARVERKGPPGLPIHPCISAPRQLLITSRTRPRRTPLPPPPCTLDNTTNLLPRAADPPGGGGAS

SEQ ID NO: 136989 - protein, 173 aa, Oryza sativa
  Clone ID: PAT_MRT4530_38515C.1.pep
CEGVTIWGPATVASSPPPVIVDSPLAASSPPVTIMPSLADPVPPPSDPMPPPVTSTPLLPATVAPTPGIAPPPWTATSPSGTATRTSSITVPPPWTAASLPLPTRITTPPLREPPGSGIRGGSLFYMTKLLLLSLSPSFLSSPVRLSTCCWPVSPVVVEMFLEAAKSTAVSAA

SEQ ID NO: 136990 - protein, 82 aa, Oryza sativa
  Clone ID: PAT_MRT4530_38516C.1.pep
MAAGKNTNTRAAHSMALPIMPRDHLFLPPWLGLVHPKTCACRRLKVVVVPEDVAPLPPTPATAERTPVSHGRDGIVQQQRSR

SEQ ID NO: 136991 - protein, 376 aa, Oryza sativa
  Clone ID: PAT_MRT4530_38517C.1.pep
MRGRAAVFAAVLVVFLVACTAAAAAAAITISRKHQHRPASGAAAKAACDVFAAGSWVVDESYPLYDSATCPFIRAEFDCRRYGRPDKEYLKYRWQPSPPCSTPRFDGVALLRMWSGKKVMFVGDSLALNQYESLLCMLHAAAPNARTTVTPASGKVDPLTTARFEEFNVTIVYYLTHYLVDIVNEKAGRVLKLDAIDQARNWLSADVLVFDSWHWWPRSGPTQPWDYIQEGNTVVKDMDRTEAFSKALNTWARWVDANLLQTNTRVFFQGISPSHYRGQDWGDTASATCMGQTRPVNGTAYPGGPIPQQAVLRSALAGMAKPVYLLDFTYLSQLRKDAHPTKYNGGIFGDDCTHWCVAGLPDTWNVLFYAALTGQH

SEQ ID NO: 136992 - protein, 372 aa, Oryza sativa
  Clone ID: PAT_MRT4530_38518C.1.pep
MSISVNMESCVPPGFRFHPTDEELVGYYLRKKVASQKIDLDVIRDIDLYRIEPWDLQEHCGIGYDEQSEWYFFSYKDRKYPTGTRTNRATMAGFWKATGRDKAVHDKSRLIGMRKTLVFYKGRAPNGQKTDWIMHEYRLETDENAPPQEEGWVVCRAFKKRTAYPARSMVETWDYSLHERNIMSAAAAAAFADPSAAYAQMRRQHRSGRFKQEAELDGAATALLHYSSHLAELPQLESPSAAAAPLQPNPSQLATAGEDDDCKGDNGGRRAKKARAAGDKVATTTDWRALDKFVASQLSPGECGSMEATAEAAAAAVAGVSSPLDHGDDDMAALLFLNSDERDEVDRWTGLLGSGAGASGVDGDLGICVFDK

SEQ ID NO: 136993 - protein, 372 aa, Oryza sativa
  Clone ID: PAT_MRT4530_38519C.1.pep
MPPSSVAANGARAARRRRRLLLFANYAALLGGSVASSLLSRYYFAHGGHNRWVATLVQSVGFPFLLVPVYAGRSPSQPRPFAWFTRRLLAACVVIGVLMGVNNLLFSYSSSYLPVSTSSLLLSTQLAFTLVLAAIIVRHPLNFSNLNAVVLLTLSSVLIALRSSDSGEQPGGGSRARYFVGFAVTLGAAGLFAAYLPVMELVYRKAVSGGFRMAVEVQVIMQAAATALAVAGLAAAGGWKEELARWDLSPAAYWAVLAALVATWQACLMGTAGMVYLTSSLHSGVCMTAVLTANVIGGVVVFRDPFGADKAVATVLCVWGFSSYLYGEYTTQKKVDGDGKVAAASSAAAAASADKIPTGGGAAEGDPVHEAV

SEQ ID NO: 136994 - protein, 1724 aa, Oryza sativa
  Clone ID: PAT_MRT4530_3851C.1.pep
MSSSFIDNNVNTNLNQGVLASTMLVWTQVGEIVFPVCTTVPVSAGPSMTGNENAVATTQDDSMSNDPPAEAENGTSTTSELEKDCNAAKPCRSDKNHEPTRITSEATKSWCPIHQTRKHTLQACWVFLNVHAEIRAYKERGIQRVFPTRDVYCPIHKTKNHDLSSCKVFLSAMKTSSPKDYGSSPTSTPREVLAIDGTSMSARANAEAENQVTTPAQHIRTINAILRETPYDPVLNDDLAQWTERLRESVTNLSNAFEEAAAAALPEQPPTGDRHPRRTYDRRQPTAPSAGCRAFSCSLRDVRWPERFRPGAIEKYDGSTDPEEFLQVYSTVLYAAGADDNALANYLPTSLKGSACSWLMHLPPYSISSWADLWQQFVANFQVTYKRHAIEDDLQALTQNPGESLREYVRRFNECRNTIPEITDASVIRAFKSGVRDCYTTQELATRHITTNRRLFEIVDRCAHTDDALRRKNDKPKTGREKKPAKDAPESSKKKNRKNGKRKAQAEALAAEYANPPKRLGPQGSDAKKAWCPIHKLDRHSLEDCLVFKKSLEKHMALEKGKRGTVPKMKLSEQKIEFSEEDHPKTAVIPGCYPIVVEPTIQNIKVARVLIDGGSSINLIFASTLDAMGIPRSELTPTDQPFRGITPQSSSKPLGKITLPMTFGQANNFRTEQITFDVAEFDTAYNAIIGRTALAKFMAASHYAYQVLKMPGPKRTITIQGNAKLAVQCDKRSLDMVEHTPSPPATAEPPKKPSDMPGVPREVIEHKLMVRPDAKSVKQKLRRFAPDRKQAIREELDKLLKAGFIREVLHPEWLANPVMVRKANGKWRMCVNFTDLNKAFPKDHFPLPRIDQLVDSTAGCELLSFLDAYSGYHQISMAKEDEEKTTFITPFGGALSDQLGNNVKAYVDDIVVKMKTSDSLIDDLRETFDNLRRYRLMLNREKCTFGVPSGKLLSFLVSGRGIEANPEKIKAIENMKSPTRLKEVQKLTGCMAVLSRFVARMGERGQPFFALLKKQDKFEWTQQAEEAFIALKRYLSNPPVLVAPQPNDELFLYIAATPYFVITVIVVEREKVQRPVYYVSEALHDAKTRYPQIQKLLYAVIMTSRKLRHYFQAHRVTVVSSFPRGEVVRNKDVVGRIAKWVVELSQFDVHFVPRTAIKSQPRSRGRIHLDITFKHAIHLNFRATNNTAEYEGLLAGIRAAVALGIKRLIVKGDSELVANQVHKDYKYSNPELSNYLAEVRKLEKRFDGIEVRHVYRKDNIEPDDLARRASRREPLEPGTFLDVLTKPLEKEVSSEGNPVVPDISSEATEVERSVADIETTDDWRTPLIKFINNEELPEDDAVAEKITRKAKIYCTIGNDLYKKAPNGVLLKCVSSDDGRHLLLDIYEGICGSHAADRTLVGKAFQQGFFWQTALKDACDMGGYRFLFVAIDKFTKWIEATPTGEIKADNAIKFIKGIFCRYGLPHRIITDNGSQFISADFQDYCIGLGVKICFASVPHPQSNGQVERANGIVLQGIKTRVYDRLMSHDKKWVEELPSILWAIRTTLTTSNKETPFFLMYGSEAMLPSELRHQSTRVQKYSDEDQEEQRNDDVNLLEEHRERVAVRAASYQQALRRYHEKRIRARILSIGDYVLRRVQSQVGRNKLSPKWEGPYTITQVLRPGAFKIADGDGRELANSWNIDQLRKFYVYVNSIHTCKTPYSLNKAYFQVQITIKVLLPNDLLPR

SEQ ID NO: 136995 - protein, 75 aa, Oryza sativa
  Clone ID: PAT_MRT4530_38520C.1.pep
TGDQNNGGKATDGAGDEEEAAAKIGSTVATVLRRSPAAAKRWTRTAATWRPRWRPPRATTTTGTAAAHGSKPSHP

SEQ ID NO: 136996 - protein, 1023 aa, Oryza sativa
  Clone ID: PAT_MRT4530_38521C.1.pep
MTCEVSGAAADRVGRQSGAMVAERQRAKPAARSGVMADEDGDSDKFEEEEWDDDAQSQRGGVRQSRQAKWGNGFMILMYIFETYLDIRQHRALKLPTLPKPLVGVISGEKFERSRAYSLDKSKFHFIHEAVTILMDTTILYYRVLPWVWKKSGELATNAGLNAENEILHTLAFLAGVMIWSQITDLPFSLYSTFVIEAKHGFNKQTIWLFIRDMIKGILLSILLGPPIVAAIIIIVQNGGPYLAIYLWGFMFALSLVMMTIYPIVIAPLFNKFTPLPEGVLREKIEKLAASLSFPLKKLFVVDGSTRSSHSNAYMYGFFKNKRIVLYDTLIQQCSSEDEIVSVIAHELGHWKLNHTVYSFVAVQLLMFLQFGGYTLVRNSKDLFESFGFEDQPVIIGLIIFQADAFAKNLGYAPQLRAALVKLQIRGIQPTTTPIHPLLKGSLLLKTQTAKRKTNGKLIHLKHRSLYSSMGYLTVSWNRFNVRDVNGMCEYMRSTILTYTPSISQFSLQAPMLSLSTPSSPPPPLPPRRATTAPTPVSLLRGAADRRDAPLTSALHAALLKSGALDRTQPLTASNSLLHAYLQCGLLSDALRLLDEMPRRDAATCASLVSALCRLGAPLDAIRAYMDMLTQDADDEDGGLRPNEFTAAALLQACGLAKVARLGRMVHGHLVTSGFCCDPFVVGSLVNTYAKVGDVVSAEKLLLGMDSRDVVSWTALLSGCVLNGMLAEALKVFVMMLEDNVLPNNVTMLSVIQACSLMGESGLFSSLHALVVRLGLENDVSVVNSLIIMYAKNGFVEEATGLFEDLYLRRGDVCPNSDARAAPIRPRPRLPPPSDSLSASSATHPAPMALPYLEAVLCFMILMYIFETYLDIRQHRALKEPTLPKPLVGVISGEKFERSRAYSLDKSKFHFIHEAVTILMDTTILYYRVLPWVWKKSGELATNAGLNAENEILHTLAFLAGVMIWSQITDLPFSLYSTFVIEAKHGFNKQTIWLFIRDMIKGILLSILSCRMMEPVLIMLAHF

SEQ ID NO: 136997 - protein, 58 aa, Oryza sativa
  unsure (1)..(58): unsure at all Xaa locations
  Clone ID: PAT_MRT4530_38522C.1.pep
TRPFLGLGSLFKLFVGISFFFFAFFFVFYCYGKSCVXKIINPQKFKKTTKKKKKKRVK

SEQ ID NO: 136998 - protein, 931 aa, Oryza sativa
  Clone ID: PAT_MRT4530_38523C.1.pep
MAAAEVARRGGDGRLERVRRNGEKSSENSTKNPVNEFRPVELKKKSHMSNPIIICITFLGFSPDLHRIKSTGSSKDGVVQQAPAGTAEPGNQGIPEGSGDKAEYQATGPVYLPGGVFPNYRPFITDNQLTASNVPPVQLTAPILAPAPAAPASAPGQLINPRLLPNFQNYQAGNLNYQYQLPSPQVQYQEGGSAQPQFAPQINQFEPMLQQTQGVPQPRPWADMIADVMREQFGLKPKDARNLYQHTYPEWFERVQLPNRYKVLDFSKFSGQDSVSTYEHVSRFLAQCGEASATDALRVKLFRPEFRTKLIDLLKEYRDCFAWEYYEMPGLSRSIVEHRLPIKPWVRPHQQPPKRCKADMLEPVKAEIKRLYDAGFIRPCRYAEWVSSIVPVIKKNGKIRVCIDFRDLNKAIPKDEYPMPVADQLVDAASGHKILSFMDGNVGYNQIFMAEEDIHKTTFTCPGAIGLFEWVVMTFGLKSVGATYQRAMNYIYHDLIDWLVEVYNDDVVVKSKEIEDHIADLRKIQPPENKTELQEMIGKINFVRRFISNLSGRLEPFTPLLRLKADQKFTWGAEQQKALDNTKEYLSSAPVLILPQKGIPFRLYLSAGEKSIGSVLIQEVEEKERVVFYLSRRLLDAETSQLAREYESKNDTLMVYSKKCQKLMKEFRLVTLKHVSREQNVDANDLAQGASGYKPMMKDVKSRRGWGIDMIGMINPPSSKGHKFILVAADYFTKWIEVIPLKKVDSGDAIQFVQEHIVYRFGIPQTITTDQGSIFVSDEFAQFADSMGIKLLNSSPYYAQANGQAEASNKSLIKLIKRKISDYPRQWHTRLAEALWSYRMACHGSIQVPPYKLVYGHEAVLPWEVRIGSRRTELQNVLTADEYYNLMADEREYLVQSRLRALAKVTRDKERVARHYNKKVVPKSFSEGELV

SEQ ID NO: 136999 - protein, 69 aa, Oryza sativa
  unsure (1)..(69): unsure at all Xaa locations
  Clone ID: PAT_MRT4530_38524C.1.pep
HKKTITLEDESSDTIDNVQAKIQXMEGIPPDLPRLIFAGKQLEDGRTLCDYHVHKEFTLHLVLRLRGGQ

SEQ ID NO: 137000 - protein, 1413 aa, Oryza sativa
  Clone ID: PAT_MRT4530_38525C.1.pep
HLAQKVTLHEQRFAEARKNFKKINHVCPYMYGSNDDDDDSEIAAAEWVRSKKVIPCQWVKNSGKEERYNFDITKDDKIFDLLLREKQIQIPAGYIIPSAEELGKRSYCKWHNSGSHSTNDCKVFRHQIQVAIEGGKIKFDDSKKPMKVDSKPFPVNMVHTSGRIADGGKNRNFQMNSARIFDKYQKKYDKQQHVGCYEQDNGGFDPHWCCEFFRFCWNEGMRLPSIEDCPGCSNIAESSSRSYNRSNRLRQTIVSVHQRLGPVNQDQGDDEDGKNQWCPSGIFTKKQKRRVPRLRNRERFQEVEQEINHRLKKTKPRQEWSVKNQVATADEVKADEAKTLAKGKSVVTASVNMVFTLPAEFGANQADVDEIEEASARLVLSPEQAIFEKPEGTENRHLKPLYINGYVNGKLMSKILVDGGAVHANCCIPSTMHQCLIQWQGDKIEIGTADSQLKMESPSYYFEGIMEGSDVYIKDTVDDLDDKQGRGFMSADDLEEVDIGPGDRPRPTFIIKNLSSDFRTKLIELLKEYRDCFAWEYYEMPGLSRSIVEHRLPIKPEVRPHQQPPRRCKADMLEPVKGEIKCLYDTGFIRPCRYAEWVSSIIPVIKKNGKIRVCIDFRDLNKATSKDKYPMPVADQLVDATSGHKILSFMDGNAGYNQIIMAEEDIHKTSFRCPGAIGLFEWVVMTFGLKSAGATYQRAMNYIYHDLIGWLVEVYIDDVVVKSKEIEDHIANLRKVFERTGKYGLKMNPTKATKGLSIKEYLSSPPVLIPSQKGIPFRLYLSAGEKSIGSVLIQEIEGKERAVFYLSRRLLDAETRYSPVEKLCLCLYFSCTKLRHYLLSNECTVICKANVIKYMLSAPILKGRIGKWIFSLTEFDLRYESPKAIKGQAIADFIVDHRDDSIGSVEVVPWTLFFDGSVCTHGCGIGLVIISPRGANFEFAYTIKPYATNNQAEYEAVLKGLQLLMGVEADAVEIMGDSLLVINQLAGEYEWNDTIMVYNVKCQELMKEFRPVTLKHVSREQNIDANDLAQGASGYKPMMKDVIVEIATIAADDWRYDVHHYLQNPSQSASRKLRYKALKYTLLDDELYYRTIDGVLLKCLSADQAKVAIGEVHEGICGTHQSAHKIKWLLRRAGYFWPTMLEDCFKYYKGCQDCQKFGAIQRAPASAMNPIIKPWPFGGWGIDMIDMINPPSSKGHKFILVATDYFTKWVEAIPLKKVDSGDVIQCVQEQIIYRFCIPQTITTDQGSIFVSDEFVQFADSMGIKLLNSSPYYAQANGQAEASNKSLIKLMVKLRHLIRKISDYPRQWHTRLAEALCSYPMACHGSIQVPPYMFVYGHEAVLPSEVRIGPRRTELQNDLTADEYYNLMADETEDLVQSRLRALAKVTRDKERVARHYNKKVVPSLFRKVSLFGN

SEQ ID NO: 137001 - protein, 720 aa, Oryza sativa
  Clone ID: PAT_MRT4530_38526C.1.pep
MEAPGLVVGSALRAAQPPPPPPLPRSPRGAADRLLIFSREPRPRLAPLTRCYCSREGKGNARSKPHREGSNSVREWLIFVSLSRLNVKANNDQRIMNLELMSQETYLADERHEGVDIWELFSQAQRNILHLNKQRLVAMEELKKLQDENKSLLQDIEVLETERQGFSIEIAESSRFSELLLRIDTMTISGMVGMTEASDLRKKVIDNRYMIHSVFSDIHHKQDTELLSELRLFLRKPAEKPLHVVHICSEMDPITSRGSLATYVTGLSSALQRKGNLVEVILPKYAGINEDVIHFLRKAEADYESYYGGCWHKNRIWTGISSGVSLTLIEPVQLSYFDRDMLRGYPDDFERFSYFSRASLDYIVKSGKQPDVLHVHNWETAIVGPLFWDIFAHQGLGNTRILLTCQDLTSQCLEVPNMLELCGLDPHKLHRPDRLQDNSETNLVNVLKGGIVYSNKVLLMSSTLPRDMAIQGLGHGLEATLTTHKEKVLVASHGLDGELWDPSKDIYLPQRYSPNDIEGKSFCRKTLKRCVGLHSGSSVVVGCICNGDSNTDGLREAVRVALHGGAQVIFMENKGPVMNSTVQALKEELKGDRVMFVEIYDEALEHLIFAGSDIFLCSSFYDPSLQIAIRAIKYGSAPVQINFPSNGSRQTEWHDYPSTALSQYIISTYGDMSLSQALDGIKNNPSQWDWRIKDAMSKVLSWDAECYDLHWEAYSVIRKL

SEQ ID NO: 137002 - protein, 64 aa, Oryza sativa
  Clone ID: PAT_MRT4530_38527C.1.pep
FSELKGRGTSMIATTYHLLIQRLLELGTSNKSMPVLDQLLHSDTVSYITSFWLLRMVFMEINYH

SEQ ID NO: 137003 - protein, 176 aa, Oryza sativa
  Clone ID: PAT_MRT4530_38528C.1.pep
MAARASEIITQRSPGSCNLTRENGTKESQKKELEVTRCVAQYHGAERREKKCSGNMCGCGVEQQAHPARPRRWCTGATGGPTGEARGAPRAGEVNWAGRVAHGKKAPAVAWACLDAERPTADADAAEDNGSMPGDEIPRRWCARPSDQHSCSFSVTRLVTTVSGKCGFLWFLNCPV

SEQ ID NO: 137004 - protein, 51 aa, Oryza sativa
  unsure (1)..(51): unsure at all Xaa locations
  Clone ID: PAT_MRT4530_38529C.1.pep
PAAAVAAVVLAVAPSXTTSPGSPSLDRSITLLTHTHTTXTTNTRCLAKLVS

SEQ ID NO: 137005 - protein, 781 aa, Oryza sativa
  Clone ID: PAT_MRT4530_3852C.1.pep
MSNKWLREGELLSESIQIRCPSSTIMCHIGGNSVRALYNPSVGANIMSATFAFDCLGDRSLEPTVRTFRISTNSTTEGLGIISGVPTRHNSVEVILDFHVFEIYDFDILIGHPIEKLLDVPETGVLNLKIGRIATSVPMLQSTNSLMESLPVPEPIEGVMAISPFETLESIFDESIEEFNEGEDETGETMDLPKTDLPSRAPIELKPLPSSLSYAFLNSDAESLVIISDKLSEREMARLIAILEKHSAAFGYSLQDLKGISPTLCTHRILLEPSSTPSREPQRRLNNAMREVIKKEVLKLLHTGIIYPVPYSEWVSPVQVVPKKGGMTVVENSNNELIPQRTVTGWRMCIDYRKLNKATKKDHFSLPFIDEMLERLANHSFFCFLDGYSSYHQIPIYPDDQIYGKTFNHCLENLDKVLQRCQEKDLVLNWEKYHFMVREGIVLGHQISERGVEVDRAKIEVIRQLPPPVNDMGVRSFLGHAGFYRRFIKDFSKIARPLTALLANDVPVDFDDECMKSFKILKESLISAPIIQPSDWSLLFEIMCDASDFAVGAVLGQTKDRKHHAITYASKTLTGAQLNYATTEKELLAVVFAIEKFRSYLVGAKVVVYTDHAALKYLLTKKDAKPRVIRWILLLQEFDIEIMDKKGVENYVADHLSRMQITNMQKLLINDYLRDDMRLKVIDSDPWYATIVNFMATGHVPPVENKKRLIYESRRHLWDAPYLFRVCSDGLLRICVSTDEGIMIIEKCHAAPYGGHYGAFRTHAKIWQSGFFWPSMYDDTK

SEQ ID NO: 137006 - protein, 133 aa, Oryza sativa
  unsure (1)..(133): unsure at all Xaa locations
  Clone ID: PAT_MRT4530_38530C.1.pep
MAPSLLADGDWPLLLHGAAVASGRRRPLVAADATGRRAXFYLRVDDLKYDPFKVAPXPTRKLVRLEQIPEKCVGGVLLTKSADKLERYWMGEIVSEAADANEVEAGKNDVSCDINAHEVDLGKDKKHCICREA

SEQ ID NO: 137007 - protein, 66 aa, Oryza sativa
  unsure (1)..(66): unsure at all Xaa locations
  Clone ID: PAT_MRT4530_38531C.1.pep
FLVYTRELACRGCSFPCISRCFFCMCLXQSSVLSSVLCIECRIKLCAWGLLAFLEVYMLCCIYVCA

SEQ ID NO: 137008 - protein, 273 aa, Oryza sativa
  Clone ID: PAT_MRT4530_38532C.1.pep
MGCKACQKPKVHYRKGLWSPEEDQKLRDFILRYGHGCWSAVPVKAGLQRNGKSCRLRWINYLRPGLKHGMFSREEEETVMNLHATMGNKWSQIARHLPGRTDNEVKNYWNSYLKKRVEGAEAAARKSAEPADVVTGSPNRSETGQERVAADRPASSESSGPVESSSADDSSSLTEPAAGLAAVRPHAPVIPKVMFADWFDMDYGTSLAGTAPGLSYQGSSSVQVDVPCGGAVDSLHGLGDGGFCWDFDDAADHMQGGGGLCDLLSMSEFLGIN

SEQ ID NO: 137009 - protein, 92 aa, Oryza sativa
  Clone ID: PAT_MRT4530_38533C.1.pep
MGFVGALGGSKMGSKRLPIFSLVAPASAQRHLLQRWPSASCTVLSLSGREGGESGGGSYCGVFRPTWTYGIEVVMLVDVRYPVPSCLRGHFL

SEQ ID NO: 137010 - protein, 600 aa, Oryza sativa
  unsure (1)..(600): unsure at all Xaa locations
  Clone ID: PAT_MRT4530_38534C.1.pep
MKERNPAVASSALARILAACASQAKDYGRCIAEKVPEIEQNMCAKEFLALRSCMQTVILYWKIVPSTPAGPPNSDPVNDGPVLSVRYSLDLKAIGIQRSNHEVEFINRETGQTCNKKCRADSETILGFFWTDCPTCDVIIIKTSGLDLFAYEPQSNALHLVDSKKINXMQCTLFTGYQXYGRIYCLQLDRVSMTLNLYRFYRDAVVQQGTLPTYSSRIAVSAVDNIIMVHQIDAKVVILYDVFMDSYAPISAPLPLLVRGLPSNNKQSAQPPDSQSSAYGGTLYGEGWSFLIPDLVCDVENGLLWKLHLDLEAIAASTSDAPLILEFLQRRKSDPSMVKTLSLAIVRTIILERRPITMVAKAMDVVLDSYSRLMKMGGGLPAVRRTSEQNQQPGVQPGVNPDSASGDGNRPVQSNSEVEHGIANLAEHVDRTLLNTSSDSDDIIDASGASDAPDRKPQVLGQDSRPLASGTSTQHVSHVASVAISPSAMFESXELAMQLMELGRQHSPTRKXGVDMLRERGLHHDYVTALLQDGYHLEALRYARKYKVITVQPVLFLEKAVAINSAQNLAAMLSFFSEFTPTFKTTSDYGRYRHILSEMI

SEQ ID NO: 137011 - protein, 218 aa, Oryza sativa
  Clone ID: PAT_MRT4530_38535C.1.pep
MAQREIVEDVEEVRKLKSEDRNYLNRCEKPPVTARLPRLPPVPRGYGYPYRARHRHPSLFFPISPSPPVPSNALAPSPSSSPPPPPLRSPLAAAQIRADDAAAFAIVRATPSAAGTYSVPFAGGSGDRPAVAAALHCSPSSVAVGFVRAVEDACGVVFPLQSKSRLSSMEKPGSIEAEGRAGGFEGPSQCEDVKQNLVVLCRIFVDVALRPGTKQRNS

SEQ ID NO: 137012 - protein, 48 aa, Oryza sativa
  Clone ID: PAT_MRT4530_38536C.1.pep
IGTVASHSLAVTKISAPTATIIVIVHPKLLPMPADIKPLPSTPLLSWP

SEQ ID NO: 137013 - protein, 122 aa, Oryza sativa
  Clone ID: PAT_MRT4530_38537C.1.pep
ELTIDHTWQIYVIYKPLNALISTVRQSHWHGRDVIEIPHERSRHLLALSVRHRRRHRRHRHDDGATADGAELVSNRRRRRLEVNAGHVDGVINAVLHRRRRHQLLLPQSGGGGRHGHRVEVG

SEQ ID NO: 137014 - protein, 110 aa, Oryza sativa
  Clone ID: PAT_MRT4530_38538C.1.pep
MKMRSSAFSVSRAPPCVASPFPSTQAIVDRATAPKASPASQKEPEGQKEPTPSTCRSLPPLEHFEGRHCRPSIAEPQTTFTASSEPPPIAAGIGNNVAGRHRLCRCSFYR

SEQ ID NO: 137015 - protein, 64 aa, Oryza sativa
  unsure (1)..(64): unsure at all Xaa locations
  Clone ID: PAT_MRT4530_38539C.1.pep
MQEYDKRSHGIDFLNRDFVVRGKLIYMLGVCMKCMAMHPEASAVAPGLLDMIRSRAVXQHPEAY

SEQ ID NO: 137016 - protein, 236 aa, Oryza sativa
  unsure (1)..(236): unsure at all Xaa locations
  Clone ID: PAT_MRT4530_3853C.1.pep
WSRDLRAXFPLSPAALSPSRCYIIAPRAPLFRFRRSPLALAVGIVLAPCSSLPAVAAELRSAAAVAPVLLPTRRPLRPLRRVAADPVRRSASPADRRSAVAIVIPSRAAVFFRSGRRSHRRRCPGVSRGPPFAFPLPSSLSGAAPPRRWSPAVTIGARARRSRRPRRRGRPRARPRGCQVGPAVSRPRPRVRLTRGTHGADRRQPRAPDAAASEDPFFVEVEAGVWESEQGKSHHP

SEQ ID NO: 137017 - protein, 85 aa, Oryza sativa
  Clone ID: PAT_MRT4530_38540C.1.pep
MAKQLNQNGKTLVPDFHRKQEAVLLKAISYEHHSQNSTSLVAHFAFDGSGRNGWMKINHGRAQIYHVATGILTKGINAFPLLVGD

SEQ ID NO: 137018 - protein, 61 aa, Oryza sativa
  Clone ID: PAT_MRT4530_38541C.1.pep
RLARQCITRRQHVVPCLSNTPMRPRHRVGRPRAIPDPVPEQRVPALPSSVSTYSQRWVIMV

SEQ ID NO: 137019 - protein, 81 aa, Oryza sativa
  unsure (1)..(81): unsure at all Xaa locations
  Clone ID: PAT_MRT4530_38542C.1.pep
PPPFFXRGVGGEFGVLIPAPNSYPPVLAQQRGMHRTEEVACENREMWEHPKEGMPYCLLYSDDLPTKSIACKLGAAMGSER

SEQ ID NO: 137020 - protein, 136 aa, Oryza sativa
  Clone ID: PAT_MRT4530_38543C.1.pep
MDGDGGGGWDDQGNGGGETTKYRGVRRRPSGKFAAEIRDSSRQSVRVWLGTFDTAEEAARAYDRAAYAMRGHLAVLNFPAEARNYVRGSGSSSSSRQHQQRQVIELECLDDQVLQEMLKGGDDQYRSAAGSKRNNY

SEQ ID NO: 137021 - protein, 186 aa, Oryza sativa
  unsure (1)..(186): unsure at all Xaa locations
  Clone ID: PAT_MRT4530_38544C.1.pep
NSCQNFGNLLYHLVWRWTSDQRYSARSAYQAFFHGQHSFACADLLWHAKGPAKYTFFLWYAFXQRCWTADLLHKCSIDSHLAYLFCAXDLETANHILLDCVFARQVWLRVLSPPGWAALSXPRGSWLQDWWLSSRACLLEHLCAGFDSLVLLVSXQLWKKRNSRVFDSALSLVSVVLESIHSEGYL

SEQ ID NO: 137022 - protein, 463 aa, Oryza sativa
  Clone ID: PAT_MRT4530_38545C.1.pep
MGYKVKESSLNEGDNESLMKPFELSEIDHVMKSMKTNTAPGPDGFPVGFYKKLWPEFRGLIKEMLDDLQRGILDSDRINYRVISLLPKIKDANTIKQYRPICPQNVILKILTKALTMRITGVIGGIINWTQTAFIPGRYILDGCVILHEVLHELHKKKESGVIFKIDFEKAYDRVQWGFLYEVMQKKNFNIIFIEWIKKITEGGDALSVILDGANSNGVLEGLVLNLVPGGLTHLQYADDTILFTKATKENVLTLKFLLFCFEEMFGMKINYQKSEVYVLGVPKDEEELYADMLNCKVGSLPFTYLGLPMGVGKEVMGAPNWVLSFRRNLDQSDKAQLDVLKSLLQDVRLDVLPDSLIWPHEKNKKFTTKSMYRLLKFGGVVDKEMKEIWGCKVPLKVKHFLFLAGRGRIPCAKLLVQRNWKGGKVLLSKERDREALNALLEKLKAKLESLRPVNVLPDNISV

SEQ ID NO: 137023 - protein, 134 aa, Oryza sativa
  unsure (1)..(134): unsure at all Xaa locations
  Clone ID: PAT_MRT4530_38546C.1.pep
RRRLRPPSPPPPPSPPLPPSLYTDQRRPSSSWSPASSPTRIADPHRARRCPSSSSSPTPXPTPDADLPDRRRPPPSPALPPRTPSPSPAPPPPSPAPPPPTSDXPPPNPAPPPPSPSPPGCPQVSPPSRRPLLP

SEQ ID NO: 137024 - protein, 581 aa, Oryza sativa
  Clone ID: PAT_MRT4530_38547C.1.pep
MNGIKLCYIYIDDWDQAALSLRMVIKNKKDGQNWELINVYGPAQQAHRGEFLAEIGNKVQQGVYPMILGGDFNLYRYLDEKSGGGGVDVRRTEAFNNFINHYELQELFKLGGKFTWTNKQINPIRCVLDRILVTSSWDHLYPLAIVSSLLRVGSDHCPLLLDTREGERVRGNNFRFEMGWFELEGFKKELLEKWPARIQSKIMDYWHLLMPYLRRWLRGWSANMVSKQKKRRKEIEQKLTEIDNIAKERDLFPQEWELFGREELRNIHLEQGVWANRLSLNERDNESLMKPFELSEIDQTFRGLRQGDPLSPILFNLIGDALSVILDGANSNGVLEGLVPNLVPGGLTHLQYADDTILFTKATKENVLALKFLLFCFEEMSGMKINYQKSEVYVLGVPKDEEESYDDMLNCKVGSLPFTYLGLPMGVGKHVRLDDLPDSLIWPHEKNKKFTTKSMYRLLKFGGVVDKEITEIWGCKVPLKVKHFLFLAGRGRIPCAELLVQRNWKGVVYKAISLMQRWKVLLPKERDREALNALLEKLKAKLDSLRPVNVLPDNISASVLLLLGLRSLSRLDVFLGRACTH

SEQ ID NO: 137025 - protein, 172 aa, Oryza sativa
  Clone ID: PAT_MRT4530_38548C.1.pep
MALETCFRAWATLHAPQPPSSGGSRDRLLLSGAGSSQSKPRLSVASPSPLRPASRFACQCSNVVDEVVVADEKNWDSMVLGSEAPVLVEFWAPWCGPCRMIAPVIDELAKEYVGKIKCCKVNTDDSPNIATNYGIRSIPTVLMFKNGEKKESVIGAVPKTTLATIIDKYVSS

SEQ ID NO: 137026 - protein, 146 aa, Oryza sativa
  Clone ID: PAT_MRT4530_38549C.1.pep
MAVGGGRPAVGGGAAAETVGSGAGAPLTPFDQPARPGGTTAAVQEVYGAERRGALEARKIYVGMYASYASTRPNAPISLLKPKTKWIRPGLVFPVNSRPPPTPPLAAACRPPLVVAVVTPPIEMPPIALPPHLHPSPHLRPPRRLL

SEQ ID NO: 137027 - protein, 190 aa, Oryza sativa
  Clone ID: PAT_MRT4530_3854C.1.pep
MIREQTFSGGISENPYLHLRDFELVCSCLSIVGMTHETLKWKLFPFSLRDEAKQWYTMSVKKFHGEWEELKSNFYLTFFPLTHVINLRLDILSFRQNEKESLGVAWARDDLYEDYENTLNYSSKIKAHPKHEPFEESDVLKVELVTINKALPGDTPDYHDVSYVSIVLCHRITPSRHMVLAPKENFPIDG

SEQ ID NO: 137028 - protein, 53 aa, Oryza sativa
  Clone ID: PAT_MRT4530_38550C.1.pep
MQMSEKKALTLAPDIQPTAISVFLPEKANGVPARGRVSTAADAAAGVDTLLYR

SEQ ID NO: 137029 - protein, 140 aa, Oryza sativa
  Clone ID: PAT_MRT4530_38551C.1.pep
MAATADGEGEVAPTWRHEGTFVGQHVDDPDRPEQPIGRPRASAARQGARWPGASRAAAAGQKAAALSHMVAGGGRRRHTREAAWKGEGAHQEDGDGEAKTGRRLTTRIGGGVSRVGVGDGASATPDRGRGAAEGQRDLGS

SEQ ID NO: 137030 - protein, 270 aa, Oryza sativa
  Clone ID: PAT_MRT4530_38552C.1.pep
MSSLFILGCPVLCLPGGAGHGGGAGRGRLLPPPVARFAGAGRPLRLTVAQAAANPGPWLAWDDDSTKVVTPYKAIAWSAAEALDLLEQTPPPSAGSAASQDVQEIIGTFKNLKELADSDEVPMEPLAATCTLLRYHWYLWQCYHGDPVTRGFPDGLLSFLHSCISFACGPDGYALPYYLNIFGIKADKLPKEAWAKDLVTVAMYASQGTRLVVGKHEKHLLDVFRMRLIADEGKQEEESKIRAEEASHRKWRPDHFVDDDDDGMLGLGGV

SEQ ID NO: 137031 - protein, 346 aa, Oryza sativa
  Clone ID: PAT_MRT4530_38553C.1.pep
MDLQEAAMEARNGHRIPPTEEKVIIDTDPGIGTLILISPLLLPASVTVIHPSILTITNSYQFPDDSVAIMMAFEAPGVKCDRAGRPEVPVAEGSAEPLKGGKPHVADFVHGSDGLGNTSFPDPTTTNKVEQSAAEFLVDKVSESPGEISVLALGPLTNIALAMKKDSSFASKVKRIVVLGGAFFAAGNATPSAEANIHSDPEAADIVFTSGADIYVVGLNITTQVYFTDKDMLELRNSKGKHAQFLCDICKFYRDWHVHSYGVDALFLHDPVSFTALVHPEYFTFKKGVVRVETQGICKGHTSMDMGLKKWNSDNPWTGYSPISVAWTVDVPKVLAYAKELLFNAQ

SEQ ID NO: 137032 - protein, 89 aa, Oryza sativa
  Clone ID: PAT_MRT4530_38554C.1.pep
SLFPEGKERPNGGKPRKRIKPPARPPRGPPPGRERPPELPPREAPGGEGKPGPKHPHAPGGPGVPPPGGPGGKGSHGQPRGKKKGAEEG

SEQ ID NO: 137033 - protein, 73 aa, Oryza sativa
  Clone ID: PAT_MRT4530_38555C.1.pep
LTDSSTPFCYSRGALCNNTRFASTSLAFPILSNTRTRTPRAIPLPPPLLSLSLRRSRGSKLTYACMRRHSSSI

SEQ ID NO: 137034 - protein, 97 aa, Oryza sativa
  Clone ID: PAT_MRT4530_38556C.1.pep
MSFKDKNSLSTSLTEENITPFPAERTQLYDLGTMKFCSDSSGGDEPRAPIAGDGGSDEPAKRQWTDPSSNSSQGEASSSLLRVKTGQVRSDLTLPIY

SEQ ID NO: 137035 - protein, 364 aa, Oryza sativa
  Clone ID: PAT_MRT4530_38557C.1.pep
MCPCFGSRRKDGSEDPVLGRDGNSLNSSELRSMSDRVPPSPLRVPASPSRFSLSSSPSRNEPLNLSLEQVIKLTHNFAPDLMIGEGYFGKVYRAQLRDGHIVAIKRAKMSRWLIHFCVDQYGNETVMHWNLVQLLGYIDKRNERIVITEYVPNGTLREHLDGQRGLVLSFNQRLEIAIDVAHGLTYLHLYAEKPIIHRDVKSSNILLNEGFRAKVADFGFARTGPTEPDQSQIQTDVRGTAGYVDPEYLRTNHLTVKSDVFSYGVLLLEILSGRRPIEVRRAARERITVRWAFEKYNRGDVKEILDPMLTESVNEDILNKIFDVAFQCVAPTRADRPTMKEVAERLWKIRRDYAKTQRRAEMAL

SEQ ID NO: 137036 - protein, 47 aa, Oryza sativa
  Clone ID: PAT_MRT4530_38558C.1.pep
LVWCQDACSHEAPPMLTLSCERRVHSIHQVHHRQHIRRTFWSARDVI

SEQ ID NO: 137037 - protein, 69 aa, Oryza sativa
  Clone ID: PAT_MRT4530_38559C.1.pep
PVPVCPRCLVLLLSTSPSAGSPSLALPVRRGALLLRGSAAFRPVGFASPSPLSAAWVAPGLPARSLAGS

SEQ ID NO: 137038 - protein, 1724 aa, Oryza sativa
  unsure (1)..(1724): unsure at all Xaa locations
  Clone ID: PAT_MRT4530_3855C.1.pep
MSFVISLTPLIIIKELCSRDGCSERLGLCNRMPRYKPEYLFGVEGFVQELCTMSFAIGFGTAPFYAQIPHDRHEEKCRVKVTLNSNSDEIPSVMFEAGGRNYIHACQEVARIAIGELRDRYCDQLADTEYRYHPRQPQGSDRGSYLETEGIENDATTRHLVEMLWAMDETRAETVLAAQDREDRNRGKICKLEDKVDRLEKELAALKGEAPPQKARVRLTARKRALFVPRYQLAPKFSPVSLLVXCPCQMVLTRSNGNGPNNNNNNNNNNGENPTLAQVLAQQTQLMNIMMQQLQNQQNQGNNHAPPQNKLAEFLRVRPPTFSSTTNPVEAGDWLHAIEKKLDLLQCTDQEKVSFASHQLHGPASEWWDHFRLNRTTTEPITWLEFTAAFRKTHIPSGVVSLKKKEFRSLTQGSRSVTEYLHEFNRLARYAPEDVRTDEERQEKFLEGLNDELSYPLMTGDYPDFQKLVDKAIRQEDKYNRMEQKKRQIAQFMAQQGNSQRPRLTLGPQSMPQGGSSSVVRPQRQFFNNNAGNNLRNQAPRPVAAPTQQQPAKREQGSKPVVCFNCGDPGHYADKCPKPRRVKVVPAQSNSTAPASKARVNHVAAAEAQDAPDVILGTFLVNLVPATVLFDSGATHSFLSMSFAGNHGMEVEDLRRPLMVSTPSNQALSLQRSPSVRIEIQGVPFLANLILLESKDLDVILGMDWLARYKGVIDCANRKVTLTSNDGRVVTVHALSSESLRSRLNQITLEEIPIVREYPDVFPDDLPGMPPKRDIEFRIDLVPGTTPIHKRPYRMATNEFAEVKRQVDDLLQKGYIRPSSSPWGAPVIFVEKKDHTQRMCVDYRALNDVTIKNKYPLPRIDDLFDQLKGATIFSKIDLRSGYHQLRIKEEDIPKTAFTTRYGLFECTVMSFGLTNAPTFFMNLMNKVFMEYLDKFVVVFIDDILIYSRTKEEHEEHLRLALEKLREHQLYAKFSKCEFWLSEVKFLGHVISAGGVAVDPSNVESVTNWKQPKTVSEIRSFLGLAGYYRRFIENFSKIAKPMTRLLQKDVKYKWSEECEQSFQELKDRLISAPILILPDPKKGFQVYCDASKLGLGCVLMQDGKVVAYASRQLRPHEENYPTHDLKLAAVVHALKIXRHYLFGTRTEVYTDHKSLKYIFTQPDLNMRQRRWLELIKDYDMGIHYHPGKANVVADALSRKGYCNATKGRQLPLELCKEFERFNLGIASRGFVAALEAKPILIDQVREAQINDPDILEIKKNMRRGKAIGFLRDEQGTVWLGEKICVPDNKDLKDAILKEAHDTLYSIHLGSTKMYQDLKERFWWASMKREIAEYVAVCDVCQRVKAEHQKPAGLLQPLKIPEWKWEEIGMDFITGLPRTSSGHDSIWVIVDRLTKVAHFIPVNTTYSGSRLAELYMARIVCLHGVPKKIVSDRGSQFTSNFWKKLQEEMGSKLNFSTAYHPQTDGQTERVNQILEDMLRACTLDFGGSWDKNLPYAEFSYNNSYQASLQMAPYEALYIRKCRTPLLWDQTGERQVFGTDILREVEEKVKIIQERLRVAQSRHKSYADNRRRDLSFEEGDYVYLRVTPLRGVHRFHTKGKLAPRFVGPYKIVSRRGEVAYQLELPQSLAGVHNVFHVSQLKKCLRVPIEEANLEQIEVQEDLTYVERPIRILEIDERRTRNPVIRFCKVQWSNHSEEESTWEREDELKSAHPHLFASSSESRGRDSV

SEQ ID NO: 137039 - protein, 397 aa, Oryza sativa
  unsure (1)..(397): unsure at all Xaa locations
  Clone ID: PAT_MRT4530_38560C.1.pep
TEADPVCQPRRVADKRTPLVTMWAAHVETTWLPSGHTNTXPHAHTNDYRHRYTGTGVDSRTTGTGRHRKDEDGSXRRRDPYHHAMRCGNDNDERAAVTNGNDGDDDEGTTSAVILGRRRDAAGTRLDDAEPRMKTTTGLXATLTKGGRRTARLXRRDERHDDRERREDDDDRXRRGGDEGSRQQLHGGKDGVEHAAAMLTTVAAQRDDEPARRNGQXRSRRGGWRSRRGSNVRRLPXAKPRSGRGGGRRCDFDEGDGDVGRRSGAATGATGGGTVAATPLFAGEDAPPVISPRNGDDAGEEEAAAXRSAYRRRTGAGRMRGGTGHRRGHRSGELXSEEEVXRGGGWRLSAGEGGGDVSRRTGEAAQAAGGWPAPRKEKEEAGRGGAATGEFGKGLKR

SEQ ID NO: 137040 - protein, 61 aa, Oryza sativa
  unsure (1)..(61): unsure at all Xaa locations
  Clone ID: PAT_MRT4530_38561C.1.pep
TLLALSAVVPGQPVNPQLLVRERPQHSGXVANRLAQDQVAATFLPPQPAQQQPLQPIQQTP

SEQ ID NO: 137041 - protein, 114 aa, Oryza sativa
  Clone ID: PAT_MRT4530_38562C.1.pep
GQKTFLTKSFKTQPPQKRKRAPGNGKRGKIWAKTPKGGLTKPNFFPKGEIHPPEKLFLNKKFGGGWKPPKTFLRGMGEKKTPWPPPKKKRGGPPAPLDGRLKTAPTKNGFFGRK

SEQ ID NO: 137042 - protein, 71 aa, Oryza sativa
  unsure (1)..(71): unsure at all Xaa locations
  Clone ID: PAT_MRT4530_38563C.1.pep
SRQKRPXVGXMXDIAXVRXCGSXIHXXGLQKCHEKRVGCRSKSIQEDTMASACCLLCIKEXYWLFLFLLFG

SEQ ID NO: 137043 - protein, 61 aa, Oryza sativa
  unsure (1)..(61): unsure at all Xaa locations
  Clone ID: PAT_MRT4530_38564C.1.pep
HPGRDRVQGGDCLPIQSQHLNRSFYQQMTQISYTXFYIPIILNVHLSPLMGGGTPFLKIXP

SEQ ID NO: 137044 - protein, 149 aa, Oryza sativa
  Clone ID: PAT_MRT4530_38565C.1.pep
MAAATIWEQEGLPPRRHHRCRRRNTVSCLRLFVSNIMAAPPRAPISRRLEEELASGGDDVRLRRRRLGLGEGYERARDSGGGRCMDGRRRRHERREVAAAATLEKGGPGSDAEYHLLRRIPPRPQPLGATAIDDSAPLGLGGGGGSGQG

SEQ ID NO: 137045 - protein, 236 aa, Oryza sativa
  unsure (1)..(236): unsure at all Xaa locations
  Clone ID: PAT_MRT4530_38566C.1.pep
YELLHHKPAGIVLNHRTERSGIHPKAETGKAAEFRQRHAIATGNDRTKTYWAPSSSSPFCGGGGRDGNGGRLTGGGSGDDGGGDGGARRRGSGGTAARERRRGGTGTXRRSSTKAAVWQHYGGGAVKREEMEGNGAGREAAMGRARRWDGAARRRWRRRRRARGGDGNGTWRRRRXWRRCAAQRRAMGRARDGTGGDRAAAVARGVRRVAMATATAPQRRHRAQGDVTSSRRRRHR

SEQ ID NO: 137046 - protein, 349 aa, Oryza sativa
  unsure (1)..(349): unsure at all Xaa locations
  Clone ID: PAT_MRT4530_38567C.1.pep
EFFLPQKPNRLTHLLETERWGXCGRMEGGGVKRGGRTSSSSVEYPVVVNGGVDGGGGGGCDSGRRRRARRRRPVLAGAAPDIARDVSPPPPPPPPPPASRRGXPSSSSSRRRRYELLHHKPAGIVLNHRTKRSGIHPKAEIGKAAEFKQRHAIATGNDRTKTYWAPSSSSPSCGGGGREGNGGRLTGGSSGDDGGSDGGARRRGSGGTRTAVRGHGNGGAAARERRRGSTKAAVRRHYGGGAVKREVMEGNGCGGEAATGRARRWDGAAXRRWRRRCRARGGDGNGTWRRRRCAAQRRAMGHARDGTGGDRAAAVARGARRVATATVTAWQRRHGVQGDVTGERRRRQR

SEQ ID NO: 137047 - protein, 314 aa, Oryza sativa
  unsure (1)..(314): unsure at all Xaa locations
  Clone ID: PAT_MRT4530_38568C.1.pep
MENPPSVRRADAAREGEGGGRGGIGLPRAPRGFAGAGDSARDWEESLEDEQGEQRHNTRSAQRLEPGRLDARPRKRRCTAGDPPPMTMRCSGHPAHGATASGSTEHTSTAATFFLFLVGLELHPALLHRTVVTVARISLSTSHPECQESGVEHLRAPTLFHLCTAPYHVVPRRHWRWVPGGTVLNHRTERSGIHPKAEIDKAAEFRQRHAIATGNDRTKTYXAPSSSSPSCSSGGRKGEGGLLTGGGSGDDGGGDGGARRRGNGGAAARERQRGSTGTAARRHXERRRGGTGTAARWHESGGAVEREEGRKGIL

SEQ ID NO: 137048 - protein, 97 aa, Oryza sativa
  Clone ID: PAT_MRT4530_38569C.1.pep
MFTYMIVLCHDDDFRVVFGSIREVLRLLNIIIRCYMPRDSRGGSLMVTAQYGYSSTLVYNPKLLSWGGYSSVFSPGWMAMMGCRKKLGNQGWSLEIP

SEQ ID NO: 137049 - protein, 344 aa, Oryza sativa
  unsure (1)..(344): unsure at all Xaa locations
  Clone ID: PAT_MRT4530_3856C.1.pep
MNQKEMWMLTGQQDPIPSPAMLAANEDRRPSYVQPRLVFTTETSRKRDTADRHYKNRVIGYKTPVVLFYYFRVKRGQLTAWRDHGGAASGQINDGRLTAMPMWRGVTERRRSSAGQRHQAQGEAPAQGGQAAALVGLSSHVRXLERRLDRRKRSPRGRVSRRAEAKRPPVSNSLMVVLDDPVVSRIFVEARFHNRDIKLTILRPAPLLGHLPMHTRRHLSSSATSPPWTTPTLESHRGGLVEMRCIILANVESLSHPLPLNHISIYTHDGKIRFLLDFCKYYILFKMYDIIFKMKNDFLWDEVVHMRQTSIYYIIKTTLKGGTTFAVKARNSHINRRKRKEESK

SEQ ID NO: 137050 - protein, 373 aa, Oryza sativa
  Clone ID: PAT_MRT4530_38570C.1.pep
MVPGHHGIKYKKSLKFFKIFKLPRKPQRSTRLVRGDRWSGSARADRMAVKRRGQGTGTAQHWPRRVLFGARGGSGGGSSSGRRREERRQRQAVPSPPPDPAGEAAAATGSPPPDPARGEAVAVGSHGRRREYELLHHKPAGIVLNHRTKRSGIHPKAEIGKAAEFKQRHAIATGNDRTKTYWAPSSSSPSCGGGGREGNGGRLTGGSSGDDGGSDGGARRRGSGGTAARERRRGGTGTTARERRRGSMKAAVRRHYGGAAVKREVMDGNGAGREAAMGRARRWDGAARRRWRRRCRARGGDGNGTWRRRRRRRRRRCAAQRRAMGRARDGTGGDRAAAVARGARRVATAMATARQRRHGAQGDVTGERRRRRP

SEQ ID NO: 137051 - protein, 214 aa, Oryza sativa
  Clone ID: PAT_MRT4530_38571C.1.pep
MDSGAQGWARLAGRVERCRHGAETEGARGQAVDGSVARGGGSGEHLVVSGSSFPTVAARTELGHARPTWPLLRPPSSSRWTWPLQAASGGGGKETEEGGGCGGGGGHSCSPPTPADMFPLLVSCRRPPLRVTSTAAVLALLAIATTFLLTSHARRSSAHPRAQLPTFAFAASAFIIGCTSDLLLHHQRPSDLRLRCRPPAPTLPPTSPPLRAAL

SEQ ID NO: 137052 - protein, 588 aa, Oryza sativa
  Clone ID: PAT_MRT4530_38572C.1.pep
MSRMAAPPPPLSGTGKPPTLPFSLKKPPPMPVYKDLHFNRDLSATKKLQAGVDLVARLVGVTLGPKGRNVVLSNKYGPPKIVNDGETVLKEIELEDPLENLGVKLVRQAGARTNDVAGDGCTTSIILAQGLIAEGMKVLAAGINPVQIARGIEKTASALVSELRLMSREIEDHEIAHVAAVSAGDDYAVGNMISDAFKRVGRKGMVRIENGRGTENGLEIVEGMQFERGYLSPYFVTDCTNMSAEFTDCKILLVDKKITDASEIIRILDSAVKEDYPLLIVAEDVEEKAMADLIKNKLKGTIKVAAIKAPSFGEQMTQCLDDIAIMTGGTLVREDMGYTLEKAGKEVLGSASKVVVGKDSTLIVTDGSTQHVIEKRVAQIKGQIENSSERYQKKILGERIARLCGGIAIIQVGAQTIIEMKDKKLRIEDALNATKAAIEEGVVIGGGCSLLRLSMKIDRIKESLDNMEQKIGADIFKQALSYPTALIANNAGVNGSFVIEKVLLNEDSRYGYNAAKNRYEDLMAAGILDPSKVVRCCIEHAAVVAKSFLTSDVVIVEAKEGKPVRIRPPMPPKSLIPPMPASASGIRV

SEQ ID NO: 137053 - protein, 310 aa, Oryza sativa
  Clone ID: PAT_MRT4530_38573C.1.pep
MGDSLLVISQLVEEYECKNDVLMIYNEKCRELMNNFRLVTLRHVSREQNVEANDLAQGASGYKLMAKDIEVEVATIAADYWSKGHKFILVATDYFTKWVETVPLKKVDSRDAIQFVKEYIIYRFGIPQTITTDQGSIFVSDEFVQFADGMGIKLLNSSPYYAQANGQVEASNKSLIKLIKRNIFDFPRQWHTRLAEALWSYRMACHGSIQVPPYKLVYGHEAVLPWETTIGSRRKYLQDKLTADEYYNLMVDETEDLVQSRLRALAKVTRDKERVARHYNKKMVPKSFSEGELVWKLFLPIGTRDNKFGK

SEQ ID NO: 137054 - protein, 52 aa, Oryza sativa
  unsure (1)..(52): unsure at all Xaa locations
  Clone ID: PAT_MRT4530_38574C.1.pep
PSPLAVGNVKRGDTPRVCVCVTRSPXAWYHAXPSYPTWAVYGVXCVCGRAVC

SEQ ID NO: 137055 - protein, 192 aa, Oryza sativa
  Clone ID: PAT_MRT4530_38575C.1.pep
MYTARRKIQKDKGLEPTEFEDTVAQAFFDLENGNQELKSDLKDLYINGAVQMDLPGNRKAVIIYVPYRLRKAYKKIHVRLVRELEKKFSGKDVVLVATRRIVRPPKKGSAVVRPRTRTLTAVHDGILEDVVYPAEIVGKRVRYHLDGRKIMKIFLDPKERNNTEYKLDTFSSVYRRLCGKDVVFDYPMTETA

SEQ ID NO: 137056 - protein, 116 aa, Oryza sativa
  unsure (1)..(116): unsure at all Xaa locations
  Clone ID: PAT_MRT4530_38576C.1.pep
ITLKGKGGVPPGGGVLKPPLGVLKPRGPSXGLTRXVFLXXGTXVXXGKKXAXIWTMGKCPIFGCTEATQGFKELGEAKKPNPEAFVRIIGFEKVRQVQLISFFAKKPPGWEEFGGK

SEQ ID NO: 137057 - protein, 131 aa, Oryza sativa
  Clone ID: PAT_MRT4530_38577C.1.pep
LELVDPRAAGSPRNFLRLHRRLLPLPRGASLHHCRIGSCLLSPLPLLLSSPMPLPSSPTTPVTPSTAAWSPPPCRSPPQLGRLVQGSVGATAPSPTSGSAFRQCRCSIVLRWSSLPSRLPSCRHYEGHSLP

SEQ ID NO: 137058 - protein, 40 aa, Oryza sativa
  Clone ID: PAT_MRT4530_38578C.1.pep
MAGRPVDGNDYGASEITLIPTGSSHALELDDGLLMVTAAG

SEQ ID NO: 137059 - protein, 53 aa, Oryza sativa
  Clone ID: PAT_MRT4530_38579C.1.pep
KQEHERTVSVFHWLLTICITTLQALTQWIIHFYNRQVPRFLSELIEVGQYHPL

SEQ ID NO: 137060 - protein, 814 aa, Oryza sativa
  Clone ID: PAT_MRT4530_3857C.1.pep
MEVELTNIQKATSSDYWSLASNQYPCGKFPKVSVGVTIPRTSSVSRGRDAASTAAFEKNLSQGTDGRSRPPKMDNASLQVSPEAANHGGSAKEVPKPVPAKVSVSQPDDNAIEQTGTFSFGTRREQDSHLDQLDRPPLVSSQGKRQVESADKNKPNSEMLRMKLWEILGGTSQNKEAVASPNPEDIETPCQPKSQIANGPSSGRQKVFTSPVPYNIKTPAQFNSQTANKPSSDPIESDSDSPQVVEVRPITRSLGRKKEPTGSTHQDKSGSAKKPLSTHRSTPKQKILDNVFAFNDKCTPKTVGKSANGESGSLRNLRSLSRRAKVEPKKAHCSDRISHKTTQDDMERKVPSKYIPSEKKGKTAESCSRSPKRERRVNTMANVGARKMQLSENLLVKTLNDGEHKLSSPQLTSFKSKGKCSSISPQQKENDNTHIPEASDRTAARNSFNSTPSPAANPSPVLRKYSWEHDENPAINGKSGQKDASPLADRFSDMPDDFASPTFAANIKISPHRSKMLDDDLFSSKYPKGVNRSRSTSFTSDPESEPLDKMEKTNELPGSESPNSQEERQNRKQPHLSPLSPIESEGAQISIPSFRKGYKSHKWLSDVDSPDKSSIEHLGRKSHLKEGTQETMSDKEPEKVPENYLTRAFDQLVVVLGRFQTKIKSETRNKSSKILAATGEIIRQHLEGVEGQMQADVDKLVNAGKSKRKRLESTFEEQQEKLRILHEKFKEEVNQQLLGCKNSVEDFEAYHAELKGVADKQKASHKKLLQNAEKTVGAQLSDAETKIAEVQKRARKRMKGLKFVLKELIAETAE

SEQ ID NO: 137061 - protein, 132 aa, Oryza sativa
  Clone ID: PAT_MRT4530_38580C.1.pep
EHFISSLSDCWMHVKKQSLYASADEFQDLVKEVLSWDIRSLSQRIRPHDVTIKDVTDNGGSKIDNGCSNDEDRQSVDPSTSVVYHLHLEGIDVSYRIDQDSNIVVENAALLSSAVNQHRYSYLTWREKVSIL

SEQ ID NO: 137062 - protein, 205 aa, Oryza sativa
  Clone ID: PAT_MRT4530_38581C.1.pep
MASRKLVLGLTAARRLRSRAPVLVSSSPFLEASTSTSDATAATATRGSGLGPWGLFLSSRALSSTRPVSLSAGDAPGSSAADHRSILPEDEYHKLADETIHDLLEKLEEYGDSLQMDGFDIDYGNQVLTLRLGELGTYVVNKQAPNRQIWLSSPVRLSTFVRSGPSRFDWDAPTNCWIYRRTGANLVELLEKEIGELCGTPVELS

SEQ ID NO: 137063 - protein, 241 aa, Oryza sativa
  Clone ID: PAT_MRT4530_38582C.1.pep
MGTEEKKHRQQSRSRSRRKDVTGKGSRCEVASKASEDGRVQKRHKQGYTRTTLPSFPLLYVLDRPTLQPDASLAAAFHPCLPACTRSSARSSELIARCCCACGFGGVGQVGEYERCHSVPGGGLELGDTNPPTRTLAMVGTSSGNGLSNGDDNYGSSIFSLKSPLAWTQPPPSLRTGSSTMRRCDGIDLPPGDPTTDRSTATIGVWRGSARGGGGARRGNDSLDDDELLGLGDGATADERR

SEQ ID NO: 137064 - protein, 75 aa, Oryza sativa
  Clone ID: PAT_MRT4530_38583C.1.pep
NPFCLYQRKPPSTPRARGRFSTGSAIVAARSRPDRPRLVPTVPRIPVYLSLYLSLSGIGAIAFLFARRRSARMGA

SEQ ID NO: 137065 - protein, 57 aa, Oryza sativa
  unsure (1)..(57): unsure at all Xaa locations
  Clone ID: PAT_MRT4530_38584C.1.pep
LSIERHIPFSFQGSTASSISRRPAALYSHTPXSWDAAQYIESVVVDVVNLVGGVGGI

SEQ ID NO: 137066 - protein, 173 aa, Oryza sativa
  unsure (1)..(173): unsure at all Xaa locations
  Clone ID: PAT_MRT4530_38585C.1.pep
SSAHAAMAAAAAPASAANNGGGNWPGQDSCLTAAPGRGAHSKRSCATAATAAAWHTLGPHPTFXSSLSSSRPSSDFPSSKKLSATRLNGSSGSRGKKSPGPAGVKVGMEAGVXWRCMHCASEKTSXLLTGPLGPKTLCNACGLRFMSGRLMPEYKAAAMPPLWLTTSGGDHSS

SEQ ID NO: 137067 - protein, 84 aa, Oryza sativa
  Clone ID: PAT_MRT4530_38586C.1.pep
MAAALSAARQEAVAPSSGQPSLSAAAARTSATPTFAPFPQRHQCRYLPLLRAVAPSVWQERNRGGMDGGSIFDAAWRRADVAGS

SEQ ID NO: 137068 - protein, 76 aa, Oryza sativa
  Clone ID: PAT_MRT4530_38587C.1.pep
MGMRMGASIVVAGLILKLHHCYHHPSQPQSPPLPSCATSSASVAVTIGPTERVAGGGDGEDAEVTEEDGSGIGDGD

SEQ ID NO: 137069 - protein, 154 aa, Oryza sativa
  Clone ID: PAT_MRT4530_38588C.1.pep
MIKRWHSSSRISRTPSGCSASAGSTSARSSHGGGRVGGEEWGRSVVASGGGGGGGGGGRGGSVSFHGADGVPPGLHPVYVGKSRRRYLIAADLVGHPMFQNLVDRSGGGGVGGGGGGGTVVGCEVVLFEHLLWMLENADPQPESLDELVEYYAC

SEQ ID NO: 137070 - protein, 332 aa, Oryza sativa
  Clone ID: PAT_MRT4530_38589C.1.pep
MTTQGFAPVLAVALLLAAFPAAVQSIGVCYGVIGNNLPAASDVVKLYKSKGIDSMRIYFPRSDILQALTGSNIALTMDVANENLAAFAADATAAAAWVKQNVQAYPGVSFRYIAVGNEVTGDDTGNILPAMKNLNAALAAAGLGGVGVSTSVSQGVIANSYPPSNGVFNDDYMFDIVEYLASTGAPLLVNVYPYFAYVGDTKDISLNYATFQPGTTVTDDGSGLIYTSLFDAMVDSVYAALEDAGAPDVGVVVSETGWPSAGGFGASVSNAQTYNQKLISHVQGGTPKRPGVALETYVFAMFNENQKTGAETERHFGLFNPNKSPSYKIRFH

SEQ ID NO: 137071 - protein, 230 aa, Oryza sativa
  unsure (1)..(230): unsure at all Xaa locations
  Clone ID: PAT_MRT4530_3858C.1.pep
MEQPTIQNLSAHRADLCEPSYSLKPILSDGYEISPGFIAMIREQTFSGGIGENPYLHLRDFELVYSCLSIVGMTHETLKWKLFPFSLRDEAKQWYTLCVKKFHGEXEELKCKFCLAFFPLTHVINIRLDILSFRESAANLDISAGASFAHRTTTEGRELLDLILENDSFGRSEAISEVEIIHEEPLRMESELDSIAESSFQSLEPEEEXIHPSEIPFQFRDDLYEDYGNT

SEQ ID NO: 137072 - protein, 70 aa, Oryza sativa
  Clone ID: PAT_MRT4530_38590C.1.pep
TGRGWSPSTGGRRESGRSWSQGQKRSRSWWECQRQAEHSRVGEGRRGPPSSRACLGTRVNYYVDCCSHLH

SEQ ID NO: 137073 - protein, 151 aa, Oryza sativa
  Clone ID: PAT_MRT4530_38591C.1.pep
MAGGSADAVTKEMEALLVGQNPNAVSGETCETSSKEGKVADSNGSHSSPPEDDDDEAQGDGPSIPIDELFPSGDFPEGEIQQYKDDNLWRTTSEEKRELERLQKPMYNAVRRAAEVHRQVRKHMRSILKPGMLMIDLCETLENMVRKLIKE

SEQ ID NO: 137074 - protein, 34 aa, Oryza sativa
  Clone ID: PAT_MRT4530_38592C.1.pep
PATDRDAATAVRASRPWIDGGVSYSRLLVKRSLG

SEQ ID NO: 137075 - protein, 450 aa, Oryza sativa
  Clone ID: PAT_MRT4530_38593C.1.pep
MAGGSADAVTKEMEALLVGQNPNAVSGETCETSSKEGKVADSNGSHSSPPEDDDDEAQGDGPSQDGGSEAAKKKKKKSKSKKKKGPLQQTDPPSIPIDELFPSGDFPEGEIQQYKDDNLWRTTSEEKRELERLQKPMYNAVRRAAEVHRQVRKHMRSILKPGMLMIDLCETLENMVRKLIKENGLQAGIAFPTGCSLNWVAAHWTPNSGDKTVLQYDDVMKLDFGTHIDGYIVDCAFTVAFNPMFDSLLQASKDATNTGVKEAGIDARLCDVGAAIQEVMESYEVEINGKVFQIKSVRNLNGHSIGPYQIHAGKSVPIVKGGEQTKMEEGEFYAIETFGSTGKGFVREDLECSHYMKNFDVGHVPLRVAKAKQLLGTINNNFGTLAFCRRYLDRLGETKYLMALKNLCDVGIVQPYPPLCDVRGSYVSQFEHTILLRPTCKEVISRGDDY

SEQ ID NO: 137076 - protein, 365 aa, Oryza sativa
  Clone ID: PAT_MRT4530_38594C.1.pep
MAASMNSKLPLALVLLLLCGGACVAVAMPSELSIVGYSEEDLASHERLMELFEKFMAKYRKAYSSLEEKLRRFEVFKDNLNHIDEENKKITGYWLGLNEFADLTHDEFKAAYLGLTLTPARRNSNDQLFRYEEVEAASLPKEVDWRKKGAVTEVKNQGQCGSCWAFSTVAAVEGINAIVTGNLTRLSEQELIDCDTDGNNGCSGGLMDYAFSYIAANGGLHTEESYPYLMEEGTCRRGSTEGDDDGEAAAAVTISGYEDVPRNNEQALLKALAHQPVSVAIEASGRNFQFYSGGVFDGPCGTRLDHGVTAVGYGTASKGHDYIIVKNSWGSHWGEKGYIRMRRGTGKHDGLCGINKMASYPTKNA

SEQ ID NO: 137077 - protein, 120 aa, Oryza sativa
  Clone ID: PAT_MRT4530_38595C.1.pep
MAALPPHAPLPSFVGVSDSPALTNGQVYNPLHRVVVSGDEARYSAILFSLPVDGAAVRPLDEAVDGDHPAMYRPFDYGEYAVFCYLPENMTPEVMKHAHKLEAFAAVRTTTTASASASAP

SEQ ID NO: 137078 - protein, 446 aa, Oryza sativa
  Clone ID: PAT_MRT4530_38596C.1.pep
ARGLLRVLILEFWGSQGEQRSGDLIPVCRLFQLRYLKTSGDVVVQLPAQISGLQYLETLEIDARVSAVPFERVHLPNLLHLQLQDETKLPDGIGCMRSLRTLQYFDLGNNSVDNLRGLGELTNLQDLHLSYSAPSSNEGLMINLNAITSSLSRLSNLKSLILSPGAISMVIFFDISSIISVVPVFLQRLELLPPICIFCRLPKSMGQLHKLCILKVSVRELLTTDIDNLTGLPSLTVLSLYAQTAPEGRFIFKDGTLPVLKYFKFGCGELCLAFMAGAMPNLQRLKLVFNIRKSEKYRHTLFGIEHLVSLQDIATRIGVDTSTGESDRRAAESAFKETVNKHPRCLRSSLQWVVSTEEESHPLEKQHHKREKVSSAGHGVLEKESVEDSEKNTDRVQTLLSPQLSNMESVVESALTGQRTKIVVKVHMPCGNSRAKAMALVASVNR

SEQ ID NO: 137079 - protein, 350 aa, Oryza sativa
  unsure (1)..(350): unsure at all Xaa locations
  Clone ID: PAT_MRT4530_38597C.1.pep
MGWSNQLKKKLNFKFLNLILTLDISNNSLSGPLPLIFGAPMLTQLVLSINKINGTIPSYICELKYLEVLDLSDNFLVGKLPRCSNGSEAKQELNMSPDSTQMQLSALILYNNDLSGKFPEFLQHCQELTLLHLPHNKFVGELPIWIAEKLPRLSYLQLRYNLFSGSIPVQLTKLENLRYLDLAYNRISGSIPPTLGGLKAMIQGGDIPEEITSLVGLKNLNFSHNHLTGNIPEKIGLLRYVESLDLSFNMISGEIPSSLSDMASLSYLNLSFXICPEEYHQGISYRHLVIQISYTSAITISVDLLFQGIVLDRRTAYKHLCGKHLQSGFTNHRGFKTRRDKARHLSLKAH

SEQ ID NO: 137080 - protein, 87 aa, Oryza sativa
  unsure (1)..(87): unsure at all Xaa locations
  Clone ID: PAT_MRT4530_38598C.1.pep
CCSGCXCVGGCCGCKMILDVXGHMPLTKTLVLVAXTKKASLAGMEIGVESGDNSSXGCNTCKCGTMCSVCYCMLLHLNLSNVDDQVA

SEQ ID NO: 137081 - protein, 126 aa, Oryza sativa
  Clone ID: PAT_MRT4530_38599C.1.pep
WGPGKQSGSNCPWHQLRQLFCGHQARSMLPDLVVSPVCTHGAAMAILRTARGFSRLIAHLLCLTRTPPFPSHRGSTATLYCLFSPGTQCAHCADLHPLALITLLAPKKTHPNTCGQTGRLRNMQAK

SEQ ID NO: 137082 - protein, 383 aa, Oryza sativa
  unsure (1)..(383): unsure at all Xaa locations
  Clone ID: PAT_MRT4530_3859C.1.pep
TNRVPTSWGFVYSRVNKAEGRGARTGSTGVGPTRQPLGPRWTGRTRLALADAVGPTRQPHPRARAADGRAPHGSRGARPKAASPARPTGGGAPAPRWSPAATSGATERRPREGREGGSEMAVQGSPRVDGDDGNGGRSGERRRRGSGRRGRRRSGGRRAKRRGGRGRRGRGEAEGGDAEAAGGXPGRRRRRTEARRRRRRERTTARARFRRGERAANGGNGGGRHGERLYSVGSERGRPERKETGAAISFPLMXAGEVRGSXIRTNPREREREKWGERGRESRGVISPSLMRAGTAGCGGIRGGGGARARAXRRVRREVGDDGWAPPVSEGGGRARPSAARARGKAGWAAGERRERKXGPSRPKRGRGGEKRLFRAFLFIKPF

SEQ ID NO: 137083 - protein, 92 aa, Oryza sativa
  Clone ID: PAT_MRT4530_385C.1.pep
ATVGEEAMRSGSAAAVFAATAPPAVEAPPPPPPPPPRASNHLFLLPTSLPLLLIKLPLLKSQPCRDYTLGRVATSEHGLAHAVVPDNEPEKK

SEQ ID NO: 137084 - protein, 158 aa, Oryza sativa
  Clone ID: PAT_MRT4530_38600C.1.pep
MQPAISQFPAAAVRLAGPALPYRRPPQKTTTSVTLRKPAAVRSRRRDDADQFFSGGGGGGVVDEGMIELRRRIHEMRAAESGWEPPAEWAAWEKEWYGSYDADVCALVGAVQAFLMSSRPGVGVGIVAAVAVSVPTTAFVLVSGLLHASQSLLSNLQH

SEQ ID NO: 137085 - protein, 58 aa, Oryza sativa
  Clone ID: PAT_MRT4530_38601C.1.pep
FDQSICDGLYSCDQKRKACNPTRAHTSESCLNYKSQRLVTRNDVTEWMARLRAPIISV

SEQ ID NO: 137086 - protein, 98 aa, Oryza sativa
  Clone ID: PAT_MRT4530_38602C.1.pep
SFPGSVHLRTQVYGTSRCLRNSVRLRTCTGRQAIKFLGSASSATTLILHGYCCCIDAFTKMSTKIRNKMMNDINGGNTSSKFNGGTFSGFIYFLRFTI

SEQ ID NO: 137087 - protein, 556 aa, Oryza sativa
  Clone ID: PAT_MRT4530_38603C.1.pep
MAEARATRRRAEEAEMEAEAGTEGDDGDGGGSSDYTSEDEGTEDYRRGGYHAVRVGDSFKQGAYVVQSKLGWGHFSTVWLAWDTGHSRYVALKVQKSAQHYTEAAMDEIKILKQIADGDPDDSRCVVKLLDHFKHSGPNGNHVCMVFEFLGDNLLTLIKYTDYHGIPLPMVKEICRHVLIGLDYLHRTLSIIHTDLKPENILLESTIDPSKDPRKSGVPLVAPSARTDDPPPKAHAPSVNGGLTRNQKKKIRRKAKRAAAATSEGSGTVASGETDGSDDRGNLSTANEGSPNQDGDKKEEGEGSRRGSKGTRKKMALEADLKCKLVDFGNACWTYKQFTSDIQTRQYRCPEVILGSKYSTSADLWSFACICFELATGDVLFDPHSGDSYDRDEDHLALMMELLGMMPRKIALGGRYSREFFNRYGDLRHIRRLRFWPLNKVLVEKYEFSDIDANGMAEFLVPILDFVPEKRPSAAQLLQHPWLDVGPLRRQPKRPSDLTQNSSDDGVSEKQRIENEERDAMAVNLGNIAIDGASSKTTEDPQASTMQNKTNATPAK

SEQ ID NO: 137088 - protein, 184 aa, Oryza sativa
  Clone ID: PAT_MRT4530_38604C.1.pep
SRADHASLFSSRSSSLIPTATVIPMIPPISLDQCRPTGAPPQRRISAEPPPHNCIPFRRCHARDCPRRRRTHAPIAPPQIAPELHAKPVPPVIGCHPASIAVAVGCRSLSGVDCSRYWIKVVAHRQASSTATAARRLAARSSRPAPISSAHQVNQVRCKDECALILIRHIVNHCGMTEICFTVE

SEQ ID NO: 137089 - protein, 103 aa, Oryza sativa
  Clone ID: PAT_MRT4530_38605C.1.pep
APSRRASQRRICCDRARVRCSACARPPVPGCPCSGLHLSWAPCRCRALAARAQKAAPPVHVMISGACARARQSFARLGQPGKGKNSRGRPSSYVGVMFPVSYV

SEQ ID NO: 137090 - protein, 71 aa, Oryza sativa
  unsure (1)..(71): unsure at all Xaa locations
  Clone ID: PAT_MRT4530_38606C.1.pep
QFSKNVVAHKVLFASDEALLPLGAPGYMVXASAHILGWWXDKFAKAFVKMASAGVKPGFTGEIRRQCRVVA

SEQ ID NO: 137091 - protein, 127 aa, Oryza sativa
  Clone ID: PAT_MRT4530_38607C.1.pep
IGWGFFFFFFFFFFFFFFFLGFFFFFLKERTKNKSNNQQGVGGVPNPPPTQGGGGKKQESGGPSKTSKRSFNKKKNLGQPLKPNQGAGQPQKGPKIGPKIPGRDPRGGEKSPPLKPGGDLLGKKCFP

SEQ ID NO: 137092 - protein, 74 aa, Oryza sativa
  Clone ID: PAT_MRT4530_38608C.1.pep
KWATSTCSRVPRERSKKSASWSTPPTSCQSIIKLILKEKNNFIRSGFIHVELVILPAQISSCGNFLGVVLGGKL

SEQ ID NO: 137093 - protein, 68 aa, Oryza sativa
  Clone ID: PAT_MRT4530_38609C.1.pep
TELIYTFCLLKHSLQEKYDSQQAFILRQPMKGATFILSSRVTQLPRRISCGPSPLTHPRAPLSLLRPL

SEQ ID NO: 137094 - protein, 186 aa, Oryza sativa
  Clone ID: PAT_MRT4530_3860C.1.pep
MANMLRAADGADVVVLVRDQPFRAHRCVLAARSPVFRAELFGGGHMRERRTSCVVVDDMEPSIFSAFLHFIYTDSLPENPDTPGDDQDCMAMQHLMVAADRYGLDRLVLICEEKLCRGIDVQTVATTLALAEQHQRVALKDACLGFIVSRGVLGAVARTDGFKHLLTTCPSIMVDILDKVASVMSK

SEQ ID NO: 137095 - protein, 52 aa, Oryza sativa
  Clone ID: PAT_MRT4530_38610C.1.pep
WLRVAKPGVSEGLGSSGLHGMPGAGGYLDGYGGGGGYGSTPPGGPGRNYMGH

SEQ ID NO: 137096 - protein, 769 aa, Oryza sativa
  Clone ID: PAT_MRT4530_38611C.1.pep
MRKGEKRGRERERRRRLMWQPDMWGPRGSHAEPAATWDKIGVKTTEGPIVTGFFNRHEMDGSTRWAGKIANSRMNQECHKHTSLNLSDPNPSIFTRSEKKFPVGEETQAEAEAETPLSTIFSPPAENLLSAPGTAQFQSTCTFKISDYGKLKIIRHELSLMRVSSSKTKMPLICKRKMPRRTIDISSEESEGNSINSESDTCTGSDEDYHIDEVLEALNISGFDNMLHELYSKKGIKKKGAHNETKLDKMLYALFKKDVIQKMKKELVSTSKNVRHKPKIHKGKAASKTDTSFIRFSAKYFAEVVSKLPEEKKIVIKNFGFHSLLLFDSSFIPKKIATWIVKKVDLKTSEIVLGDKVIPVNKEAVHAILDLPIGGSEFGKNYEHGRQFILSKFGKTVMPSVNFFGDQLINNEDMTDDSIIISFLIVALATFLCPNSSTCPSIKYLDIFEDVDMLHSFDWSSFVYDWLMSYVKKFQKTNSFGGCLYIWAILYLDHRDFGSKNVPKDVPRIAVWKQDMVKIYSDLDEIDDENYGPRPLKDFSDTCYYKPVHVQNSESFRNKLDTAIGDNLPANLKDSISDLMDSHFSANHAAKNNSCEDVLISALQILIDASASHFVRAAYNNASAENRTNTPTENAIPKSCGKDYPSSDRNADIDIDANLDQGHGEHLTNDLADNNVIDAPNIVHSDGSLNCCCEGQAFCTPGTVCPPNSKSCGSESIKEPPALLTKIAMEFKSRLAEFNNRDNRGHIYDEDKLAFDIFHEYNIGVKNDN

SEQ ID NO: 137097 - protein, 57 aa, Oryza sativa
  Clone ID: PAT_MRT4530_38612C.1.pep
HEGGWGCVDEGGAQVKMVDLFPTFCVQLDDLEYVRFHLCKFWSSMHAKFGFLNLNVG

SEQ ID NO: 137098 - protein, 99 aa, Oryza sativa
  Clone ID: PAT_MRT4530_38613C.1.pep
HASAHASEKNKKKKKKKKKRKKKKKKFKKKKKKKKKKKKKKKKKKKKKKKKKKGGPFLKNQSLLPRACNLIFFFWGPQIKIPGPGFKNVGMGKTLGFPN

SEQ ID NO: 137099 - protein, 97 aa, Oryza sativa
  Clone ID: PAT_MRT4530_38614C.1.pep
MSEAYERERQNNARLDELSAKVSALRGVTVDIYDNARAQDVIDNTSDTFSSMTTQMKGSAGRLTRMAASGNRVAILKLSGIVIGVFLVLFYGAKLIF

SEQ ID NO: 137100 - protein, 41 aa, Oryza sativa
  Clone ID: PAT_MRT4530_38615C.1.pep
YMAYRAFKSTESQPSIKSLNIKYCIRQNAISTSCCLDIARP

SEQ ID NO: 137101 - protein, 39 aa, Oryza sativa
  unsure (1)..(39): unsure at all Xaa locations
  Clone ID: PAT_MRT4530_38616C.1.pep
RXVITLLSIDPSLLYCDKSCVCIPYLDLVACLSRQIFQA

SEQ ID NO: 137102 - protein, 154 aa, Oryza sativa
  Clone ID: PAT_MRT4530_38617C.1.pep
MTERLLRWKNDLSEERDKYGSTPLHFAASVESSLHNRFSSKAIVSKVLEACPSSAFQPDNEESLPIHVAASAGVRSAIAILIEKWPGCASFRDSDGRTFLHIAVEKQRNDIVRFACKKDKEGNTALHLAVQLGNLSLVCSLLGNKRVLLNLTNK

SEQ ID NO: 137103 - protein, 255 aa, Oryza sativa
  Clone ID: PAT_MRT4530_38618C.1.pep
MDYHRIHPVGVGSPAPAPDSQQQVGKGRSTASYGEKEQLPITAPRPYAPAPLPPPPPRRRSRGRRCCRCVCWTLLAVLVLAVALGATAGILYAVFKPKIPDFHVDRLTVTRFDVNATAATVSDAFEVEVTSTNPNRRIGIYYDGGEVTASFNGTELCRGGFPALYQGHRSTVRPVILLAGETRLDSAVALQLARQQQAGFVPLTVWARVPIRIKFGAIKLWKMTGKATCNLVVDNLVAGRQIRIRSNSCSFKLKV

SEQ ID NO: 137104 - protein, 37 aa, Oryza sativa
  Clone ID: PAT_MRT4530_38619C.1.pep
LLFARSLVNGGGVLSPQTYLLLYLHDPYRTIPYYYRR

SEQ ID NO: 137105 - protein, 398 aa, Oryza sativa
  unsure (1)..(398): unsure at all Xaa locations
  Clone ID: PAT_MRT4530_3861C.1.pep
YPWLGDRPLVPTIKTFQISTNPTTEGLGIISEVPIRYNSVEVILDFHLFDISDFDILIGHPIEKLLNVPETGVLNLKVGKIVTSVPVLQSTNSLTEPLPVPEPIEEVMAISPFEAPESNLDESIEEFNEGVDESGETIDLPKMDQPSXAPIELKPLPSGLCYAFLNSDAESPVIISDKLSERETTRLIAVLEKHRVAFSYSLQDLKGISPTLCTHRVPFDPSCTPSREPQRRLNNAIREVIKKEVLKLLYAGIIYPVPYSEWVSPVQVVPKKGGMTVVENSNNELIPQRTVTGWRMCIDYRKLNKATXEDHFPLPFIDEMLERLANHSFFCFLDGYFGYHQIPIHLDDQRCMTSIFSDMIEDTMEVFMDNFSVYGKTFDHCLENLXVLQGCQEKGLGT

SEQ ID NO: 137106 - protein, 70 aa, Oryza sativa
  Clone ID: PAT_MRT4530_38620C.1.pep
AYKTLCWSSRGMTDNCTNMRQRSTRPRKDDYKSLVNSRIDGCDTVLDLGTRFFTSAKQFSHQERKSTRMA

SEQ ID NO: 137107 - protein, 66 aa, Oryza sativa
  Clone ID: PAT_MRT4530_38621C.1.pep
WGPWLLAYHCLLVYLSSTSCENSAKVPAIKTEVDLKWNPEFTLLIFGAILLHWMFDTFLLIDHYYS

SEQ ID NO: 137108 - protein, 68 aa, Oryza sativa
  Clone ID: PAT_MRT4530_38622C.1.pep
LRSCNLHACLCVHPWLFGPVGLPTYLPSCCVFVLSVLLRLKVFASPVWPARDVSCLYCASLYSVLVLE

SEQ ID NO: 137109 - protein, 154 aa, Oryza sativa
  Clone ID: PAT_MRT4530_38623C.1.pep
LMQEEFDWPTLVLSTSPETENVTSSSVRSTTKNDVVIQQGSISSYWPWDVMKLENDTHFLSHSSGDGMKCTKADHFLSHANRGSLNLDYQEQPSKSNFATDLGSHAYSKEARTLGRVYHGQQPYFFPSSCSGEKSSALKVVAKSPDASGHIVGG

SEQ ID NO: 137110 - protein, 396 aa, Oryza sativa
  Clone ID: PAT_MRT4530_38624C.1.pep
MMSPRPSASAAPEGGGGASTSRSVPTARSTPLQVIHILGNFARIWSVYSLYNYLSSSGDSMVGFIFSCLVPASVIFLALQKPWKGRPLPNTQVVPTVINGGILALYFVLWGKGLLACGPLVALLAEYAGAVLGVLSAALYGRKVNIWKKQLLNFFCEFFLNFSKHCSYTDIKNEVASQQPIGGLAAMLVAYYLLGNGWATRTHSPLYSFGSESLEKGTQVIGMKEMVVPLTAGILSALRRVLARRVSLKNQLKRRLHAINVASATCFLFPFAMWDTILGSASDSIVKLQFPSWAYLSTVLFGMVLIFYVDNVAEEKLHLVFSSPRHLMVSTGCIIVLEILYKMDFSLLGFLLCSVILGFGIFEATSLERSKKSPLEAHELSNGSFHNQLPISALPS

SEQ ID NO: 137111 - protein, 91 aa, Oryza sativa
  Clone ID: PAT_MRT4530_38625C.1.pep
MSVDRSWMRMSRATAEWQKGLQEFLNFAFQDDNPGDNAPCPCRRCLNVVHKTRPEVQSDLLRNGFDESYIQWVYHGEDSDDDNVTGRFRRT

SEQ ID NO: 137112 - protein, 141 aa, Oryza sativa
  Clone ID: PAT_MRT4530_38626C.1.pep
DDAWSKVLCLDSKRIPQNWADTQFAEALTMARTEFNNKSAVIMMVVQPEERNMYDQYWLINHLKESHGVKTIRKTLAQVEAEGQVLPDGTLVVAGQTASVVYLRAGYSANDYPVEAVWRGRPLYRQASAIKWPSMSYHFTG

SEQ ID NO: 137113 - protein, 133 aa, Oryza sativa
  Clone ID: PAT_MRT4530_38627C.1.pep
FWGKGERFFYIPLLPPKFLGEKIWEPPPGIFEIFQKFKPPPTQIFGQNNQFPGGPIFFFSQTKIRQSQNLVFSPWDFGTNVGTGRGRKDSHWRPRGGNEGSGPGWSGGRRNGGGEEGGGEGAARAEFCSPGDP

SEQ ID NO: 137114 - protein, 61 aa, Oryza sativa
  Clone ID: PAT_MRT4530_38628C.1.pep
MERNIPLRSGTKPSSKIGRTSLSHLGRAHSVSCATSPRVVCIAVGSSYSWRRWRAVTTRPD

SEQ ID NO: 137115 - protein, 169 aa, Oryza sativa
  unsure (1)..(169): unsure at all Xaa locations
  Clone ID: PAT_MRT4530_38629C.1.pep
FITILILASVPXPLFDLAGIMCGQFGIPFWEFFFATLIGKAIIKTHIQTLFIISLCNNQLLYLMEKELIWIFGHIPGFSASLPSVIAKLHSAKDKYLSTPTSATSSSKMEDTQWNFSFTLVWNTVVWLVLVNFFIKIVTSTAQEYLKKQQDIEMELITDSSPQSQSKTN

SEQ ID NO: 137116 - protein, 246 aa, Oryza sativa
  unsure (1)..(246): unsure at all Xaa locations
  Clone ID: PAT_MRT4530_3862C.1.pep
MGPTRQPHPRARAADGRAPRGGHSARPKAATRRGRREAAPAPLWSPAAAERGEGKGEKRRRSTAHSRSTATTKKVAGAEEGGGAARVDGVDGVPAVGGLGEGVDGVDGGAAKPVEATPGRETVPASGEGQPEVVGDGGXARGRRHELDSGGEWGRXRCGGFGGSGGAWRGRSGGSGGSGGRTGMTGGPHPSARLVFTLPSSFFLGVVAPLDLAKTNYPVPGPALHGVQDFHRSLHVGQVFANFNLL

SEQ ID NO: 137117 - protein, 59 aa, Oryza sativa
  Clone ID: PAT_MRT4530_38630C.1.pep
MAVCTPVLTDVAPTRSSSGYKSARLLLRRLRRMHNEKGNLVAEQVFDESALLASRLRQH

SEQ ID NO: 137118 - protein, 172 aa, Oryza sativa
  unsure (1)..(172): unsure at all Xaa locations
  Clone ID: PAT_MRT4530_38631C.1.pep
MCPAHALDARLEEDPAAGERGELRTTTNMRMQLKGITSXASRDCEKSARDTWRGIRSLCDDWGLDRCRCTATRHIEHQPPHIAQAVHGHLTKRPEETGVDDQRHMYGYATDDTAEVLHVRHFLATKLGCRLTRVTKNGTCTXLKPDDRPRYRPVLNDAGAMDHVCVQPAHLH

SEQ ID NO: 137119 - protein, 92 aa, Oryza sativa
  unsure (1)..(92): unsure at all Xaa locations
  Clone ID: PAT_MRT4530_38632C.1.pep
LFSCPTPLLLLVLLLPPLASPRNPSLSTCFELGHRPADARAPATSVRIXAXLXTNSVFKEPKHQMPNNLNGEFQDVIEMPFTHDHHGSNDQP

SEQ ID NO: 137120 - protein, 94 aa, Oryza sativa
  unsure (1)..(94): unsure at all Xaa locations
  Clone ID: PAT_MRT4530_38633C.1.pep
GFSSGDIGETHGAHTVLRASLLNFCTRVYCDINVSQDYCSNXLYFCSARGGDPALAPLYSLTCSAFDSRYYSSHQASAXLMHCDQELFNKELID

SEQ ID NO: 137121 - protein, 92 aa, Oryza sativa
  unsure (1)..(92): unsure at all Xaa locations
  Clone ID: PAT_MRT4530_38634C.1.pep
SAPSPGRRRVLPSSALLLCTMSGCGVAASPASCGWWIQRSEATDKGRESEGSFPAPTLVDDADCSVSRPLGVSAVAVXHLFQLKLNPAAPPH

SEQ ID NO: 137122 - protein, 755 aa, Oryza sativa
  unsure (1)..(755): unsure at all Xaa locations
  Clone ID: PAT_MRT4530_38635C.1.pep
MDQQWMYADRRSKQFINGVHYFLNVANTNKHNGFMSCSCDKCKNXKEYSIVXTIHAHLFQWGFMRSYNCWTSHGELGVAVEEDKVEDDNILDWAXYGGFEENTTGEADGAVEDNDGVDDLGQMLRDVKEDCEXKGGAETRAHVSGLQNIVVPRLRTGPQKVEYHVGVLAMEGXKNGVSDKAFGELLXLVKNILLEGNELHETTYEAKKAVCPLXLEVQKIYACPNDCILYRGEEYXNLEACPFCKALQYKIRRDNPGDVDGQPLKKRVHAKVMWYFPIIPRLKHLXFRNKSHARMMWWHAEELQQDRMLRHPADGSQXRNIDRAFKDFGEYAPNVRFSLSMDGMDPFGEMSSGHSTWSVTMCIYNXPPWLCMKRKHILMPIIIQGPKQPGNDIDVYLKPLVGDLKVLWRKEGIPVWDEDKQEQCNLRALLFVAINCWPALSNLYGRSNKGYKACTHYMDETKSTXLKHCRKVVYMGHHXFLVANHLVWKKGKHFEXKANHRTKPKHRNEKAVFAMVKDLKVIFRKGPNSQPIESEDGHVAMWKKNSIFWELPYXEGLDVLRAIDVMHLTKNLCVNLLGFLDVYGXSKDTLKACNDLKHMEQLEGLHPKPKVKGSHYFSPASYTLSKEKKESMFQCLXSIKVPSRYSSNIKXMISMKEKKFTNQKSHDYHMLMTQLLSVIICGILPDNVQATITKLCAFMNAISXKIINPDSLAALQGDVVQCLVSFELIFPPSFFNIMTHLLCHHVKEIGILGLI

SEQ ID NO: 137123 - protein, 118 aa, Oryza sativa
  Clone ID: PAT_MRT4530_38636C.1.pep
MKMRSSAFSGSRAPPCVASPFPSTQAIVDRATAPKASPASQKEVCQRNRFEALPLRRSNLSFSSPAAGSFLQFLAPEPEGADTIDLSFSAVAGAFRRSPRCPSIAEPQTTFSESPRDL

SEQ ID NO: 137124 - protein, 39 aa, Oryza sativa
  Clone ID: PAT_MRT4530_38637C.1.pep
EYNYSTLFRIKTHLQSLNHHPHIFQNHRLFYYQNFSSIL

SEQ ID NO: 137125 - protein, 106 aa, Oryza sativa
  unsure (1)..(106): unsure at all Xaa locations
  Clone ID: PAT_MRT4530_38638C.1.pep
MASKRILKELKDLQKDPPTSCSAGVXVKTKVFHPNINSNGSICLDILKEQWSPALTISKVLLSICSLLTDPNPDDPLVPEIAHMYKTDRPKYETTARSWTQKYAMG

SEQ ID NO: 137126 - protein, 148 aa, Oryza sativa
  Clone ID: PAT_MRT4530_38639C.1.pep
MASKRILKELKDLQKDPPTSCSAGPAGEDMFHWQATIMGPPDSPYAGGVFLVNIHFPPDYPFKPPKVSFKTKVFHPNINSNGSICLDILKEQWSPALTISKVLLSICSLLTDPNPDDPLVPEIAHMYKTDRPKYETTARSWTQKYAMG

SEQ ID NO: 137127 - protein, 43 aa, Oryza sativa
  Clone ID: PAT_MRT4530_3863C.1.pep
VSKRLDISGQQCPNSREAFRSIPPTCVLLNPGMLLMAVVSKGD

SEQ ID NO: 137128 - protein, 104 aa, Oryza sativa
  Clone ID: PAT_MRT4530_38640C.1.pep
SFFPSSSLLLSFLLPLLLPPNSSGGQRRRRPCGWGLAGGGIDGTGRDRGVGSPPRIRDLQMQAMSKFPRNMHLGRTLMRFLVQISTVYYCLKVKTFSRETGGDL

SEQ ID NO: 137129 - protein, 227 aa, Oryza sativa
  unsure (1)..(227): unsure at all Xaa locations
  Clone ID: PAT_MRT4530_38641C.1.pep
GGSGSXGRMAAVMEWGNRAEAGVRHGEAKPKEPTVRRGGGYGDGGVQPELAGGRHRAEQRGESEEECSGFGRNGGNERGCSGDRLYTLVEGESWPSGAATASEVARHRGIVGAKSAPVFGEKRGRRWRRGVASGPTRERARGGQEWRRRGRFLAAMVATAVADLRLGMIGGVHGSHLSAKEEREAGWGGKLDFWEERAEHGAGLRERERAREREGRAGRGEGFLGRK

SEQ ID NO: 137130 - protein, 65 aa, Oryza sativa
  Clone ID: PAT_MRT4530_38642C.1.pep
SWSKTTTSHTRRRGRDGHRRPPPPPSSSSWSPRTTPSTSSSTASLRRRRRRPPPLPPPTPSSPFL

SEQ ID NO: 137131 - protein, 395 aa, Oryza sativa
  Clone ID: PAT_MRT4530_38643C.1.pep
MGQCAMSHTRSTTAGAAGGKPPIAPPPTSSASAIVADTASGYHLFKINDYSRTRDIFPTGSALKSRAFTIGGHQWRIHYYPNGNTEECGEYISLFLHLDEIVTDKNVYAQHGFRLFDEFAGDNDDDDELQPSSIADLGQVSTFGGNNIGLGRLRFIKREELEKSKYLKNDSFTVRCDVVVTKRIRSEETPLVVRTSPKPKVARLVTVPPSDLHRHLQDLLCAEKGADVVFEAGGETFTAHRCVLAARSPVFSAELFGSMKESDTTVVIRIDDMEAQVFRALLRFAYTDSLPETKEEDEGAMCQHLLVAADRYAMERLKLVCEERLCGRIGVGSVATVLALAEQHHCDGLKKACFDFLSSQENLKAVTAGEGLEHLSRNCPSLVNELIGTLGNLIQ

SEQ ID NO: 137132 - protein, 44 aa, Oryza sativa
  Clone ID: PAT_MRT4530_38644C.1.pep
LNMSCSASLFRNIEITVHTCIHLMIGLLHCETIARDCHSTRNPS

SEQ ID NO: 137133 - protein, 54 aa, Oryza sativa
  Clone ID: PAT_MRT4530_38645C.1.pep
SIIINYFLYLAPPWSMQMIVLDKYCGVEGVSCRRLLKTFGKKLHEAIGSGTGTF

SEQ ID NO: 137134 - protein, 117 aa, Oryza sativa
  unsure (1)..(117): unsure at all Xaa locations
  Clone ID: PAT_MRT4530_38646C.1.pep
SAQHRQRVIPLCHSASLRSCRGLRRQCDESRVPVWGXIDWPSSSRSTTRGRGPTPTIGHPPLPELLQRAHHIEHVVHHLEEKPNAARIPSDAVQLGLCPAATPLVLKVLPSWRPPVV

SEQ ID NO: 137135 - protein, 260 aa, Oryza sativa
  Clone ID: PAT_MRT4530_38647C.1.pep
MRLVAAKPCCLFRISSVAAVAAGRRRPWRAAAASGNAHAEAEGDEDGQSLSARARGRRARLSARRRERIVVVEGGGVGGIGEFLRQPAGVESLLNTRALQSFAAVDEAPGANTFRCTLQSIGFLGFQVAPVLDLRVAPTCHDCTVEMLSCRFEGSGSVEQQNELFSAFMSNHITWKDDGEEPCLDIDVNLEVTLEVYTKPFSMLPLSAVETPGNLLMQGLLDRLVPLLGEQLLRDYHSWVQLQQQQPEISSLETAEIDAS

SEQ ID NO: 137136 - protein, 226 aa, Oryza sativa
  unsure (1)..(226): unsure at all Xaa locations
  Clone ID: PAT_MRT4530_38648C.1.pep
LFKRSPCLPPPFPTLAALSLRRIRARAVVLSLRRRRRAPVHRRRRPGPPPASASLASASLCPCRSRPLLCFARRPPEHRRPRRPEPRRRLSPLRSXPFPSSPSTRGEPRTVXFTSPFPPLYRPPLRRAGGRRRXPSGRGRAASRRPCRRGRLRARPAAARWGPAVSRPRPRXRLTRGTHGAGRRQPRAPGPPWTVRLPRGPRSACPLPSAQRLFHRSAPASLWGEP

SEQ ID NO: 137137 - protein, 214 aa, Oryza sativa
  Clone ID: PAT_MRT4530_38649C.1.pep
MSEREVLVRPQLDQKWTPCENRLPLSGLNTSVAESTVCGRGRGRLTAGPHLAAAGRARRRPRRHGRREVARPRPDGRRRRPPARRSGARERGGKGETKWRSSAHPGSTATTGTATEAERGGGAARVDEDGGAPAVDGRNGGVDEVDEEAAKPKEAMPKREELVFTLPSSFFFGVVAPLDLAKTDYPVPGPALHGVQDLHWPLHVGQVFANFNLL

SEQ ID NO: 137138 - protein, 307 aa, Oryza sativa
  Clone ID: PAT_MRT4530_3864C.1.pep
MPPPPPPSLTANTASSMGNAEAVVVLPANGGARRRADKVVHPAPMPDRAAGGAMEREGGGVGGGGEVGGWRRPEWCSAAGVAGVLRRHPAAAAFGCGLLLFMAVEYTIPMVPPAAPPVDLGFAATAALHAGIAARPWLNSLLAALNTVFVAMQAAYILWAILGEGRPRAAVAAMMMFTCRGALGCATQLPLPAEFLGSGMDFPVGNVSFFLFFSGHVAGAVIAAEDMRRAGRRGMARLYDALNLLQGVRLLACRGHYTIDLAVGVGAGLLFDMLAGRYLDGKNTVDGGAAVAPGSRCCSCHKALLSQ

SEQ ID NO: 137139 - protein, 184 aa, Oryza sativa
  unsure (1)..(184): unsure at all Xaa locations
  Clone ID: PAT_MRT4530_38650C.1.pep
ACWRRPGIIASTHASALFTNVYQLDVGGIFETYWGGDEKSGLAPDLESKHIWLKYLPSDKGLPLVNKGNFYQNGDTGPWGPCSQIYFDQIGHHDVASLLNNDDPGCIEIWNLVFFQFNKEAGGILMPSSAKHVGTGLNFEQLTSILQKKKSKFDTDILMPTIDSIXQCTGNEIQPLLCKLVLMI

SEQ ID NO: 137140 - protein, 217 aa, Oryza sativa
  Clone ID: PAT_MRT4530_38651C.1.pep
MEASSWDALRKQARRLEAQLDDQMSAYRKLISMKSDGSENDIESDIERSLKQLQQVNSQMQTWVSSGGSEVLSHTLTRHMEILQDLTQEFYRLRSSLRAKQQHASLLDLRDFDRAKFDVEEGADSDQALLKEQAAISRSTGQMDTVISQAQATLGTLMLQRSTFGGITTKISNVSSRLPTINQILSSIKRKKSMDTIILSLVASVCAFLIFIYWMSK

SEQ ID NO: 137141 - protein, 39 aa, Oryza sativa
  Clone ID: PAT_MRT4530_38652C.1.pep
PREFLALPSLCHQTNLVQYRSYQLKLLAGIIPVVVSSLV

SEQ ID NO: 137142 - protein, 152 aa, Oryza sativa
  Clone ID: PAT_MRT4530_38653C.1.pep
EAVEIVSGVRLLHFACLLRPPSPCQLCVPLSHFAWLLRLPTSRSAPPRLPSPYFTCLLRPSPPRWLHAPPSPHSARRLRASLLHLLRSPLLGCSHGTEWIDTEKREYEERRGSELERRGRKNRWWSHTESEHVGPHTEAKLPKDLICTGFAS

SEQ ID NO: 137143 - protein, 100 aa, Oryza sativa
  Clone ID: PAT_MRT4530_38654C.1.pep
MECPLISTVQRIKTNCNSKDGSHEHGDRVRKSKVFARPEYKKDVQHAGKKAADQGLPGQHQILRCRRRRREGRTAGPPCGAACFTAAGRQKQEASAAGGR

SEQ ID NO: 137144 - protein, 63 aa, Oryza sativa
  Clone ID: PAT_MRT4530_38655C.1.pep
MAARAGSRPWWEAFTTNVKNQGSLVIDMLKQLVHREESESRDEEKLKEVILEMKEQSNKRFAG

SEQ ID NO: 137145 - protein, 574 aa, Oryza sativa
  Clone ID: PAT_MRT4530_38656C.1.pep
MIAVKKLLEIHMLKDDKFQNEVTFLMDLKHPNIVRFTGYCAESRWEVLQVNGKKYVMVEMPRRLLCFEYLHNKSLDNGYMAPEYLANGLISTKSDIFSLGVIIIEVITGHRNYPRICTRESFQHFIEDALQMFTMKSANLLDDLTIARTGLSTSNTAKQVIAATYVDSMLGARSSTSNTESTAAVSCVPARRSMIEIMAFGVAKILVRGSNMMKSDGAASGERKIGILAFEVANTIVSGSNLMKSLSEESVSHLNEVVLQCEGVRTLISEQYYQLLIIHQADIRLELLYKSREYVILESELACSKEEAVSAMQYLLKRAQYTMELYKEMCVLDKFEQGKPTVIVQKLVDIVLLIYLEINKVFLHTGEDHYVEAVGNLLGETLGSTGLALQYSKVILQINKLALAFEKTDPSVLKSVPKEAKDALYQMLPPCIKLVFYRKLKPFLSIDKTSEEEVRAEMNRMLQWLVPIAESTRSDQTSVHENSVKNQFDLGECIALTSCPCPVEYILCESKREGKAAILGKTNKSLSAMNAPYIRPEYPIPVQFIEICKVAASCDVRLLSAITCGDGFHVKIGG

SEQ ID NO: 137146 - protein, 83 aa, Oryza sativa
  Clone ID: PAT_MRT4530_38657C.1.pep
KRGVLRGGPPFFFGEAPTRVRFQKMQQVFGALVEFKAVCKGAIRGPFKLIGEKAPEFPPQLVKGFPSVPGGVSPYIPAIFSKL

SEQ ID NO: 137147 - protein, 343 aa, Oryza sativa
  Clone ID: PAT_MRT4530_38658C.1.pep
MEDKGDEKTNDNKPNSIVKGGKKIRETLKKAFDQVYAPFGPLSDVDDESGDEDKGKNISGVCFMPRGESDLECEDNEVHTFEDAILILREKNKKCEKMLAHKQKKEREIAFAKSKWQKSGFPSRKLTLVARKESMWIMDSGCSRHMTGDKNWFSSLKRASKTESIIFGDASTSAVLATGLVKVHFKKTGSKVFDSCGDSVLNISHYGRVFKVDFDNSVSPVITCLVAKFDKDVMFWHRRLGHVGFDHLTRLSGLDLVRGLPKLKKDLDLDVRSDRPGSSAEGSVDTIRDGPPEITNSTSEDVSYALTDESWINVMHEELENFERNKVWTLVEPPSGHNIIGTK

SEQ ID NO: 137148 - protein, 82 aa, Oryza sativa
  unsure (1)..(82): unsure at all Xaa locations
  Clone ID: PAT_MRT4530_38659C.1.pep
GYYSFIFFFNQKLLLTGLHGAHKNHSGGGASQGQPQVYQDPTPPPKNNSRLGLHPLNPAPFPPEKPKAWAPQSXXKKGPSPQ

SEQ ID NO: 137149 - protein, 137 aa, Oryza sativa
  Clone ID: PAT_MRT4530_3865C.1.pep
MYITFLGKSILLFSPNPNDSIEPKVTVVVAALACDGREGGGGWRGEARGGRVPTVKTAAGRRGGEGRGYEKETLQRHIPPLFDGALIGVDADNGSKAHGFPAVEEAQVSASLGTPFAGSRCSTPRCLGACRCNVHPM

SEQ ID NO: 137150 - protein, 108 aa, Oryza sativa
  Clone ID: PAT_MRT4530_38660C.1.pep
MAISPAGPGPLRWRGQGRFQTPRWATASVAAAKARGGSGGGDGSQGARGVCDVDGQARGAASGKARAGRIDKHPEGGRHRAEHGGSPLCLPACRPLRHRPAHRPRRRR

SEQ ID NO: 137151 - protein, 399 aa, Oryza sativa
  unsure (1)..(399): unsure at all Xaa locations
  Clone ID: PAT_MRT4530_38661C.1.pep
MARTMLDEYKTPRKFWAEAINTACYISNQVFLRSKLGKTFYELQFGHQPKVSHLRVFDWKCFVLKSGNLDKFEACSTDGLFLDYPAHTRGYRVLILETNKIVETCEVSFDEASPGTIPNIAGTLSQVQGEDGRIFEDESDDNDDDEITTSTSTDTERGSTSEVAAPLHIQRRHPPEQIIGXEVYVKQPPGFENPDFSNHVFKLSKALYGLKQAPRIYVDDITFGCSTHAFVVEFAETIRRKFEMSMMGELSYFLGLQIKQTPQAVLDPDEDGEAVDQKEYRSMIGSLLYLTASRPDIQFAILWLLSTLKDYGFTFDKVPLFCDNTSAINITKNPVQHSRTKHIDIRFHFLRDHVEKGDVELQFLDTKLQIADIFTRPLDSNRFAFLRGELGIIHPFGMV

SEQ ID NO: 137152 - protein, 124 aa, Oryza sativa
  Clone ID: PAT_MRT4530_38662C.1.pep
MLEHNANSEGHTALELRPCFMLLTLLFTTRKHIFGVVGVPFSQADFPNILIWQIYGKSGMDVSLAEEHLVTRGFMDKYEIWTRHGEEQVEGPKNEKVPTQVEDMVHDDGSVEDKIDLEEMLRHA

SEQ ID NO: 137153 - protein, 1065 aa, Oryza sativa
  Clone ID: PAT_MRT4530_38663C.1.pep
MKSGEALDDYLSRFNKILSDLRYVGSSYRVNYTQFEVSRHFLNGLDMSIWEMKVTSIQESVDMSTLTLDSLYTKLKTHEMNILSRKVDSKSSALVSSLTSLDVGASSSKSSILAVTNAISDEQLEYFLDHLRSHCPKLGRGKKEDNGGEKTNDNKSKSIFKGKKIKETLKKAFDQVYAAFEPLSDVDGESGDEDKGKNISGVCFMARGESDSECEENEMKLKDALDRVDYMEDVVKTNEVLSCPKYRKSKGVMVDCKNFANLEKEISYLKSSLQRFSDGKKQLSMILDQSKVTSYNRGVGFDAHDYFTKNQPNVLSVTEHGEILTKPSAKKTVFKSAGILPSLSATLKETKTNISKPSSSKEKLTRKQKNEREIAFAKSKWQKSGFPSRKPVRPQRVPRSDRRPVRPIAVSRSDRAPALVARKENVWIVESGCSWHMTGDKNWFSSLKQASKTESIIFGDASTSVVLATVRVQSIGGKWYVLVIVDDFPRYSWVFFVATKDEVFQHFRGLFLRLDLEFPGSLKRIRSDNGGEFKNASFELFCNERGLEHEFSSPRVPQQNGVVERKNRVMVEMARTMLDEYHTPRKFWAEAVNTACYISNQIFLRSKHGKTSYELRFGCQPKVSHLRVFGCKCFVLKSGNLDKFDARSADGMFLGYPAHSCAYRVLVLETNKIVETCEVSFDEASPGTRPEIADESGDDDDEEVGSAGQTGSQAGQTAGTPPVIPAQDVRSNRPGSSASGSVDADRDGPPEATTSTSTSTERETTSEVAAPLHIQRRHPPEQIIGNLGERTTRSKVTTHDVCANSAFVASFEPKDVTHVLTDESWINAMHEELENFERNKIYVDDIIFGCSTHTLVVEFAKTMRRKFEMSMMASPRASHRQAVKRIMRYLNHTLEFGIWYSTSSSICLSGYSDADFAGCRIDRKSTSGTCHFLGRSLIAWSSRKQSSVAQSTAESEHVAAASCCSQVLWLISTLKDYGLTFEKIPLFCDNTSAINIAKNLVQHSRIKHIDIRFHFSRDHVEKGDVELTFLDTKLQLADIFTEPLDSNRYAFLRGELGIIHPFGMI

SEQ ID NO: 137154 - protein, 356 aa, Oryza sativa
  Clone ID: PAT_MRT4530_38664C.1.pep
MVLRRLLLRPVLIQNVDQLQKLLLLCTFNDDIRLNKLLIYMDDIIFGCSTHALVVDFAETMCREFEMSMMGELSCFLGLQIKQTPQGTFVHQTKYTKDLLRRFKMENCKPILTPIGSTAVLDPNEDGEAVDQKEYRSMIGSLLYLTASRPDIQFAVCLCARFQASPRASHCQAVKRIMRYLNHTLEFRIWYSTSSSICLSGYSDADFGGCRIDRKSTSGTCHFLGTSLIAWSSRKQSSVAQSTAESEYVAAASCCSQILWLLSTLKDYGLTFEKVPLFCDNTSAINIAKNPVQHSRTKHIDIRFRFLRDHVEKGDVELQFLDTKLQLADIFTKPLDFNRFAFLRGELGIIHPFGII

SEQ ID NO: 137155 - protein, 85 aa, Oryza sativa
  unsure (1)..(85): unsure at all Xaa locations
  Clone ID: PAT_MRT4530_38665C.1.pep
GGECGGDEVGDNGGGLRGVRGGGGGGGDGGXTVAAVNAPAVNAVPVTPSSMMLATCVSRCTSDPRYPGRIWTAGVWRRWLATVVA

SEQ ID NO: 137156 - protein, 856 aa, Oryza sativa
  Clone ID: PAT_MRT4530_38666C.1.pep
MSDDQLEQFEEEDLVLLTNRLYRAVTNVRYRKRGGPNRCFECGSTDPFHSCCPKLGRSRREDNDDEKTNDNKPKGRFKGRKNKENLKKVFDKVYAAFEPLSDVDGESGDEDKGKNISGVCFMAHGESDSECEDNELKQPHDVLDCSTCTLNKMKLKDALGRVEYMEDVVKTNEVLSCPKCRKSKGVMALMARKENVWIVDSGCSRHMTGDKNWFSSLKRASKTESIIFGDASTSAVLATGLVKVHFKKNGSKVFDSCGDSMLNISRYGSVFKANFDNPVSPVITCLVAKFDKDVMFWHRRLGHVGFDHLTRLSGLDLVRGLPKLKKDLDLMHRDSYYIWTLLVQLECNLLEESRNLVKFEACSTDGMFLGYPAHSRGYRVLILETNKIVETCEVSFDEASPAKDVSHALTDESWINAMHEELENFERNKVWTLVKPPSRHNIIGTKWVFKNKQNEDGLIVRNKARLVAQGFTQVEGLDFGETFAPIARIEAIRLLLAFAASKGFKLYQIDVKSAFLNGFIHEEIYVKQPPGFENPDFPNHDFKLSKALCGLKQAPRTWYDRLKNFLLEKGFTMGKVDKTLFVLKHGDNQLFVQIYVDDIIFGCSTHALFVEFTETMHREFEMSMMGELSYFLVLQIKQTPQGTFLHQTKYTKDLLRRFKMENCKPISTPIGSTVVLDPDEDGQAVDQKEYRSMIGSLLYLTASRPDIQFAVCLCACFQASPRASHRQAVKRIMRKQSSVAQSTAESEYVAVASCCSQILWLISTLKDYGLILEKVPLFCDNSSAINIAKNHVQHSRTKHIDIRFHFLRDQVEKGDIELQFLDTKLQLADIFTKPLDSNRFAFLRGELGIIHPFGMI

SEQ ID NO: 137157 - protein, 92 aa, Oryza sativa
  Clone ID: PAT_MRT4530_38667C.1.pep
MEFCDDLLVEIISRLPFKSLARFKCTSRSWRALISGGDLRRQLTMLADSLIVGDGGDGEHGYATASYDDGVEICDMSFFALAETACRVSDAC

SEQ ID NO: 137158 - protein, 671 aa, Oryza sativa
  Clone ID: PAT_MRT4530_38668C.1.pep
MHDHLAALLLRGSGGHHHSHPRAVHGAAVKLGCLASTYLCNNLLLSYQARGHLADARGVFDEMPRRNVVSWSVLIAASSRLGVLGDALSLFAGMLRGGERDRPNSFTVAALVAGCARAKDAVAGEQVHASAVKLGVDEDESVAGTLVDMYAKCGRVGSSWRAFVLTPQRSVLSWTSMIACLVNHGDSGYRDTAIVLFKKMLVLKVWPTNATFSCILKVFDVPELLPSGKQVHGCLVKMGTEVDPALGTALLAMYGRCGGMDEITRLACRIRHDAFSRTSLLTAYARNGCNMEAVRVFRDMLMGHMPIDQSAITSLLQVCSSLGQLRVVKEIHCYALKNFFRLDTLLLNAIVTVYGKCGDIASSEIVFNTLENKDTISWTALLTCYVQNDLSQEALFFFREMVRKGLESSIFCITSVLRACSATSSLSCGWQIHSRVVKLGVDDDTSVENALVTMYAKCGVVQVALKIFNSMRNRGIISWNALITSFSQHGNEVAAIQLFDMMQEEMVCPDDYTFVGLLSSCSRMGLVAEGCEYFKQMKTKYNLEPKMEHYTCMVDLFARAGRFSDAMKFIDAMPCQPDQLVWEALLASCRVHGNLDLGRMAAKKILEIKPEDPSPYIILSSIHASIDMWDEKARNRTLLDFQQLRKDVGSSQLDSQGFSDDIFNALQVGVT

SEQ ID NO: 137159 - protein, 497 aa, Oryza sativa
  Clone ID: PAT_MRT4530_38669C.1.pep
LQWVQRSDRRPVGPATGQRSDRRCSGGPTDPRSDRQYPFARKENVWIVDSGCSRHMTGDKNWFSSLKRASKIESIIFGDASTSAVLATGLVKVNEKVELKNVALVEDLKYNLLSVSQIIDEDFEVHFKKTGSKVFDSCGDSVLNISHYGRVFKADFDNPVSPVITCLIAKFDKDGEDGRIFEDESDDDDEVSSASQTERQAGQTAGMPPVKPPQGEEVYVKQSSGFENPDFPNHVFKLSKALYSLKQAPRAWPISTPIGSTVVLDPDEDGEAIDQKEYRMAHRRSDRRHHGGKTGGHKAVTPGGSDRERQTISAVRPEFDLGQTGVFQADPLVLLFRLPHSRGLPCPVASPPPPPSSPPPPAELRPCRAVASAVAAGRRHRRKVRRGVGKLGRSLLAVAGHRSPVAAVDRSRAAARPRRRPSLFVVWFEGEYRWVRLVVLYVYMSSKVASDHPISGEVAILVRPLMSISIHVWRHSPTMVVQKEQHYWNTKTINHKA

SEQ ID NO: 137160 - protein, 443 aa, Oryza sativa
  Clone ID: PAT_MRT4530_3866C.1.pep
MAQLFNPSTNPWHSPRQGSFRECRFDRLQAFEPLRKVRSEAGVTEYFDEKNELFQCTGRGSMGLTFPGCPATYQQQFQQFSSQGQSQSQKFRDEHQKIHQFRQGDVVALPAGVAHWFYNDGDASVVAIYVYDINNSANQLEPRQKEFLLAGNNNRVQQVYGSSIEQHSSQNIFNGFGTELLSEALGINTVAAKRLQSQNDQRGEIVHVKNGLQLLKPTLTQQQEQAQAQYQEVQYSEQQQTSSRWNGLEENFCTIKARVNIENPSRADSYNPRAGRISSVNSQKFPILNLIQMSATRVNLYQNAILSPFWNVNAHSLVYMIQGQSRVQVVSNFGKTVFDGVLRPGQLLIIPQHYAVLKKAEREGCQYIAIKTNANAFVSHLAGKNSVFRALPVDVVANAYRISREQARSIKNNRGEEHGAFTPRFQQQYYPGFSNESESETSE

SEQ ID NO: 137161 - protein, 1327 aa, Oryza sativa
  Clone ID: PAT_MRT4530_38670C.1.pep
MAAGREPRGKAVQGPEGHDVAPRGPDPPAAPARKVSHPYVIPEEINTAALKTEFEQNCKARNILLSGISLSDYDRVAHFRTAHEIWKALSNFHQGTDNIKELRRDIFKKEYIKFEMKPGEALDYYLSRFNKILSDLKSVDSSYDTNYPQSDISRHFLNGLDMSIWEMKVTSIQENKKRGGPNHCFECGSIDHLRSHCPKLGRGKREDKDGENTNNNNNKPKGSSQGRKLENLRKAFQQVCAAFESLSDVDGESGDDDKGKSISDVCFMARGESDTEYEDNEVSAFEEAINILSEKNKKCEKMSRKQKFIIESLKSEIARLKSLIPNDDDYENCEVLMNEISKIRDVNAAHDLKNRSSLACSFALHTRTLDELFLTKKLLQKYQIAFHASLMFNMISVKKLKQPHDILDCSTCNLNKLKLKDALGHVEFMEDVVKNNEVLSCPKCRKSKCVMVDCENCANLDKEVSYLKNSLLRFSDGKKNLNMILDQSKVLVLEVALVARKENVWIVDSGCSRHMTGDKNWFSLLKKASKTESIIFGDASTSVVLAIGLVKVNEKFELKNVALVEDLKYNLLSVSQIVDENFEVHFKKTGSKVFDSCGDSVLNISRYGRVFKADFENPGSPVITCLVAKFDKDVMFWHRRLGHVGFDHLTRLSGLDLVRGLPKLKKDLHLVCTPCRHAKMVASSHAPIVSVMTDAPGQLLHMDTVGPARVQSVGGKWYVLVIVDDFSRYSWVFLMATKDEAFQHFRGLFLRLDLEFLGSLKRIRSDNGDESDDNDDEEVGSAGQTGRQAGQTTVTPPVRPAQEVRADRPGSSAEGSVDVVRDAPLHIQRRHPPEQIIGNIGERTTRSKVTTHDVCANSAFVASFEPKDVSHALTDESWINAIHEELENFERNKVWTLVEPPSGHNIIGTKCVFRNKQNEDGLIVRNKARLVAQGFTQVEGLDFDETFAPVARIEAIRLLLAFAASKGFKLYQMDVKSAFLNGFIQEEVYVKQSPGFENPDFSNHIFKLSKALYGLKQAPRAWYDSLKNFLLAKGFIMGKVDKTLFVFKHGDNQLFVQIYVDDIIFGFSTHALVVDFAETMRKEFEMSMMSMLDPDEDGEAVDQKEYRSMIGSLLYLTASRPDIQFVVCLCARFQASPRASHRQAVKRIMRYLNHTLEFGIWYSTSSSIYLSGYFDADFGGCRIDRKSTSGTCHFLGTSLIAWSSRKQSSVAQSTAESEYVAAASCCSQILWLLSTLKDYGLTFEKVPLFCDNTSAINIAKNLVQHSRTKHIDIRFHFLRDHVKKRDVELQFLDTKLQIANIFTKPLDSNRFAFLHGELGIIHPFGMV

SEQ ID NO: 137162 - protein, 130 aa, Oryza sativa
  unsure (1)..(130): unsure at all Xaa locations
  Clone ID: PAT_MRT4530_38671C.1.pep
PQILWRDVAQAVTXVFATHPDVCNYAGSCDAAMLLSWLYVLAAKGVQELVLIFLPIWPVRVDLPTDLRVASFRHLYLGLLRLFPDIEHTFSPXANVFPNLVELAVGLAPRRVRLILWNESPYTCRVRCDL

SEQ ID NO: 137163 - protein, 902 aa, Oryza sativa
  unsure (1)..(902): unsure at all Xaa locations
  Clone ID: PAT_MRT4530_38672C.1.pep
MATPARFSTKPHVFDGMDFSHWCSRMQSYIMAEDYNIWRKVSHHYVIPEAINTAAEKTAFEQNCKARNILLSGTNNIKELHRDIFKKEYIKFEMKPGEALDDYLSRFNKIKKDLRSVDSSYDANYPQSEISRHFLNGLDMSIWEMKVTSIQESVNMSTLTLDSLYTKLKTHEMNVLSRKVDSKSSALVSFSSSLDVDASSSKPSFLAIFIATSDDQLEQIEEKDLALVANRIARAXIMPATGKEVVQIVALNVVQLIIFVRIVLXLGRGKREDKDGEKTNNNKPKGSSQGRKLENLRKAFQQVCATFEPLSDVDGESRDDDKGKNISDVCIMACGESDTEYEDNELKQPHDVLDCSTCNLNKLKLKDALGRVEYMEDVVKKNEVLSCPKCRKSKGVMVDCENCANLEKEVSYLKNSLLRFSDGVGARSGEILVKPDTNKTVFKSAEKGERDCFCKIKVAKIWFSLEETGQTAVGPAVRPATECRLDRASVRPAVQRRSDRPPKASKTESIIFGDASTSAVLATGLVKGEDGCIFEDESGDNDDDEVSSAGQTGRQAGQTAGTPPVRPAHEERSDQPGSSGSGTVDADRNGPPEITTSTSTDTERGSTSEVAAPLHIQRRHPPEQIIGNIGERTTRSKVTAPDVCANSAFVASFEPKDVSHALTDESWINAMHEELENFERNKVWTLVEPPSGQNIIGTKWVFKNKQNEDGLIMRNKARLVAQGFTQVEGLDFDETFAPIAIIEAIRLLLAFAASKGFKLYQMDEEVYVKQPPGFENPDFPNHVFKLSKAFYGFKQAPRAWFDRLKNFLLAKGFSMGKIYVDDIIFCCSTHALVVDFEMSMMGELSYFLGLQIKQTPQGTFVHQTKYTEDLLRRFKMENCKPISAPIGSTAMLDPDGDGEAVD

SEQ ID NO: 137164 - protein, 68 aa, Oryza sativa
  Clone ID: PAT_MRT4530_38673C.1.pep
MDSNSPPETVHQSCYDLQRATMTYIYGRSQQMETQLTSEANVIPNFSHVETILLKKFSKKLNARLKNQ

SEQ ID NO: 137165 - protein, 1027 aa, Oryza sativa
  Clone ID: PAT_MRT4530_38674C.1.pep
MANKFTTKSHVFDGLYFPYWCNKMQSYIMAEDYDIWRKVANPYVIPDQINIAALKTEFENNCKARNILLSGISCSDFDRVSHLQTANEISNALRNFHQATSNIKELRRNLFKKEYMKFEMKSGKDFDDYLSIFNKILSDLRSVDSAYDTNYTQSELIDSKSSVLVSPSTSLDVGASSSNSTALALINAMIDEQLEQFEEEDLALAANKFSREEPLSDVDGESEDEDKGKNISGVCFMARGESDSKYEDNELKQQHGALDCSTCTLNKMKRKDALGHVEYMEKIVKSDEVLSCPKRRKSKGVMETGQIVEGSVIGQATGQIGRGALVRSGPGFGGEEENVWIVDAGCSWHMTGIKTESIIFGDASTSAILAIDCVKVSDKFELKNVALVEDLKCNLLSVSQIVDENFEVHFKKTGSKIFDSCGDSVLNFSRYGRVFKADFENPVSPVIICLVAKFSKDVMFWHRRLGHVGFDHLTRLSGLDLVRSLSKLKKDLDLVYTPCRHAKMVASSHAPIISVMTDALGQLLHMDTVGPTRVQSVGGKWSKLGKTSYELRFGHQPKVSYLRVFCCKCFVLKYGNLDKFEARSTDGMFLGYPAHSRGYRVLVLETNKFIETCEVSFDEASPCTRPEIADESDDDDDDEVVSAGQTGHQAGQTAGTPPVRPAQEMRSDLLGSSASSSVDADRDGPPEATTSTGERTTRSKEEVYVKQPPSFENPDLSNHVFKLSKALYGLKQAPRAWYDRLKNFLIAKGFQMGKNDKTLFVLKLGDNQLFVQIYVDDIIFGCSTHALVVEFAETMRREFEMSMLGELSYFLGLQIKQTPQGTFVHQTKYMKDLLRGFKMENCKPISTPIGSTAMLDPDEDGEAIDQNEYRSMIGSLLYQTSSRPDIQFAMCLCALFQASPRASHRQMVKRIMSGYSDADFTGCRIDRKSTSGTCHFVDYGLTFEKVALFCDNTSAISIAKNHIQHSSTKHIDIRFHFLRDHVEKGDVELTFLDTKLQLADIFTKPLDSSRFAFLHGELRIIHPFGMV

SEQ ID NO: 137166 - protein, 49 aa, Oryza sativa
  Clone ID: PAT_MRT4530_38675C.1.pep
FCIQNLRYFLSHRQIIGLQCDFWYSSELKQYTSLISARCVATTHIHYLS

SEQ ID NO: 137167 - protein, 135 aa, Oryza sativa
  Clone ID: PAT_MRT4530_38676C.1.pep
MAPEMVLPHPRARATGGRAPHGGHAVRPKAATSAQPAGGGPRTPMVAGGDHRRGGASAERKGRGKRRRRSTAHPGASAATKEAAGAEKGGGAAWVDEGGGVPAGVERDGGVDEVGDGAAKLEEATSRREKVPAGG

SEQ ID NO: 137168 - protein, 560 aa, Oryza sativa
  unsure (1)..(560): unsure at all Xaa locations
  Clone ID: PAT_MRT4530_38677C.1.pep
GDDGECDPTFGHAVSRAWSRQSGVDLHGHRIQRGFMEGYTCXWVKHGEQEVTTVDISGAQNQEDEDEHDLFVPSPLGGEMVDVDHDLLQDMLRDVEDPAYNERDSMKFSWLVSDSETPLYAGCKAKHTKLSGTLDLMKLKASSGWTDKSFIERFGIFKAMLPDENTLPETIYEAKQASRYKRKKSADEGKKSKQGGPAKVVWYLTIIDRFKIIFANHKEAKLVRWHATERRNDSPKQPGNDIDVFLELIIDDLKILWKEGMETWDAYGQENFKLRVLLFCTINDYPALGNLSGQTVKGKKDCSDCMEHTRSRWLKKSRKMIYMRHRRWLPLHHAFRIKKKIFNGKRELQPAPKDLSGDEVHNMVKDITNEFGKKRKRKVTPYFEEHLVKVRQENMGLSDMWINREHNTPFNKCFKNRIARSTDGPSETLQRLAKGPYWDIDRWQGYDIYGYTFYTVKQHRKSTVQNNGVRIDAYQDQVGSNTYFGRIEQIWELDYVNFKVPLFRCNWVNIRTGVKVDKECFTLVDLAKVGYADKPFVLANPVEQIXFYIKDPANKKLHVV

SEQ ID NO: 137169 - protein, 154 aa, Oryza sativa
  unsure (1)..(154): unsure at all Xaa locations
  Clone ID: PAT_MRT4530_38678C.1.pep
MGLGSAHQLERSMLARYLHRYTSQVGVVEQEKQQRFPFMALLNPNTSYYTLFKILXLFPFCLPXSRVRYFLFPGLVRVRYLYSLRKSYSYPFSQSFLSENRYDSLEYPTQLTNKERKEGICEKRKEVVVLAVDGLMEQFKLEREFSLERDSEVK

SEQ ID NO: 137170 - protein, 104 aa, Oryza sativa
  Clone ID: PAT_MRT4530_38679C.1.pep
IKYIFFYFKVNQAPACSKDASECSSKRCNESSSQRWHRPNKLGSSPIYVLCSASNYMCLSVQLIAHCTSFCCQGHSLYFLHLGHPSLTGRVGGRVGGRVGGRVG

SEQ ID NO: 137171 - protein, 92 aa, Oryza sativa
  Clone ID: PAT_MRT4530_3867C.1.pep
GFGLAPLRLLIRISHYINLARATGILEFYPCQGGLTKCVSVVLDCGIFGILSPAPGFFTGHAITVCWTLDSPNLSLVAKGHHQNTWLFPQVT

SEQ ID NO: 137172 - protein, 57 aa, Oryza sativa
  unsure (1)..(57): unsure at all Xaa locations
  Clone ID: PAT_MRT4530_38680C.1.pep
PRVRASGRIWFGIASAHDFGSHDYITEERVYHNIYAMNXARWAIIYGWTSGHLHDVC

SEQ ID NO: 137173 - protein, 747 aa, Oryza sativa
  Clone ID: PAT_MRT4530_38681C.1.pep
MATMLRVFQTQLTAEALIEEVIHDKEAQFNSPNLNVAYRMNVREYQSLTSYASLLEENWGKPPGNLISDGKQVGMSDACYPDSLIGNIPNIYCYAANNPSEATVGKRRSYANTISYLTPPAENVGLYKGLKQLSELISSYQSLKDTGRGPQIVSSIISTAKQLILTRMFPLPEERMELPPNERDLIVGKVYAKIMEIESRLLPCGLHVIGEPPSAIEAVATLVNIASLDCPEDEIYSLPNILAQTVGRNIEDVYRGSDKGILADVELLRQITEASRGAITAFVERTTNSKGQVVDVTNKLSTMLGFGLSEPWVQHLSKTKFIRADREKLRTLFTFLGECLKLIVADNELGSLKLALEGSYVEPGPGGDPIHNLKVLPTGKSIHALDPQTMPTIAAMKSAKIVVDRLLEWQKVDNGGKYPETIALVLWGTDNIKTNGESLAQVLWMIGVRSVADTFGRVNRVEPVSLEELGRPRIDVVVNCSGVFRDLFINQTNLLDRAVKMVAELDEPEEMNYVRKHAQEQAQELGVSLREATTRVFSNASGSYSSNVNLAVENASWTDEKQLQDMYLSRKSFAFDSDAPGAGMREQRKTFELALATADATFQNLDSSEISLTDVSHYFDSDPTKLVQGLRKDERAPSSYIADTTTANAQVRTLSETVRLDARTKLLNPKWYKGMMKSGYEGVREIEKRLTKTVVWSAKSGQVVNWVYEEANATFIEDEAMRKRLMDTNPNSFRKLVQTCLEASGRG

SEQ ID NO: 137174 - protein, 1403 aa, Oryza sativa
  Clone ID: PAT_MRT4530_38682C.1.pep
MSSLVSTPFTTATGVQKKLGAPVPLHSFLLSRRQPAAGAGRGRAAAAAIRCAVAGNGLFTQTKPEVRRVVPPEGDASRRGVPRVKVVYVVLEAQYQSSVTAAVRELNADPRRAAGFEVVGYLVEELRDEETYKTFCADLADANVFIGSLIFVEELALKVKDAVEKERDRMDAVLVFPSMPEVMRLNKLGSFSMSQLGQSKSPFFQLFKRKKNSGGFADSMLKLVRTLPKVLKYLPSDKAQDARLYILSLQFWLGGSPDNLQNFLKMIAVSYVPALKGADIKYDDPVLFLDAGIWHPLAPTMYDDVKEYLNWYGTRRDTNDKLKDPNAPVIGLVLQRSHIVTGDDGHYVAVIMELEAKGAKVIPIFAGGLDFSGPTQRYLVDPITGKPFVNAVVSLTGFALVGGPARQDHPKAIAALQKLDVPYIVALPLVFQTTEEWLNSTLGLHPIQVALQVALPELDGGMEPIVFAGRDPRTGKDISRFLLVSLTYFAGKSHALHKRVEQLCTRAIRWAELKRKTKEEKKLAITVFSFPPDKGNVGTAAYLNVFNSIYSVLQDLKKDGYNVEGLPDTAEALIEEVIHDKEAQFNSPNLNVAYRMNVREYQSLTSYASLLEENWGKPPGNLNSDGENLLVYGKQYGNVFIGVQPTFGYEGDPMRLLFSKSASPHHGFAAYYTFVEKIFQADAVLHFGTHGSLEFMPGKQVGMSDACYPDSLIGNIPNIYYYAANNPSEATVAKRRSYANTISYLTPPAENAGLYKGLKQLSELISSYQSLKDTGRGPQIVSSIISTAKQCNLDKDVPLPEEGVELPPNERDLIVGKVYAKIMEIESRLLPCGLHVIGEPPSAIEAVATLVNIASLDRPEDEIYSLPNILAQTVGRNIEDVYRGSDKGILADVELLRQITEASRGAITTFVERTTNNKGQVVDVTNKLSTMLGFGLSEPWVQHLSKTKFIRADREKLRTLFTFLGECLKLIVADNELGSLKLALEGSYVEPGPGGDPIRNPKVLPTGKNIHALDPQAIPTTAALKSAKIIVDRLLERQKVDNGGKYPETIALVLWGTDNIKTYGESLAQVLWMIGVRPVADTFGRVNRVEPVSLEELGRPRIDVVINCSGVFRDLFINQMNLLDRAVKMVAELDEPEEMNYVRKHAQEQARELGVSLREAATRVFSNASGSYSSNVNLAVENASWTDEKQLQDMYLSRKSFAFDCDAPGAGMREQRKTFELALATADATFQNLDSSEISLTDVSHYFDSDPTKLVQGLRKDGRAPSSYIADTTTANAQVRTLSETVRLDARTKLLNPKWYEGMMKSGYEGVREIEKRLTNTVGWSATSGQVDNWVYEEANATFIEDEAMRKRLMDTNPNSFRKLVQTFLEASGRGYWETSEENLEKLRELYSEVEDKIEGIDR

SEQ ID NO: 137175 - protein, 87 aa, Oryza sativa
  Clone ID: PAT_MRT4530_38683C.1.pep
MAGTLVHCICFRRLRPPSSTAAVIVACIRLVRCSYRGRCHRLSSPSSQFASALSAMAVAVTVSCARHRRDSTALQSPPRMRLARSHP

SEQ ID NO: 137176 - protein, 58 aa, Oryza sativa
  Clone ID: PAT_MRT4530_38684C.1.pep
MARGTKSKARRYQIRYPIGTSDTLSVPKFDTHLYQSIPIGTREKNNELERKKKLDGGC

SEQ ID NO: 137177 - protein, 67 aa, Oryza sativa
  Clone ID: PAT_MRT4530_38685C.1.pep
MATENSPSVIALASRPPWGSNFTVTVPVNHNGDTTFTIPVPAKNKEHLLLKSYALLASLPLDLTRNP

SEQ ID NO: 137178 - protein, 600 aa, Oryza sativa
  Clone ID: PAT_MRT4530_38686C.1.pep
MVFGAGAGGGGRPWPRLGKMPAAALFAKQVVTGRWFMMLACMVIMSASGGTNIFSIYSGALKSSLGYDQRTLNTLSFFKELGANAGIVSGLVAEVAPPSAVLAVGACMSLAGYLVVYLAVAGRVARPPLWLMCACISAGADSQAFANTGALVTCVKSFPESRGVVVGLLKGFAGLSGAVLPQLYLAIYGGGHDAGSLILLIAWLPAAISLVFLRVVRVMPHRPTNGRVGGGGSNGPIFSFLYISFAVASYLLVMIVLQKTISFSHAAYAATAIVLLLILLLLPLAVVIRQELRSRREADVQETLPAAAPPPQPVVETPPPPPATTCGVGSCLKRTFNPPAHGEDYTIPQAALSVDMVVLFVCVICGAGGSLTAIDNMGQISQSLGYPARSVNTFASLINIWMYAGRAGVGSLSELLLSRYRFPRPLMLTLVLVVSSAGYLLIALGVPHGLYAASVVVGFSFGGLYTLLFSIVSEVFGLKYYATLYNLGMVASPIGAYIFNVRVAGALYDAEAARQNGGGGAAGHRACAGVRCFRASFLIVTAATFFAVIVSLVLVWRTRGFYRGDIYARFKAAAPAPAVEGHRGEVTPEEASGTKLHGST

SEQ ID NO: 137179 - protein, 88 aa, Oryza sativa
  unsure (1)..(88): unsure at all Xaa locations
  Clone ID: PAT_MRT4530_38687C.1.pep
IQVRERELVDVVGDEEATIPKXKTKPVTHGVDSIALFDGXFDATPTXRANCRNMNSAIIKGGSVRDLKVDGCGGKGFRQVQALSIRGN

SEQ ID NO: 137180 - protein, 86 aa, Oryza sativa
  Clone ID: PAT_MRT4530_38688C.1.pep
MLGNGGIRRLDPNSSSVLVLFLRLPMNTTTADLDSPAQADEGILSALDMATIATLAHYSTSSVPDGIGDGAGHHELAIGRRTSSSP

SEQ ID NO: 137181 - protein, 109 aa, Oryza sativa
  Clone ID: PAT_MRT4530_38689C.1.pep
SPLFFFFFFGGFFFFFLKGGKNFFSRTGVKGFFGPNKAQDFQRGLSLTQTHMKGRLTFKNHPRFRFCRTWAPRTKHSVKEGAFSPPGRERTFWQGTLWGGGPQGPGARM

SEQ ID NO: 137182 - protein, 109 aa, Oryza sativa
  unsure (1)..(109): unsure at all Xaa locations
  Clone ID: PAT_MRT4530_3868C.1.pep
MVLLRPGQLLXLIPPHYAVLKKAERXGCQYIAXIKTQRVNAFVXSRPCRANNSSIPCPVQLDVVAXNAYRISREQARSLXRTNMAEIXHGAFTPRFQQQYYPGLSNESE

SEQ ID NO: 137183 - protein, 57 aa, Oryza sativa
  Clone ID: PAT_MRT4530_38690C.1.pep
GGPAPASGARALRKTDALRKPPSGTCQTGATTTRGRGRPSVGPSEPPGFGATRGAAR

SEQ ID NO: 137184 - protein, 75 aa, Oryza sativa
  unsure (1)..(75): unsure at all Xaa locations
  Clone ID: PAT_MRT4530_38691C.1.pep
GSXFISFFLFLSLXXGTRRRTPYSXFLLSNHWDXLPLGNPPXTYTTHXFDLXLXTTXHDYRVXXRDGTKPSTLTR

SEQ ID NO: 137185 - protein, 453 aa, Oryza sativa
  Clone ID: PAT_MRT4530_38692C.1.pep
MVGVERMRRRVVAIEGIASLGGGEEPGVSGRVEGSNSSTTGQCNAAIGGRLDSGFPAAAVSTFAAMLRAGARPDGYTLPLLNRAAASLPASRGEAELVGAAHAVGVRAEFAANVYFCNTLVDAYARRGDGRVRQEAVRRNAHARRGFLDVAGLFACRMAASDDAVALFQQSPRRDAISWNIMISEYSSEGNISKVAEMYQRMRREEADLQGVQTRTVEAWVDAVRKVALDVEDVIDDFDNDPGLNHLKHVLNLSYRYLPEYLKDCFLFCSIFLENSMIKRKHLIRLWIAEGFVEDRAGTTMEELAHDYLSELIRRGMLQVMKRNENGRMTNLAFLWLQRAFDGPQLRFVLGWFPRLRRLHLKDMDHLHSLEIEEGSVVSLEVLEMTGLNELNDIPGGIFFLNNLQEVYLDSMHKDFINHQSEGENVEDFPRFIYGHSPNFWRGEDVAYCHQYT

SEQ ID NO: 137186 - protein, 932 aa, Oryza sativa
  Clone ID: PAT_MRT4530_38693C.1.pep
MAESVLLIALGKITAALGADVLQQIRNLLPTEVSLFGQLTGRMNRIKKELFVIHAFLSQADLQGVQTRTVEAWVDAVRKVALDVEDVIDEYVHLLGQQKCGWFTSVKGKFGRSQHLCLWLQIVERLKEIERDLWHISEMKDRWIHTSTELLGRGNLDGDYHCALPYSPQCGYFINSDDMIGFGNYKMLLINWLAQKDSSTSVMVILGMGGIGKTTLASNVYETEKSRYDCSAWIATSQVYNICSLLRTTIRHCFKNTKEIPPNVDIMDQHSLIVELREFLKGRSCLVVIDDVWDHVCIGTILKAFSHNEHRNKIIITTREIQIAKFVDQSYMIQMEKLEESEAWDLFCRKAFLNEKEKSCPEELVGIAKDIMKWCCGLQLALVTMGGLLSLREKNNSEWKRVYNNLLCSFDNDPGLNHLKHVLNLSYRYLPEYLKDCFLFCSIFLENSMIKRKHLIRLWIAEGFVEDRAGTTMEELAHDYLSELIRRGMLQVMKRNENGRVKHCRMHCIVREVTISLCKSRGFHMIWGNKESTSAYEARRFAIHGINQSSSEILTDLPHVRTFLSFDVTMSDTLLSRIVCSSRYLTVLDVSGALFIKEVPKQVVSLFNLRYLGLRRTKVKKLPSSLGRLANLQTLDLHHSCISRLPSGITKLEKLRHLFVETVKDSSFQSLNACSGVGAPSGICKLKSLQTLFTIEASKCFVQQANKLVQLKSFRITKVRGSHCSVLSESIKRMKQLVYLDILASDEEEILDLDISPPPSTLEKLCLRGKLNDSNLHSFFNSFCNNLTCLFLGWSSLSRDPLPLLSQMTNLAFLWLQRAFDGPQLRFVLGWFPRLRRLHLKDMDHLHSLEIEEGSVVSLEVLEMTGLNELNDIPGGIFFLNNLQEVYLDSMHKDFINHQSEGENVEDFPRFIYGHSPNFWRGEDVAYCHQYT

SEQ ID NO: 137187 - protein, 70 aa, Oryza sativa
  Clone ID: PAT_MRT4530_38694C.1.pep
SAPRATPGSAPTPTPPAARRSRRRRRPSRSRSSTTGFWASTTSGTNPRLNDPELAPYRPCATGFCFRLVD

SEQ ID NO: 137188 - protein, 72 aa, Oryza sativa
  unsure (1)..(72): unsure at all Xaa locations
  Clone ID: PAT_MRT4530_38695C.1.pep
LYCSKFTHCTTICXSLLTDFKSLRHTLLIQLSILMLKGNISSDSPSVPIHINPQAYAMLCSYLTXLTYNDLM

SEQ ID NO: 137189 - protein, 211 aa, Oryza sativa
  unsure (1)..(211): unsure at all Xaa locations
  Clone ID: PAT_MRT4530_38696C.1.pep
GWDWEGIGIGGFGEVWERRRGRGEEEKRRRGRRREVEGTFPLRPTPFSPPIGECPGGLGEMKKLQPHGPVHMTHRQATPRARPPPPQSVPSPRPPPSTPVSSPAAGADLHPASRGGAGVLLLPPHXSPPPLHQREAAPAAAAAAAPPSERHASQRRGGGGGRSCCQCQGSSFRWCGATRSTPAPPPLRRRGCRSTPSSCRRACPARSAATH

SEQ ID NO: 137190 - protein, 48 aa, Oryza sativa
  Clone ID: PAT_MRT4530_38697C.1.pep
MAEKSMILSRRLGTLIAAAAEGRDGEGQRITACQCPRDRRFKQLGVFQ

SEQ ID NO: 137191 - protein, 84 aa, Oryza sativa
  Clone ID: PAT_MRT4530_38698C.1.pep
LAAAAHAVLRPCRRRGRSGCPRRLCAAAAASAVVVHQGHLIPPARLVLGELHNEEVENNQDEEVGNNSVAESPIPNRGGRGRGH

SEQ ID NO: 137192 - protein, 74 aa, Oryza sativa
  Clone ID: PAT_MRT4530_38699C.1.pep
DPPFHVQQKIDRCNAVKHEQWSSRPHTRKAYHCAGIQTVFQIDLQVCDPRIVDVAEGGVFDLVPVVRHRVQSVG

SEQ ID NO: 137193 - protein, 64 aa, Oryza sativa
  Clone ID: PAT_MRT4530_3869C.1.pep
VEPFLIHLFAKLEDRRSRPLVVDIFVSVALLRSSLLWIKFLWISIPLLCQTRHRLQGRIYSINV

SEQ ID NO: 137194 - protein, 50 aa, Oryza sativa
  Clone ID: PAT_MRT4530_386C.1.pep
QCTLAVWAFHSIPLHKQSRIVLYRCLGRPGGSRVILCFPPLVIMFLSPST

SEQ ID NO: 137195 - protein, 162 aa, Oryza sativa
  Clone ID: PAT_MRT4530_38700C.1.pep
LNRWLSDEEGPHLKVAAIVGPAGIGKTALATELYRDRRWQFECRAFVRASRKPDMQRLLGGILSQVQRRQRSSDAYADSTVQSLIDNLREHLQDRRYLIIIDGLWETAVWNIANSAFPDVNSFSRILITADIEQVALECCGYKYDYIMRMEPLGSLDFKKFS

SEQ ID NO: 137196 - protein, 402 aa, Oryza sativa
  Clone ID: PAT_MRT4530_38701C.1.pep
APSCSSPASPPRSTSTSACSSPTRASSPPSPPSSAPSRRPAVLIVEDLVTTGSSVLETVAPLREVGLVVADAVVVIDREQGGRENLAANGVALHSLMTLTEVLAVLVKRGKLGEEKAQEVKRFLDANRKMAVPGLPVKPKVVRKAFSERAGLATNPMGRKLFELMEAKQSNLCVAADVGTATELLDLADKIGPEICMLKTHVDILSDFTPDFGHKLRSIAERHSFLIFEDRKFADIGNTVTMQYEGGIFRILDWADIVNAHIVSGPGIVEGLKLKGLPKGRGLLLLSEMSSAGNLAHGDYTAAAVKIAEQHSDIVIGFISVNPASWSVTPSSPAFIHATPGVQLVAGGDSLGQQYNTPYSVINDRGSDIIIVGRGIIRANNPAETAREYRIQGWHAYQSSLS

SEQ ID NO: 137197 - protein, 63 aa, Oryza sativa
  Clone ID: PAT_MRT4530_38702C.1.pep
PMPAAIRACSPTKAHMDGPSETDSDIHTEDKAESILTVLEGPIHPDPELDVPNELITQGELVD

SEQ ID NO: 137198 - protein, 319 aa, Oryza sativa
  unsure (1)..(319): unsure at all Xaa locations
  Clone ID: PAT_MRT4530_38703C.1.pep
QSFSSSVPYPAHNWKKYELPPPLNYRCRLNYPLNHKTGHFSPRIIQTGRITPLDPIRDGFSLRGVSVAVHGGLGTEAAAASXRAAAGAAGGERRXRGRTRRRLAASGGARGWTGGAGARRRTXGGWRRAAVRGGGRSVGGGGGGGDDGDGGAPASLFPSLSLSLSLSRAAARAAAAGAAGRXVTADGRXRAGTGGRRLPIHLYRRRPFSSSPEKLALDPSSSSSSSSSVLGPRAPPPPRPPPXHPRRPSAPAHRRSPPAAPAAANADWTATRTPRRPKPPRIRSRGVIHPVCIVXGEKYPVLWFRGVIETTTIVRGEVI

SEQ ID NO: 137199 - protein, 488 aa, Oryza sativa
  Clone ID: PAT_MRT4530_38704C.1.pep
MDAAAMESLILELHAIEAVKFGAFVLKSGITSPIYLDLRMLVAHPRLLSTVASLLGSLPATRPYDLLCGVPYTALPIASVLSAAASVPMLLRRYHVTPHAAAECLDGSFRAGDAVLIVEDLVTTGSSVLETVAPLREVGLVVADAVVVIDREQGGRENLAANGVALHSLMTLTEVLAVLVKRGKLGEEKAQEVKRFLDANRKMAVPGLPVKPKVVRKAFSERAGLATNPMGRKLFELMEAKQSNLCVAADVGTATELLDLADKDDILLLQYYSLSKIGPEICMLKTHVDILSDFTPDFGHKLRSIAERHSFLIFEDRKFADIGNTVTMQYEGGIFRILDWADIVNAHIVSGPGIVEGLKLKGLPKGRGLLLLSEMSSAGNLAHGDYTAAAVKIAEQHSDIVIGFISVNPASWSVTPSSPAFIHATPGVQLVAGGDSLGQQYNTPYSVINDRGSDIIIVGRGIIRANNPAETAREYRIQGWHAYQSSLS

SEQ ID NO: 137200 - protein, 40 aa, Oryza sativa
  Clone ID: PAT_MRT4530_38705C.1.pep
RPKGGSVLLCKFIWNRPMDPPMLILYQPALTDDSILRCCC

SEQ ID NO: 137201 - protein, 234 aa, Oryza sativa
  Clone ID: PAT_MRT4530_38706C.1.pep
MKHVYIFSAGPAMMPKAVLAQAQQELLNWQQQGTSVMEVSHRSNAFMALATQTEQDLRQLYAIPDNYKVLFLQGGAHGQFAAIPMNLIGKKGKALYLISGHWSNRSAQEARNFCEVDQLNILTQDEAGVFSVNQTDFSDIAEQYDYVHYCPNETISGVEIPDIPIVGKAVLVADMSSNILSRNIDISKFGLIYAGAQKNLGPAGITIVIIRQDLIGNAQRATPSIWNYATQVNA

SEQ ID NO: 137202 - protein, 74 aa, Oryza sativa
  Clone ID: PAT_MRT4530_38707C.1.pep
KTMVTLIMGPKAETKNCYHMPDNDNMARHEDDFFVIMTHGSDSDDLKCTALKAHGRSLAVHVPMNSTGLKGQIG

SEQ ID NO: 137203 - protein, 396 aa, Oryza sativa
  unsure (1)..(396): unsure at all Xaa locations
  Clone ID: PAT_MRT4530_38708C.1.pep
MAARLRPAAAVMRTWLATAARLRPAVATTWTRPVTTARLRPLAAVTRTRPVTAARSRPVAATTRTWLATAAHGGGDTDAACDGGAVAARGDGVADATCDIEGGADRNCLEKIPNAYLIEEVSPNLEQSIPTALVLTVKYYNLDARAVRLYPSLQEENNSLGQYLLHAAPNQKMMLYKTFMMSNSILTRKVVHDINSAKVSYFATHQSTGPNENYYGLRATMDVYGHELKPGQLSGGALWVSHFGDDGKLSSYNAVGAGWHIDPERYGDSRPHFYTSWXGFERANGAAVAPGASIDPVSDDKSLQSITVEVLLDRDKWRLVGVLWLQRCSHGEKANAIAFGGYVVTRRALPTPPMGSGSHPHTNKSRAASLTNLGVINQDGNTNPINADLPTYMGNE

SEQ ID NO: 137204 - protein, 184 aa, Oryza sativa
  Clone ID: PAT_MRT4530_38709C.1.pep
MVATVFAIFITLAVALISRRGRRRRWSGGGGEGKRSSPPPHPPPPPQPPRHPPPPPTRERERGRYHKQPRGSVLCGYYSCEFLRVNGRYRVNAEDLPRIEHRISIDDTTITNVQRDLCYFIHHALVLSSQADAFSSSPPGKIIFPGGPPDRVDLRRCWGPGGAGICLGRPFSPAWENGFSSSDS

SEQ ID NO: 137205 - protein, 115 aa, Oryza sativa
  unsure (1)..(115): unsure at all Xaa locations
  Clone ID: PAT_MRT4530_3870C.1.pep
THRPKGSFLLAGNNNRAQQQQVYGSSIEQHSGPNIFSGFGVEMLSEALGINAVAAXKRLQSPNDHKRXEIIHVKNGXLQLLKPTLTHTTKSKPEASRTTTGRRAPVPSLLDVQQQ

SEQ ID NO: 137206 - protein, 93 aa, Oryza sativa
  Clone ID: PAT_MRT4530_38710C.1.pep
MAWPCAEKELRMGRGEPRRGVWEWRRGAILRFWMTRLEVEDEGVETLKKASASLSIACVRLRDGKTENSLTTDTPFHLRPGYRVVTVLTARAR

SEQ ID NO: 137207 - protein, 116 aa, Oryza sativa
  unsure (1)..(116): unsure at all Xaa locations
  Clone ID: PAT_MRT4530_38711C.1.pep
GNGFQSVGMVNKIYPKFGAPPGDKDLGGVAGGNPMKVXNWCKGANQSRKKVPWVKRGGKASLVFTVFCKVGKVCAQVPQALRHCCKKKSRVQVQRGRVLGMCPKELSKWFSPDLSF

SEQ ID NO: 137208 - protein, 171 aa, Oryza sativa
  Clone ID: PAT_MRT4530_38712C.1.pep
MTITREEAESKEMESLRVHASALLSLSSPAASASQPTSSSSTTEGVFECKTCSKRFPSFQALGGHRTSHTRLQAKLLSDPAAAAAAAAERDRARVHECAVCGVEFSMGQALGGHMRRHRGETGTTTVVLADADDSGGATVPQPPEPMPDLNYPPLEDAGDGSEPELLNLLV

SEQ ID NO: 137209 - protein, 83 aa, Oryza sativa
  Clone ID: PAT_MRT4530_38713C.1.pep
MQCAVSNACRSRPIGKAGDRARAHVSPRPGSGRRPTSGPTPLGEGHVALEGSLLHPISGKEWPPSYLGPDSPRGRATWHRGAA

SEQ ID NO: 137210 - protein, 276 aa, Oryza sativa
  unsure (1)..(276): unsure at all Xaa locations
  Clone ID: PAT_MRT4530_38714C.1.pep
MASDGSASPASCGGAACGVCGGAATVYCAADAAALCVPCDAAVHAANPLASRHDRVPLAVAMAAASSGVGRGRGAPTTARXSFTNDSAGGGGXGGAERSLFDLLSDVDIMSCGGGGLASSFDGAAAPXWGLHPGQLAALTPWSPADSVVVPTSAAGAVAAAAAAREERVRRYREKRKNRKFQKTIRYASRKAYAEARPRIKGRFVKRATTAAASSSSDDDSTAAAGVSGAGGAGAAATKEAKFWLSFSDDGRADGVGFYMDSTTAATAAYGVVPTF

SEQ ID NO: 137211 - protein, 303 aa, Oryza sativa
  Clone ID: PAT_MRT4530_38715C.1.pep
MMASDGSASPASCGGAACGVCGGAATVYCAADAAALCVPCDAAVHAANPLASRHDRVPLAVAMAAASSGVYDHLFAPDDDAASSWAAAAAAGAAVQGQGQGSPNDSSSSFTNDSAGGGGGGGAERSLFDLLSDVDIMSCGGGGLASSFDGAAAPPLWLHPGQLAALTPWSPADSVVVPTSAAGAVAAAAAAREERVRRYREKRKNRKFQKTIRYASRKAYAEARPRIKGRFVKRATTAAASSSSDDDSTAAAGVSGAGGAGAAATKEAKFWLSFSDDGRADGVGFYMDSTTAATAAYGVVPTF

SEQ ID NO: 137212 - protein, 374 aa, Oryza sativa
  Clone ID: PAT_MRT4530_38716C.1.pep
PRTSALVRAELDALGVAYVWPIAQTGVVATVVGAAGPGPVFGLRADMDALPIQEMVEWEFKSLEDGKMHACGHDVHVAMLLGAAKLLQSRRDHFNGKVKLVFQPAEEGYAGGYYVLEEGAVDDVQGIFGMHVDAGLPAGVVASRPGPFLAGSARFTATINGKGGHAAAPHHAVDPIVAVSSAVLSLQQIVARETDPLQGAVVSVTTIKGGEAFNVIPESVTLGGTLRSMTTDGMSYLMKRIREVIEGQAAVNRCTAAVDFMEDKLPPYPATVNDEEMYAHAKAVAESMLGEANVKLSPQGMGAEDFGFYAQRIPAAFFGIGVGNDGGGMAETTTKNQLHSPHFVVDEEALPVGAAFHAAVAIEYLNKNASGPSA

SEQ ID NO: 137213 - protein, 88 aa, Oryza sativa
  Clone ID: PAT_MRT4530_38717C.1.pep
KKGRKPPICVSRKPTPFGLLMVLILTFGFSPGSRELIFFSPVDFISVSPTRIVLWPIYIFAIFPYTFSSHFFCFPLLSFLYKINVLTF

SEQ ID NO: 137214 - protein, 34 aa, Oryza sativa
  Clone ID: PAT_MRT4530_38718C.1.pep
FFFFFFRKYDTEGSHIEFNFITSHDRILKPKWRP

SEQ ID NO: 137215 - protein, 206 aa, Oryza sativa
  Clone ID: PAT_MRT4530_38719C.1.pep
MPCWAVLSSCWAIVPWADPTKHGPSPSYARVLATVTASALRRRIIPVVAAADCLLAAALNIIPAKIFTEIDHAAQVESSKVTWHTAPCPGLGPSSRSAAIMQAVGSRNNGDAVGSDGHDAKLGAHGGGSSCSEGRGGRSHHQHGRPPASRSPPPQRGLRAQGHAWLPHCAPACSLAGLPPHRDCRSSSQSYGWLQAHNAEDLDCWM

SEQ ID NO: 137216 - protein, 219 aa, Oryza sativa
  Clone ID: PAT_MRT4530_3871C.1.pep
ITIPPRPFNTTPPFSPLLEPIQATPTFESSASLTPISRPHSGRSGPAARVAPAGPTAEVARSTEPPTPPVGSAPVSSAPAGPASTAPSAELPAHESASPGPPSTGSAARRPPASPSSTSSMLWRPPGPPPGFPASGFFITSSSLTVAWTGTRRVGYFVASLNGPGSTSTKPLARLLSWPLFGQSSVSQFLEIGLFISLMCRMPSIFWVSQSPVTAPVFS

SEQ ID NO: 137217 - protein, 208 aa, Oryza sativa
  Clone ID: PAT_MRT4530_38720C.1.pep
MAELPPAGSGGHGAEEMAAAREAEEVAAAIYGHKARPSTTRSALRAIPVHGLHLGSRHSPLAVGPCRAGPKARAAHRAFFEISLFYVPILWVVPYNTFIFPLYSLFRIPELCADPAYRGSSQARHGCRARPCLGRTKSPGHRASDSMAIYSAGTKLKTGVVPVLTVHSVIFHNRLTRINPADDEMKRKMNYGHGHGGHTAHYGAGARA

SEQ ID NO: 137218 - protein, 352 aa, Oryza sativa
  Clone ID: PAT_MRT4530_38721C.1.pep
MQRYTKTGGEIWDMEKSQSPRMGSVILGVDGGAGNTVCVCIPAAMPFADPLPVLSRAVAGCSNHNSVGEDKARETLERVMAQALLKARRRRSNVCAVCLAVAGVNHPIDQQRMLDWLREIFPSHVKLFVENDAVAALASGTMGKLHGCVLIAGTGTIAYGFTRDGREARAAGAGPVLGDWGSAYGISAQALTAVVRAYDGRGPETALTNSILDFLGLASPDELIGWTYEDQSWARIADLLPVVVESAEAGDEVANKILHNSVGELASSVKAVVQRLELSGEDGKDHFPLVMVGKVLMANKRWDIGKEVIDCVTKTYPGAYPIHPKVEPAVGAALLAWNAVASELDGSPRTVA

SEQ ID NO: 137219 - protein, 294 aa, Oryza sativa
  unsure (1)..(294): unsure at all Xaa locations
  Clone ID: PAT_MRT4530_38722C.1.pep
MVELCGGEGEGQIMLATELAQLRAMARELEAKMDPDRVAARELCRALASSVDRSIRLAASCFPPPEHPPPAAGNAGRDAAFKKRQVMVPGHGGLISGLRDRRSNALXVFRCRKGMAKVRRQVRVTSVQDTASLDDGLSWRKYGQKDILGAKYPXGCNATKQVQRADGDPLLFDVVYLGDHTCGQAAVAAAAQSAPPEHAGQEQQRQSSLLAAGTEGIHQQVVAEPMAAPFLFTSTAAGGVDDGYFSFISPANSDCQFSSDFSAGSVGVDMDHEARFEDLFSSTLEFFQSEIQNL

SEQ ID NO: 137220 - protein, 145 aa, Oryza sativa
  Clone ID: PAT_MRT4530_38723C.1.pep
MAGLRKGKRDGHAQHRLLHHQRDISSSSRFAYKGAQNIHHEEKSNMLEMSSPSLTKEEEKTDAPTLSEEGIKGKLNGAGITQGIRLICTGKINNPRRGVSIAKAQRNVFYHNSPKDRANNSLEFREELRVHQAGCRCRDDQLALG

SEQ ID NO: 137221 - protein, 45 aa, Oryza sativa
  Clone ID: PAT_MRT4530_38724C.1.pep
MGVANEGERVGIIIDEMEREYSYNKQPEGNASSDEEDDVRRLVYN

SEQ ID NO: 137222 - protein, 107 aa, Oryza sativa
  Clone ID: PAT_MRT4530_38725C.1.pep
PHEGVLGPNRQGLVLRPVCRPSHPQNPPPLIDQKHDRFVTHSFVCKYAKQTHPTYTHTLICPGNVKKSERGRTGKKTKNVMVNLFKLIKWLVGNVLKFHSCKKRFGL

SEQ ID NO: 137223 - protein, 162 aa, Oryza sativa
  Clone ID: PAT_MRT4530_38726C.1.pep
PTRTRTRGRTRGFTGTAGVWRTEAINDSGGCKDRTTAEDMDLAVRATLKGWKFIYLWDLRVKSELPSTYKAYCRQQLRWSCGRANLYPWMIWDVLAAKKVLSLKKIYILGSSLLSSSCQSRGVAYIPTALLIDTDIEASEHLYSEPLRMLLMSEMCMHGMIA

SEQ ID NO: 137224 - protein, 150 aa, Oryza sativa
  unsure (1)..(150): unsure at all Xaa locations
  Clone ID: PAT_MRT4530_38727C.1.pep
PRLVAPHQRTQGQERSALSPCDRVIRVALALSTSAAVAAAAVTRALAARVTTTRVYTTLLVATAMRCSXTTVEGKVACVMTQAIDGSMTLAAREAAXLPTHEYGPYLPCNFVGRADGXMSELTNWREVTPARDAHELTIRRATTTTIPRI

SEQ ID NO: 137225 - protein, 371 aa, Oryza sativa
  Clone ID: PAT_MRT4530_38728C.1.pep
MPRRGGAAKKPAGGGELSRFLQSHLQTINDTFQMMAEAAPGGLERTEWSEVVKLGEQVSRQATVAGMVWSGDLPDVETLKENIVAYFNILQGFLLGCHGSTVGAGPTLHKSICSSAKNVVDSSFSLFNQAVSAYESRSPDRKTTIPQVTGTVWEACLALNKVPTTNCVAIGRAMTQIGVYLKDILREMKELPIGDSNGTAEKSSNGAVDTTSCSDRDGSSSDLELDEDFTEEEVAVAKLVVTVASDALVVVKETIRFITCLLKISGNRSGANEEKVETMEQLLSCCRQAADQINDLGASVYPPQDLSEMKSSVKRLYGGANAMRREIRSLGGSPEGAFVALERFEKSLGALEVEIADDVANEMENLTISSS

SEQ ID NO: 137226 - protein, 88 aa, Oryza sativa
  Clone ID: PAT_MRT4530_38729C.1.pep
MSKSGGRCSKEGDDAYFDWNRTNGEDKHFFKVMLGDFHERVGPIPGLSLGHVASCIALCFNSQLKNMPRIRTISQPLDGISTVKETLR

SEQ ID NO: 137227 - protein, 499 aa, Oryza sativa
  Clone ID: PAT_MRT4530_3872C.1.pep
MASSVFSRFSIYFCVLLLCHGSMAQLFNPSTNPWHSPRQGSFRECRFDRLQAFEPLRKVRSEAGVTEYFDEKNELFQCTGTFVIRRVIQPQGLLVPRYTNIPGVVYIIQGRGSMGLTFPGCPATYQQQFQQFSSQGQSQSQKFRDEHQKIHQFRQGDIVALPAGVAHWFYNDGDAPIVAVYVYDVNNNANQLEPRQKEFLLAGNNNRAQQQQVYGSSIEQHSGQNIFSGFGVEMLSEALGINAVAAKRLQSQNDQRGEIIHVKNGLQLLKPTLTQQQEQAQAQDQYQQVQYSERQQTSSRWNGLEENFCTIKVRVNIENPSRADSYNPRAGRITSVNSQKFPILNLIQMSATRVNLYQNAILSPFWNVNAHSLVYMIQGRSRVQVVSNFGKTVFDGVLRPGQLLIIPQHYAVLKKAEREGCQYIAIKTNANAFVSHLAGKNSVFRALPVDVVANAYRISREQARSLKNNRGEEHGAFTPRFQQQYYPGLSNESESETSE

SEQ ID NO: 137228 - protein, 45 aa, Oryza sativa
  Clone ID: PAT_MRT4530_38730C.1.pep
TNQQCKVSSSHIMRHSMFSLASSMDQSMCRPYSNCTYRTFTIPLH

SEQ ID NO: 137229 - protein, 134 aa, Oryza sativa
  Clone ID: PAT_MRT4530_38731C.1.pep
EAKGEKENKIAEENESKDSRICAAARRRRGERHASTRKAGGRLARPSWWSVRQAVAHTRRRTAWLLFPDAPLQRCAPELFSFYLSHRCVYVLGLARDVSRWPVPARDTHLARSRFKPDACPRFGNLQARCHVLL

SEQ ID NO: 137230 - protein, 175 aa, Oryza sativa
  Clone ID: PAT_MRT4530_38732C.1.pep
MASSSSAQETGRWSLAGATALVTGGSKGIGRAIVEELASFGATVHTCARNEATLNSCLEEWSAKKLSITSSVCDVSARADREALAGRVTAMFDGKLDILVNNVGFLFLKPAVNVTPEELSRVMAGNLESCFHLSQLMHPLLKTSGKGNVVNISGISTVTGFPSLPICAFCAAKGS

SEQ ID NO: 137231 - protein, 93 aa, Oryza sativa
  Clone ID: PAT_MRT4530_38733C.1.pep
GKKKIYRPPPVFNSTLFPPPQLPKHKKPVPTLFIPQKQKLRGPGERGHYFPNPTMEKGGPKKKKKRNMDGTSPIILYTISDPQREISEGKNPR

SEQ ID NO: 137232 - protein, 143 aa, Oryza sativa
  unsure (1)..(143): unsure at all Xaa locations
  Clone ID: PAT_MRT4530_38734C.1.pep
WRFRGRPESQDAMGGGAXGGGSCGENRTTSAGGAAWRGQGGCTGAAGRRRRPLPPRARXQGRERERGTGPRREKGREDGGKGSLPLPFLDGKAGEARGSGVAALAACGVRRRGRDEMPDDARKGWWPVWRRAGPGGRRRRRRP

SEQ ID NO: 137233 - protein, 70 aa, Oryza sativa
  Clone ID: PAT_MRT4530_38735C.1.pep
MNVAEENGHSPEIQKADSSPPPPTRVEKNNVAKGMEVDCKGLDHVDALRLIRHRQPATCYLAATLDEDPS

SEQ ID NO: 137234 - protein, 982 aa, Oryza sativa
  Clone ID: PAT_MRT4530_38736C.1.pep
MYSLRPKIRPPPFALAAARDSPLRWPPPPPPGRLPSWIRWRGDRRRLLPYAMSRGPPEGSQRGGRENEEEERSERRGGEGGGDGEGGEEIKGMRGEKEEKREEIRLGAGRMRRDACTGSFADFLSRLFNNKSLVSLWLIAKDEIKQLAGNRRRPDIGIGGHGAAKDDLPIDRSIYEAKLAGHGSIHQLASCSWLHLGPCSSCKAGLWRRRSKASASALLISSCSWPNPTQFCKPNRSQRPATTLATSISSLLILSFPFFSLYFSLQNHYSCIFISIFSLNLFGRFRSPPPTSIVRPPTAMRTYVRSIVYIPVYDGVRYEWRKLAPYTSAISMSSSLLNPMEQTVRCIGSSALESLGIGTPIHRAAKPIAFFGYCNFPFFFLKKYSKTEALAHAYTAHSSSINKRAHTPIRKLDILYKQARPNLCTSPCRNRSRHINHSAQHCTHNRLPAQYRVDLSEAHRPKQREEREARETARPHDRTSSIEPNRPPPPATAERMPPPPPPPPSLPPDLHRAHAYLLPRGGHRHARVASALLLASLRLPLRDHAAALVRRVHPSVSLRAAARLRGRGGGGLAAQLHSLLVRAGHAADPHASASLVQAYCSCGSVASARRVFDETAASADVVSWNVMIDGYVKSGDLARARELFDVMPGRNVVSWTMVIGAYAQMKQPEEAIEVFRRMQVEGIEPDGVALLSVLSACGDLGVVDLGEWVHRFVLRRGLCQEIPLMNAIIDMYVKCGSVKKALEVFEGMEQKSIVTWTTMIAGFALHGLGLEAVELFRRMEKENVSPNDITFLAVLSVCSHVGLTDLGRWYFKTMVSQYKIKPRVEHYGCMIDLLGRAGCLMEARGLIQDMPFKANAAIWGALLAAARTHGDTELGEQALLHLIELEPHNSGNYILLSNIYAEQERWDAVRELRISMRDRGLRNVPGASSIDVDGMVHEFTSRDGSHPSLHKIREVLCAINSNIKSVGHIALLPESLHDVEEG

SEQ ID NO: 137235 - protein, 186 aa, Oryza sativa
  unsure (1)..(186): unsure at all Xaa locations
  Clone ID: PAT_MRT4530_38737C.1.pep
GVLPRNNTASDILNQMASVLXRIHASMESNSAIGTTLLQGEENIGQFLYLEGIEYYMWNTYDVHFYASFSLIMLFPKLQLSIQRDFAAAVLMHDPEKLRMLHDGKWVARKVLGAVPHDLGLYDPWFKVNAYTLYNTDRWKDLNPKFVLQVYRDVVATGDKSFARAVWPSVYMAMAYMXAFDRDKDG

SEQ ID NO: 137236 - protein, 1234 aa, Oryza sativa
  Clone ID: PAT_MRT4530_38738C.1.pep
MYLYSLTLQRATGAVCAVIGSFSGRDSKKSAASGSSSSSSSTQEIAVARGTTLELLRPDPETGRLRTLLSVDVFGAIRSLAQFRLTGATKDYLVVGSDSGRLVILEYSPDRNRLDKVHQETFGKSGCRRIVPGQLLAVDPKGRALCIAALEKQKLVYVLNRDAAARLTISSPLEAHKSNTLTFSLTALDCGFDNPVFAAIELEYAESDRDPTGQAAEQAQKHLTFYELDLGLNHVSRKASEPIDNGANLLVTVPGGGDGPSGLLVCCDNFVLYRNQGHPEVRAVIPRRADLPAERGVLIVAAATHRQKSLFFFLLQTEYGDIFKVDLEHSNDTVTELRIKYFDTIPVTSAICVLRSGFLFAASEFGNHALYQFRDIGRDVDVESSSATLMETDEGFQPVFFQPRALKNLYRIDEIESLMPIMDMRVANLFDEETPQVFTACGRGPRSTLRILRPGLAISEMARSMLPAEPIAVWTVKKNINDMFDAYIVVSFANVTLVLSIGETIEEVSDSQFLDTTHSLAVSLLGEDSLMQVHPNGIRHIREDGRVNEWRTPGKKTITKVGSNRLQVVIALSGGELIYFEMDMTGQLMEVEKQDMSGDVACLAIAPVPEGRQRSRFLAVGSFDNTIRILSVDPDDCLQPLSVQSVSSAPESLMFLEVQASVGGEDGADHPANLFLNAGLQNGVLFRTNVDMVTGQLSDTRSRFLGLRPPKLFPCIVSHRQAMLCLSSRPWLGYIHQGHFLLTPLSCDTLESAASFSSDQCSEGVVAVAGDALRIFTIEHLGETFNETAIPLRYTPRKFVILPKKKYLAVIESDKGALSAEEREAAKKECLEAAGVTENGNANNGDQMENGDGQEDGAEDRNTLPDEQYGYPKAESERWVSCIRILDPKSRDTTCLLELQDNEAAVSICTVNFHDKEHGTLLAVGTAKGLQFWPKRNLSAGFIHIYKFVDEGRSLELLHKTQVEEVPLALCQFQGRLLAGVGSVLRLYDLGKRKLLRKCENKLFPRTIVSIHTYRDRIYVGDMQESFHYCKYRRDENQLYIFADDSVPRWLTAANHIDFDTMAGADKFGNIYFARLPQDLSDEIEEDPTGGKIKWEQGKLNGAPNKVEEIVQFHVGDVVTCLQKASLIPGGGECLIYGTVMGSVGALLAFTSREDVDFFSHLEMHLRQEHPPLCGRDHMAYRSAYFPVKDVIDGDLCEQFPSLPADMQRKIADELDRTPGEILKKLEDIRNKII

SEQ ID NO: 137237 - protein, 168 aa, Oryza sativa
  Clone ID: PAT_MRT4530_38739C.1.pep
VDPMLRHVEPPLSTFLELNKVNLDGYNEVKYTPSRDRQWHIYTLIKNKKDQRSNDQRLFLRTIVRQPGVTNGFLSGNVDNEVGRAQASSSYTSSSILRSLMAALEEIELHAHNETVRSSYSHMYLCILRVQQLFDLIPFSRTIDNVGQDEATACTLLKNMALNIYEHV

SEQ ID NO: 137238 - protein, 80 aa, Oryza sativa
  Clone ID: PAT_MRT4530_3873C.1.pep
MASRPSLKPKPKVKGARKGSPAADEEQSTAAAAVRFVKEWTTWTMKKTKVAAHYGFIPLIIVVGMRSEPRPSLAQLLSPV

SEQ ID NO: 137239 - protein, 143 aa, Oryza sativa
  unsure (1)..(143): unsure at all Xaa locations
  Clone ID: PAT_MRT4530_38740C.1.pep
ARAPWLWWWVVVVVGVAVAEAASGGGGGGDGEGKALXGXXXXXGNAPPEPXRXXATAXXGGGGXXSSSLLRXVFXLIPPMLXLXXVISTTIRXLGTLXFIXLTGNRLTXXMPSQMCHITLLXIAGLSFXLLXGDIPCFLSXLI

SEQ ID NO: 137240 - protein, 119 aa, Oryza sativa
  Clone ID: PAT_MRT4530_38741C.1.pep
HVPAGKHAGKTVQLLFAEARRRPPTWYHADCAKHFTDLCSGVIFDIDDLTLNYLRDECVTLDKRYRSPPFKWTAWMRREYFRNPCVAVGSVIAIIITCVRSAAGGLYGPKAQGKSEIIF

SEQ ID NO: 137241 - protein, 121 aa, Oryza sativa
  Clone ID: PAT_MRT4530_38742C.1.pep
LPVLQFLCKSIHISFQHKEITTMATLLLSSNKKPCSSSSSLLLLVLLLLLVFFAHHGSCSRPLPLPSPTPMQPQLKHESETASADTTTTTEEQVMQQQLSWLRSMKPRGRPQPSSPSKRTN

SEQ ID NO: 137242 - protein, 134 aa, Oryza sativa
  unsure (1)..(134): unsure at all Xaa locations
  Clone ID: PAT_MRT4530_38743C.1.pep
RPPPSRRDPHPPPLLPPPRAPVDXPPLSRSQPHPPPSRPPQMRPSTPTPAXPAPPPPPLSPPAAAPXRRPPPRRPPPDLLSRLAPTTLSSPAGWLSIEEKIERERRKRKGEERGKREGGVTWQPDMWSPRGSHL

SEQ ID NO: 137243 - protein, 401 aa, Oryza sativa
  Clone ID: PAT_MRT4530_38744C.1.pep
MAARQQHAAVLAIGTANPAKCVVAQEEFVDWYFRVTQSDHLPDLKAKMKRMCDKSAIKKRHFYHSEETIAGHPEFINRALPSLDARLGIAKDAVPELAMAAAARAIAEWGRPAADVTHLVVSTNAGAHAPGADARLAALLGLRATVQRAVLYMHGCNAGCTALRLAKDIAENNRGARVLVACAEVTLPLFAAPYEARLDALVAMALFGDGAGAAVVGADPTTPVEHPIFHVVSASQATIPGTEEGVSLLLGERGLDCRISGEVAALVRGGVERCLLDALTPLGLGAGAGGWNHLFWAMHPGGRAILDAYEAALRLEPGKLAASRRVLSEYGNMSCAAIIFVLDELRRRCRRDGGEEEEESDEYCEWGAMVGLGPGLTIETIVLRATGGGHVDDEGKKSIAA

SEQ ID NO: 137244 - protein, 128 aa, Oryza sativa
  Clone ID: PAT_MRT4530_38745C.1.pep
ACGCTNRLPPPPPPPPPPPPPVPVPPAYSVTSSVPPYSMTSSLPPSPRPPPPLPFSPIVIRRKKRDGELDEDDSTDDDDDTDSCSTPLPPPPPPGVEWEYLEPFAMRPLNFPSSLADRIDKEAASQVT

SEQ ID NO: 137245 - protein, 122 aa, Oryza sativa
  unsure (1)..(122): unsure at all Xaa locations
  Clone ID: PAT_MRT4530_38746C.1.pep
FNQAKSRALGDDNSSMVSWVTKDSDTSAMAWRSKKSLAGIAKEIDEYFLKAAASGSDIVILLDSSGGQPDPSELEANRGAGKNSKSAKVFSTIXSWSCAFKSAQANRQSSMHSREASGYGYH

SEQ ID NO: 137246 - protein, 70 aa, Oryza sativa
  Clone ID: PAT_MRT4530_38747C.1.pep
VIFSKKRVGLEEYVFKDIKIGEGTGISSVGGCRFRSKKRGVAPEENLPSNLGEQWRHNIEVIIVQRPFHG

SEQ ID NO: 137247 - protein, 121 aa, Oryza sativa
  Clone ID: PAT_MRT4530_38748C.1.pep
DAWVGFHRLWTEPIILSSSESWINFMLSNHPGAVLFMFMDVFLLTGALILTGAQATQIARNLTTNEAANQSRYAYLRGPDGRFRNPYSRGCRRNCADFLVNGYSNDEEAAWPTLQQTVQRS

SEQ ID NO: 137248 - protein, 713 aa, Oryza sativa
  Clone ID: PAT_MRT4530_38749C.1.pep
MGCTHSKVEDEEAVRRCKDRRKLMKQLMRRRVELAAAQTAYLQSLRNTGATLRQFAEVESALSQQPPAGIAVHPSPPPPPPPPPPPPPVPVPPAYSVTSSVPPYSMTSSLPPSPRPPPPLPFSPIVIRRKKRDGELDEDDSTDDDDDTDSCSTPLPPPPPPGVEWEYLEPFAMRPLNFPSSLADRIDKEAASQVTMDDDNWVETNTEFDGYDDESVSGNVEGIVSSVQLNQAKSRALGDDNSSMVSWVTKDSDTSAMAWRSKKSLAGIAKEIDEYFLKAAASGSDIVILLDSSGGQPDPSELEANRVKLSTKGQEKCLFASNHFQRITLVVLGAGKNSKSAKVFSTISWSWSFKSAQANRQSSMHSSDASGYGYHGKTLEKLYEEEQKLYKLVKDEEFARLQYRKNTSLLQRLESGDHDKLHAEKVRDNIEELQARIISLEEAVGLTCLSISKLRDEELYPQIIELSAGLVHMWRNMYECHQVQNHIAQQANLLGNLPGNEPTTDTHCQATSQLEVEVSAWHSSFCNLITLQRDYVTILNQWIKLTDCLPDNDGFMKSSSGIRSLCAELQRALTGLPEKVAAEAIKTFLSVIHTIVVQQTEERQLKKKSDQIESKFHTQLEKHSNNATQNSGQPTLAKLDTFKKQVEEEKARYLNSVRTSRAMTLNNLQTSLPNVFHALMGFSGVCVQAFEGISRCSEIVASHSGAVSPAISS

SEQ ID NO: 137249 - protein, 74 aa, Oryza sativa
  unsure (1)..(74): unsure at all Xaa locations
  Clone ID: PAT_MRT4530_3874C.1.pep
TYANAFVSHLAGXNSVFRALPVDVVANAYRISREHSPKPQGLPRGEEHGAFTXPRFQPRYYPGLSNESESETSE

SEQ ID NO: 137250 - protein, 121 aa, Oryza sativa
  unsure (1)..(121): unsure at all Xaa locations
  Clone ID: PAT_MRT4530_38750C.1.pep
PAGSATKQEAILELNQQQHLSPSCLVKSFALPXRRRCLAAADCGAARLPCGGLRGCKFPDVEGTATTKTXRPPLLHLNKAKVLEGWEXCAVGERREXRLRLHTCKCGTSLPRLLLLLLQLI

SEQ ID NO: 137251 - protein, 571 aa, Oryza sativa
  Clone ID: PAT_MRT4530_38751C.1.pep
MAEIEVVGDGGGGGGGGGVKQGVVEVREARANGGEGDPVVDVYSAAAYGDLERLRGFVERDGGASLAAPDGNGYHALQWATLNNYPHVALYIIEHGGDVNAGDNAQQTALHWAAVRGAIAAADVLLENGARVEAADVNGYRAVHVAAQYGQTAFLHHIISKYGADFECLDNDGRSPLHWAAYKGNADTIRLLLFMDANQVRQDKNGCTPLHWAAIRGNYEVCTVLVHAGTKEELTLKDSGGFTPVELANDKGHRHLSYILSNATKVTFEDKYCSGRSRKIGYASILFCFLIVLITLFLNSIIFAPNFSRITAAVGIWSWGAISLAFASLVMFYRVSRKNPGYIQANTKRLDPKEPLMEIDLNSSAWTGNWSQLCPTCKIIRPMRSKHCPTCKHCVEQFDHHCPWISNCVGRRNKWDFFVFLCMGTTTAFLGAAIGFHRLWTEPIILSSSESWINFMLSNHPGAVLFMFMDVFLLTGALILTGAQATQLKVFYVSITPLWRKFLEEQMIARNLTTNEAANQSRYAYLRGPDGRFRNPYSRGCRRNCADFLVNGYSNDEEAAWPTLQQTVQRS

SEQ ID NO: 137252 - protein, 1678 aa, Oryza sativa
  Clone ID: PAT_MRT4530_38752C.1.pep
LTPPRQFARRGAAAAAADPHPSRERAGRRRSSCCIRRIAQCEVIEIHTDFLVKQHYGAKGVDQWTGYGHDTTGVPTSFTQCFLNLGHGISSHLDCEGQFCELENLLDAKIYTYDALITELQNKRSDMYKDADDITKESKRRLSKSIAKICYCLDDVGLICASEATKICIERGQEKGWLKEVVDATDQQTDANGSRLFAENSALHMKFFEEALHLIDKRLQQGIDMLLNSESGCVEAAKTGYISPKLYELIQIFHSFSNSRHARCLIFVDRKITARVIDRMIKKIGHLAHFTVSFLTGGRSSVDALTPKMQKDTLDSFRSGKVNLLFTTDVAEEGIHVPECSCVIRFDLPRTTRSYVQSRGRARQEDSQYILMIERGNVKQNDLISAIVRSETSMVKIASSRESGNLSPGFVPNEEINEYHVGTTGAKVTADSSISIVYRYCEKLPQDKCYSPKPTFEFTHHDDGYVCTLALPPSAVLQILVGPKARNMHKAKQLVCLDACKKLHELGALDDHLCLSVEDPVPEIVSKNKGTGIGTTKRKELHGTTRIHAWSGNWVSKKTALKLQSYKMNFVCDQAGQIYSEFVLLIDATLPDEVATLEIDLYLHDKMVKTSVSSCGLLELDAQQMEQAKLFQGLLFNGLFGKLFTRSKVPNAPREFILNKEDTFVWNTASVYLLLPTNPSFDSNVCINWSVIDAAATAVKLMRRIYSENKRELLGIFDSDQNVGDLIHLANKSCKANSLKDMVVLAVHTGKIYTALDITELSGDSAFDGASDKKECKFRTFAEYFKKKYGIVLRHPSQPLLVLKPSHNPHNLLSSKFRDEGNVVENMSNGTPVVNKTSNRVHMPPELLIPLDLPVEILRSFYLFPALMYRIESLTLASQLRSEIGYSDSNISSFLILEAITTLRCSEDFSMERLELLGDSVLKYADEGQLSSIRCHMICNATLYKLGIERNVQGYVRDAAFDPRRWLAPGQLSIRPSPCECPVKSEVVTDDIHIIDDKAIVLGKACDKGHRWMCSKTIADCVEAIIGAYYAGGGLRAAMAVLKWLGIGAEIEEDLIVQAILSASVQTYLPKDNVFEMLEAKLGYSFSVKGLLVEALTHPSQQELGAKYCYERLEFLGDAVLDILLTRYLFNSHKDTNEGELTDLRSASVNNENFAQVAVKHNFHHFLQHSSGLLLDQITEYVNRLEGSSMDKVELLSDGLPKGPKVLGDIVESIAGAILLDTKLDLDVVWGIFEPLLSPIVTPENLELPPYRELIEWCGKHGYFVGINCRDQGDTVVATLDVQLKEVLLVRQGFSKKRKDAKAHASSLLLKDLEEKGLIIPKNASKTEQFEKHCGSTNPFNNLHVDAMDTQTPKPTKEKNAADSRNISDPLLGKPLHVIVKTSKGGPRIALYELCKKLQWPMPTMESEKVQPSFSSVCSSPGGSSQKATPQAFAFASTITLHIPNADVISLTGDGRADKKSSQDSAALFLLYELQRRGIEVKPGKAVSFNTTSVFLCDEDENMSDICDIMGKHLGRPVAEEGKKDNSDDGMDLSSSDDDDDSLDSSSSDDDDDESGDEDDGSDELPAEMESSEEEDGSDGQDESSSSMVSTDEEDESDEEDEIPEKPESSKLTAAGSTLSSGDKNTHPAKEDGKTPAISKPNKETPESSGTHACKYCSKAFSSDKSLRSHQKARHPAK

SEQ ID NO: 137253 - protein, 185 aa, Oryza sativa
  unsure (1)..(185): unsure at all Xaa locations
  Clone ID: PAT_MRT4530_38753C.1.pep
KIYTALDITELSGDSAFDGASDKKECKFRTFAEYFKKKCVXFCACPCACSGIILLFLSNIFVYRYGIVLRHPSQPLLVLKPSHNPHNLLSSKFRDEGNVVENMSNGTPVVNKTSNRVHMPPELLIPLDLPVEILRSFYLFPALMYRIESLTLASQLRSEIGYSDSNISSFLILXAITTLRCSEDF

SEQ ID NO: 137254 - protein, 89 aa, Oryza sativa
  Clone ID: PAT_MRT4530_38754C.1.pep
SCSMSFNGEVLCNSRRCEGTTTDCLPTSCLEVGIIDQPVACHHSALYIFSSVHLLNYDKRVPKEWRTADLVLVCVSCYVCLSICYLRRN

SEQ ID NO: 137255 - protein, 184 aa, Oryza sativa
  Clone ID: PAT_MRT4530_38755C.1.pep
MISFMETSPSKIYYWRERASGMSSLAYFMSKDTIDHLNTIVKPIVYLSMFYFFNNPRSSIWENYVILVALVYCVTGIGYTFAIFFQPGSAQLWSALLPVVLTLIATQRKNTFFADLCYTKWALEGFVMANAQNYSGVWLITRCGSLVKSGYDINDKALCIVVLIANGIVFRCVAFFCMVTFQKH

SEQ ID NO: 137256 - protein, 85 aa, Oryza sativa
  Clone ID: PAT_MRT4530_38756C.1.pep
MAAVDATAPSVVKVDVIARKKKNWIWILRKNEGRKRKVKVAQGSGERTSVDGMWEGRGAATRRVRQHRRGGGGKARSVRRERRLP

SEQ ID NO: 137257 - protein, 34 aa, Oryza sativa
  Clone ID: PAT_MRT4530_38757C.1.pep
SICSPSYTKIDFLLFKHAIYIPLNECIKIMYAFI

SEQ ID NO: 137258 - protein, 116 aa, Oryza sativa
  Clone ID: PAT_MRT4530_38758C.1.pep
IHLIFSFKQDHQELVVAQKPTNRLRGHPSSNHLAGGFYYIGYQRPLPMIYFVLQSYASTIRTLAAVGATVVAWNGKQRLGKVTDLCCLICTLCRFLFFNTMMMKFSSSLRWVNLPI

SEQ ID NO: 137259 - protein, 67 aa, Oryza sativa
  unsure (1)..(67): unsure at all Xaa locations
  Clone ID: PAT_MRT4530_38759C.1.pep
CCLCLVKPHSGRXYAYAAGALITNPPPIRFRARSIVWSNDGIYIVCVVAWLHLNKYPPSLDNVLHLG

SEQ ID NO: 137260 - protein, 66 aa, Oryza sativa
  Clone ID: PAT_MRT4530_3875C.1.pep
TLTPSSATIAGIKTQYSSALPVVCSGYMRIASQGSKPRSTQEQQGRRAQVPSLLDFKQTILPRIIE

SEQ ID NO: 137261 - protein, 324 aa, Oryza sativa
  Clone ID: PAT_MRT4530_38760C.1.pep
MDHAADHLDPAAPPSGPASSSAAVAEVNAWLASLAAEAGGAGGGGVGAPGGRGGVVGVGGGGAAPELSLGPEPTPRGVAYLRALAAASQARSRAAGIAAAGLRAQAAEYRAEAARLREALERAGLARDALSPPAAVSARAVAAVANLLAIRDTEMSRWRGLGFVVASADLSLRRAEVEEKRDKVHKESKALLDYTRKAITKLTELKKMLEKFKNDVEKQQAEQMTDWQTKLVMMDSKERQYILQVSNYKAMLNRVGYTPEINHGVLMEMAEHKKDLERKTKPIADTLRSYQDLPPLLSYHVIDNQDASEHLGLFAVYHFALMSM

SEQ ID NO: 137262 - protein, 47 aa, Oryza sativa
  Clone ID: PAT_MRT4530_38761C.1.pep
VCIIFPLLSKKPVLFYSNLKQFSLHSPLRTDDLLHGTPLVHFSPFHG

SEQ ID NO: 137263 - protein, 99 aa, Oryza sativa
  Clone ID: PAT_MRT4530_38762C.1.pep
TARRLIAAVCLRRRYLASVDRWVRCRLLPVYARPSLGVAHTAAMTPSVIATVSRSGRIYKPDSTSMVSSSQVPHTTSVSHIISTISILSLPCIGNNPFA

SEQ ID NO: 137264 - protein, 85 aa, Oryza sativa
  Clone ID: PAT_MRT4530_38763C.1.pep
KCTRGVPCNGRPVLCDEWRENCFKWYCRKELVSLTAMEILCTQSILRYTFNEVLVKLRTLAIKFNELTAKCYVGDVFLRGCLVGD

SEQ ID NO: 137265 - protein, 94 aa, Oryza sativa
  Clone ID: PAT_MRT4530_38764C.1.pep
LLENLQKFLQTVLLPEARARVFKSNYSQSLGELKILRSSWLVASFSESGKAGFSSFWLLVHFLDFTTTASQNLDQKLDCLGELLIMGEAAAARS

SEQ ID NO: 137266 - protein, 599 aa, Oryza sativa
  Clone ID: PAT_MRT4530_38765C.1.pep
MAKLLIEIAGSMGPAFRNAPHIGREMEKSHLIQLVSQNCENHHIISIWGMIGIGKTSFIRSVYESKEITSMFEQYAWVTILHPFNLHDFVTSLAQELDAHDFSLLGNGVQKSEESIKASKRRCPLVLDDVLSIEEWSLIQPHLPNETNTKIIVTTREASIAEHCSVTYKNIYKLEGLKEDAALALFKNKVFVDSSNTDLDLDMSTQAKLIIKECDGHPLAITNIAGFLARKQKTASEWKKLNDDFSSGSYLKIQGRKVSSNNEGTIRHLSIIDVCETNKNALKQCADLTHVRSVTVFGEWRSSLDFSMMRMLRILDLEGTSGLKDDDLDQIGIFLHLSYLSLRGCADIYKLPNSLGNLWDIQVLDVSGTRIIKLPKTITKLKKLQYLCAGNVPKDDATSSIELKESSDLSKMVHEAIDDLEMPDFVAKSVQLGTTALDMTAAYCRKKMQNTDNVKMRDIYHEYCKVKFPSILHGLDMYGVEAPEGIDQLNDLHTLGVVNVAAEKAILHDLEKLKKLHKLGLTGVNKKNSQAVLSAIANLVLLHSLSLRSEGEPGLQGCLDHTFTPPSKLQSLKIYGNLVTLPTWITQIQNLTKLKLRST

SEQ ID NO: 137267 - protein, 770 aa, Oryza sativa
  Clone ID: PAT_MRT4530_38766C.1.pep
NGKISSHPTCFSEQNIISIWGMIGIGKTSFIRSAYGSEEITSMFEQCAWVTISHPFNLHDFITSLAHELNAHDFSVLGNGLQKSEESIKHSKRRCLLVLDDVLSIEEWNLIQPHFPNETNTKIILHTTREASIAEHCSMTCKNIYKLEGLKEDAAFALFKNKVFVDSSNIDLDLDMITQAKLIIKECDGHPLAITNIAGFLARKQKTTTEWKKLNDNFTSGSVNKENLEMISTTLEPSYNNLSYHLKLCLLYLSVFPKGHNIRRKRIVRRWVAEGYISKTHSLSAEEVGESYFAELINRSIIQPSEPVPAHNVGNIEYCRVHNLMHKISVSKSMEENHGFVLEVSSNNEGTVRHLSIINTGETNKNALKCVDLTHVRSVTIFGECRASLDFSMMRMLRILDLEGTSGLKDRDLSQIGNFLHLRYLSLRGCTDIYHLPNSLGNLWDIQMLDVSGTSIIKLPKTITKLKKLHYLRAGHVPKDDATSSIELKESSDLSKMEHEHDIFHKYCKVLLPGIPQGLDMYGVKAPEGIGQLNDLHTLGVVNVAAGKVILRELEKLKKLHKLGLTGVNKKNSQAILSAIANLALLHSLSLQAEGEPGLQGCLDHTFAPPSKLQSLKIYGNLVTLPIWITQLQNLAKLKLRSTQLKLAPSMEILGKLPHLVILRLWKNSFLQSKKILFDFQQGTFPSLVVMELKDQEGLKSLNFLQGAMPRLELLQINNCMHIDNNGFFGVSSLPSLKEVMLMGDHNEELMKNLRDQLALNQNQPVLRGH

SEQ ID NO: 137268 - protein, 787 aa, Oryza sativa
  unsure (1)..(787): unsure at all Xaa locations
  Clone ID: PAT_MRT4530_38767C.1.pep
RERFDTSFQAFRNAPHIGREMEKSHLIQLVSQDGENHHIISIWGMIGVGKTSFIRSVYESEEITSMFEQCAWVTVSHPFNLHNFITSLAHELDSNDFSVLGNGLQKRRCLLVLDDVSSIEEWSLIKPHLPSETNTKIIVTTREASIAEHCSMTCKNIYKLEGLKEDAALALFKNKAYGSNIDLDLDMTTQAKLIIKECDGHPLAITNIVGFLARKQKTATEWKKLNDDFSSGSVSKENLEMISTGLEPSYDDFSYHLKLCLLYLSVFPKGHNIRRKRIVRRXAAEGYISKTHSLSAEEVGESYFAELINRSIIQPSEPIPHNAGNIEYCRVHNLMHKISVSKSMEENHGFVLEVSSNNEGIVRNLSIINVGETNKNVLKCVDLTHVRLVTIFGEWRASLDFRKMRMLRILDLEGTSGLKDRDLSQIGNFLHLRYLSLRGCADIYHLPNSLGNLWDIQVLDVSGTSIIKLPKTITKLKKLHYLRAGNIPKDDDTSSIELKESFGMEVLDRTTSYCCKVLLPSILQELDMYGVKAPKGIGQLNDLHTLGVVNVVTGKVILRELEKLKKLHKLGLMGINKKNSQVVLSVIANLALLHSLSLQAEGEPGLQGCLDHTFAPLSKLQSLKIYGNLVTLPTWITQIQNLTKLKLRSTQLKLDLFLEVLGKLPHLAILRLWMNSFQSKELCFNFQQGTFLSLVVMELKDQGGLKSLTFMQGAMPRLELLQIDNCIHIDENGLSGVSSLPSLREVMLKGDHNEEQVMLKGDYNDKLLKNLRNQLALNQNQPVLKGA

SEQ ID NO: 137269 - protein, 267 aa, Oryza sativa
  unsure (1)..(267): unsure at all Xaa locations
  Clone ID: PAT_MRT4530_38768C.1.pep
MPPLHAVSPAAAAAPPRALSSAARVPQRPGCVPERPNILSSSTNFMSLRAGPMRFYSRPLILQNSDKRAVLRHATIEEIEAEKSVIEDQARERMEKAIETVQNNFNTVRTGRANPAMLDRIEVEYYGTPVNLKSIAQINTPDATSLLIQPYDKSSLKLIEKTIVAANLGVTPSNDGEVIRVTVPPLRASXRRKELAKTVAKLAEEGKVAIRNIRRDAIKAYDKLEKEKKLSEDNVKDLSADLQKVTDEYMKKIEAIQKQKEQELMKI

SEQ ID NO: 137270 - protein, 799 aa, Oryza sativa
  Clone ID: PAT_MRT4530_38769C.1.pep
MTILLVILGLHLCSLHLPAISAAADTLSPGQSIAGDDRLVSSNGKFALGFFNTGSKSSGNDTLSYWYLGIWFNKVPNKTHVWIANRGSPVTDATSSHLTISPDGNLAIVSRADSSIVWSSQANITSNNTVAVLLDTGNLVLQSSSNSSHILWESFDHPTDVFLPSAKIGLNKITGLNRRIFSRRDLVDQSPSVYSMEFGPKGGYQLVWNSSVEYWSSGEWNGRYFSRIPEMVVKSPHYTPFIFQIEYVNNDQEVYFTYRIHDETIPLYTVLEVTGQRKALAWLNDTQGWQAVFTHPNDQCEVAATCGPFTICNDNTFPSCSCMEGFSIESPDSWELGDRTGGCRRNIPLDCVSSRSDTGTADKFYPMTSVQLPDKAQSIGAATSADECAAACLSSCSCTAYSYGEGGCSVWHDKLLNVRQQGNGVLYLRLSAKEVLESRRNNRWGVILGASIGASTAALGLIFLLMIWIRKGKRYNLTMDNVQGGMGIIAFRYVDLQHATKNFSEKLGAGSFGSVFKGSLSDSTIIAVKRLDGARQGEKQFRAEVSSIGIIQHVNLVKLIGFCCEGDRRLLVYEHMPKSSLDAHLFPSSGAVLSWTIRYQIALGVARGLAYLHSSCRDCIIHCDIKPENILLDSSFTPKVADFGMAKFLGRDFSHVVTTMRGTIGYLAPEWISGTAITSKVDVYSYGMVLLEIISGSRNSSKQSSRDGVHEACFPVQVARNLLNRDIDSLVDANLHGEVKLEQVERVCKVACWCIQDNEFDRPTMSEVLQFLEGLSEVETPPMPRLLHTLAGGLDSKIM

SEQ ID NO: 137271 - protein, 313 aa, Oryza sativa
  Clone ID: PAT_MRT4530_3876C.1.pep
MERVATLVSCIAAATAMLLAVAAAAAGSGGGGCTRSCGNISVPYPFGVEADCYYPGFNLTCNHSYHPPTLFLVDGAGTSHQVLDISISNSTVRINSSLIAFTKSADKQAVINTTWEVRGPYYLLDDPSNMVVLVGCQARFDVRGGSNNTLISSCTVVCPSPDPSTTYIGAGDGSCSGVGCCQANIVLRYSRYTVQIHDLQEQDAPSSSPTFNDGSAYIVDQPFNYTGLMIFEKNFPQALPAMLDWFIVGDNSTCPMSTNESAPAPASAAECRSVHSFYEGYYGDVSDDVVVGYRCRCSPGYQGNPYVKDGCYV

SEQ ID NO: 137272 - protein, 362 aa, Oryza sativa
  Clone ID: PAT_MRT4530_38770C.1.pep
MESAAGEEGKAAPSLPLATLIGRELRGGGSERPLVRYGHFGFAKRGEDYFLVKPDCLRVPGDPSSAFSVFAVRALPPCRVSGLVSGFRDADGVSGFVLVLGSAVWQVFDGHNGVSAAVFSKEHLLEHVMSAVPQGIGRDDWLQALPRALVAGFVKTDIDFQRKGEASGTTATLVVVDGFTVTVASVGDSRCILDTQGGVISLLTVDHRLEENVEERERVTASGGEVSRLNLCGGQEVGPLRCWPGGLCLSRSIGDTDVGEFIVPIPHVKQVKLSNAGGRLIIASDGIWDALSSEAAAQACRGLPAELAAKLVVKQALKTSGLKDDTTCVVVDIIPSDHSSTPPSLSPKKNQNKLRSLLFGRG

SEQ ID NO: 137273 - protein, 85 aa, Oryza sativa
  Clone ID: PAT_MRT4530_38771C.1.pep
PPNFSPPLFQRAHPFLWQKFPVPPTLSMAFPPPLLDFNFNHSLALSPYSPITNFSHGRYFSPNGGICALFPKKKGKAPPKYFPVP

SEQ ID NO: 137274 - protein, 672 aa, Oryza sativa
  Clone ID: PAT_MRT4530_38772C.1.pep
MPRTAAGVDVEDLLVRVKNGADAELAEVAREVAALAEQGRLGEDDDEDGVLVPALLARLAAAGGAEARVRVMAALRRLARCVGCESKERLASIEALSSIVRSLSRDVDETREAIALLLDLSDIPQVRQRIGRIKGSIVMLVTLRNAHEPGTHDDAEKLLHMLSSNPQNVLLMAEAGYFRPLIHYLKEGSDMNKILMATAISKMFLSEPMKSSLGEDGAVEPLVEMFKSGNLEAKHSALGALLNLSSSLQNAEILINSGITGPLLQLLFSVTSVLMTLREPASAILAAIAQSERILLHKDVAPQMLSLLNLSSPVIQLHLLRALNSISGHTNAKRARAKIRQNGGVQLLLPFLTEKNIDIKIAALNFISNLSKDASQELAEQIRDTHLNIFVKIISSPTSGNEKAAAIGILSNLPVTDKKITELLTEANLLPLLISLLEINITAPLTPLRTSLLEGIAGVLIRFTVPWDKKLQSLAVGHGVVPCLVKLLSEGSIKAKSKAATSLAQLSQNSLALRKTKLPRWLCVAPSAETYCLVHNSQCTVKSTFCLVKAGAVSPLIQILEDDNREADGAVLEALATLMQDEIWENGSKVIEKASGVHALLRIAEAGNSTSQEKAIWMLERIFRLEAHRERYGEIAQALLIDLAQKGDPILKPMIGKILAHLELLQTQSSYF

SEQ ID NO: 137275 - protein, 905 aa, Oryza sativa
  Clone ID: PAT_MRT4530_38773C.1.pep
MGKCAARQRQWRWPLLHRSPRPTPPPPHGLHPPRRALAEHARMPAEQQQPPPVAPARVTFSRVFQSCAQAGREALAAGRAAHARMVVSGFVPTAFVSNCLLQMYARCAGAACARRVFDAMPRRDTVSWNTMLTAYSHAGDISTAVALFDGMPDPDVVSWNALVSGYCQRGMFQESVDLFVEMARRGVSPDRTTFAVLLKSCSALEELSLGVQVHALAVKTGLEIDVRTGSALVDMYGKCRSLDDALCFFYGMPERNWVSWGAAIAGCVQNEQYVRGLELFIEMQRLGLGVSQPSYASAFRSCAAMSCLNTGRQLHAHAIKNKFSSDRVVGTAIVDVYAKANSLTDARRAFFGLPNHTVETSNAMMVGLVRAGLGIEAMGLFQFMIRSSIRFDVVSLSGVFSACAETKGYFQGQQVHCLAIKSGFDVDICVNNAVLDLYGKCKALMEAYLIFQGMKQKDSVSWNAIIAALEQNGHYDDTILHFNEMLRFGMKPDDFTYGSVLKACAALRSLEYGLMVHDKVIKSGLGSDAFVASTVVDMYCKCGIIDEAQKLHDRIGGQQVVSWNAILSGFSLNKESEEAQKFFSEMLDMGLKPDHFTFATVLDTCANLATIELGKQIHGQIIKQEMLDDEYISSTLVDMYAKCGDMPDSLLVFEKVEKRDFVSWNAMICGYALHGLGVEALRMFERMQKENVVPNHATFVAVLRACSHVGLFDDGCRYFHLMTTHYKLEPQLEHFACMVDILGRSKGPQEAVKFINSMPFQADAVIWKTLLSICKIRQDVEIAELAASNVLLLDPDDSSVYILLSNVYAESGKWADVSRTRRLLKQGRLKKEPGCSWIEVQSEMHGFLVGDKAHPRSGELYEMLNDLIGEMKLSGYEPDSASFVEVDEEGSAPEHCLELLVANLL

SEQ ID NO: 137276 - protein, 353 aa, Oryza sativa
  Clone ID: PAT_MRT4530_38774C.1.pep
MLASAAAAVGVAALLPGRLKPKPTPRLLKRLATASSSASTPPSPRSGGAGVEAEADTTPLFLRPAAHPVAAASLAAFRRRAAELVPDSAPHLHRHLRWLLADAAARDAGADPALLRAPLGDLESLWLRHVRDRRPFQYVVGNEHWRDLVVAVREGVLIPRPETEAVVDMVAKVQGFEAGWWADLGTGSGAIAVAVARMLGPEGRVFATDVSEVAIDVARLNVQRYGMQDKVEIRHGSWFEPLEDLKGKLMGVISNPPYIPTEDLPGLQPEVGWHEPKLALDGGKDGLEHLLHLCEGLSSVLKPGGFFVFETNGNKQSEFLVDFIQTKWDSSFRDVEAVLDFADIKRFVTGYRR

SEQ ID NO: 137277 - protein, 673 aa, Oryza sativa
  Clone ID: PAT_MRT4530_38775C.1.pep
MHPPAAHSVEHLARASAPRDASALVLLLPACGTLRSLRALHGRLLLLTSGLLRGIRARTKLLSCYAALGDLASARGVLDGTPRPDAYAYRVMLGWLVDAGSHADAVALHRDMRRRCPAAAQADVVLSLALKACVRSADFRYGRRLHCDVVKAGGADGFVMNSLVDMYAKAGDLENARKVFDRVPERNVVSWTSMLSGSIQNGIAEEGLVLFNEMRQDNVHPSEYTMVSVLAACAMLGGLHQGRWIHGSVIKYGLSTNSFISASLLDMYAKCEKVEDARRVFDELEFVDIVLWTAMIVGYTQNKRPLDALQLFLHKKFVSIVPNSVTIATVISASAQLRHLPLGRSVHAIGVKLGTMESDVVRNALVDMYAKCQALPEANSIFGRILIKDVVAWNSMMAGYSENGMANESLVLFNRMRMQGISPDAISVVNALSACVCLADLHIGKGFHTYAIKYAFMSNIYVNTALLNLYSKCADLPSAQRVFNDMTDRNSVTWSAMIGGYGMQGDSAGSIDLFNEMLKENIHPNEVVFTSILSACSHTGMVTAGKEYFDSMARHFNITPSMKHYACMVDVMARAGNLEEALEFIQNMPIKAGISVWGSFLHGCKLHSRLEFGEEAIKKMAALHPETPDFYVLMSNLYTSYGRWDKSQTIRRWMQEQGLVKLPGCSSVGHENG

SEQ ID NO: 137278 - protein, 211 aa, Oryza sativa
  Clone ID: PAT_MRT4530_38776C.1.pep
MATLTYSSTQYWSKRGHVPSQAKVLDRLTFKRVIKKASVEEFSCIPYILALFSCLTYSWYGFPVKQVMLMASLILAVFCMTVFFSSFSIHNHHIRKVFVGSVGLVSSISMYGSPLVAMKQVIRTKSVEFMPFYLSLFTLFTSLTWMAYGVIGRDPFIATPNCIGSIMGILQLVVYCIYSKCKEAPKVLHDIEQANVVKIPTSHVDTKGHNP

SEQ ID NO: 137279 - protein, 144 aa, Oryza sativa
  Clone ID: PAT_MRT4530_38777C.1.pep
HSTTASAGADFFSSHLRSRGIPHSPRLEPRSSLPPPPLHSTTAPTRAQVLPSHHRTRGLPHPSPSEPRSSPSAPARTFCCRCSSDARPRPPVMATCGFAATPPYSASRTVVITRCRLSSPIGRRPLPQDSICVASNRIGCSKLE

SEQ ID NO: 137280 - protein, 198 aa, Oryza sativa
  Clone ID: PAT_MRT4530_38778C.1.pep
MAKGNPCPRAYYRCTVAVGCPAAVAKSSSANAATTEMLELLRDFSDYSSFNSDISSELERLAAAVTPRSDAPQVAAVDLNGGSSSSSRLTTTTPPPLLQLGCRQALPFIVPTGRCASLAAVVEEISGRRASPPWMSAAGDAVAVIPSYENHVTEVSTCVKHSSSHTDIDRLRLSITTPFHDYDVITLIDKIINPLFWC

SEQ ID NO: 137281 - protein, 191 aa, Oryza sativa
  Clone ID: PAT_MRT4530_38779C.1.pep
MSLTVLLGQLSGSHRADSGFDVRFHCLPAEELLDFCGSEDFISRFMQQHSSHSREAIFGLESHVAAVVLDLFSTTFLDVTCNLDLPGYVYFTSTASLLSLVLRLLVLDQEMLVDFEEMEDVVDLLGLLSVPATLLPTPVIKKDCVEIMGTICPHGKDDFVFLPGQASHFGNLNFITDDFSKISLLDSDSQI

SEQ ID NO: 137282 - protein, 46 aa, Oryza sativa
  unsure (1)..(46): unsure at all Xaa locations
  Clone ID: PAT_MRT4530_3877C.1.pep
FVXVXHXVFXXXAXVSVXXHXLLARLSPPSFRSLRNGXRVEMLKES

SEQ ID NO: 137283 - protein, 62 aa, Oryza sativa
  Clone ID: PAT_MRT4530_38780C.1.pep
PPPPPPPPPPPPPPPPPPPPPPPPPPPPLPPPPPPPPPPPPPPPPPPPPPPPPPPPPPPHPL

SEQ ID NO: 137284 - protein, 451 aa, Oryza sativa
  unsure (1)..(451): unsure at all Xaa locations
  Clone ID: PAT_MRT4530_38781C.1.pep
MAQDAGDAVLPASRITVERHLSLICKIMAEDAVVMLLQGAVVGGCYFQPRPGVAGQYIESHLRRKWEDWKKDWFYTALPDRPRLRLPVSPPERSAAWLAVSELGEEYDAVRDRLRGLRSQGLTASMVFGDYFRRHIAPLQERSRSAWEYTRHNDPMRTHVGKRWDWGEEDAKTVVRRVLALDTVEQTLIPDGILSLCSDRDRESILVVMSVVGAGRGWSCWGTAGGGGGDGAGSSGATAGGSRTGGSSGGGGSRPPGSSHGPGGDSAGDPKGKRKMSESRPPSPPRGGGAERIAGQPPAGHKCPAASEAGRKKKRLRKIGQTEPCRGSFIEPLKWTFRCPPXRDSSQGVSASDPSQGHARRRWTRSCGRRRRSGRRRSSPQAPYMRRWATSACSTRPTPKIWRRGSRTPVGSLRRLPRTRRAGARAAVAVMVTRTGTRWSAAPDSGARALR

SEQ ID NO: 137285 - protein, 2052 aa, Oryza sativa
  unsure (1)..(2052): unsure at all Xaa locations
  Clone ID: PAT_MRT4530_38782C.1.pep
MPLFMSEEELRLLGGDVAAVAERADAAIRELRQQVDTVRAEADAAAIAAEQTCALLEQRYDTLSAEADRFRAELAELAAASERRAADLASSQSEIHQLRIQAIAKDGEIERLKVEISEVHKSKSQSLELIEQRDAEIREKDGIIQNYLDKILLNRSSCQVNLADSSASKGARIQEVEAKFTHLQATCNRITQEKDLLEKHNLWLDEELKEKVKNLAELRKSNMDEEARMSAKVAELERETSESSSSLRRSKERVSELEQRVSYMEKELCSTKDAAAANEQRLAAELSTVMKLAELHKESSEEWSKKAGELEDTFDQVEDEYKEKLEKETSAKRDLEMEATYLKQKLEKCESDLENTRKSSELSFTPLVAADPCDLAGSPMKEMAFSDPANQNDLMIVPKVPTGVSGTALAASLLRDGWSLAKIYEKYQEATDALRHERFGRRHAEAVLERVLHEIEEKAELILDERAEHRRMVEAYALMDQKLQQALLEHDNFENTIRNLKSELKRRERDHSIAQKEIDDLQKQIKLSIYLTFAPTQACILGVCTSKNYYDINGNHCGAVLKIAVLLKECQDIQLRCGSSLPNVGDGALSTSTSTGVPEVENNIHEHMTFNDINGLVQQNVQLRNQVHLLSADLDKRDMELRESFQIELKKITDDAASRVEKVMKKSEEQAIMIESLHRSVAMYRKLCEEQQKSRSNVEHIPKNLEDDGRKDLMVLFEGSQEVSRKAYEQVSERAKSLDEELTKLRTELLSLRSERDKAVLEAEFARERLNGFTAELEHQRKEANSISLRNAELMHLVVDYEKRLRENSESMKAVEENSRKLLMEMSILKNEKEILAKSEKKALEEVHDLTTRVHRLQATIDTIHATEEVQENARSIERRNQEEYIKRLERDWAEVKKELQEQRDHVRVLTLDKKNAFDGCLKQVEDMRKELQNSWKAATDAESRAAVAEAKCSDLETKLKSRKENDELFQLKEELEKYKEEAQANKSYMLQYKEIANSNESALKQMESALQDFKTESETIKKSLEDEITKLRTKISELEKCYIMKCEEAASAIEAKEKDTTSLMKEISVLRNEVSEKVIQIEKLETELASSKRALDEQYKRWRSAQDNYERQVILQSETIQELTSASKELSSLQQEIIVLRQTVETQKAENDGLRTLGEQEKIELVKGKDEALQKYNELNDQNKILHNQLEALHIRLAEKERNIAGLSSQRIDSHGEDDLHSVIGYLRRSKEILESALKSTKEAQDLLRSQTDSARTSMLKDEEFKSLQFQLVFFCIKNALPQVRELNLLRESNIQLREENKHNFEECQKFHDEAQKAKMEAERLHNLLLEKQVDAEICKKEIEMQKTEIANLNQKISELVENSRGVDLSTYETMKDELQNIKATLRENSAELERTKKLLSEKDSVIRNLEEKLAGCQSELDAREKKLNDVEASLKSEIDRHRKININIKRKLDASAKEKEELTKEKQSLSKQLEDLKXKGQKTTTENSNEQAIKEKDFRIQTLEKVLEKERDDNKKEKAFRRRNEKVFTTAIQNMNQERKQVEESIEKHRQAVKEVIEHYTGISSQIPSGSAIDEQLRSYFLAIKAVEESPSPFQDGAASQTPSVESADVDASAATAGRQVATPPRPAQVKVVEERAVSTLPKPSTEVRRPGGRRPLVRPSLERVEEPQADIDTTVVEGSTEKGGLLMERETPGGVSALQPSSRKRLIPSPQTRDDASQGETTDANPPLKKPKEGSSQCTSELKTEQSPHEDVMAPVPVLPSTELDEQQPGEEMDTDQSSLPVEEVEETREDDLGDKDDMETHIDASMDIQGQDAETGIDNDATTVEDVPVKSEAVMESLEEDLKTEDGKEEGQFTATTDVEDEREEGELPDEPEQPDSTPPVLDVGEQAGDSFRAASPAGPTEKSDVDMPEETGEGDGTMESDQSPVPQSGGADASPSQMADASPSPAREPSPNPVQAGAPPEQQNPTPPNPVQAGASSEQQNPATAAEGVETRSTRTINLTERARQNRQARILRSATQQNARGRGNQSLTYRKDGGRGTRGRGGRGQS

SEQ ID NO: 137286 - protein, 63 aa, Oryza sativa
  Clone ID: PAT_MRT4530_38783C.1.pep
PTRPPRVRPRVRKKKKKKKKKKKKKKKKKKKKKKKKKKKKKKKKKKKKKKKKKKKKKKRGGAF

SEQ ID NO: 137287 - protein, 468 aa, Oryza sativa
  Clone ID: PAT_MRT4530_38785C.1.pep
MASCKKVCVIGAGVSGLAAARELRREGLDVTVLEQRGGVGGQWLYDTATDAGDPLGVAGVHSSMYASLRLITPREVMGFSDFPFRPGKDGDSGAGEVDARRFPGHAEFLRYIRELCDVFGLMDAVRLNTAVTRVAMAPPRRDGSLRWAVRSKHHGEAETEEVFDAVVVASGHFCQPRLPTIDGMDRWRRRQLHSHSYRVPDAFHGEVVVIVGCGISSKDIGLELRRVAKEVHLSAKSPEEAMTPAMSKILARYDNLHLHPQIEHLREDGTVVFVDGTCVVADAVVYCTGNTYSYPFLDTDGKVTVDDNRVGPLFDHVFPPALAPSLSFVGIPAMVVVPLFNEVQARWVAQVLSGRRALPSPEEMARAAEEYNRGREAAGVAKRRTHDILDLEYCDDYGERNCGFPRLEAWKKELMWSSYLTMCDNLETFRDDYHDSDLVADGLRLHGWISPATTLTQQGDDDKRPHLL

SEQ ID NO: 137288 - protein, 656 aa, Oryza sativa
  unsure (1)..(656): unsure at all Xaa locations
  Clone ID: PAT_MRT4530_38786C.1.pep
MTPTLIDISMITGLDVTSSANPMSLNTKNQYDFKTKSIGGWSGYVAAYIGQSPVTPREHVAFLLMWLEKFLFCGSSCGPTTNWQFVAEALETKRQFSLGKILLGYLYQMLNNALAKLIVGSVVGASGPWWLLQSWLNLVVMRFVNRPSVTETEFPRLEPTVNDDGEELTHRRFTSYGEYASTPTAAGAKLSAELLKDWFCSFYEGFQKDARAWFLYGDSTLLENPWDFRFEDINNDKYQKPREIFLSAITPCILPVSIHQGRNIQVSYEFYHPMSSTRQFGMGQLLIGLFFADKIQCRGEISSSLMMDRLLNLQAPPLGSIDTIKLATFRSKVFDRWWGEWKLHLFHXMTDLFPDIVPQTTESSPLHQSNSGRDIEYAPGLITKGXEPADASKKRKTRSSAVNILAPAPKKKTKTKKTTPADDLPALDPSIEQALDEEIIEDDIDEAATEKKKTAVKKKSAATTSKPAPPQSTSDQTPSAVGSHHIEEEIQPTVPTIPVDELADILTPGVYLEQHQFKLEKAKLRLAERLEHKGIEATIQANRQLVHEEKSKLDQLSEGPIKSNIDQLEARKIELLAQLQECNTELDLEHKKLADLPRSVEEQKARLKSAIKNVANLTKSLKIIPRTDAQDAQAIEEVEQIRQXKAISAIQQYLSQ

SEQ ID NO: 137289 - protein, 81 aa, Oryza sativa
  Clone ID: PAT_MRT4530_38787C.1.pep
SASGAIHARQKLDQGGWRHRERDGRTDAHHHHRDLLLRLIDPPLACPSSRAASCRPSRPVNAHRSRACTPISSRRDPAPHV

SEQ ID NO: 137290 - protein, 500 aa, Oryza sativa
  Clone ID: PAT_MRT4530_38788C.1.pep
MRFVNRPSITETEFPRLEPTVNDDGEELTHRRCTSYGEYASTPTDAGAKLSAELLKDWFCNFYEGFQKDARVWFLYGDSTLLENPWDFRFEDINNDRYQKPRKIFLSAITPCILPVGIHQGRNIQVSYEFYHPMSSARQFGMGNLLIGLFFADKIQCRGEISSSLMMDRLLNLQGPPLGSIDTTKLATFRSKAFDRWWTEWKLHLFHQSASMYMTDLFPDILPQTTESSPPHQSNSGRDIEYAPGLIPNRDPSIEKALDEENIEDDVDQAAAELPPPPSSPVQQSLSDRTPSAVGSHHIVEEEQPAAPAIPASSLDSLVVDCGSIRAQLHEVQALIPEELADVLTPAAYLEQHQFKLEKAKLRLSECREHKEIEAAIQVNRQLVHEEKVKLDQLSEGPIKSNIDRLEARKINLLAQLEECNAELDMEHKKLADLPKSVEQQKARLKSAIKNVADLTKSLKVISRTDAQDAQAIEEVEQIRQRAILAIQWYLSQYLLCNRT

SEQ ID NO: 137291 - protein, 956 aa, Oryza sativa
  Clone ID: PAT_MRT4530_38789C.1.pep
NNEPSTPGSPGFSTDRLPPNTTTSRGATDPSSYSDDDDDDVVGAEEAEVDPNVLPEDDGVVAAEEEEDGEDLFNDNYLDDYRRMDEQDQYESVGLDDSIEDERNLDEIMADRRAAEAELDARDVRTGAAPDRKLPRMLHDQDTDEDMSFRRPKRHRANFRPPREPRTPRSDDDGDGATPSSPGRSQRGMYSGGDVPMTDQTDDDPYEDEFDEEDEMNMYRVQGTLREWVTRDEVRRFIAKKFKEFLLTYVNPKNEQGEFEYVRLINEMVLANKCSLEIDYKQFIYIHPNIAIWLADAPQSVLEVMEEVAKNVVFDLHKNYRNIHQKIYVRITNLPVYDQIRNIRQIHLNTMIRIGGVVTRRSGVFPQLQQVKFDCSKCGTVLGPFFQNSYTEVKVGSCPECQSKGPFTINVEQTIYRNYQKLTLQESPGIVPAGRLPRYKEVILLNDLIDCARPGEEIEVTGIYTNNFDLSLNTKNGFPVFATVVEANYVAKKQDLFSAYKLTDEDMSEIEKLAKDPRIGERIVKSIAPSIYGHEDIKTAIALAMFGGQEKNVKGKHRLRGDINVLLLGDPGTAKSQFLKYVEKTGHRAVYTTGKGASAVGLTAAVHKDPVTREWTLEGGALVLADRGICLIDEFDKMNDQDRVSIHEAMEQQSISISKAGIVTSLQARCSVIAAANPIGGRYDSSKTFTQNVELTDPIISRFDVLCVVKDIVDPFTDEMLARFVVDSHARSQPKGANLEDRVPTDVEDDPLAAARQADPDILSQDMLKKYITYAKLNVFPKIHDADLDKISHVYAELRRESSHGQGVPIAVRHIESIIRMSEAHARMHLRSYVSQEDVDMAIRVLLDSFISTQKFGVQKALQKNFRKYMTYKKDYNELLLLLLRTLVKDVLHFEEIVSGPTTRLTHIEVKVEDLKNKAQEYEIYDLRPFFSSAHFRDNNFVLDEGRGIIRHPLAA

SEQ ID NO: 137292 - protein, 68 aa, Oryza sativa
  Clone ID: PAT_MRT4530_3878C.1.pep
FFFFFFLLKKLCNLYLVLISNRITHQGSYWWGFILLYADTSSQLHYSEVSAFGTHSIILGSIVCCCNI

SEQ ID NO: 137293 - protein, 791 aa, Oryza sativa
  Clone ID: PAT_MRT4530_38790C.1.pep
MSSSASPSAAPSAEYAEHLSNLVAIPSLSHENYYFLGPVGNPDPTEFIIGETNRIPFRLTNPDLGHWKNTFKSWPSLEKTSPEKSWTAWFKRMSAGKRVHWDEIGIGQALDLTIANSAKDEPLIAAASYFWSNTINAFLFNQEPMTPTLIDIIMITGLDVTSSANPMSLNTKNQYDFKTKSIGGWSGYVAAYMGQEKFLFCGSSCGPTTNWQFVAEALETKKQFPLGKILLGYLYQMLNNASAKLAVGSVVGAGGPWWLLQTWLNLVVMKVVNRPSVTEAEFPRLEPIVNNDGEELTHRRCTSYEEYASTPTDAGAKLSAELLKDWFCSFYEGFQKDARVWFLYEDSTLLENPLDFRFEDINNDRYQKPREIFSSAITPCILPVDIHQGRNIQVSYEFYHPMSSARQFGMGQLPIGLFFDDKIQCRGEISSTLMMDRLLNLQGPPLGSIDNIKLATFRSKAFDRWWGEWKLHLFHQSASMYMTDLFPNVVPQTTESSPPRQSNSGKDIEYALGLIPNGGGPSPPVIGYNAPKTSALLQELIRDPADAGKKRKTRSSAVNISAPAPNKKTKTKKTTPADDLPALDPSIEQTLDEEVIEDDVDEAAAEKKKTAVKKKLTATTSKPAPLPETSNRTPSAADSHNVEEEIQPTAPAIPLEKAKQRLADRRERKDIEATIQVNRQIVHEEKAKLDQLSEGRIKSNIDRLEARKIELLAQLQECNAELDLEHKKLADLPQSIEEQKAKLKSAIKNVADMTKSLKTIPGTDAQDAQAIEEVEQIRQRAISAIQRYLSQ

SEQ ID NO: 137294 - protein, 229 aa, Oryza sativa
  unsure (1)..(229): unsure at all Xaa locations
  Clone ID: PAT_MRT4530_38791C.1.pep
MEDQSLKPIRCKAAVCRAASEPLIVEEIVVDPPKAYEIRIKIICTSLCHTDVTLWHKVDPAFPRILGHEAYGVVESVGENVEGLAAGDTVVPTFMGQCDSCASCAAEWTNQCTAVPFTMGPGMRRDGTTRFWDGEGKPLSDTVAVTSFSQYTVVDVNQVVKVDPAVPPKIACLLGCCGGTGVGAAWRLAKVQPGSSVVVFGLXSVGLAVVQGAKMCGATKIIGVDLNPN

SEQ ID NO: 137295 - protein, 673 aa, Oryza sativa
  Clone ID: PAT_MRT4530_38792C.1.pep
MSSSTSPSVAPSAEYAEFKRMSASKRVHWDEIGIGQALDLTIANSTKDEPLMAAASYFWSNTINAFLFNQGPMTPTLIDISMITGLDVTSSANPMSSNTKNQYDFKTKSIGGWSGYVAAYKGQEAEFPRLEPIVNNDGEELTHRRCTSYGEYASTPTDAGAKLSAELLKDWFCSFFEGFQKDARVWFLYEDSTLLENPLDFRFEDINNDIYQKPREIFSSAISPCILPVGIHQGRNIQIQCRGEISSTLMMDRLLNLQEPPLGSIDNIKLATFRSKAFDRWWGEWKPHLFHQSASMYMTDLFPDVVPQTTESSPPIQSNSGKDIEFAPGLIPNGGGPSPPVIGYNAPKTSALLQGLIRELADAGKKRKTRSSAVDTSAPAPKKKTKTKKTTPADDLPALDPSIEQALDEEVIEDDVDQVAAEKKKTAVKKKSAATTSKPAPPPPSPPSLSVQQSSSDQTPSAVVSHHVEEEVQPTAPAIPKILEDISHRLEASSLDSLLVDCGSIRTRLHEIQALIPDELADILTPAVYLEQHQFKLEKTKLRLAERQKHKDIEATIQVNRQLVHEEKAKLDQLSEGPIRSNIDWLEARKIELLAQHQECNAELDIENKKLADVPKSVEEQKARLKSAIKNVVDLTKCLKVIPGTDAQDALAIEEVEQIRRKAISAIQRYLSQ

SEQ ID NO: 137296 - protein, 63 aa, Oryza sativa
  Clone ID: PAT_MRT4530_38793C.1.pep
LFAVDMNNVITLIFEMWLVMLQISHRSMLFWTLTWYLTGKITNSYCCTTSILQYMMLVSSKLN

SEQ ID NO: 137297 - protein, 351 aa, Oryza sativa
  unsure (1)..(351): unsure at all Xaa locations
  Clone ID: PAT_MRT4530_38794C.1.pep
LIHIDDDDAAAVCRAASEPLIVEEIVVDPPKAYEIRIKIICTSLCHTDVTLWHKVDPAFPRILGHEAYGVVESVGENVEGLAAGDTVVPTFMGQCDSCASCAAEWTNQCTAVPFTMGPGMRRDGTTRFWDGEGKPLSDTVAVTSFSQYTVVDVNQVVKVDPAVPPKIACLLGCCGGTDILNLLGVGAAWRLAKVQPGSSVVVFGLGSVGLXGKEFGVTDFVNPSQLGDKSVSEVINAMTDGGADYSFECIGISSVMTEAGRGKTIILGVEKDSQPLCLPSFEFLFGKCVMGSLFGGAKPKTDIPILAEKCMNKELELEKLVTHEVGLTEINTAFDLLLQGKSLRCIIWMDK

SEQ ID NO: 137298 - protein, 657 aa, Oryza sativa
  Clone ID: PAT_MRT4530_38795C.1.pep
MSSSTNPSDASSAEYAEHLSNRIAIPGLSHENYYFLGLVGNPDPTEFIIGETNRIPFRLTNPDLGHWKNTFKSWPSLEKVPPEKSWTTWFKPAVLQINWQFVAEALETKRQFPLGKILLGYLYQMLNNASAKLIVGSVVGAGGPWWLLQSWLNLVVMRFVNRPSVTETEFPRLEPTVNDDGEELTHRRCTSYGEYASTPTDARAKLSAELLKDWFCSFYEGFQKDARVWFLYGDSTLLENPWDFRFEDINNDIYQKPREIFLSAITPCILPVGIHQGRNTQVSYEFYHPMSSARQFGMGQLSIGLFFADKIQCRGEISSSLMMDRLLNLQGPPLGSIDTIKLATFRSKVFDRWWGEWKLHLFHQSASMYMTDLFLDIVPQTTESSPPHQSNSGRDIEYAPGLIPNGGGPSPPVIGYNAPKSSALLQGLIREPADADKKRKTRSSAKKKTAVKKKSAATTSKPAPPVLADLFPFDIKDYLDEGEEDTTSKALAPLSDDVKKTLENISHWLEASSLDSLVVDCGSIRTQLHEIQALIPDELADILTPAVYPEQHQFKLEKAKLRLAERREPFRRSDQSNIDRLEARKIELLAQLQECNAELDLEHKKLADLPRSVEEQKARLKSAIKNVADLTKSLKIIPGTDAQDAQAISAIQQYLSQ

SEQ ID NO: 137299 - protein, 211 aa, Oryza sativa
  Clone ID: PAT_MRT4530_38796C.1.pep
RKKKSNGFISGDSTLLENPWDFRFEDINNDRYQKPREIFLSAITPCILPVGIHQGRNIQVSYEFYHPMSSARQFGMGQLPIGLFFADKIQCRGEISSSLMMDRLLNLQGPPLGSIDTIKLATFRSKVFDRWWGEWKLHLFHQLASMYMIDLFPDIVPQTTESSPPHQSNSGRDIKYAPGLIPNGGGPSPPVIGYNAIKHDVQRNQPDLGSY

SEQ ID NO: 137300 - protein, 305 aa, Oryza sativa
  Clone ID: PAT_MRT4530_38797C.1.pep
MPLRLQLFSKGLSENQPMLARKERTRSSAVNISALAPKKKTKTKKTTSADDLPALDPSIEQALDEEIIEDDVDEAAAKVLADLFSFDIKDYLNEGEEDTTSKALAPLSDDVKKTLENISHRLEASSLDSLVVDCGSIRTRLHEIQALIPDELADILTLAVYLEQHQFKLEKAKLKLAKRRERKDTEAKIQANRQLVHEEKSKLDQLSEGPIKSNIDRLEARKIELLAQLQECNAELDLEHKKLADLPRSVEEQKARLKSAIKNVADLTKSLKIIPGTDAQDAQAIKEVEQIRQRAISAIQQYLSQ

SEQ ID NO: 137301 - protein, 145 aa, Oryza sativa
  Clone ID: PAT_MRT4530_38798C.1.pep
NRILSPSPKQQRQGYRVCPRTDPQQSPSSKKKTKTKKTAPADDLSALDPSIEKALDEENIEDDVDQAAAELPPPPSSPVQQSLSDRTPSAVGSHHIVEEEQPAAPAIPVLADLFYFDIRDYLDEAEKDTSSKALAPLSDNAKKTL

SEQ ID NO: 137302 - protein, 63 aa, Oryza sativa
  Clone ID: PAT_MRT4530_38799C.1.pep
PAAKLHSLVISTLDRNLLKLKLYALRPSRYVSTLVLCAPVLTPAFFMISYMFGIKISSDIIIM

SEQ ID NO: 137303 - protein, 346 aa, Oryza sativa
  Clone ID: PAT_MRT4530_3879C.1.pep
APRASIADVSCSADNSKKKEKSKKYGRVLEPDEPFKLFLRDRETTEFLTAKEERHLFSKIQILMKIEEAHRKLEVQCGREPTLAEWAEAVGMSSKELQSSIRTGRRCREKMARSNFRLVIHVARKYEGYGLDIQDLVQDGCSGLMKTFEKFNPSKGCRFPTYAYWWIRQSIKKSIFKNSRLIRLPESVYALLRKVGKARMECIMEGEQPTNANVARRAGITIEKLAKLRAKTRKPRSMQDHVWSDEGVTFQEITEDPNVEPPDLSVDRMMMRQQVRDFLGILSPREKEIIEHRFGIHDGEPKTLHVIGDMFGLSKERIRQLQNRALEKLKRSASLQGFDVYFDLLT

SEQ ID NO: 137304 - protein, 58 aa, Oryza sativa
  Clone ID: PAT_MRT4530_387C.1.pep
MDLDLDLGLTCLDVLHSATCLETGTTPDQRRAERIRELNDWELKEEHGIGLEQSTIKR

SEQ ID NO: 137305 - protein, 67 aa, Oryza sativa
  Clone ID: PAT_MRT4530_38800C.1.pep
AAYHLLRLPHRATQLPHTEPRSLSLRRIRTTASLDSDHLPATLRLPRLQRLARHSTSLNSSNLPASL

SEQ ID NO: 137306 - protein, 1145 aa, Oryza sativa
  unsure (1)..(1145): unsure at all Xaa locations
  Clone ID: PAT_MRT4530_38801C.1.pep
MSVNKTVKLTMPVLLALLLLSYGTGSIRCTTIAGNSTDVLSLLDFKATTNDPRGALSSWNTSIHYCWWSGVKCKPNTRGRVTALKLAGQGLSGQITSFLGNLTDLHTLDLSSNNFSGQIPPLTNLQKLKYLRLGQNSLDGIIPDSLTNCSNLFYLDLSNNMLEGTIPPKIGFLNNLSVLAFPLNFLTGNIPSTLGNLTNLNIMLLANNKIDGNIPQELGQLSNLGWLSLSENNLSGGFPQGFFKNLSSLQILSIQTTLLGGTLPFDIGNTLPNLTKLFLADNMFEGHIPASLGNASLLRGIDLSLNNSTGHIPNSFGRLSGLSTLNLETNKLEARDNQGWEFLEALRGCNNLNVLSLADNLLFGDVPNSIGGLSINLTILLLGGNNLTGIVPLSIGNLQGLISLGLDNNGFSGTIEWIGKLKNLQSLCLRNNNFTGPIPYSIGKLTQLTELYLRNNAFEGHIPPSLGNPQLLLKLDLSYNKLQGTIPLEISNLRQLIYLQLASNKLNGEIPDALGMCQNLVTIQMDQNFLRGDMPISFGNLNSLTILNISHNNLSGTIPVALGYLPLLSKLDLSYNNLQGEVPTVGVFRNVTSAYLDGNSRLCGGVTDLHMLSCPQVSNRIKRDSDITKRDYNLVRLLVPIFGFVSLTVLIYLTCLAKRTSRRTDLLLLSFGKQFPRVSYKDLAQATGKFSESNLIGRGSYSSVYRAKLAPTKLQVALKVFDLEVRCADKSFLSECEVLRSIRHRNLLPVLTACSTIDNSGNAFKALIYEYMPNGNLNMWLHKQFASVASKCLSLAQRVNIAVDIANALSYLHHECERSIVHCDLKPTNILLDDDMNAYLGDFGIPRVRPRVRLLSLESPXLGHSSPNSSIGLKGTIGYIAPEYAQCGHASTYGDVYSFGIVLLEMLTGKRPTDPMFENELNIVNFVEKNFPEQIPQIIDAQLQEERKRFQATAKQENGFYICLLSVLQVALSCTRLIPRERMNTREIAIKLHAIKTSYAEATKREIVGFECDVDELPNRPSAYTDTLDVRNYSSVQQHGCVPVVDGVLLVYYLGFANLGNVFYSLSNWDNGIAKDLSFDSLSEQLVMLVITRGQIEETLGLGYLNPAARSAPPLQRLRARRGLWSGRVLRCYLRVRRNVVESRC

SEQ ID NO: 137307 - protein, 73 aa, Oryza sativa
  Clone ID: PAT_MRT4530_38802C.1.pep
MSAALSSFPLLFSSLFSLLFFGEGRPAASSKRARQAGGTEQDATLAKPPMYTAKGPPVNGLNEFRGEHFWFCG

SEQ ID NO: 137308 - protein, 102 aa, Oryza sativa
  Clone ID: PAT_MRT4530_38803C.1.pep
MADPAAIVALCRTCTGSRYEVTTTHYTRRVLVEMPRPSPLLAVQCAELITRAVSVSRDSGCFTLQERHSAVFDLARCGFEEEGYPVVHYESALQTAKSTTVR

SEQ ID NO: 137309 - protein, 610 aa, Oryza sativa
  unsure (1)..(610): unsure at all Xaa locations
  Clone ID: PAT_MRT4530_38804C.1.pep
MGNCCRSPAAAAREDVKTSHFPASTGGGKKKPHQARNGGGGGGGGGGGGWEKKRLSVLGEEGSEVNGGIEEKYALDRELGRGEFGVTYLCMDRCSRELLACKSISKRKLRKPVHVEDVEREVAIRQDVLMSAIIMCPREACEDEGSVHLVMELCVGGDLLDGVVAKGHYSVSASTVITFSSVVYAFVLANQNPFLRVLIPMNFRCENRIGXDPPEFAYLCNYLFCQARAEFSENVCTPYXMAPDLLNRDYGPEIDIWSAGVILYILLCGVPPFWAALLFCKFLPSKIAETEQGVAQAILRGNIDFKREPWPNVSDNAKDLVRQMLQPDPKLRLTAKQVLVRNWLLMNVENSMRCLIVAINSRWKQLRRYTQTVIYRLGTQDSCFTSVVAEHTWLQNAKKAPNVPLGDIVKSRLKQFSRMNRFKRRALRVIADHLSAEEVEDIKDMFKVMDTDNDGIVSYEELKSGIAKFGSHLAESEVQMLIEAVDTNGRGALDYGEFLAVSLHLQRMANDEHLRRAFLFFDKDGNGYIEPEELQEALVDDGATDIMEVVKDILQEVDTDKDGKISYDEFVAMMKTGTDWRKASRHYSRGRFNSLSMKLIKDGSVKLVNE

SEQ ID NO: 137310 - protein, 68 aa, Oryza sativa
  Clone ID: PAT_MRT4530_38805C.1.pep
DADHAFVSNHPFGRSHGTAWAHSFLQCGYHRVRMVLNAQCKHILLLCAFFTTDSVGTNTAAVRGKLAV

SEQ ID NO: 137311 - protein, 81 aa, Oryza sativa
  Clone ID: PAT_MRT4530_38806C.1.pep
MASRAIVTVGFTSPRATPSASPSPFSAAGTPFAPHAGELRHGRHPSHPCRRAAALHRQPVAALRHRCVNATSPRAVAAGPA

SEQ ID NO: 137312 - protein, 358 aa, Oryza sativa
  unsure (1)..(358): unsure at all Xaa locations
  Clone ID: PAT_MRT4530_38807C.1.pep
MRAPHGSDSGGGPRWTGSTDRERGGAPRGANVAPMQGPRGSHAGGRTDGPDRPXGGSDGRGVARGXAHTGGSSRPGGHGARRRGIDAAVAQGGDRLAVEGGGAAAKRRARERDGEEDGPHRRILTTASDGGRWRRRDELRDHLXNKKGGVREGERNHGWLGCRPWRSSPACGANGVPAAENGDGEADGVALGLVNPTVTMARLAMAASGXSGGGGGVEGDGARAMEGXGELGEMEKKREGRAVMRGRGREREGVGTGDEGKAATWATWLREARAAVAGRSGASQRWETGPTGGAHLSVTLGERGVGQPAXAGPWPSAGPVGRGRGVHVSSSERSSGAPGKEKSIREVRLYGGRFMLNF

SEQ ID NO: 137313 - protein, 307 aa, Oryza sativa
  Clone ID: PAT_MRT4530_38808C.1.pep
MSPLSLSLSPLLSFLSHFSPGCGWRCVFDATGRRAGVAGGWQGRSAAERRADATGAAADGCCRADGRGGRPPQPSAYTRPSNPLPSTLLSVHLRAGDKRRGYAELWWCPGEMCGHVWLDEQPVGPWLAGVVVVRGGAELGPAAALDGALGDARVRDLTDTGGGGHLHHFPLLVEAMDGLAPAAMSEALLVFASGRSIGGAGPGRRPHLRRGESREFAWIYDYEDAPMSAPVWTMLRDFSKVRVQETEEKQGLGIGYWVDALQQKLHFSIPLVREGDGSIEVVADNNGWSFMGEDVVARSGISRKSRM

SEQ ID NO: 137314 - protein, 106 aa, Oryza sativa
  Clone ID: PAT_MRT4530_38809C.1.pep
MRSDPSSHRRWRRAAGNPGKRGWGRNGDTELTVAEAKEEEEATHDGGGMHFQWLRAAVLGASDDLVSTASLMLGIGAACPADEHAVLLSGLAGLVAVDWPSASRLP

SEQ ID NO: 137315 - protein, 362 aa, Oryza sativa
  Clone ID: PAT_MRT4530_3880C.1.pep
MSAYCGKYKDELIRNAAYIGTPGKGILAADESTGTIGKRLASIGVENVEENRRALRELLFTAPGALDCLSGVILFEETLYQSTRDGTPFVDVLAAAGVLAGIKVDKGTVELAGTDRETTTQGHDGLGERCRRYYAAGARFAKWRAVLSIGRASSRPSQLAVDANAQGLARYAIICQENGLVPIVEPEILVDGEHGIEACAEVTERVLAACYKALSDHHVLLEGTLLKPNMVTPGSDAARAPPEVVAEHTVRALLRTVPPAVPAIVFLSGGQSEEEATRNLNAMNQVASRGKKPWSLTFSFGRALQQSTLKAWAGKAENVGKAQAALLARCRANSQATLGAYAGDAAAGEGVSENLHVKDYKY

SEQ ID NO: 137316 - protein, 78 aa, Oryza sativa
  Clone ID: PAT_MRT4530_38810C.1.pep
LHDMGNVEMWDLSGNFFLSEDDIGKNRAVACTAKLQELNNAVLISTLTEDLTNEHLSKFQAVVFTDISLDKAFEFDDY

SEQ ID NO: 137317 - protein, 188 aa, Oryza sativa
  Clone ID: PAT_MRT4530_38811C.1.pep
KKKNFFFKKKKKPKKKKSGKTKKRVWEKKIFERDPKKKRAKKKKVKRKKILINKRGGEKKWEAKPKKRKFKKPPLKTMTQMKGKGGKPPKGSPLKKKAGLKTRGGPFRGENQTKSLGIGLNWAGWNLPRGKLLRPRGGGKRPQREGGPFQKRGVPNPLGNPNPKGPLGNFQKGARGAGKKLGRNPLGQ

SEQ ID NO: 137318 - protein, 1021 aa, Oryza sativa
  Clone ID: PAT_MRT4530_38812C.1.pep
MAEAALLALSKIGSYAAIEAAMVAKSKISNLMELSATVQRIRRQFLMMNFFIRKMGASYLSDELLKGWIAEVRMLAYRVEDVLDSFFYHSIQFKKDKFLNKIVKGSHYAVVFNAIADELVQIEKDIEHVSKLKDMWVYPVSQLIPTQVTISEHRFPQYSFPRLMKDEDLVGMENNRQHLKQLFSHGISALRVISVWGMGGMGKTTLVLNVYEQHKEKFDINVWLTVSQAFSVEALLRKLLWEIRRRCELTTPGDGDSVNKEQQASDETDKLEVSQLKELKDELKKALMRKRFMVVLDDVWDRQVFDMMHDVFEDFRNGSRVVITTRRGDVAALAHEGCHLKLNPLELNDALLLFSKKAFPNSNDLECPLKLKDLATDIAKKSNDSSLTECRLELNGLATDIAEKCNCLPLANSPAQVQELVAYIVKNCQDLLQMENNPSGLQKLATDILKKCELLPLVKCSAELQKLAIEIVKKCGGLPLAIASVGSLLSARMQIECVWKQIHDQLPCELEKDDQVRGVLTLSYYDLPGELRNCFLYCSMFPEDYLLSREVLVRQWIAEGFVEKKGDSTLEEVAEGYLMELVHRNMLQLVYNDELGRVSTCSMHDILRELALSISKAELFGTANNFSEMAQMNTNVRRLSACRWTHTEHDLSKIKFPHLRTVIALQSSMDFVPSILSESKHLTVLELQDSGINQVPASIGDLFNLRYIGLRNTAVKSLPDSIEKLVNLQTLDAKSTKIEKLPSGIVKLYKLRHLLIDRLSDGTRTEFRYFEGVVAPKGLSRLEELQTLETVEASKDLGEHLEKMIQLRNLWIGNIKAGHCAQLLASLSKMPLLYSLLLCASDEEEKLNIEKLVPTSTMLQKLIIRGCTSESTLECPVFQDHGRRLKYLALSRCHLGHDAFERLEKCVPNLTYLSLNKVHTNGAHTLVLPAKSFPLLKTLVLRNMSNVNLLKIGADALKCIEGLYIVSLSNLKSVPEGIESLSSLKKLTLLGLHNDFKAEWNKKRMHEKMKHVTKLRVYEWS

SEQ ID NO: 137319 - protein, 79 aa, Oryza sativa
  unsure (1)..(79): unsure at all Xaa locations
  Clone ID: PAT_MRT4530_38813C.1.pep
MATKKTLRTLGEADLRGKKENVRADLNEPLDDAQNITDDTRIRAYMPTVKILLEKNAKIKTNSXTGRPNEITPKYNLKP

SEQ ID NO: 137320 - protein, 165 aa, Oryza sativa
  unsure (1)..(165): unsure at all Xaa locations
  Clone ID: PAT_MRT4530_38814C.1.pep
FFFFGQPAAQPPITPSIQSHISHQQLLQVQSPFRANFQHSQRQPHHFQSPSSSPKXLPLLPSSPFHPSILILIITPAQSCNIFPQCPPPSYPPPSSHPSTSIIRSRPRIIWSLSTHPRASSHHTSLVPFNQAVYPXGXHXYMADNAXYTQWVVSQYPXTGHTGPF

SEQ ID NO: 137321 - protein, 398 aa, Oryza sativa
  Clone ID: PAT_MRT4530_38815C.1.pep
MPAAAAAEGKAARARSTAATADAAADDVLYVFALLRRRRPCIGSLGTRKRFSAFRLLASFDVCWEKELGSELHASGPSYSVSLSLLWASRPRGEAGEEEGVGGRRQAMQRRRGRKGDIGCRGRRHGGGCRRPATAIRRWQQLGRRVDDVVVQDGSSMGGGVPGTASRWGAMSLSSDLTFLPLPAVMAVSAAGIGLTGGALSRCRAAAAGVGPGGVQSCRRSGASGPSPLSSTNPAAATMNRTADGMEIPKFHQAIVTDQRCSTLDLLHVILRPSPIQPSSRIVTPPPTTGTPRKLTAIRSAAATKTLHEAPAPALPPLRRLQPYSCWPKPVLLYIHQNHTMICKICVKRINDWLHQRDQRKRLNSTCEGMTGKNCEDAEDMTGKDCEKGAGKKRQRKN

SEQ ID NO: 137322 - protein, 78 aa, Oryza sativa
  Clone ID: PAT_MRT4530_38816C.1.pep
FKPFGGPRVKRVFQVCLGLLFKDSELRFVSLIRGRWPRRKIREGLCLRVGGLLIFLQDSFLVGFGELVFFKEREVLNY

SEQ ID NO: 137323 - protein, 1179 aa, Oryza sativa
  unsure (1)..(1179): unsure at all Xaa locations
  Clone ID: PAT_MRT4530_38817C.1.pep
VQHGVALASEASPCWYEESSQASKARXHILGLTNVQFEKDNVCSAYQAGKQIGAHHPVKNVMTTTRPLELLHIDLFGPIAYLSIGGNKYGLVIVDDFSRFTWVFFLHDKSETQAIFKKFARRAQNEFDLKIKNIRSDNGKEFKNTCIESFLDEEGIKHKFSAPYSPQQNGVTKRKNRTLIEMARTMLDEYKTSDRFWAEAKTPYELLTGNKPNVSYFRVFGSKCYILNKKARSSKFAPKVDEGFLLGYGSNECAYRVFNKTSGIVEIARDVTFDETNGSQVEQVDSHVLGEEEDPSEAIKTLALGDVRPREPQQGASSSTQVEPLTSTQADDPSISSLDQGEEGEQVPPSPIILARPRIHQSIQRDHPTDNILGDINKGVSTRSRIANFCEHYSFVSSLEPLRVEEALNDPDWVMAMQEELNNFTRQNVIGTKWIFRNKQDEAGVVIRNKARLVAQGFTQIEGLDFGETFAPVARLESIRILLAFATNLNFKLYQMDVKSAFLNGPINELVYVEQPPGFEDPKYPNHVYKLHKALYGLKQAPRAWYECLRNFLVKNGFEIGKADSTLFTKRHDNNIFVCQIYVDDIIFGSTNKSFSEEFSRMMTKRFEMSMMGELKFFLGLQIKQLKEGTFICQTKYLKDMLKKFGMENAKPIHTPMPSNGHLDLSEQGNNVDQKVYCSIIGSLLYLCASRPNIMLSVCMCARFQAAPKECHLVAVKRILRYLVHTPNLGLWYPKGARFDLIGYADADYAGCKVDRKSTLGTCQFLGRMPLHKQTSHKSKRPRDRSPTPSSHDDSDSDWSGGEDAVPQVARVARRSTHAHDGGGDGEGSSRQPQTPPHQPNVPIGPLRIHTPERDPAVIRQVYDWRRKSEVVAPRRDEDPRSLRRTATDPRFWTLFQQDFYESVIKSKAHPTVPMQWINWEELQAHNDLVINSVIANCDLMDIRSFMTLQQNWCNEIIAQFYATVYWMTQGSWYSVSYQQLSEIWGFRLRSLLNLDDLHNLQIPANTDLLPLYTQNDPNVVLGKVDGLKLYFAYLNRMFHRSFVPKDGDASSINHLSRTVLLRFDPPPHRFHVYHFVWEEIRMASIQYKKGLVYAPHIMRMIETVTQLQFRHDVTHSQLHLRLLKAPCSSAARDIPSSSTQPPPAPERPASVARREPSPLFRILRSLFGLCSEEAKKNR

SEQ ID NO: 137324 - protein, 467 aa, Oryza sativa
  Clone ID: PAT_MRT4530_38818C.1.pep
MARTMLDEYKTSDHFWAEAVNTACHAINRIYLHRLLKRLPMSFLPARSSKFAPKVDEGFLLGYGSNECAYRVFNKSSGEEEDPSEAIKRLALRDVRPREPQQGASSSTQVEPPTSTQADNPSTSSLDQGEEGVQVPPSLINLARPRIHQSIQRDHPTDNILGDINKGVSTRSRIANFCEHYSFVSSLEPLRVEEALNDPNWVMAMQEELNNFTRNELYQMDVKSAFLNGPMNELVYVEQPPGFEDPKYPNHVYKLHKALYGLKQAPRAWKADSTLFTKRHNNDIFVCQIYVDDIIFGSTNKSFSEEFSRMMTKRFEMSMMGELKFFLGLQIKQLKEGTFICQTKYLKDMLKKFGMENAKPIHTPMPSNGHLDLNEQGKDVDQKVYRSIIGSLLYLCASRPDIMLSVCMCARFQAAPKECHLVAVKRILRYLVHTPNIGLWYPKGARFDLIGYADADYARCKVDRKST

SEQ ID NO: 137325 - protein, 1129 aa, Oryza sativa
  unsure (1)..(1129): unsure at all Xaa locations
  Clone ID: PAT_MRT4530_38819C.1.pep
VQHGVALASEASPCWYEESSQASKARXHILGLTNVQFEKDRVCSACQAGKQIGAHHPVKNVMTTTRPLVLLHMDLFGPIAYLSIGGNKYGLVIVDDFSRFTWVFFLHDKSETQAIFKKFARRAQNEFDLKIKNIRSDNSKEFKNTCIESFLDEEGIKHEFSAAYSPQQNGVAERKNRTLNEMARTMLDEYKTSDNFWAEAVNTACHTINCLYLHRLLKKTPYELLTGNKPNVSYFRVFGSKCYILNKKARSSKFAPKVDEGFLLGYGSNECAYRVFNKTSSIVEIARDVTFDKINGSQVXPSEAIKRLALGDXEEGEQVPPSPINLARPRIHQSIQRDHPTDNILGDINKGVSTRSRIANFCEHYSFVSSLEPLRVEEALNDPDWVIAMQEELNNFTRNEVWTLVERPRQNVIGTKWIFCNKQDEAGVVIRNKARLVAQGFTQIEGLDFGQTFAPVARLESIRILLAFATNLNFKLYQMDVKSAFLNGPINELVYVEQPPGFEDPKYPNHVYKLHKALYGLKQAPRAWYECLRNFLVKRGFKIGKADSTLFTKRHNNDIFVCQIYVDDIIFGSTNKSFSEEFSRMMTKRFEMSMMGELKFFLGLQIKQLKEGTFICQSKYLKNMLKKFGMENAKPIHTPMPSNGHLDLNEQGKDVDQKVYRSIIGSLLYLCASKPDIILSVCMCARFQVALKECHLVAVKRILRYLVHTPNLGLWYPKGARFDLIGYADEDYAGCKVDKKSTLGTCQFLGRSLVSWSSKKQNSVALSTAEAEYVSINWEELQAHNDPVIDSMIANCDLMGIRSFMTLQQNWCNEVIAQFYATVYFDRYRAMHCMTQGSWYSVSYQQLAEIWGFRLRSLLNLDDLHNLQIPANTELLPLYTPNDPNVVLGKVDGLKPYFAYLNRMFRRSFVSMDSDANSINHLSRTVLLRFDPPPHRFHVYHFVWEEIRMASIQYKKGLVYALHIMRMIETVTQLQFRHDVTHSQLHLRLLKAPRSSAAWDIPSSSTLPPPAPERPASVARREPSPLFHNLRSLFGLCSTEAKKNRRLRNSAKKTARDVKFLKARYYEDHHIDIPPSPPGFEAEPDEPQDEAIEDPFAGLPYDFDFFGYGHGYGYPPPPPPEDPSQAPFA

SEQ ID NO: 137326 - protein, 115 aa, Oryza sativa
  unsure (1)..(115): unsure at all Xaa locations
  Clone ID: PAT_MRT4530_3881C.1.pep
FFSPPNFFFPTNHYAVLKKAXEREGCQYXIAIKTQPXNAPPFFPGFSPPSAGKNSVFRALPVDVVANXAYRISRDASPKPQEPTGDEEHGAFTXPRFQQQYYPGLSNESESETSE

SEQ ID NO: 137327 - protein, 849 aa, Oryza sativa
  Clone ID: PAT_MRT4530_38820C.1.pep
MARTMLDEYKTSDRFWAEAVNTACHAINRLYLHHLLKKTPYELLTSNKPNVSYFRVFGSKCYILNKKARSSKFAPKVDEGFLLGYGSNECAYPVFNKTSGIVEIARDVTFDETNGSQVEQVDSHVLGEEEDPSEAIKRLALGDVRPREPQQGASSSTQVEPTTSTQADDPSTSNVDQGEDGEQVPPSPINLAHPRIHQSIQRDHPTDNILGAINKGVSTRSRIANFCEHYSFLSSLEPLRVEETLNHPDWVMAQQEELNNFTQNEVWTLMERPRQNVIGTKWIFRNKQDETGVIIRNKASLPQRAGPINELVYVEQPPGFENPKYPNHVYKLHKALYGLKQAPRAWYECLQNFLVKNGFEIGKADSTLFTKRHDNDIFVCQIYVDDIIFGCTNKSFSEEFSRMMTKRFEMSMIGELKFFLGLQIKQLKEGTFICQTKYLKDMLKKFGMENAKLIHTPMPSNGHLDLNEQGKDVDQKGARFDLIGYADADYAGCKVDRKSTSGTCQFLGRMPPRKRTSRKSKRQRDRSPTPSSHDDSDSDWSGREDAAPQYAWVARGGTLPPRRSTQALGGGGDGEGSSRQPQTPPHQPNVPIAPLHIHTPERDPADWCNEVIAQFYATVFFDPYHAMQWMTQGSWFSVSYPRLAEIWGFDLHDLLNLPDLHNLPIPANADLLPLYIPNDPNVVLGKVDSLKPYFAYLNRMFHRSFVPKDGDASSINHLSRTVLVSLFGLCSAEAKNNRRLRNSAKKTARDVKYLKARYNEDHHIDIPPSPPGFEAEPDEPEEELEDPFAGLPPDFDFIIVTTFYCILRRKHIRQATNCTSAHSGHIYTDWRPHKSIKQLQMGPTIMPMG

SEQ ID NO: 137328 - protein, 1113 aa, Oryza sativa
  Clone ID: PAT_MRT4530_38821C.1.pep
MARTMLDEYKTSHRFWAEAINTACHVINRLCLHRLLKKSPYELLTGNKPNVSYFRVFGSKCYILNKKARSSKFAPKVDEGFLLGYGLNECAYHVFNKTSGIVEITRDVTFDETNGSQVDQVDSHVLGEEEVPSEAIKRLALGDVRPREPQQGASSSTQVEPPTSTQADDPSTSSLDQGEEGEQVPPSPINLAHPRIYQSIQRDHPTDNILGDINKGVSTRSRIANFCEHYSLVSSLEPLRVEEALNDPDWVMVMQEELNNFTRNEVWTLVERPWQNVIGTKWIFRNKQDEAGVMIRNKARLVAQGFTQIEGLDFGETFEPVARLESIRILLAFATSLNFKLYQMDVKSAFLNRPINELVYVEQPPSFEDTKYPNHMYKLHKALCGLSKPLELATQGRKFHLPNKVFEGHAQEVWNGECEANPHSHAIKWPLKDVDQKVFGILRERGLISLAMPMRIMSGAKWIGKAHQCILMIKGQFKNQVYSRRVPMSSRGRSPTSKARHAIRRMSESRKDAIDTQAQASEDIAAQVANVERDSGSHAPSFEEEIQLEEDIAAQQAAHEEGPFFVTAPSRDPNYHRRVTRWNRKWTEVEKERKKDPYKYQQLSTDPRFWNLFQQDYYETVIAPKKGAILMQWVDWKYMEELHDPIINEVIEACARQNLKELMGLQYPWCKEIIAQFYATVYFEPNKEKIIHWMTDGIIYSVTYAKFAAILGFPARSRTNRVKIHDEKPMDTNSLHFLYQDVDYELGTIKGLLPFYAYLNKLLRKTLNPKEGDASNVLAYTRNLLHKMKAHPQLFDAFDFIFEKIWLISMIPKRGHGYGPYIMKMIEIVSKKKFHKEVAHTGYQVRPIKAVSVPAGRTTRASSRAGPSATVTSSDSNSSLRFFKSIFNMCKTISVHQAKERRARKKDTRRIKNLLHNAHLLLTERGAPHRETAQAPLCRPGPPFYLVRGHHTGLLLPKKRNMLFTMRASLHPEVTSDKQSTRLLPRSPAFPVDAHFNLHLMASDFLAILALKPGMDLTGTDIPTPGVSTPAPAREESQEALIIPTGRGELCSPDGFEVEDSGEDVFEDPFAAEASSSRADRGKAPMEEEEEEEEEDDNDEESSEEDKDFDEDE

SEQ ID NO: 137329 - protein, 79 aa, Oryza sativa
  Clone ID: PAT_MRT4530_38822C.1.pep
RHRLFHRPNSTITITKPTGPNKPLQSDKQTGLNRPFESNKPTGQNRPFQSNKPTGQNRPLQSNKPTDLNRPFQSNRPKF

SEQ ID NO: 137330 - protein, 1535 aa, Oryza sativa
  unsure (1)..(1535): unsure at all Xaa locations
  Clone ID: PAT_MRT4530_38823C.1.pep
ATLERQEELLIHEKERSHELKCELAKEREXNEALVRLYKQTKESHANLEVANAQLQERVDGLDKAYLSLEEKFETLKNSVSLPSKASCSKIAPSNEPCARCKDIDIEACATNSISLSALQKQNEKLMGLLHNGLLKCHMGSKALKEYLGYQRDNFNHEGLGYVPPPKGKVDKSVMIKRPQGLSNFVRAKSILPNDCASHCSFDASYVLRKNASGRVVAKYVGPRGKNISIKRVLWVPKALVTNMRGPKQEYVTGGRSWVIDSGCTNHMTGEESMFSSLDPNGTSQDNIVFGDDGKGNVMGLGKALPCEFSSSKAKHETCLVAKSNTGWLWHRRLAHVGMRNLHKLLKHNHILGLTNVQFEKDRVYSACQAGKQIGAHHPVKNVMTTTRPLELLHMDLFGPIAYLSIGGNKYGLVIVDDFLRFTWVFFLHDKSETQAIFKKFARRAQNEFDLKIKNIRSDNGKEFKNTCIESFLDEEGIKHEFSAPYSPQQNGVAERKNRTLIEMARTMLDEYKTSDRFWAEAANTACHAINRLYLHRLLKKTPYELLTGNKPNVSYFRVIGSKCYILNKKARSSKFAPKVDEGFLLGYGSNECAYRVFNKTSGIVEIARDVTFDETNGSQVEQVDSHVLGEEEDPSEAIKRLALGNVRPREPXSSSTQVEPPTSTQADVPSTSSMDQGXEEALNDPDWVMAMQEELNNFTRNEVWTLVERPRQNVIGTKWIFRNKQDEAGVIIRNKARLVAQGFTQIEGLDFGETFAPVARLESIRILLAFATNLNFKLYQMDVKSAFLNGPINELVYVEQPPGFEDPKYPNHVYKLHKALYVLKQAPRAWYECLRNFLVKNGFEIGKADSTLFTKRHDNDIFVCQIYVDDIIFGSTNKSFSEEFSRMMTKRFEMSMMGELKFFLGLQIKQLKEGTFICQTKYLKDMLKKFGMENAKPIHTPMPSNGHLDLNEQGKDVDQKVYRSIIGSLLYLCASRPDIMLSVCMCARFQAAPKDVGLSDIKSDYPATIGQSDFKSDYPTWGQGQGDLTSPGCILMIKDQFKNQVYSRRGSMSSRGRSPSSKARHAIRRMSESRKDTIDAQAQASDQAAQVANVERGAPLPPRRSRVSGEGSSAPASKVRRGNPTDSSEPGQGSGSHAPSFEEEIQLEEDIAAQQAAQEEGPFFITAPSRDPNYHRRVIRWNRKWTELEKERKKDPYKFQQLSTDPRFWNLFQQDYYETVIAPKKGAILMQWVDWKYMEELHDPIIDEVIEACARQNLKEFMGLQYPWCKEIIAQFYAIVYFEPNKEKTIHWMTDGTIYLVTYAKFAAILGFPARSRTNRVKINAEKPMDTNSLHFLYQDVDYELGTIKGLLPFYAYLNKLLRKTLNPKEGDASNMIEIMSKKKFHKEVAHTGYHVRPIKAAAVPAGQTTRASSRAGPSATVTKPDSNSSLRFFKSIFNLCKTILAWQAKERRARKKDTRRIKNLLRNAHLPCSPDGSEVEDSGEDVIEDPFAAEASSSRADRGKAPMEEEEEEEEGDYAKESSEEGEDSNEDE

SEQ ID NO: 137331 - protein, 641 aa, Oryza sativa
  Clone ID: PAT_MRT4530_38824C.1.pep
GGRIFWEADWVKANPEELDHFTPNGSGTFVERPSQNLIGLKWIFPNQPDQGRVVIKNKASNLNFKLYQMDVKSAFLNGPINELVYVEQPPGFEDPNYPNHVYKLHKALYGLKQAPRACEEFSRMMTIRFEMSMMGELKFFLDLQIKQLKEGTFICQTKYLKDMLKKFGMENAKPIHTPMPSNGHLDLNEQGKDVDQKVYRSIIGSLLYLCASRPDIMLSVCMCARFQAAPKECHLVAVKRILRYLVHTPNHGLWYPKGARLDLIGYTDADYAGCKVDSKSISGTCQFLGRMPPRKQTSHKSKHQRDRSPTPSSHDDLDSDWSGREDAVPQVARVAWADTLPPRRSTQALGGGGDGEGSSHQPQTPPHQPNVPTGPFRIHTPKRDPAVIRQVYDWKRKTEEELQAHDDPVLNFVIANCELMGIRSFVTLQQNWCSEVIAQLYATVFFDPYCAMHWMTQGSYYYVSCPRFVEIWGFDVCSLLNLPDMHDLPIPANTNLLPLYTPNDPNVVLGKVDGLKPYFACLNRMFCRSFVPKDGDASSINHLSRTEIRMASIQYKKGLVYAPHIMRMIETVTQLQFHHDVTHSQLHLRLVKAVTPTNKFFKHPNGNIIEGFGIVQDVPVCFEDKEAVLDFHVFVKVRLGP

SEQ ID NO: 137332 - protein, 83 aa, Oryza sativa
  Clone ID: PAT_MRT4530_38825C.1.pep
MMGHPYLRADTARPDNWWAVPGPEVRHVDRHGTPEVPIVLCRPDDRGPCRASLMAMRMLGLELVHFGCCYDDEPHGHPSGTSI

SEQ ID NO: 137333 - protein, 958 aa, Oryza sativa
  Clone ID: PAT_MRT4530_38826C.1.pep
MTTTRPLELLHMDLFRPIAYLSIGGNKYGLVIVDDFSRFTWVFFLHDKSETQAIFKKFARIVQNEFDLKIKIIRSDNGKEFKNTCIESFLDEEGIKHEFSAPYLPQQNGVPERKNRTLIEMARTMLDEYKTSDRFWAEAVNTACHAINRLYLHYHLKRTPYELYTGNKPNVSYFHVFGSKCYILNKKARSSNFAPQVDEGFLFGYGSNECAYRVFNKTSGIVEIARDVTFDETNGSQVEQIDSHVLGEEEDPSEAIKRLALGDRPRQNMIGTKWIFRNKQDEARLVIRNKARLVAQGFTQIEGLDFGETIAPVARLESIRILLAFATNLNFKLYQMDVKSAFLNEPIHELVYMEQPLGLEDPKYPNHVYKLHKALYGLKQTPRACEEFSRMMTKRFEMSMMGELKLFLGLQIKQLKEGTFICQTKYLKDMLKKFGMENAKPIQTPMPSNGHLDLNEQGKDVDQKGARFDLIGYADADYAGCKVDRKSTSGTCQFLGRMPPSKQTSHKSKRPRDRSPTPSSHDDSDSDWSGGEDAVPQVALVARGGNLPPRRSTQALGAGGGGEDSSRQLQTPPHQPNVPIGPLRIHTPERDPAVIRQVYDWRRKTEVVAPWWDEDPRPLHHSATNPRFWTLFQQDFYESVIKSKAHPTVPMQWINWEELQAHNDPVLNSVIANCERMGIRSFMTLQQDWCNEVIAQFYATVFFDPHRAMHWMTQGSWYSVSYPPLAEIWGFDLHDLLNLPDLHNLPIPTNTDLLPLYIPNDPNVVLGKVDGLKPYFAYLNRMFRRSFVPKDGDASSINRLSRTVLLRRPAPQPLGTSPPLPLSRLLLLSALPLWLVSLFGLCSAEAKKNCRLRNSTKKTARDVKFLKARYYEDHHIDIPPSPPGFEAEPDELEEEEIEDPFAGSPPDFDFFVYAHGYGYPPPPPPEDPPQAPLRLSRRLIVLSFWCLDAKGRDYLSCL

SEQ ID NO: 137334 - protein, 107 aa, Oryza sativa
  Clone ID: PAT_MRT4530_38827C.1.pep
CAGLIADGRVHISPSGSSSPALAGSHLLLTAKALSSLSSLIGKGVKGIPSRPDGILAPCSCHRGTRAVVEVLTEQNGGASHTGAAPHTTAPAWQARPSYVGRPLKPH

SEQ ID NO: 137335 - protein, 1616 aa, Oryza sativa
  Clone ID: PAT_MRT4530_38828C.1.pep
MSGQTGNGKDGDKGATFPYDYPSTSTSYVSTYSGKAPYFNDTDYATWKHKMKMHLKSINPLIWRIVEKGYVLQNPEEPTKEDDENEHKNAQAANAILSALSGSEFNRVDGIESAKVIWDTLRNLHEGTDSVRESKVEILKGQFERFVMLDGESPSDMYDRLSKIVNEIKGLGSKDMTDEVVVKKMVRAITPRNSTLVTIIRERPDYKTLTPHDLLGRILAHDMLEQESKEVIQYINQTSITSIKKEDLALKAKEEEEESRKSKSKAEIDDEEMALFVKKFGKFMKQSGFFKGSSSKYSSNKSSGRHSARVCYVCKEPRHFIADCPHIKDCLHFKEDKKLEKKEKHKHSKHDRYGQAHLGMIFGSDSESSSSDEEGVATFAVKPSSPPRFFNYSSDEDAPICLMAKESKVPSPLNSFNVDLVSDEEEDVEDEVMDDELFKSITKESIPHLSELLGRLEDQYATLERQEALLIREKKRSHELKSELAKEREKNEALVRLYKQTKESHANLEVANAQLQERVDGLDKAYLSLEEKFETLKNSVSLPMLCKSKMRSLCDSFTMALLKCHMGSKALKEYLGYQRDNFNHEGLGYVPPPKGKVDKSVMIKRPQGLSNFIKAKSILPNDYASHCSFDASYVLRKNASGRVVAKYVGPRGKNVSIKRVLWVPKALVTNMRGPKQESLSGGRSWVIDSGCTNHMTGEESMFCSLDLNGTSQENIVFGDNGKGKVMGLDRVCSACQAGKQIGAHHPVKNVMTTTRPLELLHMDLFGPIAYLSIGGNKYGLVIVDDFSRFTWVFFLHDKSETQAIFKKFAKRAQNEFDLKIKNIRSDNGKEFKNMCIESFLDEEGIKHEFSAPYSPQQNGVAERKNRTLIEMARTMLDEYKTSDCFWAEAVNTACHAINRLYLHRLLKKTPDELLTGNKPNVSYFRVFGSKCDILNKKARSSKFAPKVDEGFLLGYGSNECAYRVFNKTSNIVEIARDVTFDETNGSQVEQVDSHVLGEEEDPSEAIKRLALGDVRPREPQQGASSSTQVEPPTSTQADNPSTSSLDQGEEGEQVPPSPINLAHPRIHQSIQRDHPTDNILGDINKGVSTRSRIANFCEHYSFVSSIEPLRVEEALNDPDWVMAMQEELNNFTQNEVWTLVERPRQNVIGTKWIFRNKQDEAGVVIRNKARLVAQGFTQIEGLDFGETFAPVARLESIRILLAFATNLNFKLYQMDVKSAFLNGPINELVYVEQPPGFEDPKYPNHVYKLHKALYGLKQAPRAWYECFHNFLVKNGFEIGKADSTLFTKRHDNDIFVCQIYVDDIIFGSTNKSFSEEFSRMMTKCFEMSMMGELKFFLGLQIKQLKEGTFICQTKYLKDMLKKFGMENAKPIHTPMPSNGHLDLNEQGKDVDQKVYRSIIGSLLYLCASRPDIMLSVCMCARFQAAPKECHLVAVKRILRYLVHTSNLGLWYPKGARFDLICYADADYAGCKVDRKSTSGTCQFLGRSLVSWSSKKQNSVALSTAEAEYISAGSCCAQLLWMKQTLRDYGLNVSKILLLCDNESAIKIANNPVQHSRTKHIDIRHHFLRDHSTRGDIDIQHVRTDKQLADIFTKPLDEARFCELRSELNILDSRNVA

SEQ ID NO: 137336 - protein, 64 aa, Oryza sativa
  unsure (1)..(64): unsure at all Xaa locations
  Clone ID: PAT_MRT4530_38829C.1.pep
KKQGLFLSHQKLFNGGSKIALVRKNSANPGMFATDFSKAMVNMGTLRPXVGSQPRSRLTCRKVN

SEQ ID NO: 137337 - protein, 542 aa, Oryza sativa
  Clone ID: PAT_MRT4530_3882C.1.pep
MVHDTGGGRASSTACHYSPSLVAAEPEEHVHGRSKDDDDDAAVSLMGEKALLELLLDMALEQHAPGKKLPAEEREESEFDIYLRDDKSHVLYHPEFSSTSVSSSPLSVKSSERSDLGTASAVLTKDVALLAEETDILATQLKASQLYSVDSSKSNEELQSKGQVFVRSTRLLERRSKRRYAPRASIADVSCSADNSKKKEKSKKYGRVLEPDEPFKLFLRDRETTEFLTAKEERHLFSKIQAKPYFYPVIFIFRTAQILMKIEEAHRKLEVQCGREPTLAEWAEAVGMSSKELQSSIRTGRRCREKMARSNFRLVIHVARKYEGYGLDIQDLVQDGCSGLMKTFEKFNPSKGCRFPTYAYWWIRQSIKKSIFKNSRLIRLPESVYALLRKVGKARMECIMEGEQPTNANVARRAGITIEKLAKLRAKTRKPRSMQDHVWSDEGVTFQEITEDPNVEPPDLSVDRMMMRQQVRDFLGILSPREKEIIEHRFGIHDGEPKTLHVIGDMFGLSKERIRQLQNRALEKLKRSASLQGFDVYFDLLT

SEQ ID NO: 137338 - protein, 53 aa, Oryza sativa
  Clone ID: PAT_MRT4530_38830C.1.pep
RMVIRASPNSTEEVDDAAREITCDKRYIMSASIHPVRCDASSSGSEARYGRVG

SEQ ID NO: 137339 - protein, 146 aa, Oryza sativa
  Clone ID: PAT_MRT4530_38831C.1.pep
MTFFFLLALEVKALSICNVLELKDAPSVVAGVKKCWNVCCDDPRVQGWMLHIIKELSMLQFISVRYNVSALRIKPFFQCKEEKGKFSQCAVYILQVISKDFDAPYFFPENFKKMLDANVFSSFQILHKKKSVAVDSRITLNLEKTT

SEQ ID NO: 137340 - protein, 56 aa, Oryza sativa
  Clone ID: PAT_MRT4530_38832C.1.pep
GPLINRKNPASLNYRSMNCKTGKFNNRMDRVYRSTFYSTLFNPTNKRNILLGEQAK

SEQ ID NO: 137341 - protein, 66 aa, Oryza sativa
  Clone ID: PAT_MRT4530_38833C.1.pep
IIFIFKIIYNIYILLLKLFLLYFYFYKFIFYFFFFLTNQECDAQAQPCRHQITTNHHDMGPQVHNS

SEQ ID NO: 137342 - protein, 830 aa, Oryza sativa
  Clone ID: PAT_MRT4530_38834C.1.pep
MAAQPSSSASTGATKFDASQYAFFGNNAVEEVELGGLEDDDGVDAGFVGPGDEEYPSAYGRDMFEDEGGGSFTGVDDLAGAFSKLTRSINEPTQSGIISHGGSISRQSSTPDWAQDSYWPTQPIFGAEQGLDNESRWSQPPHLARFADSRLHRTSSSPQQDAQYNPNEHILGAMPYLLHRTSSYPQQEPQYNHTEPIPVPKSSFISYPPSGAVSHSSPGQPHHMNMPSPPTSFQMPVSAQNELHHPQFPRGGMPPGPLGRSMAHLDSAGLSTNNLQQNALNSGPVRPNGAMLTPGLVQHNLQRPNGLVPPQMLSRRPQHGMAPIQHSPPQFSQFHAQMLGPRHPPPQGRQMYNPQHSSQMMSGFDANLAMPDLSDPRARAMLHHGVHGQHYLPQGFELAGMRMDNGWPRFRSKYMSTPEIENIARMQQAATQINDPYIDDYYHQACLAKKSAGGQLKHHFCPTLIRDPSSCARSKDEPHAYLQVDALGRLPFSSIRRPRPLLDVEQTSESSDDVTEKSASKTLDQEPMLAARITIEDGLCLLLDVDDIDRLLQFSQQQDGGLQLRNRRQALLEQLAESLQLVDPLTPSNNAPLSPNDDLVFLRIVSLPKGRKLLSRYLELVSSGSELARIACMAVFRHLRFIFGNLPSDSSAVETTTKLATAVSTCVVRLELSGLSACLAAIVCSSLQPPLRPLGHAAGDGASFIIKSVLDTATELLTDQHVASTYSMQNRALWQASFDAFFGLLTEYCMSKFDSVIHALQTQPAVAAVIGREMPVELLRASLPHTNEYQRKQLLGFAQRTVPVNNHSSHGSSNGPMTSESIPSSESRKI

SEQ ID NO: 137343 - protein, 113 aa, Oryza sativa
  Clone ID: PAT_MRT4530_38835C.1.pep
MDAEDCTSDNLLVEDAEDQASEHGTVRIVAESVELGPFHVVDGVTAFELINLLNPNEPCSDQVALEAYHHEETGDGVTHFVQIQAFGMKWEEMACSCYVVDLAKNGILHQMEV

SEQ ID NO: 137344 - protein, 63 aa, Oryza sativa
  Clone ID: PAT_MRT4530_38836C.1.pep
MATAKAGEDGGMDAGNNGGRGGHTRTMVAAGEGSGMSPVRSSVNVAAAADKMADTPATDEPLE

SEQ ID NO: 137345 - protein, 96 aa, Oryza sativa
  Clone ID: PAT_MRT4530_38837C.1.pep
LDVDDIDRLLQFSQQQDGGLQLRNRRQALLEQLAESLQLVDPLTPSNNAPLSPNDDLVFLRIVSLPKGRKLLSRYLELLLCVLRCNPLCDPLDMLQ

SEQ ID NO: 137346 - protein, 776 aa, Oryza sativa
  Clone ID: PAT_MRT4530_38838C.1.pep
MAISLLLLLLLLGAGHMTQPTAAALNQDGVLLLSFKFSLLADPLASLAGWGYSDDTPCAWNGVVCMAFPSSSASEAARVVSVVLPNAQLVGPIARELGLIEHLRHLDLSGNALNGTVPVELLRAPELRVLSLAGNGINGALPDQVGQLRSLRALNLAGNALSGPIPANLTLLPNLTAVSLANNFFSGALPVGGFPALQVLDVSSNLLNGTLPPDFGGAALRYVNLSSNRLAGAIPPEMASRLPPNVTIDLSYNNLTGAIPTLAPFTVQRPTAFAGNAELCGRPLDSLCASAADPPINGTARSPPAIAAIPKNPTEALPGDDTGAPASGSGQQGRMRMATIIAIAAGDVAGIAVLVVVFMYVYQVRKKRQREEAAKQRMGVVFKKPEPDESPDGIGRSLSCCLRKKAGDESDSTEEVTDTSASKEGVVAAKAKTDDKKGKDGGGGAVLVTVDGEVELEMETLLKASAYILGAAGSSIVYKAVLADGAVLAVRRIGSDDAGVRRFSEFDAHMRAIARLRHANILRLRGFYWGPDEMLLIHDFAANGSLANISVKRKTGSSPISLSWSSRLRIARGVARGLAFLHDKKFVHGNVRPSNILLDADMEPLLADLGIHRLIRGGDTLKPAAAAGAGRFGSKRSAKSLPDLSPPPGASPLAGPSGSGDTAVAQYQAPEGVKNPKANAKWDVYSLGMVLLELVAGRALTSLELCQWSSAEESGQQVFRLADAALRGEMAGREEALASCLRLGFACCAMAPHKRPSMKEVVAAMDRIPSPSSSAQ

SEQ ID NO: 137347 - protein, 898 aa, Oryza sativa
  Clone ID: PAT_MRT4530_38839C.1.pep
MAAQPSSSASTGDTKFDASQYAFFGNNAVEEVELGGLEDDDGIDAGFVGPGDEEYPSAYGRDMFENYKKTDAIRQRHGTGTIHTDTAGPNTQRPEVLLLFSTPIATTAPFPCHQLMVCWLAYSMQEAVGPYVHDEGGGSFTGVDDLAGAFSKLTRSINEPTQSGIISRGGSISRQSSTLDWAQDSYWPTQPIFGAEPGLNNESRWSQPPHLARFADSRLHRTSSSPQQDAQYNPNEHILGAMPSLLHRTSSYPQQEPQYSHTEPIPVPKSSFIPYPPSGAVSHSSPGQPHNMNMPSPPTSFQMPVSAQNELHHPQFPRGGMPPGPLGRSMAHLDSAGLSTNNLQQNALNSGPVRPNGAMLTPGLVQHNLQRPNGLVPPQMLSRHPQHGMAPIQHSPPQFSQFHAQMLGPRHPPPKGCQMYNPQRPSQMMSGFDANLAMPDLSDPRARAMLHHGVHGQHYLPQGFELAGMRMDNGWPRFRSKYMSTPEIENIARMQQAATQINDPYIDDYYHQACLAKKSAGGQLKHHFCPTLIRDPSSRARSKDEPHAYLQVDALGRLPFSSIRRPRPLLDVEQTSESSDDVTEKSASKTLDQEPMLAARITIEDGLCLLLDVDDIDRLLQFSQQQDGGLQLRNRRQALLEQLAESLQLVDPLTPSNNAPLSPNDDLVFLRIVSLPKGRKLLSRYLELVSSGSELARIACMAVFRHLRFIFGNLPSDSSAVETTTKLATAVSTCVVRLELSGLSACLAAIVCSSLQPPLRPLGHAAGDGASFIIKSVLDTATELLTDQHVASTYSMQNRALWQASFDAFFGLLTEYCMSKFDSVIHALQTQPAVAAVIGREMPVELLRASLPHTNEYQRKQLLGFAQRTVPVNNHSSHGSSNGPMTSESIPSSESWKI

SEQ ID NO: 137348 - protein, 72 aa, Oryza sativa
  unsure (1)..(72): unsure at all Xaa locations
  Clone ID: PAT_MRT4530_3883C.1.pep
LKVVRTVAGSMARVTYFSGVAPGXRSSTEKQWLVHGAHTSALQRLVLVPQIEAFSVPLITLKKQGHLVCLNL

SEQ ID NO: 137349 - protein, 444 aa, Oryza sativa
  Clone ID: PAT_MRT4530_38840C.1.pep
LFLCHIVSNSISLPCRVVRGCRYCKSAGAASCLVHFGNDREYLIDLIGNPGFLSEPDSLLNGLSSISVSSPLRPPKYNSADIVNNFKSLAKQYFLDCQSLNMMFNDPAAVSGTVVDLDEAMGSNIGPNLSPATNSDFQANFSHRSRGAQSSGQDGNFLIQKSSPEDTQSAQSDPFSDISLDIEDLIIPWSELVLKEKIGAGSFGTVHRADWNGSDVAVKILMEQDFHPERLKEFLREVAIMKSLRHPNIVLFMGAVTQPPKLSIVTEYLSRGSLYRILHKHGARENLDEKRRLSMAFDVAKGMNYLHKRNPPIVHRDLKSPNLLVDKKYTVKVCDFGLSRLKANTFLSSKTAAGTPEWMAPEVIRDEPSNEKSDVYSFGVILWELMTLQQPWSTLNPAQRTLATTVFCQYHGIPETSNQNSPSTSRGYQLTVHGHLQNPEDTSP

SEQ ID NO: 137350 - protein, 1426 aa, Oryza sativa
  Clone ID: PAT_MRT4530_38841C.1.pep
MAGEITPSGSRRSWLSSGAASLARSLRDGDDPFRRSAAASRRDAGDDEENLRWAALEKLPTYDRMRRGILRKAVDGGGDGEGAGSLFKADEVDIANLDPREGRELMERVFKAVEDDNERFLRRFRDRLDQVGIELPKIEVRYQHLDIEADVHVGKRALPTLLNATINTLEGLVSLFISSNKRKLKILNDVNGIIKPSRMTLLLGPPSSGKSTLMRALTGKPDKNLKVSGEITYCGHTFKEFYPERTSAYVSQHDLHNPEMTVRETLDFSRRCLGSGARYDMLSELTRRERNAGIKPDPEIDALMKATVVEGKQNNIVTDLVLKALGLDICADTIVGGAMIRGISGGQKKRVTTGEMLTGPATALFMDEISTGLDSSSTFQIVKYIRQVTHVMNATVMMSLLQPPPETYALFDDIVLIAEGYIVYHGPRENILEFFESAGFRCPERKGVADFLQEVTSRKDQQQYWFLEQDHYRYVSVEEFAQNFKKFHVGQKLQKELQVPYDKSKTHPAALTTKKYGLSSLESLKAVMSREWLLMKRNSFLFIFKAFQLFVLGFITMTLFLRTKMPHEKFSDTSKYVGALTASLITIMFNGFGELQLTIDKLPIFYKQRDFLFFPAWTYGLANIILKVPLSLMESSLWIVLTYYVVGFAPAAGRFFKQFLAYFWTHQMALALFRLLGAILRSMVVANTFGMFVLLLIFLFGGFLVSRKDIKPWWIWGYWTSPMMYSNNALSVNEFLASRWAIPNNDSSISAPTIGKAFLQSKGYFTGEWGYWLSIGAMIGFMIVFNILYLCALTFLRPIGSASTVVSDDDTKSELEAESNQEQMSEVINGTNGTENRRSQRGMVLPFQPLSLSFNHMNYYVDMPAEMKAQGFTESRLQLLSDISGAFRPGVLTALVGVSGAGKTTLMDVLAGRKTSGTIEGDIKLSGYPKKQETFARISGYCEQTDIHSPNLTVYESIVYSAWLRLSSEVDKNTRKVFVEEVMSLVELDVLRDALVGLPGVSGLSTEQRKRLTIAVELVANPSIIFMDEPTSGLDARAAAIVMRTLLLLKRGGRVIYAGQLGLHSQILVEYFEAIPGVPKITEGYNPATWMLEVSSSLAEARLDIDFAEVYANSALYRSNQELIKQLSVPPPGFQDLSFPTKYSQNFLNQCVANTWKQFQSYWKDPPYNAMRYVMTLLYGLVFGTVFWRRGKNIESVNDLNNLLGATYAAVFFLGAANLLTLLPVVSVERTVFYREKAAGMYSPLSYAFAQGFVEFCYSAVQGVLYTILIYSMIGYEWKADKFFYFLFFMIAAFAYFTLFSMMLVACTASEMLAAVLVSFVLSSWNNFAGFIIPRPLIPVWWRWFYWANPVSWTIYGVIASQFADSDRVVTVPGQATTMVVKDFLEKNMGFKHDFLGYVVLAHFGYVIIFFFLFGYGIKCLNFQKR

SEQ ID NO: 137351 - protein, 111 aa, Oryza sativa
  unsure (1)..(111): unsure at all Xaa locations
  Clone ID: PAT_MRT4530_38842C.1.pep
IRFPSVSPSPSASPSSPDPLPLSRSPPPPRFSARDAIYPPGSRASPLPPARFPRFSSPSPAREIAXPAPLPPCIISPAPARNSSQAAPYPYGGLGFPPPPTAWLASPQPQA

SEQ ID NO: 137352 - protein, 107 aa, Oryza sativa
  unsure (1)..(107): unsure at all Xaa locations
  Clone ID: PAT_MRT4530_38843C.1.pep
PGPPFPPXXNXFYNSXGPPFSTXLLGKNPXFSXPXSPCNXXPLSPPXGXFQXXXPHSPSXXXPPXXWANGXIXXLXXXXKFPFQXXVXXXPLFXPXXPXXXXXPPXF

SEQ ID NO: 137353 - protein, 70 aa, Oryza sativa
  Clone ID: PAT_MRT4530_38844C.1.pep
MAMGLRSPFPHDRALGSGGSVARVQRYSASGQPPAVDAGATLAVLRPLPAPCRPLSPLASTPSAANGLRR

SEQ ID NO: 137354 - protein, 349 aa, Oryza sativa
  unsure (1)..(349): unsure at all Xaa locations
  Clone ID: PAT_MRT4530_38845C.1.pep
MSPQTETKASVGFKAGVKDYKLTYYTPEYETKDTDILAAFRVTPQPGVPPEEAGAAVAAESSTGTWTTVWTDGLTSLDRYKGRCYHIEPVVGEDNQYIAYVAYPLDLFEEGSVTNMFTSIVGNVFGFKALRALLLEDLRIPPTYSKTFQGPPHGIQVERDKLNKYGRPLLGCTIKPKLGLSAKNYGRACYECLRGGLDFTKDDENVNSQPFMRWRDRFVFCAKAIYKSQAETGEIKGHYLNATAXLAHYCRDNGLLLHIHRAMHAVIDRQKNHGXWVSMPGVIPVASGGIHVWHMPALTEIFGDDSVLQFGGGTLGHPWGNAPGAAANRVALEACVQARNEGRDLARED

SEQ ID NO: 137355 - protein, 104 aa, Oryza sativa
  Clone ID: PAT_MRT4530_38846C.1.pep
MTWRHLLSIILVLSSGVLGRDVIQQDIGFVVEAILTVPDPPPSPSPQPSPDVAPPPNPVPNPIPVPIPVPIPISAPQPNPNPTPVPIPISAPQPNPNSNPVPVL

SEQ ID NO: 137356 - protein, 352 aa, Oryza sativa
  Clone ID: PAT_MRT4530_38847C.1.pep
MSPVGWLVLLLPALLRRGSSGVAAAGKVPAVIVFGDSSVDTGNNNFIPTIARSNFWPYGRDYADGLPTGRFSNGRLATDFISEAFGLPPCIPAYLDTNLTIDQLASGVSFASAATGLDNATAGVLSVITIGEQLQYFREYKERLRIAKGEAEAGEIIGEALYIWSIGTNDFIENYYNLPERRMQYTVAEYEAYLLGLAESAIRDVHSLGGRKMDFTGLTPMGCLPAERIGNRDNPGECNEDYNAVARSFNGKLQGLAARLNKDLPGLQLVYADTYKILASVVDKPADYGFENAVQGCCGTGLFEAGYFCSLSTSLLCQNANKYVFFDAIHPTEKMYKIIADTVMNTTLNVFL

SEQ ID NO: 137357 - protein, 124 aa, Oryza sativa
  Clone ID: PAT_MRT4530_38848C.1.pep
MAMLHVAVTLAPSQPSRDDSVFPARARGGGRVARHFVRLNSEPRISRAKRVGGPEKTKNSGRVSGSPHDQQMAVGVLVVVVVIARLPGGAVVAGRFPATYGFSERVLPPRPDALRPALVGVLGE

SEQ ID NO: 137358 - protein, 1379 aa, Oryza sativa
  Clone ID: PAT_MRT4530_38849C.1.pep
MDIRSTPEFHSFCKRNSIDSIHKRQGSQKLRLQVVRQLLLHKKSGRVKKGRSCRPRIVCANCHLANKPVDIEVPQAVLPDTVFEAVLRTSPASLLSGRKQAGPDGRASPTTQAAWFATDKKDFGYSFPCDGPGRGGTCDISAWRACYECLRGGLDFTKDDENVNSQPFMRWRDRFVFCAEAIYKAQAETGEIKGHYLNATAGTCEEMIKRAVFARELGVPIVMHDYLTGGFTANTSLAHYCRDNGLLLHIHRAMHAVIDRQKNHGMHFRVLAKALRMSGGDHIHAGTVVGKLEGEREMTLGFVDLLRDDFIEKDRARGIFFTQDWVSMPGVIPVASGGIHVWHMPALTEIFGDDSVLQFGGGTLGHPWGNAPGAAANRVALEACVQARNEGRDLAREGNEIIRSACKWSPELAAACEIWKAIKFEFEPSNSSQNLKTKGAELESHSKDSCGSGESSYRRTRNGELSPFSARLFDLFLYWFFLTAAARGFSPLTPGMRDPNPTSSPNYFCESSARNSGGSGTLDVSGSVPPMTCPQFNGDNPQMWKANCEQYFDVYGTHPVNWVKIATLNFVGNAAFWLQSVRSQMGGISWNGLCDAVCTRFAKDKHQALIRQWIHIVQTGTVSEYVEKFDGLMHQMIAYDPSLIPVYFVTKFIEGLKDEVRVVVLVQRPQDLDTACAIALLQEEAMEGVKSASPKRSEPIFGIKSNRMMSNYSVPTSTKTTNVTAEDRRGTEAARARDEKLAALKSYRRAKGLCFTCGEKWGKEHKCASTIQLHVVEELLETLTLGYESESDPKSEDTEDSQHGTLLSISQQAVWGTESSRTIKLRGWIQDMELLMLVDSGSTHSFIDSEVSLRLPGVHKLQTPLTVRIADGGTMKCTHEISSCNWWMQGNQFCNSFRVLPLGNYDIILGMDWLELFSPMQVDWANKWMEFLYQGKLVRLQGILPKSVQCSSITNHQLCGLNRLGSLSYLVQLQSVTHEENSSVPEAVKEIIQDFHDIFQEPEGLPPRRACDHTINLIPGAKPINLRPYRHNPALKDEIEKQITEMLSSTYTMKYLSKPFRTGMTCGWGNINSFSMIFLLGIPLPRKVLVWVFPKPKKKRMEEFFLFDKKGTLEFCLHKPYLHPGFTRKSGGSRRENQISKGNPRLGKVRFTKKLAGLFVCLVRKEEDLMMIRSPEPEVKIVVDRDPVKTSFEEWARPGHFSRTIAKGPDTTTWIWNLHADAHDFDSHTGHMYRTNWGIGHGLKDILEAHKGPFTGQGHKGFHSFGLYIHNDTMSALGRPQDMFSDTAIQLQPIFAQWVQNLHAGAPSVTAPGATTSTSLTWGGGELVAVGGKVALLPIPLGTADFLVHHIHAFTIYVVVVILFKGIIFAHSSGPFDTR

SEQ ID NO: 137359 - protein, 304 aa, Oryza sativa
  Clone ID: PAT_MRT4530_3884C.1.pep
MKPSPSTVAAFYGTLARGLDELERSLAASSAAAEFVSAASLRAALALIRAAHAGLARLVGSLHLPGGAAWLDEYMDETSRLCDACRALRLGAASLEGYSDSASRLASALRSSHLSLEVTRAMSACRRDAMAIREENRVLVETRAEALALRLAETIPPDAKFTGMLTSFLLTLLSWGVLHYWPDAGGAGGATDCGAYFGAAFASALARAQQRAAAAAAAVSPSVVDAGGGAMMHEFRRARAAVEQARDAVDRAGDVAAAAAEVALRADALRSGCEDVIALIDDLFDEVAEGRKKLLDLCSGGGGN

SEQ ID NO: 137360 - protein, 437 aa, Oryza sativa
  unsure (1)..(437): unsure at all Xaa locations
  Clone ID: PAT_MRT4530_38850C.1.pep
MSPQTETKASVGFKAGVKDYKLTYYTPEYETKDTDILAAFRVTPQPGVPPEEAGAAVAAESSTGRCYHIEPVVGEDNQYIAYVAYPLDLFEEGSVTNMFTSIVGNVFGFKALRALRLEDLRIPPTYSKTFQGPPHGIQVERDKLNKYGRPLLGCTIKPKLGLSAKNYGRACYECLRGGLDFTKDDENVNSQPFMRWRDRFVFCAEAIYKSQAETGEIKGHYLNATAGTCEEMIKRAVFARELGVPIVMHDYLTGGFTANTSLAHYCRDNGLLLHIHRAMHAVIDRQKNHGMHFRVLAKALRMSGGDHIHAGTVVGKLEGERDMTLGFVDLLRDDFIEKDRARGIFFTQDWVSMPGVIPVASGGIHVWHMPALTEIFGDDSVLQFGGGTLGHPWGNAPGAAANRVALEACVQARNXGRDLAREGNEIIRSACKWSPEL

SEQ ID NO: 137361 - protein, 141 aa, Oryza sativa
  Clone ID: PAT_MRT4530_38851C.1.pep
MASAMTSPRRRRLGGSGSHARRRTAALRHKRRAPRRRGRRGELTGDQRNGGRATDGEGDEKEAAKLFGSTAATALRRSSAVTKGRTRTTTTLRTRWWRRRPTTATATAARHGWSDGDDGGAKQHGARALQTPASEGEGGDG

SEQ ID NO: 137362 - protein, 535 aa, Oryza sativa
  unsure (1)..(535): unsure at all Xaa locations
  Clone ID: PAT_MRT4530_38852C.1.pep
MSCREGRMSPQTETKANVGFKAGVKDYKLTYYTPEYETKDTDILAAFRVTPQPGVPPEEAGAAVAAESSTGTWTTVWTDGLTSLDRYKGRCYHIEPVVGEDNQYIAYVAYPLDLFEEGFVTNMFTSIVGNIFGFKALRALRLEDLRIPPTYSKTFQGPPHGIQVERDKLNKYDRPLLGCTIKPKLGLSAKNYGRACYECLRGGLDFTKDDENVNSQPFMRWRDRFVFCAEAIYKSQAETGEIKGHYLNATAGXFTANTSLAHYCRDNGLLLHIHRAMHAVIDRQKNHGXWVSMPGVIPVASGGIHVWHMPALTEIFGDDSVLQFGGGTLGHPWGNAPGAAANRVALEACVQARNEGRDLAREGNEIIRSACKWSPELAAACEIWKVIKFEFEPYLQKKYYEPRCRGFESLLAHSLPKGKGLYFPPEGRKTMIGIADVKLLNLEKYMKKKGGRKFFGFMVKEEKEENWGSVEFQVFSFTNKIRRLASHLELHKKDFSSERGLRRLLGKRQRLLAYLAKKNRVRYKKLISQLDIREW

SEQ ID NO: 137363 - protein, 128 aa, Oryza sativa
  Clone ID: PAT_MRT4530_38853C.1.pep
GSKRVSCASTDHASSLETPQSFGNGATEGGRFSQYIPVPHPQFPLFVHLGSRWSEFIRSSLLGSISTTGSAAGDLGDGTSGGSTTGAAGRSLHGTATGDATGGSPDGAATGTVEVSAMLSIYVARASC

SEQ ID NO: 137364 - protein, 750 aa, Oryza sativa
  Clone ID: PAT_MRT4530_38854C.1.pep
MMIRSPEPEVKIVVDRDPVKTSFEEWARPGHFSRTIAKGPDTTTWIWNLHADAHDFDSHTGDLEEISRKVFSAHFGQLSIIFLWLSGMYFHGARFSNYEAWLSDPTHIGPSAQVVWPIVGQEILNGDVGGGFRGIQITSGFFQIWRASGITSELQLYCTAIGALIFASLMLFAGWFHYHKAAPKLAWFQDVESMLNHHLAGLLGLGSLSWAGHQIHVSLPINQFLDAGVDPKEIPLPHEFILNRDLLAQLYPSFAEGATPFFTLNWSKYAEFLSFRGGLDPITGGLWLSDIAHHHLAIAILFLIAGHMYRTNWGIGHGLKDILEAHKGPFTGQGHKGLYEILTTSWHAQLSLNLAMLGSTTIVVAHHMYSMPPYPYLATDYGTQLSLFTHHMWIGGFLIVGAAAHAAIFMVRDYDPTTRYNDLLDRVLRHRDAIISHLNWVCIFLGFHSFGLYIHNDTMSALGRPQDMFSDTAIQLQPIFAQWVQNLHAGAPSVTAPGATTSTSLTWGGGELVAVGGKVALLPIPLGTADFLVHHIHAFTIHVTVLILLKGVLFARSSRLIPDKANLGFRFPCDGPGRGGTCQVSAWDHVFLGLFWMYNSISVVIFHFSWKMQSDVWGTISDQGVVTHITGGNFAQSSITINGWLRDFLWAQASQVIQSYGSSLSAYGLFFLGAHFVWAFSLMFLFSGRGYWQELIESIVWAHNKLKVAPATQPRALSIIQGRAVGVTHYLLGGIATTWAFFLARIIAVG

SEQ ID NO: 137365 - protein, 448 aa, Oryza sativa
  unsure (1)..(448): unsure at all Xaa locations
  Clone ID: PAT_MRT4530_38855C.1.pep
MAEEGDKATAAAEAXGGGAAATAAAGGGGGGGGGGAEEESVKLFVGQVPKHMTEAELLAMFQEVAIVDXGCCFLICPSREEADKAVNAYHNKHTLPGASSPLQVKYADGELERLEHKLFIGMLPKNVTDTELTDLFSKYGNIKDLQILRGSQQTSKAGCAFLKYETKEQAVAAIEALNGKHKIEGSSVPLVVKWADTEKERQARKAQKAQLQSSNMPSASPMQQSSLFGALQMGYMPQYNGFGYQPPGTYGLMQYPLSPMQNQATFPNMVQPVNQGNSIRGVNPELSPNSVPRSFNAMQLSSPYPPVPGVQYAGSYPGGLMNNRPFGNSFSSIKVPIVNANSPASSSPSSNPGGQIEGPPGANLFIYHIPQDYGDQDLSNAFQRFGRVLSAKVFVDKATGSSKCFGFVSYDSPASAQAAIGVMNGFQLGSKKLKHWELRVSSLFNSHS

SEQ ID NO: 137366 - protein, 477 aa, Oryza sativa
  unsure (1)..(477): unsure at all Xaa locations
  Clone ID: PAT_MRT4530_38856C.1.pep
MSPQTETKASVGFQAGVKDYKLTYYTPEYETKDTGILAAFXVTPQPGVPSEEAGAAVVAKSSMGTWTTVWTDGRTSFDRYKGXCYHIEPVVVEENQYIAYVAYALDLFEEGSVTNIFTSIAGNVFGFKALCALHLEDLRIPPTYSKTFQGLPHGIQVERDKLNKYGHPLLGCTIKLKLRLSAKSYGRACYECLRGGLDFTKDDENVNSQPFMRWRDCFVFCAEAIYKSQARTGEIKGHYLKATAGACEEMIKRVVFAXRKLGVPIVMHDYLTRGFTANTSLAHYCCNNGLLLHIHQAVHPAIDRXKNHGMHFRVLAKALRVFGGDHIHTGTVIGKLEGERGMTLGFVDLLRDDFIEKDRVRNIFFTDWVSMPGVIPVASRGVHVXHMPALTKIFGDNSVLQFGGGTLGHPWGYAPRAAANRVALEACVQARNKGRDLAREGNEIIRSACKWSPELAAACEVWKAIKFEFEPVDKLDS

SEQ ID NO: 137367 - protein, 460 aa, Oryza sativa
  Clone ID: PAT_MRT4530_38857C.1.pep
MAEEGDKATAAAEAGGGAAATAAAGGGGGGGGGGAEEESVKLFVGQVPKHMTEAELLAMFQEVAIVDEVTVIKDKATKASRGCCFLICPSREEADKAVNAYHNKHTLPGASSPLQVKYADGELERLEHKLFIGMLPKNVTDTELTDLFSKYGNIKDLQILRGSQQTSKAGCAFLKYETKEQAVAAIEALNGKHKIEGSSVPLVVKWADTEKERQARKAQKAQLQSSNMPSASPMQQSSLFGALQMGYMPQYNGFGYQPPGTYGLMQYPLSPMQNQATFPNMVQPVNQGNSIRGVNPELSPNSVPRSFNAMQLSSPYPPVPGVQYAGSYPGGLMNNRPFGNSFSSIKVPIVNANSPASSSPSSNPGGQIEGPPGANLFIYHIPQDYGDQDLSNAFQRFGRVLSAKVFVDKATGSSKCFGFVSYDSPASAQAAIGVMNGFQLGSKKLKVQLKRDNSKHSKPF

SEQ ID NO: 137368 - protein, 133 aa, Oryza sativa
  unsure (1)..(133): unsure at all Xaa locations
  Clone ID: PAT_MRT4530_38858C.1.pep
NSGTRLLLSWVLNFVVTPLXAKLDCPFSCVSGEVITGSGTLPFXTSDAFQERLSLGQASKGMWMPPSHWWHCRMPPGLGWIRLAPVSATLLAPVTIGFFHPPCFPKPLLGPNKGFGPGVSRSEVPKGRPEFKI

SEQ ID NO: 137369 - protein, 88 aa, Oryza sativa
  Clone ID: PAT_MRT4530_38859C.1.pep
MRPSQLLLLTLALVLLSSNKLANASAESNINPEADCSPAVIMIGDKCIPNVCLHKCLALGAARGNCIEGPACNCDFCGPNAPPPSIVQ

SEQ ID NO: 137370 - protein, 50 aa, Oryza sativa
  Clone ID: PAT_MRT4530_3885C.1.pep
MDPDGYVEATGNLEAQDGVGSLESFGWFNRIIITPLYHGNDIVASIHTIK

SEQ ID NO: 137371 - protein, 978 aa, Oryza sativa
  Clone ID: PAT_MRT4530_38860C.1.pep
MAARAEAAAAAPRPLQAAAIGVCAETGFWDALRRLKLDVLGTDDSPIPITGYYTPRQYEKIASLFRICPESILPPSANSFGDRNNCPVPGTLLNTNNMRGFQNLDRALLLKAEAKKILHDIKSGKVEENPALLLRFLVISFADLKNWKVYYNVAFPSLIFDSKITLLSLKLASQVLKQEEATSLSNAFTEWRKSSETTVVPFFLINISPDSSATIRQLKDWKACQGNGQKLLFGFYDHGNRGFPGWALRNYIAFVSLRWKIEKVHFFCYREKRGRPDIQQSLVGEASFPAPHGWDEPDYVPEAIGWEGETAGKESKEMKPKEIDLSSINPASQDEEKQLMHLKLMGWRHFPVNLDKLAGTWGVRKLTVVDDGCVSMSDLVKQSLYTDKDCGVPRVTAIVPHLKERCSAVEVEGIQMGIPKLEYNISASKISSITDDCKRLQTLVDSNDVVFLLNETWEGMWLPTLLCADKNKDMTITLSCDMVLVQEQKVESDHNGALDQQSAVILPGLTSVASGKAVELFARMLHHPDEIHAPGDIAGTDTEHQLGLLPHQMQGSLSKCVLSTVLCNSSSNCIACSNAVLSEYRRRGFDFVTQAITCPTYLKDLTGISDLKKPFASKISASIPVSKTSASIPVNLEKLSSARCLLLGAGTLGCDVARILMDCGVRKLTVVDSGRVVVSNLARQSLYTSDDRDSPKASAILGRLKERCPSVDAKGIKMEIPMPGHPVSPNEAVSVLEDCKRLQELVSSHDAVFLLTDTRESRWLPTLLCANENKIAITAALGYDSYLVMRHGAGPGTNCGSPDVVAAADTLSAEDVLGRQRLGCYFCNDVVAPVDSVSNRTLDQQCTVTRPGLSSITSGCAADLFTRMLHHPDGIHAPGEIAGTSSEGPLGLLPHQIRGSLSQYNLLTLLGYSSSNCTACSNAVLSEYHRRGMDFVMQVINEPTYLEDLTGLTDLMKSAAYSQVEWIDEVDDDDEMDI

SEQ ID NO: 137372 - protein, 49 aa, Oryza sativa
  Clone ID: PAT_MRT4530_38861C.1.pep
RAWPISSLSSAVTTTPRFCNIVYLSLSPHLRRFQKFLEPPPSTERCVCG

SEQ ID NO: 137373 - protein, 248 aa, Oryza sativa
  unsure (1)..(248): unsure at all Xaa locations
  Clone ID: PAT_MRT4530_38862C.1.pep
RKFSITDDCKRLQXLVDSNDVVFLLNETWEGMWLPTLLCADKNKIAITVLLGYDNYLVMRHGAGPGTKSGGMDEGIAQIENLSTQDALGRQRLGCCFCSDTTSLVNSDHNGALDQQSAVILPGLTSVASGKAVELFARMLHHPDEIHAPGDIAGTDTEHQLGLLPHQMQGSLSKCVLSTVLCNSSSNCIACSNAVLSEYRRRGFDFVTQAITCPTYLKDLTGISDLKKPFASKISASXPVSKTSASIP

SEQ ID NO: 137374 - protein, 58 aa, Oryza sativa
  Clone ID: PAT_MRT4530_38863C.1.pep
FLFSFLHGEEDRKMFNAGGGNPPPLRRESKSSPCPRSSRASTRARLNPPLLALRYAPL

SEQ ID NO: 137375 - protein, 42 aa, Oryza sativa
  Clone ID: PAT_MRT4530_38864C.1.pep
LEEFLIVYCQVFILSLEYYISVGTNKCPHKIASQRHEQHNRS

SEQ ID NO: 137376 - protein, 58 aa, Oryza sativa
  Clone ID: PAT_MRT4530_38865C.1.pep
MEGEKSLKKGKKPNLGGAGLLGSDGVKTFSELGGGPRENPKWAQGLEGIFERGKEKPG

SEQ ID NO: 137377 - protein, 55 aa, Oryza sativa
  unsure (1)..(55): unsure at all Xaa locations
  Clone ID: PAT_MRT4530_38866C.1.pep
FFFFFFLDEENFTSKRVSTVVFYIGYIIVRRVVPHTRENXGGXSWCTVGPFTSSP

SEQ ID NO: 137378 - protein, 57 aa, Oryza sativa
  Clone ID: PAT_MRT4530_38867C.1.pep
ALVKCMQSMFKLSLFASTLLCNRSLDYLRADLIRAPGTCVCGFSFMVMMNKISVQFR

SEQ ID NO: 137379 - protein, 475 aa, Oryza sativa
  Clone ID: PAT_MRT4530_38868C.1.pep
MEVEGAPDLADFMNDWFFGTVGTRRSGGGAYDLTGDQSSGKRPSAPAEKKQQQQQGRSGGGGGGSASKQTQEWLEEARRMVGAGSPGRKGVGSPSRQVPRFAAAAAAGTEPSPSLDRRDPMSRSARRHRQPGGIGDEILQRASISSSPPRADPFASAPASPAHSLPPNPPSSRRKSRFHYPSAPDAFSSSSAYRRAASSASTSPTSAAKPHHRRHASASSSSSPAAVDVFDDGVARLNSFLRRQRAAVAELGSGGRPSSRSTKIVLSDASKSVSSIAAAICYAWMLASKEDAEAAVPVVNMRRGRMERCRQAAWLLHHVGVDASALLFADEVDMEGLMMDKRVSLVVVGQDVLKPNDKMGSVCTILTNNYCEDAYSLLQSLDIKKLLLAVLLDHNDHSFVEYLKNNYREPSTKGEGNSPLDQKHSVSASGSSQDAKKPNSNNQRPVHGNGGKTSDETPRGKNKYFLAKWFGFGSK

SEQ ID NO: 137380 - protein, 163 aa, Oryza sativa
  Clone ID: PAT_MRT4530_38869C.1.pep
MASSSKNHAGNPLVGQFSSEKLGKSNHAIWKAQVLAAIRGAKLEGHLTGAAKALAALIRKKEGETEVVVSNPDYEDSGCATSRCGCDSSSHGDADEGTTNRGRGAVVRKHSPKPDHPPTRCRSQAKVWFRRPCSFRSLVRASDQNRGKQKQHRRKDEEPALGK

SEQ ID NO: 137381 - protein, 93 aa, Oryza sativa
  Clone ID: PAT_MRT4530_3886C.1.pep
METKIASTVLVLLLLTLDGVAAAKMCHDPSQTFRGSCGHPTNCIACCTNEGYTGGYCTTVRHKCMCTKACGGESPPDDPPSAMPASPVTTTRA

SEQ ID NO: 137382 - protein, 146 aa, Oryza sativa
  Clone ID: PAT_MRT4530_38871C.1.pep
MGHHRCPLPVGVVVAGASSTRGRAIAARSRSPAPVVIVEFTQGGVALGYLVGAARRFRLLCSRSPAVITGSTRAASRSMLPAVAGPTPDPRRHDRPPPPILIWDYMMETADYKGKAELDDTAEIVIEKDSETSDPARYNDDPVLSE

SEQ ID NO: 137383 - protein, 106 aa, Oryza sativa
  unsure (1)..(106): unsure at all Xaa locations
  Clone ID: PAT_MRT4530_38872C.1.pep
MKVGLITCLLIPPSCWRRCGEKGLLHCWXENKLVQPLWQTVXRFLKELKIELPYDPAIPLLGIYXPDKTIIQKDTCTPMFTAAFFIIAQTWKQPECPLTDDQIKKM

SEQ ID NO: 137384 - protein, 89 aa, Oryza sativa
  Clone ID: PAT_MRT4530_38873C.1.pep
EPPSPNKSKKLKMMLFIQSLLLNLKREEWALGKSRNWTSQDSAAKQETFPPAPNPSDSRTDGASESASNFPPNRIAGAARAGKQIGSGG

SEQ ID NO: 137385 - protein, 95 aa, Oryza sativa
  Clone ID: PAT_MRT4530_38874C.1.pep
NQMRRTSYVKMKLSKISPAKSIFGKGDHAGESGRVIFPSNHQPILFGHGARPRRKQDGLVLVAQMSERGAGTPPDGFLKQAEAAHNRYATQPEGS

SEQ ID NO: 137386 - protein, 134 aa, Oryza sativa
  Clone ID: PAT_MRT4530_38875C.1.pep
MSGADVDKVQNLIHCCLQLYMDKKEVVDALSREAKIEPSVTQHVWQKLEENNREFFKAYYLRLMLKNQITAFNKLLEDQLRIINKEYHPGPSSMPLPNGSNSNLLKQNPCFLSESTPMPMPDDGNVQWKFQWHS

SEQ ID NO: 137387 - protein, 1747 aa, Oryza sativa
  Clone ID: PAT_MRT4530_38876C.1.pep
MPPAPWPTPRTVRQAAELHAHLTTSGRLLHPPSAHHLLNSLVNCLPPSDPLHLRYALHLFDRMPASTFLFDTALRACFRAGTSSGDPDIPFVLFRRMRRAAVRPDGFTFHFLFKCSSSSRPRALLCTMLHAACLRTMLPSAAPFVANSLIHMYTELGLAGDVRRAFDEIPVKDAVSWTMVISGLAKMGMLSDARLLLAQAPVRDVISWTSLIAAYSRADRAKEAVDCFKNMLSEGIAPDDVTVIGVLSACSQLKDLELGCSLHLLVKEKGMSMSENLVVALIDMYAKCGDFGHAREVFDAVGRGRRPQSWNAIIDGYCKHGHVDVARSLFDQMEVRDIITFNSMITGYIHSGQLREALLLFMNMRRHDLRVDNFTVVSLLSACASLGALPQGRALHACIELRLVETDIYIGTALLDMYMKCGRVNEATIVFQRMGKRDVHAWTAMIAGLAFNGMGKAGLEYFYQMRCDGFQPNPVSYIAVLTACSHSCLLNEGRLYFDEMRILYNIHPQIEHYGCMIDLLGRSGLLDEAMDLVKTMPMQPNSVIWASILSACRVHKRIDLAQCAAEHLLKIEPDEDAVYVQLYNICIDSRKWEDASKIRMLMEERQVKKTAGYSSVTVAGQVHKFVVSDKSHPRILEIIAMLEEISHRLKSAGYSPITSQVTVDVDEEEKEQTLLAHSEKLAIAFGLVSLAPNLPVHIIKNLRPTIFRPLGADDGKQKQPDRRVVFLLPPSRRDAPVLVRPIPSSPAPFSLRSSVTMAVRDVASLNRMITGFIRDGLADRARAVYRWMVASGIRETPHTFSTILGVCSTYEALQLHGRVLALGLCCNPFVGSALVNHYMHVESPHAALSLFRELPLQNTAMCNVVLRGLGNLKLTEELICCFLDMRRQYLELNGLSYCYAMKGCYQNGEWLEQGRQLHGVVLKAGWIPSNIFLSNSLVDLYSAIGDSVDTVKALNDILSEDVISWNSILSMYADRGHMKEAVYYLKQMLWHGKMPSVRSFVSLLALSGKTGDWQLGVQIHGIVHKLGFSCSSVHVQTTLIDMYGKCCCFDHSLAIFNEIPSIALECCNSLITSSLGCNMFDAALEILHCMIVEGVTPDDVTFSATMKAISLSASPSLTSCQMLHSCLVKLGFEMDMAVCSSLITAYACAGQLSSSHLIFEGLLDPNVICFTAIISACARYGDGARAMELFDQMVSSGLKPDNVTFLCAIAGCDQAGMFEEGRLVIELMRASRELDPDERHFACMVNLLSRDGFVKEAMEMMEQSPLRHYTKAWSSLLQSCKAHGENVLGKRAANMLIDVGRKDPATTLQVSNFFNDIGDRETALRIKEMTNVKEVKKSGHSLIEMFVARRLFCCIWWWRLTTVLSTSTKSKTAECRPVDEVSTGVGWGCVKWGKVQEGIRAGGVEKAPATCQERTSTRTLVDSCWVLLLNSLVLGLFAEDTVPLKFDLRAYSDSAILGLQCMQAHKVQNLIHCCLQLYMDKKEVVDALSREAKIEPSVTQHVWQKLEENNREFFKAYYLRLMLKNQITAFNKLLEDQLRIINKEYHPGPSSMPLPNGSNSNLLKQNPCFLSESTPMPAMPDDVMCNGNSSGIVDRTQSSDQLIYAGKDIQGLHSSMDASNLLPVQNANSVLFGVENGTTIKTESGYSSNGNFGFCGNAFLESCQSIGDASGGSFSSSELNGQPLDDSILDIESSSFGFLSQLPRNFFSDLPEDFSQSTEILDNYGKSPFLPSEQNNFSDSTGGEHTG

SEQ ID NO: 137388 - protein, 76 aa, Oryza sativa
  Clone ID: PAT_MRT4530_38877C.1.pep
KSNWPPHGTRPLTPPGGDPLAATEGFINRGRSLSDRPGLIYPGAFLERLWGPIWRGRVGTSLQGIARTPGKRLWVG

SEQ ID NO: 137389 - protein, 185 aa, Oryza sativa
  unsure (1)..(185): unsure at all Xaa locations
  Clone ID: PAT_MRT4530_38878C.1.pep
MASTSKGTCDQSQIPSTTMDPSDEAPSGKKSDGQIPAPAPVTSDEGKAPVMEKKKKKKKAKTKMVRFTQAQINNCITYKEEEMPDYDNMPSIIEILGDDLANCPQDYIDELKAIDDSREEDKAFWIKMQNEIRGEREGILRQYFTKGYAEYEVDIDDDDDDKDNKVPARVAAPXSRRRFRNGVAV

SEQ ID NO: 137390 - protein, 57 aa, Oryza sativa
  Clone ID: PAT_MRT4530_38879C.1.pep
LCRAARLRFATRLGRRREIAGDPPRLCPAVAEQPAAVPARADHTSCAEPRLVLLECV

SEQ ID NO: 137391 - protein, 111 aa, Oryza sativa
  Clone ID: PAT_MRT4530_3887C.1.pep
MKGRQGQRVRLYVRGTILGYKRSKSNQYENTSLLQIEGVNTKEEVGWYAGKRIAYVYKAKTKSNDSTIRCIWGKVTRPHGNSGVVRAKFRSNLPPTFMGKKVRVFMYPSSI

SEQ ID NO: 137392 - protein, 680 aa, Oryza sativa
  Clone ID: PAT_MRT4530_38880C.1.pep
MCGIFAYLNYNVSRERRYILEVLFNGLRRLEYRGYDSSGIAVDADVPSCASSSSSTAVPAYAGASPLVFRQEGKIENLVRSVYSEVDEKDVNLDAAFNVHAGIAHTRWATHGVPAPRNSHPQSSGAGDEFLVVHNGIITNYEVLKETLIRHGFTFESDTDTEVIPKLAKFVFDKAHDEEGDVTFSQVVMEVMRQLEGAYALIFKSPHYPNELIACKRGSTLILGVNELSGQNSGKPFHDVKALTTNGKPKELFFSSDLFAIVEHTKNYLAIEDDEIVHIKDGSVSILKFDHEKEKPASVQRALSVLEMEVEQIKKGSYDHFMQKEIHEQPHSLTTTMRGRVKDSGVLLGGLKEKEYLKTIRRSRRLVFIGCGTSYNAALAARPFVEELTGIPVTMEVASDLLDRQGPIYREDTAFFVSQSGETADTLLALDYALENGALCVGITNTVGSTLSRRTHCGVHINAGCEIGVASTKAYTSQIVVMVMVALAVGSDQISTQVRRQAIISGLSNLPSNVSEVLKLDTEMKELSSSLIDSESLLVFGRGYNYATALEGALKVKEVALMHSEGMLAGEMKHGPLALVDENLPIIVIATRDACFSKQQSVIQQLLSRKGRLIVMCSKGDASAVCPSGSCRVIEVPEVADCLQPVINIIPLQLLAYHLTVLRGFDVDQPRNLAKSVTTQ

SEQ ID NO: 137393 - protein, 459 aa, Oryza sativa
  Clone ID: PAT_MRT4530_38881C.1.pep
MESSNLGGGGGGGGGGGPPPFLIKTYEMVEDAATNHVVSWGPGGASFVVWNPLDFSRDLLPKYFKHNNFSSFIRQLNTYGFRKIDPERWEFANEDFIRGHTHLLKNIHRRKPVHSHSLQNQINGPLAESERRELEEEINRLKYEKSILVADLQRQNQQQYVINWQMQAMEGRLVAMEQRQKNIVASLCEMLQRRGGAVSSSLLESDHFSKKRRVPKMDLFVDDCAAGEEQKVFQFQGIGTDAPAMPPVLPVTNGEAFDRVELSLVSLEKLFQRANDACTAAEEMYSHGHGGTEPSTAICPEEMNTAPMETGIDLQLPASLHPSSPNTGNAHLHLSTELTESPGFVQSPELPMAEIREDIHVTRYPTQADVNSEIASSTDTSQDGTSETEASHGPTNDVFWERFLTETPRSCLDESERQESPKDDVKAELGCNGFHHREKVDQITEQMGHLASAEQTLHT

SEQ ID NO: 137394 - protein, 162 aa, Oryza sativa
  Clone ID: PAT_MRT4530_38882C.1.pep
MWGTTAAAVRRLCAAGDVRSALAMLARGTKSGDAALDVTACTALVNGCCKGGDVAEARRVFDETPLLGLAPNEVTYTALMHGYFTHGQREKGFALFEEMRRGGVEPNLYTYNCLIGEWCRTGEFERARSLFDEMPVRGIVRNVVSYNTLIAGLLNSSWTDGY

SEQ ID NO: 137395 - protein, 73 aa, Oryza sativa
  Clone ID: PAT_MRT4530_38883C.1.pep
SNPPTPHPPGGFFKSFVRTSPACIPSSILPPSSTTMIHLHSPPTVPVVFPLAASDDMPPPTATAIGLRPPSLL

SEQ ID NO: 137396 - protein, 564 aa, Oryza sativa
  Clone ID: PAT_MRT4530_38884C.1.pep
MEGGGAQRHHRGRRRGAAGSAARTPRGWCCSFAGVPQSPDLRPFPPSLAPPATAASSSPAPGGGAGRNKLPPKSPSISSFHSSPTSSRLAGLGGLIDPRRILSPGRVSPIDLDDSAPPLPLPLPLPPPPVTPAAETVVVPAETSAAVAPLVVASAEADAAGDEALDLRLFLRGRDGSTCVVMELDSGVLCDSSAFFAAMAPPRGPAGDGGGSGRRIEVDGVDNVEAFRAAVELMYQPDPLRWLAAAGVSRSIDVLEVSSSIMFERGVKLCLSYIEAVPWNENEEEKLKNLFARCTFDEAISQDVLARLRPHSWSSSEDLTVHLIQSVTSSTNSGARKDMQSLVNGLLSKSSVYQKDMAGLNRESLYNICYACLNSLVDLYDEATEATNHTAQALVIKGSKPFIERISQQTENLNWLLDILVNIDMAEEFVELWAKQDRLIRIHEQASPMMRYELSRISASVFIALGKGKVQCRGELRSLLFYGWFSPMLLDFGWLQRCSKGLDVRSLEENLGQALLTLPLKQQQCLFEEWFQCFASKGSECPNLTRAFQVWWRRSFVRSSVEGQ

SEQ ID NO: 137397 - protein, 32 aa, Oryza sativa
  Clone ID: PAT_MRT4530_38885C.1.pep
LHHSTVRMPYSMFLSVQFVGDSSVSASCVRYD

SEQ ID NO: 137398 - protein, 127 aa, Oryza sativa
  Clone ID: PAT_MRT4530_38886C.1.pep
MACCLWQDKSIEEIDKLRCAFFWKGEKSVKGGQCLVAWKTVLLQKQQQVLGIKDLRAHNTALVLKSAPPQPLLPSRIRAGNTVAHPTRHHTHPLELAKSESAPTFIQAVMDKNHSTSGIEPVESIST

SEQ ID NO: 137399 - protein, 67 aa, Oryza sativa
  Clone ID: PAT_MRT4530_38887C.1.pep
SFTCDLSDNIAAPWPSSSSVQSLSLCAPEMSLPALPVAPTSGSSVGISRTGIGILAPLLFFATAITF

SEQ ID NO: 137400 - protein, 73 aa, Oryza sativa
  unsure (1)..(73): unsure at all Xaa locations
  Clone ID: PAT_MRT4530_38888C.1.pep
CFRRFKNGGGKRKFGLKPLQVGAQLGLLFLQLQLKKTFPHPILPLIIELPGPPHMPCPNYLAXMQVLNLLVAN

SEQ ID NO: 137401 - protein, 489 aa, Oryza sativa
  Clone ID: PAT_MRT4530_38889C.1.pep
MDAVQPSNASINRVHLVYVLVRRLALVGSLVGRGGLRLPAGGAGAAMTGCIVLFMRPGVRTASYIRGTVCSCLRTSWIIDSHRIASKIKNASGSVDASKHKWVSNPTKACPRCNHIIDNSDVVHQWPGLPRGVKFDPTDQELLWHLLAKHGKVGAKAHPFIDEFIPTVEEDDGICYTHPQKLPGVKQDGSVSHFFHRTFKAYNTGIRKRRKINTGDLADVRWHKTGKTRPVVVDGKHLGCKKFMVLYMSTMKGGKPEKTNWVMHQYHLGTGEDEVEGQYVVSKLLFQQQFKPGEKNAQDLTSADALESIVAEDLPNIPPLPLEEHVFTNQELEVLEKSETITDQGKETSEINNEDNAVEDVAHMATEKPEDGDNPSSQDPKWWEGESQFLLDSQQLAENLAICDEFLQSQSQTSCGGGDDETDKIKPRLAVYAQLPVEDLKKDLEECQRLDPSDGTNLELENASEFRLSQIEFSQDSFTTAWAGGKVID

SEQ ID NO: 137402 - protein, 99 aa, Oryza sativa
  Clone ID: PAT_MRT4530_3888C.1.pep
MYHVLQQPSLSSTSGEEPLENELLELVGLNTTNPVKQLGAELQDNVARRATFMRIKSTGTLTNLKAKFWTCTRVKQIFQAMVSLPTFMPLEASTKLCFR

SEQ ID NO: 137403 - protein, 98 aa, Oryza sativa
  Clone ID: PAT_MRT4530_38890C.1.pep
SESSANVDLVCALCDNGGEIASCEGKCLRSFHAVRDAGEDCQTLGYTRRQFDALNPFLCKNCELEKYQCFACMRLGSAKTDTPEVFPCASANCGYFYH

SEQ ID NO: 137404 - protein, 116 aa, Oryza sativa
  Clone ID: PAT_MRT4530_38891C.1.pep
RRDVLAHAVPPHTVVGNGVEPSPTEELPDGAVVESVHLIDRVPLCSELFVTVDEAPQLVGPAAEAYAGDEAEEEANLHHSKPLVVLDNRAGQLHQLFVFTMRPSACLYYNDVLRRV

SEQ ID NO: 137405 - protein, 90 aa, Oryza sativa
  Clone ID: PAT_MRT4530_38892C.1.pep
AAAGLPEASHRRPLGRRQRIQTPEAGRPLPPPQSSSLPCPRPAAIIPMVAGDGSTLPTVAGDGSALPTVAGDGSTLPVVASGGSAPLPPP

SEQ ID NO: 137406 - protein, 168 aa, Oryza sativa
  Clone ID: PAT_MRT4530_38893C.1.pep
MSSSSAAADRGAAGGASSFRVYYSLGAAGTVPFVWESKPGTPKSTVVPASAADGGYAMPPISPPPSYSYQWSSCNSDQPPPPSKAKKCRRRLSTSSSSCSWASSGGWMSWLTSFRRRQRWLPPSPGKTTYRRRWLGQDGGVAVDDVVVVRRSPPRRAVPCFGAGKVHW

SEQ ID NO: 137407 - protein, 108 aa, Oryza sativa
  unsure (1)..(108): unsure at all Xaa locations
  Clone ID: PAT_MRT4530_38894C.1.pep
LVCSLSCSFLXVLVVVPFVFLFRCLVGPWRGSAFVSALVLPFGFLAGGVAAAAGWCWPLWLRLRRXCGCSWLPLAVCALLRLVXVSXPXXRGCWAGFSPLLLPAXGCA

SEQ ID NO: 137408 - protein, 262 aa, Oryza sativa
  Clone ID: PAT_MRT4530_38895C.1.pep
MAVADGLKRLLETATCVQCSRKAPRTARGGGGGGGGGRWSRSRGRRWAVAEKAAGGGEEPRPKVAACGGRGSSDLLLAALMRARVQGAWRAPREPTRGGGRGEAAATRGAAAPARLRRGGGARRPPCVPARLVGLRLRRRPPSSSGPLRHPPLAPPPRAAVLTSPPPRSSAVSASASVPTSTPSAPSSPTARPRAILADRPRPPPVLAVRAVRRPSPPPPVAALGSSTTARRLLRPHPPPVAAFAPARHRRPTRERERKSEA

SEQ ID NO: 137409 - protein, 157 aa, Oryza sativa
  Clone ID: PAT_MRT4530_38896C.1.pep
MAEPRPGQPGPLPRLRLMNIHYDVDKIGGVTTTSIIKLALRVRGYLAIFLKLCKLDTQKHMAPGAASPKAATVAAAAAVFAALVVLSSSLVAPAAAKMFCSNCDDICNASCVNSDTIAKLCAPQCDGCSPEACQSCLQALKQECLTGCSDYCHKNCT

SEQ ID NO: 137410 - protein, 125 aa, Oryza sativa
  Clone ID: PAT_MRT4530_38897C.1.pep
SEAIVGGSQGAEVAQAPAGGEEPRPKEAACGERGSSNLLLAALMRARVQRAWRARREPTHGGGGGEAAATRGAAAPVRHRRPCAPAATARLTAATLLCRLRLRADVHAVCAAVHTVLVDRPSPRH

SEQ ID NO: 137411 - protein, 47 aa, Oryza sativa
  unsure (1)..(47): unsure at all Xaa locations
  Clone ID: PAT_MRT4530_38898C.1.pep
PPAXXSWGSPTKPXQTHLLHDRPDGANSLAMILLRISLISDSIAHHL

SEQ ID NO: 137412 - protein, 193 aa, Oryza sativa
  unsure (1)..(193): unsure at all Xaa locations
  Clone ID: PAT_MRT4530_38899C.1.pep
MPHFSSLSHGWVGGGGRPRAAGGAEDGSERRVGTRLATGGGGGGGGGRRSRSRGRRWAVAEKAAGGGWALGXRWAGTEAAAGGGRGAEVARAPAGGEELRPEVAACGGRGSSDLLLAALMRARVQGAWRACREPTRGGGRGEAAATRGAAAPERRRPPRAYXRGGGARQPTRAVPSSARSEPPASSRQASRSP

SEQ ID NO: 137413 - protein, 108 aa, Oryza sativa
  Clone ID: PAT_MRT4530_3889C.1.pep
GMNLFCFVSYRMLLAFLPLFLVYIIFFVMACWTYFCPRKRPSPPILVNRGGRDTWLGPLQNLNRGGFPTQILFFLLRTPTGGLLCCFPAKAVLKQRLSPAPLPKKKPA

SEQ ID NO: 137414 - protein, 93 aa, Oryza sativa
  unsure (1)..(93): unsure at all Xaa locations
  Clone ID: PAT_MRT4530_388C.1.pep
FSTPLIYFLFFSVKNFPPRKKLALVAPQSHNQPFNNVQGISQKLLLKHFGXPHFDRIFSQEQFXLTFIVPSRYGXLHRFFGAPSTITTLDGVL

SEQ ID NO: 137415 - protein, 382 aa, Oryza sativa
  Clone ID: PAT_MRT4530_38900C.1.pep
MAKRARLLSAAAGPVLPDELVWEILARLPARGLLRCHAVCRDWRRLATSADFLLAHHRHQPPRPLVFGCARWRSGAAADADAAVDSVDLIRHPAERRRVLGFSDYRQHQSFKIHSSCDGLLLFVSGRAFYICNPATRQVTPVPALTGGGSQVTLYPHPSSGDGEYRVLKWKYPDAVCILAVGSSEKPRRIGLPEAFLPPVFWIDEIGFLPPVLLHGCLHWHLRKPEDAILVFDTVAESFRWMVSPNVDGYGAHLVEIDGGMLGIGIVTQGMAKLWVLQDYETEVWSLRYHVKLPVARMRSIAREGFFSWKIVCHRGEILVYIQSSVFLFLCDTKGNLREKIHLDNMLPCAMRHCLKESLVNHAFFGRHGGAHVGQPQFFCGL

SEQ ID NO: 137416 - protein, 64 aa, Oryza sativa
  Clone ID: PAT_MRT4530_38901C.1.pep
MHSAQEPQSTCSSIPSPLRLAKPPIRVSIPPIRGEGRAVQEPPRESEGRRRRGKPPPPRAPPSC

SEQ ID NO: 137417 - protein, 253 aa, Oryza sativa
  unsure (1)..(253): unsure at all Xaa locations
  Clone ID: PAT_MRT4530_38902C.1.pep
MEEEAAGGGRGAEAGDGQWRRRQRAXGQGAEVAQAPAGGEEPRPKEAACGERGSSNLLLAALMRARVQRAWRARREPTHGGGGGEAAATRGAAAPTLRSGGHRAPTTRRRSPPPIARPRSPGRPPPPSPAAVVLEPPPPPAIGSVPARRRPHLTAATLLCRLRLRADVHAVCAAVHTVLVDRPSPRHPRRPPAPTARPRRARCAPAFSTPASRGPRLLDHRPPPPPPPPVASLAPTRRPSPTSASRPLSPTHP

SEQ ID NO: 137418 - protein, 447 aa, Oryza sativa
  Clone ID: PAT_MRT4530_38903C.1.pep
MEASLVLLCLCVFLASGGEGRSPAGTVLPLQVRVQEVELEAPAANRLRFRHNVSLTVPVAVGTPPQNVTMVLDTGSELSWLLCNGSYAPPLTPAFNASGSSSYGAVPCPSTACEWRGRDLPVPPFCDTPPSNACRVSLSYADASSADGVLATDTFLLTGGAPPVAVGAYFGCITSYSSTTATNSNGTGTDVSEAATGLLGMNRGTLSFVTQTGTRRFAYCIAPGEGPGVLLLGDDGGVAPPLNYTPLIEISQPLPYFDRVAYSVQLEGIRVGCALLPIPKSVLTPDHTGAGQTMVDSGTQFTFLLADAYAALKAEFTSQARLLLAPLGEPGFVFQGAFDACFRGPEARVAAASGLLPEVGLVLRGAEVAVSGEKLLYMVPGERRGEGGAEAVWCLTFGNSDMAGMSAYVIGHHHQQNVWVEYDLQNGRVGFAPARCDLATQRLGAGA

SEQ ID NO: 137419 - protein, 89 aa, Oryza sativa
  unsure (1)..(89): unsure at all Xaa locations
  Clone ID: PAT_MRT4530_38904C.1.pep
MERTAAEAAAGGKGAWRDGPVTYLHLLXYIAISGGQIFFNKGKPTKATLLSGDTIPSLFFYPPRFSGGFCLRVRVIRRRRARLYGAAGG

SEQ ID NO: 137420 - protein, 78 aa, Oryza sativa
  Clone ID: PAT_MRT4530_38905C.1.pep
MGAVMGDRRCGSELSGLGPGKGKMTALGVLFSRPSHAPVSLVLRRRTARATARQGRQWRGSVESEARGVERRSSAAVL

SEQ ID NO: 137421 - protein, 39 aa, Oryza sativa
  unsure (1)..(39): unsure at all Xaa locations
  Clone ID: PAT_MRT4530_38907C.1.pep
RAFCLSRLEQTCRCRLLVKTCMXLRNLERLDVTNNWRRD

SEQ ID NO: 137422 - protein, 94 aa, Oryza sativa
  unsure (1)..(94): unsure at all Xaa locations
  Clone ID: PAT_MRT4530_38908C.1.pep
CYKQPSLTNLCGYYMCEMLRVCGRYRTKGMWLPSIPYNASPFDQKTLIYLCADLCRFIRRDTYNYPGEFHDPHSXLATDPKFKNLMEREREHAI

SEQ ID NO: 137423 - protein, 115 aa, Oryza sativa
  unsure (1)..(115): unsure at all Xaa locations
  Clone ID: PAT_MRT4530_38909C.1.pep
GILSTLGYTLYIDMVYLHVYRRSLYMLRKFITESTDGKIPTRIGMGRHCIVXGLMSPSPTXKPPDLRYKRDPREDLQHRISXPRQPPQPTKPEPTGAKSPSDLVEPTRLRSHRYH

SEQ ID NO: 137424 - protein, 178 aa, Oryza sativa
  Clone ID: PAT_MRT4530_3890C.1.pep
TRQLKQLTYTSQPLVGSIILYSAMNNTVTITHTHTHTRTKMAKSSWLHQKFRNSEVGEARPHHRRRRAGLLAERVELPRGQGHDGGLMAAQALLAGAARQGRRARADGLLVRRLHRINGGGGAAACRRHDGYLRSPALAFHLAASCAFAATWRRRLQMLLFFFYAIRVPGPSQTSSSC

SEQ ID NO: 137425 - protein, 106 aa, Oryza sativa
  unsure (1)..(106): unsure at all Xaa locations
  Clone ID: PAT_MRT4530_38910C.1.pep
RAPSKTFGATWRKRRKKRAGGQPYICPAAIEGGAGNLRGVIWGWMDLGQESWLFLGWGKWVKFGKGSKRLGLCSLRISKRRGGCCNDGFIGFRXNEYDMIDRELRN

SEQ ID NO: 137426 - protein, 444 aa, Oryza sativa
  Clone ID: PAT_MRT4530_38911C.1.pep
MAKQAWSSLFGCFTSHHDGGGKRKKGGGGGKKAKKKVAAAASQKQRKLQSRLSFSDLSFGGMVSPEDLSLSLAGSNLHVFTIAELRAVTRDFSMTNFIGEGGFGPVYKGYVDDKLKPGLRAQPVAVKLLDLEGTQGHNEWLLKFQHGNRAKGLEFKSCQLTEVIFLGQLRHPHLVKLIGYCYEDEHRLLVYEFMTRGSLEKHLFKKYAASLPWSTRLKIAIGAAKGLAFLHEAEKPVIYRDFKTSNILLDSDFKAKLSDFGLAKDGPEDDETHVSTRVMGTQGYAAPEYIMTGHLTAKSDVYGFGVVLLELLSGRKSVDKSRPAREQNLVEWARPYLTDARRLGRVMDRNLAGQYPAKAAQKAAALAHRCVSLNPKSRPHMSPVVKALEPLLALDDDCLVGTFVYVAPPDDVAANGDGSSKRRAGRRRSDGAAAAAAADGVQRE

SEQ ID NO: 137427 - protein, 1557 aa, Oryza sativa
  Clone ID: PAT_MRT4530_38912C.1.pep
MGDAAAAAPAAAAAGPSSTRGEPKDPRTIARKYQLDLCKRAVEENIIVYLGTGCGKTHIAVLLIYELGHLIRKPSREVCIFLAPTIPLVRQQAVVIASSTDFKVQCYYGNGKNSRDHQEWENDMREFEEFYNSNSVEKFPRVFGMTASPIIGKGGSNKLNYTKCINSLEELLHAKVCSVDNEELESVVASPDMEVYFYGPVNHSNLTTICIKELDSLKLQSERMLRASLCDFKDSQKKLKSLWRLHENIIFCLQELGSFGALQAARTFLSFDGDKLDRREVDLNGSTSSFAHHYLNGATSILSRNKTDGSHAGSFDLEKLEEPFFSNKFSVLINVLSRYGLQENMKCIVFVKRITVARAISNILQNLKCLEFWKCEFLVGCHSGSKNMSRNKMDAIVQRFSSGEVNLLVATSVGEEGLDIQTCCLVVRFDLPETVASFIQSRGRARMTKSKYVVLLERENQSHEKLLNGYIAGESIMNEEIDSRTSNDMFDCLEENIYQVDNTGASISTACSVSLLHCYCDNLPRDMFFTPSPVFFYIDGIEGIICRLILPPNAAFRQADGQPCLSKDEAKRDACLKACVKLHKLGALTDFLLPGPGSRKNKVSVTNNSSNNKVEDDSLREELHEMLIPAVLKPSGLKLDSLSNLHFYYVKFIPIPEDRRYQMFGLFVINPLPVEAETLQMMLAHKFQEMCLKILLDRSEFTSPHVKLGNDVTLEINSTFYLLLPIKQKCYGDRFMIDWPAVERCLSSPIFKDPIDVSVHASYSSNESLRLLDGIFSKTDVVGSVVFSPHNNIFFFVDGILDEINAWSEHSGATYAEHFKERFRIELSHPEQPLLKAKQIFNLRNLLHNRLPETTESEGRELLEHFVELPPELCSLKVIGFSKDMGSSLSLLPSLMYRLENLLVAIELKDVMLSSFPEASQISASGILEALTTEKCLERISLERFEVLGDAFLKYVVGRHKFITYEGLDEGQLTRRRSDVVNNSHLYELSIRKKLQVYIRDQQFEPTQFFAPGRPCKVVCNTDVEVRLHQMDIHPDNRENCNLRCTRSHHWLHRKVIADVVESLIGAFLVEGGFKAAFAFLHWIGIDVDFNNPALYRVLDSSSINLSLMDYTDIAGLEELIGYKFKHKGLLLQAFVHPSFSQHSGGCYQRLEFLGDAVLEYVITSYLYSTYPDIKPGQITDLRSLAVGNDSLAYAAVEKSIHKHLIKDSNHLTSAISKFEMYVKLSNSEKDLLEEPACPKALGDIVESCIGAVLLDSGFNLNYVWKVMLMLLKPVLTFANMHTNPMRELRELCQCHGFELGLPKPMKADGEYHVKVEVNIKSKIIICTAANRNSKAARKFAAQETLSKLKNYGYKHRNKSLEEILIVARKRESELIGYNEDPIDVEADISVKMKSPHIHEENIPFQNTETSFTRSSKFHNQIIAGSGKHDVNNGRNNQPKLATQSGRLPSEATEKSNKKVYHGDMVHKTARSFLFELCAANYWKPPEFKLCKEEGPSHLRKFTYKVVVEIKGASATLLECHSDGKLQKKAAQEHAAQGALWCLKQLGHLPKEEDVRV

SEQ ID NO: 137428 - protein, 100 aa, Oryza sativa
  unsure (1)..(100): unsure at all Xaa locations
  Clone ID: PAT_MRT4530_38913C.1.pep
GKFFCGHLLFVPPPFVVXKKAQKKGCVFFAFKTNPYFLVSPLPGKGFFFRVFPPFFFANAFPFSKKKVXGVQHNKGDGLGAFPPPQNKRSPKVFIGGESF

SEQ ID NO: 137429 - protein, 687 aa, Oryza sativa
  Clone ID: PAT_MRT4530_38914C.1.pep
MATRVLLSSKVILALVLASLFSLPRHGRALELMNWSCNNGSAYAANTTYDTNVHSILATLTARTPNTTTGFATATTGRGTDTEAWGLALCRGDTDRVGCASCLAAVPAVAFNECRGDMDVTVFYDRCLARFSYVDFTARPDNTEVLIGSPSADRITADAGHFDALVADLAGALADWAAYNSTLRYAAGVMTSGDGFMSTTEDMVHNIYGVVQCTPDQAAAACRACLEALRVDMPKVFAGKMGGRFNAVWCNLRYETFVFFDGDPSVKLVAPPVVPEDGKRRSSPENAAAVVGAVLGALVILLSLFIIYLWKKLQAKQYAADKNVDSGSLLFDLAIIRKATANFAEHNKLGHGGFGAVYKGFLPDVGEIAVKRLDRTSGQGLEQLRNELLLVAKLWHNNLAKLLGVCIKGDEKLLVYEFLPNRSLDTILFDPQKREQLSWETRYQIIHGTARGLLYLHEDSQIKIIHRDLKASNVLLDSNMNPKISDFGLARLCSGTKTTSITSQVVGTLGYMAPEYAVLGHLSVKVDVYSFGILVLEIVTGRRNTDVFDADEESSNLLSYVRPIDQLFYDFLKAMAFFMLKVWDHWQKGIPLEITDTLLLLSGSRGLQDMELLKCVHIGLLCVQENPADRPTMLSVLVMLQDVDTTNFAAPSKPAFTFANVRNTTSSSPSAAALSANEVSISEFHPR

SEQ ID NO: 137430 - protein, 56 aa, Oryza sativa
  Clone ID: PAT_MRT4530_38915C.1.pep
IKRTSSCNQLGNISYVIFQLQMPVSRYPFKSRLQKITQIFQSRCQATEDWNCRCES

SEQ ID NO: 137431 - protein, 55 aa, Oryza sativa
  Clone ID: PAT_MRT4530_38916C.1.pep
ITPIFTICKARPAKPTENVIGSKKSIPLCPNQGWKIVRPCKKSLVRVICDCNLLN

SEQ ID NO: 137432 - protein, 46 aa, Oryza sativa
  Clone ID: PAT_MRT4530_38917C.1.pep
SRDVGAPGLCDEQDGEKAGPAAVSPCAGCQPPLALRQADAAPRRAA

SEQ ID NO: 137433 - protein, 180 aa, Oryza sativa
  Clone ID: PAT_MRT4530_38918C.1.pep
MAAVMKALAVASPISARAQPRRCPAGSSGGPSQSLHSSFGGVSLQCRRTKPASLHRSRPSMQVVMMAARPAIQFIQGTDEQTIPDVRLTKSRDGTNGVAIFTFDQPSVFDSSAELGDITGFYMIDDEGVLQSVDVSAKFVNGKPALIEAKYVMRTPREWDRFMRFMERYSQANGLQFVKK

SEQ ID NO: 137434 - protein, 358 aa, Oryza sativa
  Clone ID: PAT_MRT4530_38919C.1.pep
MVGDRKRPAPFAGFSPFARSLLFSASSSKPLPPPEDPPAAAADEIPSGIAGSSRDMPPPKRAKRAEPSSDEERYSSDDESYSSDSDDSDDASEELDTVQADFAFYDPKPGDFHGVKLLLKTYLDSKPWDLTGFVDLILEQTTVGTVVKIADDEEDGEGNGADGSSTGGNDDLFGLISVLNLGRYSEHRCMKDLKDYLLAVCGDKDTKKKLKQMLGDKAPDVGLLVCRRFVNFPYELVPKMYESLFDEVSWATEDEPTQELRDSFRFKQYLMVVRVLERKTPAKQKAKNSTEEDEPIIYPKLEDEIFRELSSWSFTFPIRSEQSAQQEMKNYKEMGLVMAVKAEAIPKFRKKLEDLLSE

SEQ ID NO: 137435 - protein, 86 aa, Oryza sativa
  Clone ID: PAT_MRT4530_3891C.1.pep
MKWPTTSKIGNGQRWGARRQQIRWIHYPGCGRGGFAAIDLWSGVDCCGDDDDDDDNDDDDDDSSGLRPRHRRTATTTMTRQMEARG

SEQ ID NO: 137436 - protein, 909 aa, Oryza sativa
  Clone ID: PAT_MRT4530_38920C.1.pep
MEFVASIVDAVFRPLKDYFARTFGYVMSCGDYIDLLGHEMDELKSKRDDVKRLVDVAERRGMEATSQVKWWLECVSRLEDAAARIEEEYQARLRLPPEQAPGLRATYHLSQRADEMFAEAANLKEKGAFHKVADELVQVRFEEMPSAAVVGMDAVLQRLHACVRHGDVGIVGIYGMAGVGKTALLNKYNNDFLINSPDINVAINIEVGKEFSLDDIQKIIGDRLGVSWENRTPRERAGMLYRVLTKMNFVLLLDDLWEPLNFQMIGIPVPKHNSKSKIVLTTRIEDVCDRMDVRRKLKMECLPWEPAWELFREKVGEHLMFSSIEIQEQAKALAMKCGGLPLALITVGRAMASKRTEKEWKHAITVLKVAPWQLLGMEMDVLMPLKNSYDSLPSDKLRLCLLYCSLFPEEFSISKEWIIGYCIGEGFIDDLYTDMDEIYNKGHDLLGVLKIACLLEKGDDEDHISMHPMVRAMALWIASDFGTKETKWLVRAGVGLKEAPGAEKWSDAERISFMRNNILELYERPNCPLLKTLMLQVNPALDKICDGFFQFMPSLRVLDLSHTSIHELPSGISSLVELQYLDLYNTNIKSLPRELGALVTLRFLLLSHMPLDLIPGGVISSLTMLQVLYMDLSYGDWKVDATGNGVEFLELESLRRLKILDITIQSLEALERLSLSNRLASSTRNLLIKTCASLTKVELPSSRLWKNMTGLKRVWIASCNNLAEVIIDGNTETDHMYRQPDVISQSRGDHYSNDEQPILPNLQNIILQALHKVKIIYKSGCVQNITSLYIWYCHGLEELITLSDDEQGTAANSSEQAARICRDITPFPNLKELYLHGLANCRALCSTTCFLRFPLLGNLKIVDCPKLKKLELPVGNLNAVQCTREWWDALEWDDAEVKASYDPLFRPLH

SEQ ID NO: 137437 - protein, 249 aa, Oryza sativa
  Clone ID: PAT_MRT4530_38921C.1.pep
MEEYGGGDLLSEAMGSGARVVVVEDRVEAPGAFALHLLLKRALAGGGAAALLALAQPFSHYDRVLRKMGCNLSLHRKSERLHFFDLQAFPGGAKGGAISDSFVRLYGDIQRAIDASRTGDNTGRFTLMIDDVSLLEVAAGGSVDDVLDFLHYCVTLTSEMNCSLVFLIHEDIYSSEEGVGVLLHLRYIADLVIRAAPLSTGLAADVHGQLSVVNKCTFREQRLKAQRIWNFHFRVKENGADFFYPGSRH

SEQ ID NO: 137438 - protein, 117 aa, Oryza sativa
  Clone ID: PAT_MRT4530_38922C.1.pep
MAATATKTIDFAAERALAKDFLANFAGPRGEPKYLNILQDVANRKIRAVQIELDDLFHYKDADDEFLQRVTENTKRYIGIFADAIDELMPESTEAYAVDEDRDILMTQRVDEGADGG

SEQ ID NO: 137439 - protein, 37 aa, Oryza sativa
  Clone ID: PAT_MRT4530_38923C.1.pep
HDRPYFIAEAYGGNSADSLEEFTGIKPWARVIFLPSY

SEQ ID NO: 137440 - protein, 236 aa, Oryza sativa
  Clone ID: PAT_MRT4530_38924C.1.pep
RKRFARPIVDKDRPDIRIHVYLDREKLIVSLDLSGEALHMRGYREDTGKAPLRETLAAIIVLRSGWQKGTPLVDPMCGSGTLLIEAAQMQAGIVPQLQRKYWGFNAWKGHQQAIWQQVLEEAHSQKNTQIDPLFYGFDSDHRVLAKAKQNAQNAGVAHLIHWPQADIAALKNPCLDQKGTLVSNPPYGERLGTTPALIALYSVFGQRLKQQFAGWNVSIFSGEPSLLNCLRLRSTR

SEQ ID NO: 137441 - protein, 219 aa, Oryza sativa
  unsure (1)..(219): unsure at all Xaa locations
  Clone ID: PAT_MRT4530_38925C.1.pep
NKLSIECIERMGESDGIWAWTRFNQLFNYLPLAAMIEKKIICMHGGIGRSINTIEQIEKLERPITMDVGSIILMDLLWSDPTENDSVEGLRPNARGPGLVTFGPDRVTEFCKRNRLQLIIRAHECVMDGFERFAHGQLITLFSATNYCGMSPLTSFVTYASMQPSFLLRPCXAPVNSPESSPERAMDATWMQELNIQRPPTPTRGRPQSASDRNSLAYI

SEQ ID NO: 137442 - protein, 64 aa, Oryza sativa
  Clone ID: PAT_MRT4530_38926C.1.pep
MPLPEAEARARRSAFVGPLLGQAQPAGGGGGGAALSTGHGSMRDATGAHPRSCQGRAYILWPLP

SEQ ID NO: 137443 - protein, 60 aa, Oryza sativa
  Clone ID: PAT_MRT4530_38927C.1.pep
PETRISRQRCVTWTMSFLITFSSWSTPRVNIKFSDKYYSKPAYNHEFSSLRLERPKAHAR

SEQ ID NO: 137444 - protein, 61 aa, Oryza sativa
  Clone ID: PAT_MRT4530_38928C.1.pep
SSLVKIPFTTRLLTQQKMTAHHVLLTEPTNPAPFDFSTYSATRVAHHDEAQWSTINKVSQP

SEQ ID NO: 137445 - protein, 53 aa, Oryza sativa
  Clone ID: PAT_MRT4530_38929C.1.pep
ICTIIHYRIDFAPYCLGFPRFLLIIFTVIACLFLHRTRLLFFFDHPLLVPILF

SEQ ID NO: 137446 - protein, 81 aa, Oryza sativa
  Clone ID: PAT_MRT4530_3892C.1.pep
ISLKNHLPDKRPKKTNALSTSSSKQYLGVEKNSFRVEGIEIRDAAHISTFSQNATLVHHLAYQLSLQSRKILSNSTFHGNI

SEQ ID NO: 137447 - protein, 593 aa, Oryza sativa
  Clone ID: PAT_MRT4530_38930C.1.pep
MKRMQRMPTRKSHSWWWDSHISPKNSKWLAENLEEMDKQVKDMLKLIEDEGDSFAKKAEMYFERRPLLVTHVENFYRMYRALAERYDNVTGELRKNIPSSLQSQGSLSISESDSETQSAPPTPKPDSEETTPKQKRKPRAAGFDVFLGSGGSSDISKKGSDGSSSSSSESDSEVDELREDNGDGSPFALNERIAELEDELQEAREKLEALEEKNTRCQCEKLEEKLKDSHSEISSLQKELEGQLAHHDHEIEKCKKELEHVHEKYSHDKSTLETEIIKLQDIVKNFEGDLAKMSQEKLQLKAQVKELEQASRSLDDSSAQIMKLQEIIKDLQRRLDNDSNEKKMLEERAIEFEQVRKELEGSRTEVAELQATINNLKADLGRALEEKSQLESRINDLEHTIACNLEEFSQEKSSLGAEIQKLKEANASLEGKLTSTESQLQQLHAEKSEASISSEKQISDLNQAIADLETKLELLSSEKTTVDNKVASLLTDVTARDEKIREMDSHLHQLHLEHVKLIAEADAVTKAVSELRARVSELEEEVEEQKLMVSDGAEGKREAIRQLCFSLEHYRHGYQQLRQLLQGHHKRPLVMAN

SEQ ID NO: 137448 - protein, 82 aa, Oryza sativa
  Clone ID: PAT_MRT4530_38931C.1.pep
MFEGQGTAWVRRIDSWSVAMYVGVSICGGDGGGDRDARGGGVDNSSPFPLELQIRTATAFAEAATAGGCDGNNEGDYGGNVM

SEQ ID NO: 137449 - protein, 59 aa, Oryza sativa
  Clone ID: PAT_MRT4530_38932C.1.pep
MKRMQRMPTRKSHSWWWDSHISPKNSKWLAENLEEMDKQVKDMLKLIEDEGDSFAKKAE

SEQ ID NO: 137450 - protein, 213 aa, Oryza sativa
  Clone ID: PAT_MRT4530_38933C.1.pep
MVLGLMVVEAIGDPIGGPDTLGGWPRLSGSGMNCLMATFNKEMTSHGAQVDGGGSDWWSNRWVRHFGWVAKTFREMTSHDARADGDGSDWRSNRWVRHFGRVAQTFRLMAFNRKSERVVPRGRFGGVDDKNRDESSYGQHRLVAEVVDDVVGRAMCACSRARMSLGEALNDELLNVRYLRWWQYRRFVFQQWKNTQIPAAQKSKCHGYVTISF

SEQ ID NO: 137451 - protein, 314 aa, Oryza sativa
  unsure (1)..(314): unsure at all Xaa locations
  Clone ID: PAT_MRT4530_38934C.1.pep
MSPPPAAARAPPVLRNELSRRTAVLGLRLWKLDGEAIGRVCHKNLVRLLGYCAEGAHRILVYEYVDNGNLEQWLHGDVGPVSPLSWDIRMNIVLGTAKGITYLHEGLQENGAKRDIKSSNILLDKRWNPKVSDFGLAKLLGSDSNYVTTRVMGTFGYVAPEYASTGMLNERSDVYSFGILIMEIISGRSPVDYVRELEEATAAFAPEHVVGEGGYGIVXPRRPRRRPRGRSHGRRPLLVALRCVDPDSQKRPKMGHVIHMLEVDDFPYREDRRTPRASPLDRTRTYAKPVTESGDEGNTTTAASTPSRLHESLR

SEQ ID NO: 137452 - protein, 136 aa, Oryza sativa
  Clone ID: PAT_MRT4530_38935C.1.pep
IKEVDVVSRKKVPYYEERQVYEGPAQIDVIQGGAREYASAASTAVNGRLIAHQKLPGQRIKEVDVISRKKIPYYEQRELYEGPAQLQVINGGEREYVSATSNARGGRLIGHRTLPGQRSKESDVISKKKVPYYQER

SEQ ID NO: 137453 - protein, 338 aa, Oryza sativa
  Clone ID: PAT_MRT4530_38936C.1.pep
MMEEASTSASGGGGGAANGGQRGFPPARSGVFYRFTQQNLPAWKPAMTPGCVITIFLMIGVTFVPVGLVCLHASNHVAEIAHRYDIDCVPNAYKRNRQAYIKDSSISKNCTQEVKVKYLMRAPIYVYYELDNFYQNHRRYVKSRSDKQLRYGQKYTHSSCDPIERNDGLPIVPCGLIAWSLFNDTYGFTCGSTEIKVNRKNISWKSDREHKFGKDVYPFNFQNGSLIGGGKLDPALPLNQQEDLIVWMRTAALPQFRKLYGVIEEDLQADEIITMHIANNYNTYSFGGKKSLILTTSTWLGGKNDFLGYAYLITGSLSLFLTILFALIHVKNPRPHGD

SEQ ID NO: 137454 - protein, 54 aa, Oryza sativa
  Clone ID: PAT_MRT4530_38937C.1.pep
MAKVPYRVISIAFCHIVDVQGGDWRRKRKVGDYRRYRQAGYRWAQHARSSHGRY

SEQ ID NO: 137455 - protein, 422 aa, Oryza sativa
  unsure (1)..(422): unsure at all Xaa locations
  Clone ID: PAT_MRT4530_38938C.1.pep
MEKKDKGRHRGRDGGGGGGGGGGGGGGGVDRGGGGSGGGGPGMGRRGSDARGQQAEAAAAAISGIATRLGFGCTISMTPLFCAVLDGQEITVKYFLDKGADPNKKDAEGFAPLHEAAKIGNVGIARLLLSKGASVDVSSSEGTPLHVAASNGKSSIVLILLEHHANPNVMTPDCYTPLTAVLSATPEIVNESECLKCMKLLIKAGAHYKLATPDTPLEIATRNGLTECVAYLLEISTVVRLSEHDKGSDGDRKSKLKLHGGKAFEEGDYAGAIIFYTEFLCKYNFFNNPSPNYXXQRLAQKNPTPHIPHRRSMAVSASQLTSRILLSLLLSRNYCCVNKGRLSLNFQWHCHHVGDTLAMKLDPADATLYSNRSLCHLRSGAAQEALLDANDCIKLKPEWTKDHEEDACEDPVDPLEWDSYGF

SEQ ID NO: 137456 - protein, 151 aa, Oryza sativa
  unsure (1)..(151): unsure at all Xaa locations
  Clone ID: PAT_MRT4530_38939C.1.pep
IPTHRRKRGDVTAGYGRVGKHRKHPGGRGNAGGQHHHRINFDKYHPGYFGKVGMRHFHYTRNXHFCPTVNVEKLWSVLSKGQQARSTSGKTDRVPVIDCTPAGFFKVLGQGXLPNFPVVVKAKFFSKSAEKKIQAAGGHASWLLNSIHHKY

SEQ ID NO: 137457 - protein, 112 aa, Oryza sativa
  Clone ID: PAT_MRT4530_3893C.1.pep
MPWPQSATVVVVIIIIIIIIIIAATVNATPEVDGGKSAPPAARVVDPPIPKIGAAETVAPQADIVVVASTVATGSAAAELPTAGRSRSCWLSATSSRHLPFDETERERGRTG

SEQ ID NO: 137458 - protein, 485 aa, Oryza sativa
  Clone ID: PAT_MRT4530_38940C.1.pep
MEKKDKGRHRGRDGGGGGGGGGGGGGGGVDPAGGGSGGGGPGMGRRGSDARGQQAEAAAAAISGIATRLGFGCTINVGGGMPPQMEFLMACTDGDVARLKEVVDSMDEDDRQSLTSVRMEGYEPLFEAASSGKIDLCKYLVEELGFDVNAEANHDSGMTPLFCAVLDGQEITVKYFLDKGADPNKKDAAGFAPLHEAAKKGHVGIARLLLSKGASVDVSSSEGTPLHVAASNGKSSTVQILLEHRANIQRSQVDAKSFRNRVQVFYVPALPNVILPDCYTPLTAVLSATPEIVNESECLKCMKLLVKAGAIYNLATPDTPLKIATRNGLTECVAYLLEITTVKLSEHDKGSDGDRKSKLKLHGGKAFEEGDYAGAIIFYTEAMKLDPADATLYSNRSLCHLRSGAAQEALLDANDCIKLKPEWTKGHYRKGCAHMALKEYEEACTAFMAGTKLNPLNDEMQDAFWEAAKGMMYEHMAGKRVSSVD

SEQ ID NO: 137459 - protein, 525 aa, Oryza sativa
  Clone ID: PAT_MRT4530_38941C.1.pep
MGKKGKGRHRGRGGGGGGGGGGGGGGGGGGVGGDRGGGGSGGGGPGMGRRGSDARAQQAAAAAAAISGIATRLGFGCTVNVGGGMPPQMEFLMACTDGDVARLKGNAIVMGAVVCEASLDRVRNRLYLTMKSLTIVTALGMTPLFCAVLDGQEITVKYFLDKGADPNKKDAEGFAPLHEAAKIGNVGIARLLLSKGASVDVSSSEGTPLHVAASNGKSSIVLILLEHHANPNVMTPDCYTPLTAVLSATPEIVNESECLKCMKLLIKAGAHYKLATPDTPLEIATRNGLTECVAYLLEISTVVRLSEHDKGSDGDRKSKLKLHGGKAFEEGDYAGAIIFYTEFLCKYNFFNNPSPNYKQQRLAQKNPTPHIPHRRSMAVSASQLTSRILLSLLLSRNYCCVNKGRLSLNFQWHCHHVGDTLAMKLDPADATLYSNRSLCHLRSGAAQEALLDANDCIKLKPEWTKGYYRKGCAHMALKEYEEACTAFMAGTKLDPLSDEMQNAFWEAAKAMKNEYMAGRRVSSVD

SEQ ID NO: 137460 - protein, 172 aa, Oryza sativa
  Clone ID: PAT_MRT4530_38942C.1.pep
MDEDDRQSLTSVRMEGYEPLFEAASSGKIDLCKYLVEELGFDVNAEANHDSGMTPLFCAVLDGQEITVKYFLDKGADPNKKDAAGFAPLHEAAKKGHVGIARLLLSKGASVDVSSSEGTPLHVAASNGKSSTVQILLEHRANIQRSQVDAKSFRNRVQVFYVPALVCYCLTF

SEQ ID NO: 137461 - protein, 435 aa, Oryza sativa
  Clone ID: PAT_MRT4530_38943C.1.pep
MRGSMRGSAAAAAATVTRVAQRVVAPSAATPGGALPLSWLDRYPTQRALIESLHVFKGRADAAVAPAAAIERALAAALVSYYPIAGRLAERGDGGELVVDCTGEGVWFIEATASCSLEDVDYLEYPLMVDKDELLPHPTYPASESHPEDSLILLVQVTQFACGGFVVGFRFSHAVADGPGAAQFMTAVGEIARGRAAPALAPAWGRDAIPCPPSAAVGPLPVPTELRLQYLAMDISTDYIDHFKARFLEQTGHRCSAFEVLIAKAWQSRTRAAGFAPGSPVHVCFAMNARPVLRRALPDGFYGNCYYIMRVTAAAGAVADASVNDVVRLIREGKKRLPGEFARWSGGGGGGEDDPYRITSDYRTLLVSDWSRLGFAEVDYGWGAPVHVVPLTNLDYIATCILVRPSAHKPGARLITQCVAADAVDAFHNDMMRLD

SEQ ID NO: 137462 - protein, 101 aa, Oryza sativa
  Clone ID: PAT_MRT4530_38944C.1.pep
MAAGPSPAAVAGVAAGGVLGGSGWRGDGGRRPRRHDLAPRIFMADAAHPPRHRSPPLARRADAASPRRSCSGSASAEPQAPVEEPHGTGRRGERGCRRHRR

SEQ ID NO: 137463 - protein, 77 aa, Oryza sativa
  unsure (1)..(77): unsure at all Xaa locations
  Clone ID: PAT_MRT4530_38945C.1.pep
GSFHRCAAVGRRSGFFSXLLFYFLACYPIFLHFLVNLSSMEVCFLFPLDLGARLLRFLVCTVYEVVSWLYMQIVHMI

SEQ ID NO: 137464 - protein, 87 aa, Oryza sativa
  Clone ID: PAT_MRT4530_38946C.1.pep
MGTAGREAALRTVEPAAARSAEPADVGNDYDIATGLGDDHSGQILPGGHIRAREKTARAIRQQPWQGRLMGAAMNTRGSPEGVAPSR

SEQ ID NO: 137465 - protein, 48 aa, Oryza sativa
  Clone ID: PAT_MRT4530_38947C.1.pep
GKKVYMTQIEFGPLNDHLYSHSLSRWNSFRQVMVICAEIIVQSIVLVT

SEQ ID NO: 137466 - protein, 132 aa, Oryza sativa
  Clone ID: PAT_MRT4530_38948C.1.pep
MPEREGATVAAESPPPSQGCRTTGCSPPTGSGGGGRRDAGPPPPPLLDPVEGRALPATVEPYRGPMARKRRQWRSDRRVHASLTGQPYGRDGMLWVCRSRAAKAIFGQTELMAGACGGFVVERWSWARLNGK

SEQ ID NO: 137467 - protein, 72 aa, Oryza sativa
  Clone ID: PAT_MRT4530_38949C.1.pep
NNELKGQVAKLNKSLERCLKVDDDVASLHVKLKELVGDNFIVINPEVRRKIRLKCGRNMYPYKDGLGTSSKY

SEQ ID NO: 137468 - protein, 135 aa, Oryza sativa
  Clone ID: PAT_MRT4530_3894C.1.pep
MSSFSVVGIVCTASYSRGARRSMVTRWVARREKLVGQLRGVGSEEVHRLWELVEDLVGSVAHGKRILSAAAHAGRTSLAPTLLGGEAHRGLRTRGEARRLSHTRDGLGWLHARFQSFLPLLSHPSPSLQCPSPFR

SEQ ID NO: 137469 - protein, 50 aa, Oryza sativa
  Clone ID: PAT_MRT4530_38950C.1.pep
NYVYGIFGRIYAATHLVKSMMLHCHCVRLSGEAYISEPMAFLVQKKKKKK

SEQ ID NO: 137470 - protein, 514 aa, Oryza sativa
  Clone ID: PAT_MRT4530_38951C.1.pep
MLSTAASSAASPGPPTTAPSKPPSPPSARSSSPRSSHYREMGRGCGRWWWVAVALVVVAAAAAAEGAREEAAVAVAVAPRRHAYAAMMYMGTPRDYEFYVATRVMMRSLGRLGSDADRVVIASLDVPPRWVQALKDDGVKVVSVENLKNPYEKQGNFNMRFKLTLNKLYAWSLVSYDRVVMLDSDNIFLQNTDELFQCGQFCAVFINPCIFHTGLFVLQPSMDVFKNMLHELAVGRDNPDGADQGFLASYFPDLLDRPMFHPPVNGTKLEGTYRLPLGYQMDASYYYLKLRWSIPCGPNSVITFPSAPWFKPWYWWSWPVLPLGLSWHEQRRENLGYSSELPVVLIQALFYIGVIAVTRLARPSLSKMCYNRRMEKSTIVLLTTLRVVAAWSILAAYTIPFFLIPRTVHPLLGWPLYLLGAFSFSSIVINVFLLHPLAVLTTWLGIIGALFVMAFPWYLNGVVRALAVFAYAFCCAPLIWGSLVKTMSSLQILIERDAFRLGEPNQTAEFTKLY

SEQ ID NO: 137471 - protein, 179 aa, Oryza sativa
  Clone ID: PAT_MRT4530_38952C.1.pep
MRKDDGVKVVSVENLKNPYEKQGNFNMRFKLTLNKLYAWSLVSYDRVVMLDSDNIFLQNTDELFQCGQFCAVFINPCIFHTGLFVLQVGLLAIWVSPFFCKISFNFLHPSMDVFKNMLHELAVGRDNPDGADQGFLASYFPDLLDRPMFHPPVNGTKLEGTYRLPLGYQMDASYYCEYQ

SEQ ID NO: 137472 - protein, 57 aa, Oryza sativa
  Clone ID: PAT_MRT4530_38953C.1.pep
MAAPDVEYRCFVGGLAWATNDRSLEAAFSTFGEILESKIINYRETGRSLDIGILSFL

SEQ ID NO: 137473 - protein, 53 aa, Oryza sativa
  Clone ID: PAT_MRT4530_38954C.1.pep
KINFKTIILITHVKAVTISIFLQKYIFSKRSSLKISPLRQQIYTITRGVHTMI

SEQ ID NO: 137474 - protein, 62 aa, Oryza sativa
  Clone ID: PAT_MRT4530_38955C.1.pep
MGSVLTWSWIYSNDNEVMVALPVRLTRYDPSRAVPCLGQAMGLRSYGHLYLDQGSVLAGERR

SEQ ID NO: 137475 - protein, 121 aa, Oryza sativa
  unsure (1)..(121): unsure at all Xaa locations
  Clone ID: PAT_MRT4530_38956C.1.pep
LLNQLLIELDGAGERKGVFVIGATNRIDVIDDAALRPGRFGKKHYVPLPGADERVSILRALARNKPISSSVDLGALARREECKNLTGADLASMVNEAAMAALEERLEFLENGXSSMSSSSA

SEQ ID NO: 137476 - protein, 110 aa, Oryza sativa
  Clone ID: PAT_MRT4530_38957C.1.pep
QFQLAKGLEGPLLSSGARLRKFFMSVFFVAGSSTHLSDLGHFQAFSNSPCKKSSECTYISHLFMTDYTLCSYVLYFFNDTTHQYVSNIVCSYLLSSNSGLLTMLRFYIHN

SEQ ID NO: 137477 - protein, 110 aa, Oryza sativa
  Clone ID: PAT_MRT4530_38958C.1.pep
MALCVKANKAVSCTAARKQVARAGVARPVLARRMAVQASAQKESSPVAAQLTAGLTAAAATNMLMPLAAAAEVTPSLRNFIYSLVAGGAVLGAIALAITAVFNFDPVKRG

SEQ ID NO: 137478 - protein, 81 aa, Oryza sativa
  Clone ID: PAT_MRT4530_38959C.1.pep
MDQTHSVELVGVLGVQSAAVGRFAVPDDPVHLRPSRCAMSVAKSGVWKGVDAVAMPFLAVAGASFTPSSPFKRYRRMSNPQ

SEQ ID NO: 137479 - protein, 415 aa, Oryza sativa
  Clone ID: PAT_MRT4530_3895C.1.pep
MLMNTLSRSAASSSKREIWEGLELGRGVGGGLALRGGFRRRVLGAGGEAAAPAPAPVMAGLLQIHLDFGAVALLVVLKAAAGSAAPPTTTRSRSSSTVVAGMVFCDQCKDGARGLFDYPLYGARVAIECGGGESPVTVRECNTNWFGGFSVRMEGTPEMNRCTARVVQATGHCGAAIPTAPRDLTLAFRMLGLALYTVPPLLSQPLRPMDFCPSPLTSPSPPALALAPSPIPTPIIAPPPVSSPAPPLPPLWRRRPRRLPPIWRPTPPSLPVDTMPPPPPPPPPQPQGSACTFDKWADVGLHGCNWKVVTPNTTVAMAFGPAAAQRYGPDMTLREALDGRGDMYRTLLREATAALLNAYYNPSGSGFLYPTTASVIDHINAALLTPTLHKLLLEGARFRRANSDSNLPCHLTPCN

SEQ ID NO: 137480 - protein, 79 aa, Oryza sativa
  Clone ID: PAT_MRT4530_38960C.1.pep
MPVSLATIMVLVYLVHRSPAIDLPRPVLGYVHGSNSTASTRTGNGEDTSMTMTLDEQAKAATTNEYKLIMQRRHQEHNS

SEQ ID NO: 137481 - protein, 63 aa, Oryza sativa
  Clone ID: PAT_MRT4530_38961C.1.pep
GRKLYDPKAGGWEDLGMFDVMKILGRGGRPKFEKSGEGIIIGTQDKLVYYLRLLKSKFGIESK

SEQ ID NO: 137482 - protein, 148 aa, Oryza sativa
  unsure (1)..(148): unsure at all Xaa locations
  Clone ID: PAT_MRT4530_38962C.1.pep
QLLSLSDGERITSIVPVNEFGEDQYLVMLTVNGYIKKVPLNAFSAIRTSGIISIQLAPGDELKWVRRCGDDDLVALASQNGMVIVNTCNEAWADAXRALGRKTRGVLAMKLKEGDKMASMDIIPATSHNMPETYSRVRDLSPXHGCFS

SEQ ID NO: 137483 - protein, 648 aa, Oryza sativa
  Clone ID: PAT_MRT4530_38963C.1.pep
MVAQSELNRSICGTRIHELKSRLRVFHESKIISVRCSPGLTVELCLGCTLGTTCYSWRLPPPKRLVEVLSGDLSEEIVEEARRRLSGRANSMMGCRAFGLAQHGPSLIGPCLGRVCSPWGGTTRPDVSKPMQLNPKAITRRNKTKVKRWRCAEIVLNHLSNLVAIPSISHENYYFLGPVGNPDPTKFIISETNRIPFRLANPDLGHWKNTFKSWPSLEKTPPEKSWITWFMRMSASKRIHWDEIGIGQALDLTIANSAKDEPLMAAASYFWSNTINAFLFNQGPMTPTLIDITMITVLDVTSSANPMSLNTKNQYDFRTKSIGGWSGYVAAYMGQGSVTPREHVAFLLMWLEKFLFCGSSCGPTTNWQFVAEALESKRQFPLGKILLGYLYQMLNNASAKIAVGSVVGAGSIENIELARFRSRSFDRWWGEWKLHLFHQSASMYMKDLFPDVILQTIEFSPPNQSNSGMDIEYAPGLIPNGGPSPPVIGYHAPKTSTLLQGLIREPADTGKKRRTRSSAVDTSAPAPKKKDKLKKTKLTDDLPALDPSIEQALDEEEIGEDVHQAADEKKRIAVKKKSATTTLKPAPPPPPPPTSPVQQPSRDQTPTLTLCYLDNLYANTPYFAQKFAICNSYMCPPNFTMSKALMKL

SEQ ID NO: 137484 - protein, 661 aa, Oryza sativa
  unsure (1)..(661): unsure at all Xaa locations
  Clone ID: PAT_MRT4530_38964C.1.pep
MSSSASPPAAPSAEYAEHLSNLVAITSLSHGNYYFLGPVGNPDPTEFIIGETNRIPFRLANPDLGHXKNTFKSWPSLEKTSPEKSWITWFKRMSASKRVHWDEIGIGQALDLTIANSDKDEPLMAVASYFWSNTINAFLFNQGPMTPTLIDITMITGLDVTSSANSMSLNMKNQYDFRTKSIDGWSGYVAAYVGQGSVTPREHVAFLLMWLEEFLFCGLSCGPTTNWQFVAEALESKRQFPLGKILFGYLYQMLNNASAKIAIGSVVGAGGPWWLLQSWLNLMVMKFVNRPSVTEAEFPRLEPIVEDDGEERTHRRCTSYGEYATPADAGAKLSAELLKDWFCSFYDGFQKDARIWFSYEDSTLLENPSDFRFEDINHERYQKSREVFSPAISPCILLVGIHQGRNIQISYEFYHPMSAVRQLGMGQLPIGLFFANKIQCRGEISSTLMMDRLLNLQGPPLGSIENIELARFRSRSFDIWWGEWKLHLFHQPASMYMTDLFPDVIPQRMESSPPHQSNSGRDIEYALGLIPNGGGPSPPVIGYNAPKTSTLLQWLIREPADAGKNRRTRSSAVDTSAPAPKKKAKLKKTKPTDDLPALDPSIEQALDEEEIGEGIDQAADEKKRIAVKKKSETTTLKPAPKSQKFPDRWNEELERNADDSE

SEQ ID NO: 137485 - protein, 124 aa, Oryza sativa
  Clone ID: PAT_MRT4530_38965C.1.pep
GRELHLPQHPPHFHTFPLSQNQLHHTKCSSLLSPLSSPSSPLPSLLPTAAEATTPSALLRTTRSAVTVSSTVLSRFSAATAMATLTAARLTPLLALSSTLLSSTVSSSSRGPVALAARSSLSEC

SEQ ID NO: 137486 - protein, 101 aa, Oryza sativa
  Clone ID: PAT_MRT4530_38966C.1.pep
MRFAVTKVCGGGAKARAGMLQIAGSNIETPALLLSTRKGLPAFVSRDLLASLSLPDSLLLHVCPTHFMEGPPSKTISNIGGLHHMLGLPDHILIAAAGDSI

SEQ ID NO: 137487 - protein, 62 aa, Oryza sativa
  unsure (1)..(62): unsure at all Xaa locations
  Clone ID: PAT_MRT4530_38967C.1.pep
FLDREAXXTXRVEAFKLFGSFKXRXYLAPXLGGIXWVXSLVSLGWKLVNPGXTISTTTYXXR

SEQ ID NO: 137488 - protein, 85 aa, Oryza sativa
  unsure (1)..(85): unsure at all Xaa locations
  Clone ID: PAT_MRT4530_38968C.1.pep
VWDLSVEKPSHFINNGLGCXAEIAXQGDNCAQTIRKKLRIMVAGGDGTVGWVLGCLTDLYRLKREPVPPTGIIPLGTGNDLAKSF

SEQ ID NO: 137489 - protein, 78 aa, Oryza sativa
  Clone ID: PAT_MRT4530_38969C.1.pep
VAAVGLGPPTLYTPPYVSPNPTTLASSYQHKYSQPLISTPFPPLARHPPLPTCRNTQEALTPPPRQQFRIPNAYSNTP

SEQ ID NO: 137490 - protein, 100 aa, Oryza sativa
  unsure (1)..(100): unsure at all Xaa locations
  Clone ID: PAT_MRT4530_3896C.1.pep
MEFGWALXRPMRLPDSPRHERGLPVARXGTGVKPEVWCAWLKGVMRRILSRPLSDVDLNVNIVVCIPRPVLDGDFNAHSAWNSIREFLGLTVCMRLARVI

SEQ ID NO: 137491 - protein, 50 aa, Oryza sativa
  Clone ID: PAT_MRT4530_38970C.1.pep
LAYSAAARTTTVYCFRAHSLIYSRADLCPLAVWYNCSEEHCSSCRIPAAR

SEQ ID NO: 137492 - protein, 49 aa, Oryza sativa
  Clone ID: PAT_MRT4530_38971C.1.pep
TPSLFFFPTLGLQRRTKIWLTLYPQLPFCSVSVCQRDVPTIHVLIVDRA

SEQ ID NO: 137493 - protein, 523 aa, Oryza sativa
  Clone ID: PAT_MRT4530_38972C.1.pep
METLFSAILGELTSRSVSFLIDRCSSKPSSPPMAATFMEEKIQRLERMLLRLATAIEEAEGKHITNQAMLRQVNMLRQDMHKGYYALDTFRIQKHQEEDMNDDDDNEVSYNTLSLSKFNSIKRARVLTGTRRHGDMREFDQMVDIIEITMAGMAEFVMLLNNYPSMHRQPYNTYMFMDKCMFGRQMEMEHIIKFLLHPETPYSDIFDVLSIIGPAKVGKSTLVEHVCNDERVRNHFSRIIFLSDSDLSEQKSLLILRDSGVIRHKHNSSLASSGGERLLVVVELTEDVSDDEWRRMYSSSRSCISAGSKIIITSRSEKIAKLGTTQPLRLKFLSREAYWYFFKVLAFGSSDPKDYPEVASVSMAMFNGYFDREMYNTFIGPFIDLNNMATFIQASIYNGDWLSLRERFRTKESKSQLLPNKGSGDFGMKSKCVVIPRTDGNVNYYCEIFEHCRVELAHAEDQKAPKIGIQDILSGRVEPHGKFDLVLWRSHLPPYYSYIYSSEIHEFKSATTCRIRLRQKRKI

SEQ ID NO: 137494 - protein, 97 aa, Oryza sativa
  unsure (1)..(97): unsure at all Xaa locations
  Clone ID: PAT_MRT4530_38973C.1.pep
MWLNHWRKTVYMHHPRFLRLNHPYRQNTSDFDGMVEEGARPKFIIGSDIWDEVNDLEVLCGKGSGSTPASTSSGESPLWKKKSXLSYWKDSRHAVDV

SEQ ID NO: 137495 - protein, 525 aa, Oryza sativa
  Clone ID: PAT_MRT4530_38974C.1.pep
MMSSRLLKRACLLLLVSSWLCSLSDAKRKTPPSPPPPPSSFGLPVRAVCLGGWLVTEGWILPSLFDAIPNKDLLDGAQLQLKAVAADAYLTAADQGGAAAVVANRTQAAPSASETFKLWRINETTFNFRASSGRFVGAGSDGGAAVVAVAAAPGPSETFQVVRDDGDKSRVRIRAPNGHFLQIALGSNSVTADYYGESTSWGDDDPSVFVVTKVLELQGEYQICNGYGTAKATPILRNHWSTYIVEDDFKFISASGLTAVRIPVGWWIASDPNPPAPYVGGSLQTLDNAFKWAEKYKLGVIIDLHAAPGSQNPWEHSSSRDGTQEWGTSDANIAETVQVIDFLASRYAKSPSLLAVELMNEPFAPRATLESLMKYYHDGYNAVRKYSSTAYVIMSNRLGPHDPTEFLQFANGFPRAVIDVHYYTVFNDLFNNLTVQQNIDFIKSNFSSELKNVTTQNGPLTFVGEWVAEWRVPNATKEEYQRYAKVQMDVYGQATFGWSYWTLKNVNNHWNLEWMINNGYISLKT

SEQ ID NO: 137496 - protein, 135 aa, Oryza sativa
  Clone ID: PAT_MRT4530_38975C.1.pep
LSSDDEEEINHHPTHATSPPTNAAASSSAYRRAGLDNIPRLDSSSHPGPDFVAVDKLRMMPCCHTFHQRCIFDWLRLAAAMHLLSLPPPPLPTQHNRRMIRLGARSQGRSQGRNFFSLQKWLPLQQQTNHAQGNC

SEQ ID NO: 137497 - protein, 339 aa, Oryza sativa
  Clone ID: PAT_MRT4530_38976C.1.pep
MEEGGRRGIPSLLNSSSSDEHIATDITQLVGWTPLIELNRIVRKDGVNARIVGKLESYQPLCSVKDRSALRMIEDAEEKGLISPGVTTLVEPTSGNLGIGVAYNALLKGYRFVAVMPAEYSLDKQMLLTYLGAEVILTDPTLGFQGQLDKVEQIKNDMPNVHHLDQFKNAANPEAHFVWTGPEIWKDTAGKVDIFVAGSGTGGTISGVGKYLKMKNPAVKVICVEPAESPVISGGKPSRHKIQGMGPGFVPKNLDISIVDEIITVTAQDAMANAKRLAREEGLLVGISSGANLAACLKVASRKEYEGKMIVTIFPSGGERYMNSDLFAQAREECSAMTF

SEQ ID NO: 137498 - protein, 45 aa, Oryza sativa
  Clone ID: PAT_MRT4530_38977C.1.pep
DPRANAGSVHPCVGFDASVVAQSPVQAHQLTAHALPNERVDGHVV

SEQ ID NO: 137499 - protein, 718 aa, Oryza sativa
  Clone ID: PAT_MRT4530_38978C.1.pep
MAMAMALLLLLLLQLWSVEAQVAAPPPASCPDRCGDVSVPYPFGIRDGCHLPGFRLTCDATHTPPRLMLGNGTLQVVDISLANSTVRALDLAGAVNFTYDVSKLAPSGSGTWSSLGTVAGAGPYVVSEQRNRLVVTGCNVQATLAGENTNIIGGCSSFCPVSEMFTSVAATVPVVPGAGADNATDGGFICSGTSCCETPIAIGRPSYLVQFLSLDQNQELTGKLPVAVRIAERGWFEGVAGELLNTSSDSAAALRTPVPVVLEWVVSPTLEAVLQGVTGQFADDRNWSCPADAARSACRSSNSFCSNVTGNYRRGYVCRCRRGYGGNPYVAGGCQDIDECKLAGRCYGECTNTPGDYQCRCPRGARGDPRIPNGCVKTNLGLSVGIGVGSGAGLLVMGLGAAFLKRKVKKQRARMLRQKFFKQNRGHLLQQLVSQKADIAERMIIPLSELEKATNNFDKSRELGGGGHGTVYKGILSDLHVVAIKKSKEAVQREIDEFINEVAILSQINHRNVVKLFGCCLETEVPLLVYEFISNGTLYHHLHVEGPMSLPWEDRLRIATETARALAYLHSAVSFPIIHRDIKSHNILLDGSLTTKVSNFGASRCIPAEQTGITTVVQGTLGYLDPMYYYTGRLTEKSDVFSFGVVLIELLTRKKPYSYRSPDDESLVTHFTALLTQGNLGDILDPQVKEEGGEEVKEIAVLAVACAKLKVEERPTMR

SEQ ID NO: 137500 - protein, 403 aa, Oryza sativa
  unsure (1)..(403): unsure at all Xaa locations
  Clone ID: PAT_MRT4530_38979C.1.pep
MAPPPHSDSDLLKPRDVCIVGVARTPIGALLGSLSSLPATKLGSVAIQAALRRANVEPALVQEVFMGNVLSANLGQAPARQAALGAGLPDTVPCTTVNKVCSSGMKAVMLAAQTIQLGMHDVVVAGGMESMSNAPKYVAAARRGSRFGHDVLIDGMLKDGLWDVYNDFPMGMCAELCADQHSISREEQDLYAIQSNERAIAARDSGTFSWEIAPVEISSGRGKPPLIVDKDESLAKCTSLPSRLPSKIRSDGAAAIVLVSGQKAKSLGLQVIARIRGYADAAQAPELFTTTPALAIPKAVSNAGLQTSQIDYYEINEAFSVVALANQKLLGIPSGKLNLSGGGVSLGHPIGCSGARIIVTLLGILRHKNGKIGVAGVCNGGGGASALVVELXKQPSLFTRSSL

SEQ ID NO: 137501 - protein, 517 aa, Oryza sativa
  unsure (1)..(517): unsure at all Xaa locations
  Clone ID: PAT_MRT4530_3897C.1.pep
MRTPHVNLKDRGRPANDCRHRYTGTGADNRTTGTGDTERMRTVQRXRDPYHHATRRGNDNDERARRRRPGTTETNGEGTTSAAILGRRRDAAGTRLXDAEPRTKTTTGAAATLMKHRGRTRTARRRDERHDDRERRKDDDDDXRGRRGGDEGSWQRLHGDEDGVEHAAAMTMTVATQRDDEPGDRQDXTTRTNGDDDDGPRRGLDGGETMPRTTLPLRCRKGRRRRRPXALARNSSRPGEGMYWMPARTSFRRDLGKEEVRTGEWTTSQCRGRWWRRRPAHGRRGRGGRRRNSGVAATVAGGGASPAXFPTNRRRRRGRGCTCEAEGEDGAAGRCSGEEGEAAGGRPAPEREKEKAGRGGWGREPATGEVGTAAVKAAGGHGRWPELARAFRAGLNGADLEEERRXRLHGREKRPAGXEGDDDRVGGTHRSGARRQRACGARAHATGSGRGRLGPGGRPRRXRPGRKKGGEGAWPGGGGEAXEEGKRGRRGRLWAXAEREREDFGPDLAQREEGDYF

SEQ ID NO: 137502 - protein, 545 aa, Oryza sativa
  Clone ID: PAT_MRT4530_38980C.1.pep
MEAGTWAVVVAAVAAYMAWFWRMSRGLSGPRVWPVVGSLPGLVRHAEDMHEWIAANLRRTRGTYQTCIFAVPGLARRGGLVTVTCDPRNLEHVLKSRFDNYPKGPFWHGVFGDLLGDGIFNSDGETWVAQRKTAALEFTTRTLRTAMSRWVSRSIHSRLLPILSDAAAAGGGGGGATVDLQDLLLRLTFDNICGLAFGKDPETLARGLPENDFASAFDRATEATLNRFIFPECVWRFKKWMGLGMETTLARSVQHVDRYLSAVIKARKLELAAGNGKGDASSATPHDDLLSRFMRKGTYSDESLQHVALNFILAGRDTSSVALSWFFWLVSTHPAVERKIVRELCTVLAASRGADDPALWLAAPLNFEELDQLVYLKAALSETLRLYPSVPEDSKHVVADDVLPDGTFVPAGSSVTYSIYSAGRMKTVWGDDCLEFRPERWLSADGTKFEPHDSFRFVAFNAGPRICLGKDLAYLQMRNIAGSVLLRHRLAVAPGHRVEQKMSLTLFMKHGLRMEVRPRDLAPIVDELRGAGEYAAAARATAACA

SEQ ID NO: 137503 - protein, 988 aa, Oryza sativa
  Clone ID: PAT_MRT4530_38981C.1.pep
MARRSCFFFLLPLLVAALAGSPVVTAQRNALPAAAAAAASVRVGVILNLTSAVGVRRRVGIQMAVEDYYAANPGSATRVELHFRDSAGDVLPAASAAVDLIKNVQVQAMIGPPSSAATEFVAHIGSHSRVPVLSYSATSPSLSPAQTPFFVRAAVNDSFQAAPVAAVLDAFRWRAAAVVYEDSPYGSGILPALADALQGAGAKIMDRTAVPVDATDDRLDALLYRLRAMPTRVFVVHMLHNVAGRLFRRAKMLGMMSDGYIWVATDGVATFMDRFSPEEVDAMQGVVSLRPYVQETDAVKNFSARFKARLRRDHPTVDDVREPTVLRFWAYDTAWAIAAAAESAGVAGPAFQTPQTSAPLTDLDRLGVSATGTALLNAVLSTTFDGLAGKFRLVDGQLQPPAYEVVNIIGKGARTVGFWTPEFGITQDLNAGSAKTLRQILWPGEPRDTPRGWTVSPSGLPLRVSVPTKRGFTQFVDVGNVTATGRRNITGYCIDVFDEVMKIMPYPVSYVYDPYPDSPESYEKLVDQVSSQKADAVVGDVTITASRMEEVDFTMPFTESGWSMVVAVQKETSTSMWIFLQPLTTSLWLASLAFFCFTGFVVWVIEHRINEEFRGTPWQQFGLIFYFSFSTLVFSHKEKLESNLSRFVVIIWVFVVLILTSSYTASLTSMLTVQKLQPTVTDVRELLRRGDYIGFQEGTFIVPVLEKMGFEGRMRSYSTVDQYADALSKGSANGGVAAIFDEIPYLKLFLSQYCNGYTMVGPIYKTDGFGFVFPRGSPMVADVSRAILTLAEGEKMAQIEKKWFGEPGACQSQGSAVGSSNLSFRSFGGLFLITGVVTSAMLLIYLAVFFYRERDELRAAEAAAAASGSGSGSGSRSLRRLRAWARHYDQKDLKSPTFKRRWSDESVRNGSEYAASRTPRWGDESPCNVAGAADADAGRIPEEVVGGMSPFSISTSSEERNGAVSPAAAEFDNSSDRAAVVAGTSQPR

SEQ ID NO: 137504 - protein, 66 aa, Oryza sativa
  unsure (1)..(66): unsure at all Xaa locations
  Clone ID: PAT_MRT4530_38982C.1.pep
PGRGINPARTLGPPVLYNQHPAXKTPWIFWVGPVIGAFLGGGYPKLVLPGKPPKALSLFRSTSGTG

SEQ ID NO: 137505 - protein, 94 aa, Oryza sativa
  Clone ID: PAT_MRT4530_38983C.1.pep
CLSCPKSHHWPLPLLGTYTPPSHSLTPSQLYTLHNHHTHTDLLPLLYSPKILQTTHRETDYLYAKTLDKIDDTPKGCNLRNGVLTLDHLQFPIR

SEQ ID NO: 137506 - protein, 35 aa, Oryza sativa
  Clone ID: PAT_MRT4530_38984C.1.pep
IRDIASMVVASLFISPLVVIRCSFLEEKVVFKSSG

SEQ ID NO: 137507 - protein, 56 aa, Oryza sativa
  Clone ID: PAT_MRT4530_38985C.1.pep
SFRQNQVIFFATNSNRMGSSRYEGARTFQVSWSVGKTVDTGQPAHKGALPDIVLDR

SEQ ID NO: 137508 - protein, 91 aa, Oryza sativa
  Clone ID: PAT_MRT4530_38986C.1.pep
LQEFGTRLRSASRRGPSPACSRPTTPLPGRDRLSISSPRTWSADNYPPAHGWPASSSPAGTDEDQDQEGGCPTPMTLLVTQGDAEAKGRTG

SEQ ID NO: 137509 - protein, 1142 aa, Oryza sativa
  Clone ID: PAT_MRT4530_38987C.1.pep
MEPDPQQAKIRQGPSIKARFEVLILKGKFNHVKFLLFAGGRVLFVLVNMLEKIGLPPKPSMRGASWVVDATHCQGCSVQFSLFTRKHHCQRCGGLFCSNCTQQRMVLRGQGDSPVRICDPCKKLEEAARYELRYGHKNRASKANAKAASNPEDDVLSEILGGDGMQTKFSRRESLDPELPGASSSSSSSRRTSGAFSMDGNGGESLSIEAQNYELNNTGSIFTPEELRQQAVEEKKKYKTLKSEGKPEEALRAFKHGKELERQAAALGLELRKNRRMATKAPSVSAVVSTKNLEGSDEAESKKSLPGKRVRKEKNDLASELKDLGWSDADLHDETRTTAMSVEGELSQILREVTPKSSEGNKTSSIDKSQVNALKRQALLLKREGKLAEAKEELKKAKILERQLEEQEILGEADESDDDLAALIRNMDDGNQDDILLDNPRFPDFNFEKLLGTSDDLLIDGNFDITDDDMNDPDMTAALKSFGWSEEDEIQMEGHGPVSSLNQEALKEQVLALKREAIAQKKAGNVAEAMSLLRKAKLLEKDLETEQSESKVPSPQGHRSTRTEDITVAEMNTRPVSAPKSKLAIQRELLALKKKALALRREGKVDEAEEELKKGSVLEKQLEDLENSSARPVVKENRNFGSTPPYKVEPPTLDLADEGYEPEVTDNDMQDPALLSVLKNMGWEDEDADTASIINMPSNSSRIVSQKPTKSKGQIQKELLAIKRKALAFRREGKNTEAEEELEKAKVLEQQLSEMEESVNLTASQQSARSAGQIRGNKSGALLDPASSPDTSAHLPKLRNATEGVISLPVHAAELAASLDAQASSQSIPPTELIIPKPDHASKVHSEGTRSTLSRPSFTDPLVTAERLHSPSDVHDHKEPQIPHGHDTLKDEILHHKRKAVAFKREGKMAEAREELKQAKLLEKRLEVSQENSANGRDESMKPVVQETNLIQQSASAKSCTDDISSAPPAQEIKPVQPPKALSSRDRLKIQRESLAHKRNALKLRREGKTAEADAEFELAKSLESQLEESESQVSGGKSSDANDAAVEDLLDPQIMSALKSIGWSDADLSAQSSNAQPSKKAEAKPTVAATTKPQSEKTQLEEHIKAEKLKALNLKREGKQTEALEALRSAKRLEKKLASLA

SEQ ID NO: 137510 - protein, 803 aa, Oryza sativa
  Clone ID: PAT_MRT4530_38988C.1.pep
MASRMALRPNDVTLRLTPPLAAAARRNRRAAAGGVRVYAVASGAVSTKVENKKPFAPPREVHVQVTHSMPPQKIEIFKSLDDWARDNILSHLKPVEKCWQPQDFLPDPASDGFHDEVKELRERAKEIPDDYFVCLVGDMITEEALPTYQTMLNTLDGVRDETGASPTAWAVWTRAWTAEENRHGDLLNKYLYLTGRVDMRQIEKTIQYLIGSGMDPRTENNPYLGFIYTSFQERATFISHGNTARHAKDFGDLKLAQICGIIASDEKRHETAYTKIVEKLFEIDPDGTVLAFADMMKKKISMPAHLMFDGEDDKLFEHFSMVAQRLGVYTAKDYADILEFLVSRWKISDLTGLSSEGNKAQDYLCTLAARIRRLDERAQSRAKKAVLLLSVLVETHFENNTRSDKVSGNMWTSLFALLTILISEINREYAIMLIRLLLGSPEPEKKKKMIGWGDVYKVVAATVPLYFALFLGYGSVRWWRIFTREQCDAVNRLVAFFALPFFTFEFTLHTDPFQVNYRAVAADVISKAVIVAVIGAWARFMSKGGCAVSWSITSFSLSTLTNSLVVGVPMARAMYGEWAQQLVVQLSVFQAIVWLTLLLFVLEVRKAAIGMYVDGAEAAAAAGKDVEAAGAAAAAGTVVVAAAAGKPSLWALVKVVAHKLARNPNTYASFVGITWACLANRLHIALPSAFEGSVLIMSKSGTGMAMFSMGLFMAQQEKIIACGTSFAALGLVLKFALGPAAMAIGSIAVGLRGDAALPQSITSFIFAKEYGLHADVLSTAVIFGMLVSLPLLVGFYIVLELIR

SEQ ID NO: 137511 - protein, 123 aa, Oryza sativa
  Clone ID: PAT_MRT4530_38989C.1.pep
MIGWGDVYKVVAATVPLYFALFLGYGSVRWWRIFTREQCDAVNRLVAFFALPFFTFEFTLHTDPFQVNYRAVAADVISKAVIVAVIGAWARFMSKGGCAVSWSITSFSLSTLTNSLVVGVPMA

SEQ ID NO: 137512 - protein, 188 aa, Oryza sativa
  Clone ID: PAT_MRT4530_3898C.1.pep
MSHAGLWLPPQFLAGDPDTTLSNSDFSFPSEFPYEFGLSSPESSDDGEEDFFAGLSRRLGQTSLHETRKQLSSTVSEIPRKTQGLVGSPQSTLAGIGSWSGRSAVSGDGSPNGYSRVPSPSTTPFDENNDPWEVIYAAAVQIARMKMNNNNNRVPAQYDFHNNRRLLTHHCPNRSFNQVVRAKQQCGS

SEQ ID NO: 137513 - protein, 400 aa, Oryza sativa
  Clone ID: PAT_MRT4530_38990C.1.pep
MASRMALRPNDVTLRLTPPLAAAARRNRRAAAGGVRVYAVASGAVSTKVENKKPFAPPREVHVQVTHSMPPQKIEIFKSLDDWARDNILSHLKPVEKCWQPQDFLPDPASDGFHDEVKELRERAKEIPDDYFVCLVGDMITEEALPTYQTMLNTLDGVRDETGASPTAWAVWTRAWTAEENRHGDLLNKYLYLTGRVDMRQIEKTIQYLIGSGMDPRTENNPYLGFIYTSFQERATFISHGNTARHAKDFGDLKLAQICGIIASDEKRHETAYTKIVEKLFEIDPDGTVLAFADMMKKKISMPAHLMFDGEDDKLFEHFSMVAQRLGVYTAKDYADILEFLVSRWKISDLTGLSSEGNKAQDYLCTLAARIRRLDERAQSRAKKAGTLPFSWVYGREVQL

SEQ ID NO: 137514 - protein, 130 aa, Oryza sativa
  unsure (1)..(130): unsure at all Xaa locations
  Clone ID: PAT_MRT4530_38991C.1.pep
VHIAFRAPSRNRLIMSKSGTGMXMFSMGLFMAQPGXRSFACGTSFAALGLVLKFALGPAAMAIGSIAVGLRGDVLRVAIIQAALPQSITSFIFAKEYGLHADVLSTAVIFGMLVSLPLLVGFYIVLELIR

SEQ ID NO: 137515 - protein, 81 aa, Oryza sativa
  Clone ID: PAT_MRT4530_38992C.1.pep
MAIVAEVEAGQIREGPEAQGVQPSHKMGTREGDPRDGISCRGSSMSSLAPWNVAAVEKGRHLSSQRCATPRQWRRRSGPMA

SEQ ID NO: 137516 - protein, 117 aa, Oryza sativa
  Clone ID: PAT_MRT4530_38993C.1.pep
MAGGMAARAPTLLLFWPLWIGAVRQLKRLLSSSSGPIPIHPAPVPPYRRIPTSATASGSGRARFRWLISQRANDDEVVRGATRIDAISVANPCITDAIILLYYNFKILKIVIVDALS

SEQ ID NO: 137517 - protein, 972 aa, Oryza sativa
  Clone ID: PAT_MRT4530_38994C.1.pep
MLLLLLFALTLGHGARSAAPLPRRGTSLRAQVAALLHWKSTLKGFSQHQLGTWRHDIHPCNWTGITCGDVPWRQRRHGRTTARNAITGIALPGAHLVGGLDTLSFRSFPYLASLDLSDNGHLSGTIPPGISSLLMLSSLNLSSNQLTGNIPPSIGDLGRISSIDLSYNNLTGEIPPALGNLTKLTYLSLLGNKLSGNIPWQLGKLHDISFIDLSLNLLVGPILSLFGNLTKLTSLFLVGNHLSGPIPDELGEIQTLQYLDLQQNNLNGSITSTLGNLTMLKILYIYLNQHTGTIPQVFGMLSSLVELDLSENHLTGSIPSSVGNLTSSVYFSLWGNHITGSIPQEIGNLVNLQQLDLSVNFITGPVPSTIGNMSSLNYILINSNNLSAPIPEEFGNLASLISFASYENQLSGPIPPSLGKLESVSEILLFSNQLSGQLPPALFNLTNLIDIELDKNYLVGPLPDLCRGKKLEILHLSHNNLNGSMPKTLRDCISLRSLGISYNKMDGDITDALGVYPHLWRLTGEIPPEIGKLVNLNLIDLRNNQLSGKVPNQIGQLKSLEILDFSSNQLSGAIPDDLGNCFKLQSLKMSNNSLNGSIPSTLGHFLSLQSMLDLSQNNLSGPIPSELGMLEMLMYVNLSHNQFSGAIPGSIASMQSLSVFDVSYNVLEGPIPRPLHNASAKWFVHNKGLCGELAGLSHCYLPPYHRKTRLKLIVEVSAPVFLAIISIVATVFLLSVCRKKLSQENNNVVKKNDIFSVWSFDGKMAFDDIISATDNFDEKHCIGEGAYGRVYKAELEDKQVFAVKKLHPDDEDTVHDEERFQIEIEMLAKIRHRSIVKLYGFCCHPRAYVSDFGIARILKPDSSNWSALAGTYGYIAPELSYTSLVTEKCDVYSFGVVVLEVLMGKHPGDIQSSITTSKYDDFLDEILDKRLPVPADDEADDVNRCLSVAFDCLLPSPQERPTMCQVYQRLAI

SEQ ID NO: 137518 - protein, 51 aa, Oryza sativa
  Clone ID: PAT_MRT4530_38995C.1.pep
QKPLDRFCLNPGFHDLPPFLLRGIPCSPADLWFVLFSTNPHRAFKSNEPYL

SEQ ID NO: 137519 - protein, 34 aa, Oryza sativa
  Clone ID: PAT_MRT4530_38996C.1.pep
RTTGGLDMDSHSHRSMPTSANANAAPPSSSFSSV

SEQ ID NO: 137520 - protein, 102 aa, Oryza sativa
  Clone ID: PAT_MRT4530_38997C.1.pep
GARCCRCSRRRASSSSRLLPRAAGLRSQARPRRRRRENKKAGGSAASSSTSKASGGISPAAPTPANAGTRTRHRAALRRRPAAAGAPAARTPSSDGTATSGR

SEQ ID NO: 137521 - protein, 125 aa, Oryza sativa
  Clone ID: PAT_MRT4530_38998C.1.pep
FWVVFFFFFFFFFFFFFCTPHNKIPPALGGLFFSQAKKGTRGHIIRMGPTYKGGEGKTKGNPFSQLALTGGGGPEKPPPRFIFSINKAYRVFRVGGHGIPWEGKGFSWGLALGGIRGKTPVVEPP

SEQ ID NO: 137522 - protein, 140 aa, Oryza sativa
  Clone ID: PAT_MRT4530_38999C.1.pep
GARCCRCSRRRASSSSPPPSARRRSPIPSPAAPTPSRGGTRARKPAVRQRRRRRLAPAARSPAAPTLANAGTRTRTRKPAARQPRRRRRREPAAVAPGAPTPANAGTRTRHPAALRRRPAATGAPAAPTPSSAGTAASGR

SEQ ID NO: 137523 - protein, 75 aa, Oryza sativa
  Clone ID: PAT_MRT4530_3899C.1.pep
MVVHPSVSPTTGPPTTTPRAPARHSSSPNSAPHLPSTRFPIQISSASRFATAHPPHRAPSLSNRFDMGIRAKDGI

SEQ ID NO: 137524 - protein, 161 aa, Oryza sativa
  unsure (1)..(161): unsure at all Xaa locations
  Clone ID: PAT_MRT4530_389C.1.pep
LLTKVPLIENTEDLEDFESVFINLSTLQSATANFDESNRLGEGGFGVVFKGVLPGGQEVAVKRLSNCSIQGLGQLKNELSLVAKLQHKNLVRLIGVCLXRRREDPDKSKQLDWGKRYMILNGIARGLQYLHEHSQLKIIHRDLKASNVLLDADMKPKIADF

SEQ ID NO: 137525 - protein, 82 aa, Oryza sativa
  Clone ID: PAT_MRT4530_38C.1.pep
MRGRVTFVPWASSGAPDGAASWCWRIHWRRRDRLESGRRLSWRVEGPKQRGGDRATGRQAGEVTSLVASAWRLDRERDEGLG

SEQ ID NO: 137526 - protein, 343 aa, Oryza sativa
  unsure (1)..(343): unsure at all Xaa locations
  Clone ID: PAT_MRT4530_39000C.1.pep
MEQTEPIPPKDSLETAVEQKLFPAHDDGSSFTIFRVPAHIREENKKLYEPQLVSIGPYYRGRDALRAMEQHKLRLLRHFLQRAATVPLSDFVRAVRAVERRARCCYSERTSVFDGYFILEFFFKWNRGEPDPLCDVGWGLTLLHSDLLLLENQIPFFVLERLFDTFFRGAVTQDNLVKILLIQLKLNGTVVPRQPLRPEFTGQFDHLLHLLHDKFVPKLEELELPAVTNGSPSPSPPRLLLIPCVSLLREAGVTFRKKRSPRDMFDVTFDRKRGVMELLRIEIHLANLTQLMNLIAFEQSRGTTRRDSXPLTSYSALMSSLVRSGQDVSVLQRELFGSLEFSP

SEQ ID NO: 137527 - protein, 362 aa, Oryza sativa
  Clone ID: PAT_MRT4530_39001C.1.pep
MAIATESQQAQVQAAATDAVAAAAVGRKVVDEVSGWLRVFDDGTVDRTWTGPPEVLPLMQPVPAYAEPRDGHTLHDLPGEPNLRVYLPEVALAERRLPVVVQLHGGGFCISHPSWLMYHHFYARLACALPAVVVAVELPLAPERRLPAHIDTGVDGLRRLRSIALSDAAALGDPAAELLRTAADFSRVFLIGDSSGGNLVHHVGARVGEDGADSWAPLRVAGGIPLHPGFVHATRSKSELEPRPDSVFFTLDMLDKFLAMALPEGATKDHPYTCPMGPNAPPLESVPLPPLLVAVAEHDLIRDTNLEYCDALRTAGKDVEVLVNRGMSHSFYLNKYAVDMDPATGERTRELVDAIKSFVDRH

SEQ ID NO: 137528 - protein, 185 aa, Oryza sativa
  Clone ID: PAT_MRT4530_39002C.1.pep
MADIVSDVFLSFFCCCYYPPGGHRGVGAHNDTALRRRRGGAGRSSSRPPVSLQTVELKVRMCCEGCERVVRSALANLRGVDSVEVDVAMEKVRVTGYVDRGRVLREVRRSGKKAEFWPSGGTPRRFTSEKEYFRDGEAYRGSYNYHRRGYGDGDRHGWMREPARGADAVSNMFNDDDVSAACAIM

SEQ ID NO: 137529 - protein, 97 aa, Oryza sativa
  Clone ID: PAT_MRT4530_39003C.1.pep
YQLLEPSIKERDAEYESLTYSSELYVSTRLIFCFDMQKKTISNGSIPIMNSLATFIINGIYQIVINQILLSPGIYYRSELDHKGISIYTGTIILDWG

SEQ ID NO: 137530 - protein, 138 aa, Oryza sativa
  Clone ID: PAT_MRT4530_39004C.1.pep
MAGRASCVLILLLAIAGFADVLAAGGATPSSSSSQVSTTTAAELKEVNGMLACMIGCFTQMFGCAFGCMAKGPDTTLCVVSCNQNSIVCMVRCALTPPPPKPKPTPPPPAPTPKPPAPSPSPPPPKAAGHGVAGDPLA

SEQ ID NO: 137531 - protein, 223 aa, Oryza sativa
  unsure (1)..(223): unsure at all Xaa locations
  Clone ID: PAT_MRT4530_39005C.1.pep
MAGGRRWGGWREQEPPRRAGSSAAVQRFHRSVIKSFSYLLRDVAIAAGLLNFALXASLSSLQASSGRLVAWPFYWAAQGCFLFVVWIIAHECGHHALQDDTLGLVLHLWLLAPYFSWKYSHQRHHSNTSSQERDEVFVPRFKSDLPWNSPYVYKYNNXPVARLLLLGMQLTVGWPMYLVFNTWGRWYPRFASHFDPSGAIYMRRERVFIAISDIGMLAVSLAL

SEQ ID NO: 137532 - protein, 26 aa, Oryza sativa
  Clone ID: PAT_MRT4530_39006C.1.pep
ACITWTSKSLVLHFGILLALIGCNVY

SEQ ID NO: 137533 - protein, 55 aa, Oryza sativa
  unsure (1)..(55): unsure at all Xaa locations
  Clone ID: PAT_MRT4530_39007C.1.pep
VSVSRYRHGCGVVPGRVVLVVQKCKRSPSVPIKIKIKIKIKNXSKPQGVVPVLGE

SEQ ID NO: 137534 - protein, 68 aa, Oryza sativa
  Clone ID: PAT_MRT4530_39008C.1.pep
NLTRSDHHSAPVHGAQAQQRRGLRRRRRRTAGGMRMQGELAACRPDGVVQPPSPAGPGEPSHTRHVTP

SEQ ID NO: 137535 - protein, 69 aa, Oryza sativa
  Clone ID: PAT_MRT4530_39009C.1.pep
QYSRDREGIIRYNADAELASNVKTVVSEHIIPYNDEPANNVKTIVSDFYSKDLSSVSSYIVFNVQADPS

SEQ ID NO: 137536 - protein, 286 aa, Oryza sativa
  unsure (1)..(286): unsure at all Xaa locations
  Clone ID: PAT_MRT4530_3900C.1.pep
XSHVPSGMITLRKRAFRYLKQGDLTVTEYLHEFYRLARYAPEDVETDEEKQEKFLQGLKDELAVQLLLEDYENFEKLVDKAMQLESEHNRMTNCKRRIVNILVFPGGNQRQRTEPLPIIGSSVGYHEFLPQEDERNVDNNNIIHQDIDDSINEGTQNGNPSNFDSEKDSKGDSNNGTTDADVSKDFQPPIPTPSQDDRSQADNSAKKTLICYNCKEPGHFSRDCPQPKRNLRHHSGHYARRRQVTRLVVTGANAVPVSLKGSKPKDLIVTRSIHNSRSEEYLVDKV

SEQ ID NO: 137537 - protein, 63 aa, Oryza sativa
  Clone ID: PAT_MRT4530_39010C.1.pep
TSFKKFFSKNLKGRNFRGGEKFLKKKKIAPTWVGSPNKYSSTSQGCFLPNRIHTPQGRPPPRD

SEQ ID NO: 137538 - protein, 151 aa, Oryza sativa
  Clone ID: PAT_MRT4530_39011C.1.pep
MSTTVGDLLLLQGFAEMGLRDGFSDNILLDNFSYGGSNLTRVRAPIIAEPSSSTTWSIEIIQASSSAAYQKMSDHMISNEYAARYIRHISTKAKPARCKPRSSCLAPTLCRLASRSCPARAAPHTPHARTSSHEDEQTNECPDDTSSFPLA

SEQ ID NO: 137539 - protein, 124 aa, Oryza sativa
  unsure (1)..(124): unsure at all Xaa locations
  Clone ID: PAT_MRT4530_39012C.1.pep
RRTELQNELTADEYYNLMADEREDLVQSTLRALVKVTKDKECVARRYNKKVVPXSFSEGELFWKLILPIGTRDNKFGKWSPNWEGPFQIHKVVSKGAYMLQGLDGEVYGRALNGKYLKKYYPSV

SEQ ID NO: 137540 - protein, 332 aa, Oryza sativa
  unsure (1)..(332): unsure at all Xaa locations
  Clone ID: PAT_MRT4530_39013C.1.pep
MRERGRQIRLGSSDAWTVGDGVSGTGEGGSGGRGGGDWLWAATAAGLGGGGHGSSGFAARGNRRCGSIGGGLGRGGSAAEEVGDGDAGSTARGHGKASTGGGLGRGGSATEEVGDGDVGSSTRGYGRGRSAAEEVGHGDAGSTARGHGRGRSIDGSLGRGGSATEERGGSTGNGLGRGRSSAEEVGDGDAGSTARGHGRSGSTGGALGRGRSIAEEVGDGGSSVLGGDVAAAGAGQTGLGEGGGGGDGGGGGGAAAAATGGDGGGGGGEGRGGRRCRGASXGGRAGGGGGGNLGGGCGGAXPRGVGRGRGGGFRSVLGGGEGADRGGGWPGG

SEQ ID NO: 137541 - protein, 809 aa, Oryza sativa
  unsure (1)..(809): unsure at all Xaa locations
  Clone ID: PAT_MRT4530_39014C.1.pep
IYIYITVQNRVIKPVHSTSLEHEGELISEEGELKEHIIAFYKELFWAKPPSKTHLSQDFWTDSHHLTEEESAWIIRPFTLEELDNVIKEAKLNTAPGPDGFHVQFYKTFWQELRGDLFEMLILLHNNELNLKRLNYGIISLIHKIKEAANIKQYRPICVLNDCFKFLAKVVTNRLTVVANNEISHTQTAFIPGRFILEGCITLHETLHELHKHNLKGVVFKIDFEKAYNRVSWDFLFEVLDRKKFPPSWINWIKACXKAAGEGRMCVNINGERSEFFRTYRGLRQGDPLSPLLFNLVSDALAKIFEDAKAANLLSGLIPHLIPGGLTHLQYADDTVIFIPFIDREIVITKFLLYCFEELSGMKINYQXSVANMLNCPLGEFPMMYLGLPISPNKLLNADLDFLPQKLVKKLGFWKTCSLYYSGRAVLINSCLSSIPTYAMGLYLLPEGIHQKMDSIRGKFYWAGLSSKRKYHMIRWRNLAFPKEFGGLGFTETRAFNIALLAKWIFKLESKEKSLCLDLLRNKYMRDRGFFYGSEVGISQFWRGLLNIIKWFVLGGEWALGKGDHILFWDDVWIGNCPPRIRFLGLYEICNQQRIIVKEVAQEGLECLTFRRLFGNVELTEWSYLXLTQEIACTDEADVLKWVHGKNGVYTSKSLYQLLNFRGILDPKMNMLWRLPIPLKQKHFLXLAMKDRIQTTEQLXQKNWEGLEACELCGVTENAQHVIFTCPMASFIWCFARDGFSWNFVPSSFDHFFASMLKPNDNSHNTLSWMFLAAVSWQLWLTRNDMIFRDKLIGSPLTIIYRVISLLQH

SEQ ID NO: 137542 - protein, 233 aa, Oryza sativa
  unsure (1)..(233): unsure at all Xaa locations
  Clone ID: PAT_MRT4530_39015C.1.pep
TLFPTSTTLDPPSPTSSAMDLPLPRAPPVDPLLPWPLAVDPASPSPTSSAEDLPLPRPLPVDPPLSWSLAVDPASPSLTSSVADPPLPRLPSMDLPLPWPLAVDPASPCPTSSAADRPLPXPLVLDPTSPSPTSSVADPPLPRPPPVDAFPWPLAVDPASPSPTSSAADPPLPRPPPMDPHLLLPLAANPLLPWPPPPKPAAVAAQSQSPPPRPPEAVAAMYGERQREGGVAK

SEQ ID NO: 137543 - protein, 85 aa, Oryza sativa
  unsure (1)..(85): unsure at all Xaa locations
  Clone ID: PAT_MRT4530_39016C.1.pep
GQKQSSSTNFYEHEETSEGMDLMGGASVDMNFRSSGLNSAKKMMENMGWKEGEALXEEHKGNLRNCGKLVTEEREKIVNIPDGSN

SEQ ID NO: 137544 - protein, 42 aa, Oryza sativa
  Clone ID: PAT_MRT4530_39017C.1.pep
HLGAKMHYDGKGLLLDSILKQLRPSTSPDPMTRRRLVGHHRS

SEQ ID NO: 137545 - protein, 68 aa, Oryza sativa
  Clone ID: PAT_MRT4530_39018C.1.pep
METVSTLWLQAQLTVYASPCSSYYCNKSRAPGLSMTLLLLRMHNASGTHLFYINYSSSNFNAQLGRKM

SEQ ID NO: 137546 - protein, 400 aa, Oryza sativa
  Clone ID: PAT_MRT4530_39019C.1.pep
MADVTGGHSSPPAAAAETLPDDVLAEILLRLPPHPSFLSSASLVSKRWLRHTRNPSFLRRFREFHRTAPVLGFFLNSSHGALFFPTDAPLCRIADQVASLRRNTGDGLWWLVGCRHGRVLLRSCDWANLLVWDPMTEGFVCFPAPIQMVQADADRDAAVFCAASAGDEDRRSGAFNVAVVFVSGDHVFGCMFSSAIGAWGDVISTPVTLPLLMIYDEPAALAGEALYWIVNGSSLLEFNCGSQSLALISRPSDMPATHRWNIRPVSLEDDLLGLAFFNDFCLHLWVREVADDGATNWVPRKSVEMDKLLSLPVATEDSRRRIVPAWICGFSGDGNVVFIGTPAGIFLVELDTLKFKKVTDGSLLIKTVHPYESFYYVPNEKGGKQESAIVGNQVSEAGGK

SEQ ID NO: 137547 - protein, 1530 aa, Oryza sativa
  Clone ID: PAT_MRT4530_3901C.1.pep
MPRYKPKYLFGVEGFVQELRTMSFAIGFGTAPLYAQIPHDRHEEKCRVKVTLNSNSEDIPSVMFEAGEGNYIHACQEVARIAIGELRDRYSDQLADTEYRYHPRQPQGSNHGSYLETEGIENDATTRHLVEMLWAMDETRAEVVLAAQDREDWNRGKICRLEDKVDRLEKELAALKGEEPPQKARIRLTARKRALFVPRYQLAPKVRVVEKEVTPALADPPVVNMVHTRSNGNGPNNNNNNNNNGENPTLAQVLAQQAQLMNMMMQQLQNQQNQGNNHAPPQNKLAEFLRVRPPTFSRTTNPVEASDWLHAIEKKLDLLQCTDQEKVSFASHQLHGPASEWWDHFRLNRTSAEPITWLEFTAAFRKTHIPSGVRQFFNNNAGNNIRNQAPRPVAAPTQQQPAKREQGSKPGVCFNCGDPGHYSDKCPKPRRVKVVPAQSNSTTPASKARVNHVAAAEAQGAPDVILGTFLVNSVPATVLFDSGATHSFLSMSFAGNHGMEVEDLRRPLMVSTPSNQALSLQRSPSVRIEIQEVPFLANLILLESKDLDVILGMDWLARYKGVIDCANRKVTLTSNDGRVVTVHALSSESLRSRLNQMTLEEIPIVREYPDVFPDNLPGMPPKRDIEFRIDLVPGTTPIHKRPYIMAANELAVVKRQVDDLLQKGYIRPSSSPWGAPVIFVEKKDHTQRMCVDYRALNDVTIKNKYPLPRIDDLFDQLKGATVFSKIDLRSGYHQLRIKEEDIPKTAFTTRYGLFECTVMSFGLTNYPAFFMNLMNKVFMEYLDKFVVVFIDDILIYSRTKEEHEEHLHLALEKLREHQLYAKFSKCEFWLSEVKFLGHVISAGGVAVDPSNVESVINWKQPKTVSEVHSFLGLAGYYRRFIENFSKIAKPMTRLLQKDVKYKWSEECEQSFQELKNRLISAPILILPYPKKGFQVYCDASKLGLGCVLMQDGKVVAYASRQLRPHEKNYPTHDLELAAVVHALKIWRHYLFGTRTKVYTDHKSLKYIFTQPDLNMRQRRWLELIKDYDVGIHYHPGKANVVADALSRKGYCNATEGRQLPLELCKEFERLNLGIVSRGFVVALEAKPTLIDQVREAQINDPDIHEIKKNMRRGKAIGFLEDEQGTVWLGKRICVPDNKDLKDAILKEAHDTLYSIHPGSTKMYQDLKERFWWASMKREIAEYIAVCDVCQRVKAEHQKPAGLLQPLKIPEWKWEEIGMDLITGLPRTSLGHDSIWVIDDRLTKVAHFIPVKTTYSGSRLAELYMARIVCLHRVPKKIVSDRGSQFTSKFWKKLQEEMGSKLNFSTAYHPQTDGQTERVNQILEDMLRACALDFGGSWDKNLPYAEFSYNNSYQASLQMAPYEALYGRKCRTLLLWDQTGERQVFGTDILREAEEKVKIIQERLCVAQSRHKSYADNRRRDLSFDEGDYVYFRGTPLRGVHRFHTKGKLAPRFVGPYKIVSRRGEVAYQLELPQSLAGVHNVFHVSQLKKCLRIPTFPESPFLQEKNLKSSKASKASHTDPKQPFEHVDPV

SEQ ID NO: 137548 - protein, 209 aa, Oryza sativa
  Clone ID: PAT_MRT4530_39020C.1.pep
MPPPTRTRRGVTLAEQMAASSNLRDLLKLRDNDDDDDDGGGQGGRRQPRPLPDAVVVAAGRRRTLLDVIRGVDDDDGHDHPPTGVLEGHRPATSTRTAAAGGARGGRVSLMALLEQAERQWTTAAAGDASRRRVADDHAAAAEAGTNKGFAGAAAGVGGRCCVCMARGKAAAFIPCGHTFCRACARELRVGRGRCPLCNAAIHDVLNLF

SEQ ID NO: 137549 - protein, 665 aa, Oryza sativa
  Clone ID: PAT_MRT4530_39021C.1.pep
MEEFELQQQPYYSKLLLGSPLEIANVDDSDLQLVAGVPSDPPPAPPTAVKKKKKRSLPGTPDPSAEVVALSPRTLLATNRFVCEICGKGFQRDQNLQLHRRGHNLPWKLRQRGGAGGGGGGEPPRKRVYVCPEASCVHHSPSRALGDLTGIKKHFCRKHGEKKWKCDRCGKRYAVHSDWKAHSKVCGTREYKCDCGTVFSRRDSFVTHRAFCDALAQENNKLAQPMNMAAVTSALQGQQQAHHPVADDDDAAGVKSPHLKMFPDVDNIVAAATAGNPLLPPPLSMAGCMLSSLAAPLSSPFLPGCKLGVDAARDAAMVFPPPPPPAGSAAAIMSATALLQKAAELGATTSTGCYGGVAFPAMGIAGGLDRLPAIGHHLAPYDDVVVPAALQGQTATQLVGFDLGGLLPGQLYGGGGGAMTRAIGSLMHGGDQHAALDHRACSKIPRFRMEDGGKHFVFVHGLGHGAWCWYRVVAALRAAGHRATALDMAAAGAHPARADEVGSLEEYSRPLLDAVAAAAPGERLVLVGHSLGGLSLALAMERFPDKVAAAVFLAACMPAAGKHMGITLEEDLTLATMLVRPGTNYIDDPIMKDETLLTEGNYGSVKRVFLVAMDDASSDEEMQRWTIDLSPGVEVEELAGADHMAMCSKPRELCDLLLRIAAKYD

SEQ ID NO: 137550 - protein, 65 aa, Oryza sativa
  unsure (1)..(65): unsure at all Xaa locations
  Clone ID: PAT_MRT4530_39022C.1.pep
VVRNTQHPRSYYRCTQHNCRVNKRVQRLAQDPRMVLXSSEGRHVHSPSREEDGPARASADMTFIW

SEQ ID NO: 137551 - protein, 69 aa, Oryza sativa
  Clone ID: PAT_MRT4530_39023C.1.pep
MEGMGIDSGVARGEAGVGGDGEARGRFLESARRNYSLFINIYFVFTNMSNTGNLEASWAGPGSAEPGPW

SEQ ID NO: 137552 - protein, 65 aa, Oryza sativa
  Clone ID: PAT_MRT4530_39024C.1.pep
CWSGRIRDRWAGDGFAELVGGVVAHDEGSVSSRDELVIYFLTIPCKFYFILFSVHRVLVLLNISL

SEQ ID NO: 137553 - protein, 277 aa, Oryza sativa
  Clone ID: PAT_MRT4530_39025C.1.pep
MPYPCIDVSRIRIRITVSSVIGQDVFLIGRGADALTGVTRDPKPPLRLFAPRYLRFPMALAGAPRRRRATRSRLPPTLLLIVLLLLGGAPRASALRVPLREVATLLNLSRSLLNRVAAARAARGDDFAASRARRIASHLSLFSSRGAWALSWDYLRHYAFSSAAGCGLSCATAAARLLAAAAEVSRLHSATDAAQWLRRNYGDVRDAAAQLLNGLLVAFSEQGPLREVVMDVKWEVEEGELLKDCLKVGAKDLEGLLVIAKDLLFGATRTSSRHNEL

SEQ ID NO: 137554 - protein, 112 aa, Oryza sativa
  Clone ID: PAT_MRT4530_39026C.1.pep
PTRPPTRPPTRPLSICCSSPERFLRLDRNAILEAKPIKGTIARGRTPEEDECLRLQLKYSEKDQAENLMIVDLLRNDLGKVCEPGSVHVPRLMDVESYKTVHTMVSTIRGNQ

SEQ ID NO: 137555 - protein, 106 aa, Oryza sativa
  Clone ID: PAT_MRT4530_39027C.1.pep
YFSNGNILRLMFLLLIVCGLSIFCLFYPPNLFGFGWPRSSSVWLSLSFAKLLDLERLTGGGMVGDGRLTYIGASGKWCSGYDFSGHHICSKRFARKCFVFLTCVTG

SEQ ID NO: 137556 - protein, 95 aa, Oryza sativa
  Clone ID: PAT_MRT4530_39028C.1.pep
MRVPGARAHEGKSTYESQKEWRDLTRVHVVSRDVLSFLGIPTGASCARQLGNRETGLGGGEKRQKSWTALRIKQHCIQSYVDRWGSNCSLLLLVK

SEQ ID NO: 137557 - protein, 147 aa, Oryza sativa
  Clone ID: PAT_MRT4530_39029C.1.pep
MAAAAASLLHLATSACSPPRVRLVGPTTGRRSPLRAAPAPPPPRAYKVTIEHGGESRVVEVEEGETILSRALDEGIDVPHDCKLGVCMTCPARLVAGEVDQSDGMLSDDVVAQGYALLCASYPRSDCTIRVIPEDELLKVQLATADD

SEQ ID NO: 137558 - protein, 107 aa, Oryza sativa
  Clone ID: PAT_MRT4530_3902C.1.pep
GGRVSDSEGSDQVSSDDEDESPRHLGEEEMESKACTHCGEIGHVASMCLTVCPHCEEDHPPGECPTRKVACFLCEGRAKGNQPQEGDTKQKTVIRFNQQSEGSFSRE

SEQ ID NO: 137559 - protein, 147 aa, Oryza sativa
  unsure (1)..(147): unsure at all Xaa locations
  Clone ID: PAT_MRT4530_39030C.1.pep
LDALSQSYRQYQLQSDILLQQHVLSPCNEIIRQQHIIVATPLXQPATLQWINNQVMQQQCCQQHMLIAQQYHYQAINTDHAIVQQLQLQXVIVVYYDQTQAQAQALLDLNLTYICRMYANYYIAPRSIPTVGGRLVLNCNRYNGIKR

SEQ ID NO: 137560 - protein, 67 aa, Oryza sativa
  unsure (1)..(67): unsure at all Xaa locations
  Clone ID: PAT_MRT4530_39031C.1.pep
RGRKFFIHYXSIXHSERRPXVRGEKCKKXPKTVKTXVSFFQHVRTVLHLDVKPXLXXGKPXPXXWVA

SEQ ID NO: 137561 - protein, 283 aa, Oryza sativa
  Clone ID: PAT_MRT4530_39032C.1.pep
MDHLSLVPYEGGSAGGGGGGGKYKECMRNHAAAMGGQAFDGCGEYMPASPDSLKCAACGCHRSFHRRAAAGIGGGPVFFRPPPPPQPHSHHAALQGFLPSSVPAPAPPPQLALPYHAVPAAAWHHAAAAAAGRAGSETPPRMDDFGPGSAGGSGSGGGGIFGRKRFRTKFTPEQKERMREFAEKQGWRINRNDDGALDRFCVEIGVKRHVLKVWMHNHKNQLASSPTSAAAAAAGVMNPGAGIGLGTGLGTGISGDGDGDDDDTDDSPPRAAVSSPSPSPISV

SEQ ID NO: 137562 - protein, 316 aa, Oryza sativa
  unsure (1)..(316): unsure at all Xaa locations
  Clone ID: PAT_MRT4530_39033C.1.pep
CLWRGSDINSSNKSLVLWDRVCQLKSXGGLGVIDLRFQNNALWMKNLHQIYNRHTVRLVSLIWSTYYNGKVPHALSLKARNHKDSVHQTSTKDLSQIFLLPMXSRLINNFLQCKLQILWISSQMTAIWSYARVNDRFSSQKXLSHNLYAYTISNYLNWISKSKCTMKVKVFGWLLLIDRLNTRDKLDRKHCAPDGSDLTCVICSSGARETLQHLFFHCTFSSQCXAQFGLVWDLYLFFEDMLQHARGSYXSSHFVEKILYAAWNIWKQRSNXGYIFDNVPSSVSSWMTFFKNDLSLLVFFLNADERSTFISWLNQL

SEQ ID NO: 137563 - protein, 96 aa, Oryza sativa
  Clone ID: PAT_MRT4530_39034C.1.pep
MASALAFLALHSPLKVEDYGLIFLRGESIINPSIRPYGSHLRADPKDLQLALQEIVDKPTLSLGAKRFETDPLWKSDELSPYDFLQKNVPWDRVLI

SEQ ID NO: 137564 - protein, 729 aa, Oryza sativa
  Clone ID: PAT_MRT4530_39035C.1.pep
MTVSRGPPGRPAASSGCLGCWRRRPPLGFGAKVTIAIALGLSFAIVWTSLSPTSSSQQISTERSSFAADIVDPPPASHNHTATTTTAAAAAGGHRKPRPTTSRSHKKRHPPAGSHPHRPNATASPDSTPANADHAVQSKPAEPEPEPGTELEEEEVEQDQEEKEAELPMPEESGDGKAPEEESEKAPELELDELSEGDGYGEEAEEGQKKAPKKTKKQPPLFSSSAHYHWKHCGAKSGHHYIPCVDFDGDGSQRHRERSCPRLPATCLVSMPKEYKPPAPWPERKEKVWYGNIGHPRLSSYVKGHGWLNRTGDYLMFPPDEWEFKGGSRHYVEAIDEMAPDIDWGKNIRVVLDIGCKSAGFGVALLEKDVITLSLGLTNDQTDLAQVALERGIPATVGSLGSKRLPFPSGAFDAIHCGDCNIPWHSNGGKLLLEINRILRPGGYFIISSKHGDLESEEGISASMTAICWNVIAYNSDDVSEAGVKIFQRPPSNDEYDLRAKKDPPFCKEDQNKAPAWYTLIRHCLHKAPVGIEERGSEWPEEWPKRIETFPEWLGDLQTRVEADHKHWKAVVEKSYLDGLGIDWSNIRNVLDMRAVFGGFAAALASKKVWVMNVVPVHAPDTLPIIYERGLIGVYHDWCEPFSTYPRSYDLLHADHLFSRLNNRCKQPVSIVVEMDRILRPGGWAIIREKLEILDPLEKILKSLHWEIVMAFRKDKAGIMSVKKTTWRP

SEQ ID NO: 137565 - protein, 96 aa, Oryza sativa
  Clone ID: PAT_MRT4530_39036C.1.pep
FALPGKDKTGRVLPQGSEPVKSPVVGPKDPVFSPLGMTQNKAGPHDGAHKDTFSPPPPPETPGRGPLTPGKISPWGYLWRFSPQIRGKFEFVFGSF

SEQ ID NO: 137566 - protein, 179 aa, Oryza sativa
  Clone ID: PAT_MRT4530_39037C.1.pep
MGDAASNQPVLAASDLGQSNLDAGAGAGAVGGGGFIALDVSALSSLAGDGPDTTAAPPRTPKVVRSLSRKGERKPADGDGNGAAGTGKRPPLSPLFVHVAAADDMGGLGRLVHTPVAGTPGGKSRRLGRQPAAPWLDPRRVVFFFATLSSVGTLILLYFTLSMSKMGGDSGGGGSSDAR

SEQ ID NO: 137567 - protein, 229 aa, Oryza sativa
  Clone ID: PAT_MRT4530_39038C.1.pep
LNCWPSTHTKVIWSTSSRKFFRPSCRPGCMEPLSPTSRSLTLTDFSTASVSVSTSRARTDGLEHVATRHRIQQIEARRRTLPPYPIEGGVKELAGGFGDCPSLRHRLQPRRPPDSSSLVTDSPSWLLLFPSFISQNTSGFRRPRAGCCQIRQPRAHGHRILLLRQLRTAAHTRRRTAGRGFGGAAGLATSTKLLSSLFLFLFFFLFFFHRLANRDHEMWEYNDVYCMHC

SEQ ID NO: 137568 - protein, 130 aa, Oryza sativa
  Clone ID: PAT_MRT4530_39039C.1.pep
PVLSLLKNAVLSVPLSEWRPQLKLLWLKITPPGSKSRPTRDDWTDHAAPCEGETKHTTNKAAVLAYLQRMNKRYLYNIDLVATISLIFDSLRMNLSINCERNPPPLVCLWFRMVTTVSPPYCSVTEMAVQ

SEQ ID NO: 137569 - protein, 151 aa, Oryza sativa
  Clone ID: PAT_MRT4530_3903C.1.pep
EKRRGLGRRAARCDGDGDAMMTRCGSGAGREAATRWRAGRETARGAQGDGTGRQRRYDRRAAWRRDSRAAMEWAGDGGARRGSARGSVWRRRRRDGRAVRQRDGDGDGLAAAARGSERRGDARGDGTGGDGAAAVARGTRRDAMVTARQRR

SEQ ID NO: 137570 - protein, 179 aa, Oryza sativa
  Clone ID: PAT_MRT4530_39040C.1.pep
MGFADILTDAGLAMLDSWLSTRSYIVGNSASQADVVTYKALSSAPDATKYANAARWYKHIASFEDEFSNLPGDSTKAYTEYGPDKTEATLNPAKAPAAEEDDDDVDLFGSDDEEEDAEAARVRQERLDEYNKKKAAKPKTIAESVVTLDIKPWDDETNMVELEAAVRAIEQDGLVWGAS

SEQ ID NO: 137571 - protein, 105 aa, Oryza sativa
  unsure (1)..(105): unsure at all Xaa locations
  Clone ID: PAT_MRT4530_39041C.1.pep
HSDRKYSLSPIAAAAAMAALAGASTAFAAKPRLGARRRPRPRVXRXVLRVGNNGGAXRWRVAGGVGKTXPGVACPRCXSRRRXAXPRGGIAXDASRVKXRRXKSH

SEQ ID NO: 137572 - protein, 170 aa, Oryza sativa
  Clone ID: PAT_MRT4530_39042C.1.pep
MPSPAPVSPSASPEFLRQPLPPCPYADRRRRLLRHRSGKVALGLASLPPEHRRVFRAVLVSVQPLPASLVASSPARSSSSSSSSRRPHRRGVRPSVKPFAFVVRIPSSEPLQPHHRLRPRLRVVKPRAGRVSTSSKDRHRSRSLAVRLRRPRADSAVLVRCRRAAPRRVV

SEQ ID NO: 137573 - protein, 109 aa, Oryza sativa
  unsure (1)..(109): unsure at all Xaa locations
  Clone ID: PAT_MRT4530_39043C.1.pep
PNLYLKNLDDGVDDDKLRELFAESGSITSCWVMRHSYGVSRXASAFVASKSAANASRALAQMNRTQAGTTPLYVSLAHPTQYRKPMLFAQFLQLLPLPTLLLSLFPLLP

SEQ ID NO: 137574 - protein, 50 aa, Oryza sativa
  unsure (1)..(50): unsure at all Xaa locations
  Clone ID: PAT_MRT4530_39044C.1.pep
VXRAPSHRVLVLDSFIWLCALGHVCMWMYRFSDCCDCCFVVFVLIVMFLV

SEQ ID NO: 137575 - protein, 62 aa, Oryza sativa
  unsure (1)..(62): unsure at all Xaa locations
  Clone ID: PAT_MRT4530_39045C.1.pep
ADEDQDIAESKAAHXEEYLKYTRRSESGDNIYRCQAYAQTLEQCCGVGREMRMGGRSGAGLM

SEQ ID NO: 137576 - protein, 57 aa, Oryza sativa
  unsure (1)..(57): unsure at all Xaa locations
  Clone ID: PAT_MRT4530_39046C.1.pep
MRVIKSPAVVFLVEXDQLKEIYLEESEFKDDAXDNLFLVLXGLVSPHEYKYVHPGSL

SEQ ID NO: 137577 - protein, 109 aa, Oryza sativa
  Clone ID: PAT_MRT4530_39047C.1.pep
TWGTLPLGGLHPRQLKTPQPGLCQIKQMLPLLREMPLILPAALGKTVFKLNMFHGKRRGSLDILGIVPRGKKSRAAPLLYGVGWAMLNLLGLPKWKPPCPFSWTYSLAN

SEQ ID NO: 137578 - protein, 39 aa, Oryza sativa
  Clone ID: PAT_MRT4530_39048C.1.pep
PVEIHHKCQIPANLDWFGWCTWDAFYKSVNPVGIEEGLK

SEQ ID NO: 137579 - protein, 87 aa, Oryza sativa
  Clone ID: PAT_MRT4530_39049C.1.pep
PTKGPFAFIILALKKLSTLERQLFRCALFAQINSHYKMGIACQRQSNRNSRPWELLVPIFGGFQFCLLPTTKKKQLKKKKQKKKNHQ

SEQ ID NO: 137580 - protein, 163 aa, Oryza sativa
  unsure (1)..(163): unsure at all Xaa locations
  Clone ID: PAT_MRT4530_3904C.1.pep
SAWCKIRPGRLRRPFXITSLLPNHTTPKISPHSSQGSGQSPLVPRXIRKPHRPSQGPSKFHHTHPCXDASARGKLHYKPSCCPRWLVVSTIXLPGFPXDRFLIAMGTTSKTMHPQPTMKSHFSGVITTMKHGQMSRAXAAHSDTXRSNTIIIPSTGLVVIKHG

SEQ ID NO: 137581 - protein, 358 aa, Oryza sativa
  Clone ID: PAT_MRT4530_39050C.1.pep
MPSSTPPSVQPAPTVQPLPSSTAGQSTRIDLREIKSNIIKRIGPGRAKKYFQHLERFLSSKLNKNEFDKLCLVTLGRENLPLHNHLIRSILHNACRANGPPAIDAPKLAGDVSKSEQILHPVWNNGNVSIQHVKDNRSLTIEQEGAPIIRENGAPNFSDLKRCQQVQNSEHAEPRNKRLHYEKEPPSFLEPSHSNGPSAISYGENSGESSAIASVPPNDSSVSCYELGELCDTMLLSKRMEKVAEAAASWNKITAWETKPCITEAAVVTATCQNKQRSAYLLGSVLFRVGPIHCVPLINSNEALVLHTELWCSTPNKLRSHNTEFSLCVLQPWTSRGCPWGWKNYENGRACRGFFANF

SEQ ID NO: 137582 - protein, 183 aa, Oryza sativa
  unsure (1)..(183): unsure at all Xaa locations
  Clone ID: PAT_MRT4530_39051C.1.pep
VQCSAGPDNCIVYVGIVQDCIRTFDLFDYSHAALSSLSLSPPHVFHRIRVTACALRVLHNLQPAGXQPQAAAAIWSKPGDGEGPRVLLYYMSLRGTYEDYHAVRTILWGLRAAIDERDLSMDSAFLLELAALLPQRRHVTLPQMFVNGRHLAAPDRRRCRSPPPPLPSASSPSATATAAAPES

SEQ ID NO: 137583 - protein, 333 aa, Oryza sativa
  Clone ID: PAT_MRT4530_39052C.1.pep
MEGAPRRHGRPGEELRYEERAHRHRGWEVGRGGGRTDAPPKLVDALPTRSRKPLPTISRHPSARLPATTSRIDHAATRRTRRLYIASTAAVIGEDLMAAGPDLPLPANVASPAPHRGGPVTAILALPVALQDQTDWHARISSIFGPAEELSRSPRPAFLLARAWGRAAAAVAVAVRSGGGGGQERGRVKDLQSLLVPKGAHHPPHAALSSLSLSPPHPQAAAAIWSKPGDGEGPRVLLYYMSLRGTYEDYHAVRTILWGLRAAIDERDLSMDSAFLLELAALLPQRRHVTLPQMFVNGRHLAAPDRRRCRSPPPPLPSASSPSATATAAAPES

SEQ ID NO: 137584 - protein, 148 aa, Oryza sativa
  Clone ID: PAT_MRT4530_39053C.1.pep
MRSVADGGKWVKHKSSGMTTFPNSHYKSPSTPHVVPLQLVYTATFSLALHDSNIEGFAQWRIGGLVFSLREVKQGGKTARAPTTGTDAAVVVPCCSSDNGSLLDYFYAVHRGSKESSTLRGADTAYHGGMSSSTCYLLEKGCACCPAP

SEQ ID NO: 137585 - protein, 54 aa, Oryza sativa
  Clone ID: PAT_MRT4530_39054C.1.pep
MGVEARSSFFRRPTEAPAGDGYLLGGQPARCSGGHSTGSNKPGPGGFHGWWKLV

SEQ ID NO: 137586 - protein, 64 aa, Oryza sativa
  Clone ID: PAT_MRT4530_39055C.1.pep
SDRVPWGSVRPATSPAAAPPSPWPSPPSPGTPSTRIPPRRSPPAAPPPPPAPASPRQHGKRRPP

SEQ ID NO: 137587 - protein, 59 aa, Oryza sativa
  Clone ID: PAT_MRT4530_39056C.1.pep
WHGTGRLVALCPPLFSDEVGDVNVTKKLLMGDVDVNEADPEGNTALHWCLSGSSSTQEP

SEQ ID NO: 137588 - protein, 1515 aa, Oryza sativa
  unsure (1)..(1515): unsure at all Xaa locations
  Clone ID: PAT_MRT4530_39057C.1.pep
MKSMEERLLDAMNAMAAKDDIATHLMXIDLKLEQQGERLGRVKTKVDLSLTSLDQVQQEQTWVXRALKAVIVAPSPPPPLPPETPHQAPTSSEPQPPPXLHWVPSPHYSPGDCEHCDMGHRQWTPKMDFPKFDGNGVKVWIDNCETYFAFYQITEAFLVSATSMNLMGDAANWYQTWKLEVGWHDWEMLKTAISREFDVHLWSVKMDELLLLKQTSTVIEYCSKFSELVYQIRLYDPLLCGSVLVSHFMLGLKDDLRSFVQAAQPTTVTQDCLVALAQEGAHIGQPRKRFNQCRDNAVGRGNEKPKLARGELWKAQQLKEYRRAQGLCFKCGDKYVSGQVCVKQEAELKLLCRKSQXILFDDILDAVTAPELVEEDFNLSLHALAGTCSSATVQLRALVGNQVILIFVDSGSSHSFVNSDLCAKLQLPTTATLPISVKVANGEVLSCDAKIPQFTWWVQGYHFSFTMRLLPMGXYDVVLGMDWLTQYSPMTCDXAAKTIQFSYQGAEIILQGVASPIVIEVTEVSATQVVKWDQGNDIWAMAMLEPVAALSSSSSEYPAIQQLLQQYSTLPPDRVLNHSITLLPNSVPVNSXPYRYSPAQKGEIEKQVFEMLTAGLITPSCSPFASPVSLVKKKDNSWRFCVEYRRLSSLTIKNKXPLPIAEELLDELASTKFFSKLDLKSGYHQIRKLEADEYKTAFKTHHGHVQFRVMPFGLTNAPATFQCLMNSIFAPFLRKFVLVFMDDILICNKSLEEHGHHLELVLXLLQQHQLCAKLSTCSFATSQLEYMGHIIFAEGVATDPEKTQAMASWPIPTNVTQLRWFFXLTGYYRKFVQHYGILAKPLTMLLQKNTKFVWTPQAQEAFAALKTAMCTTPVLTLPDFSKPFVLEIDACATGIGAVLSQEGHPVXFYRKALGIANQKLSIYEKEFLAIIMVVDKXRSYLLTSPFVIKTDHKALYHLDDQSLGTDLQKKAMTKLIGLQYKFQYKKGVDNKSADAFSRVGHLFPISVVQPAWVQEVPNSYVVDLFAKXIIAXLAITSPNSQGFTLSHGLIRKADKIWIGVNSALQTKLIAAFHSFAIGRHCGIQATYQRVKKLFVWKGLKKSMEEFVXQCAVCQQAKHEHCSYPGLLQPLTIPYGAWLDISMDFVEGLPTSKGSSVILVVVDRYTKFAHFLPLKHPFSALXVAELFLNNMASLYGMPKSIVSDRDKVFTSNFWXTLFKRFEVPLHLSTAYHPXSDGHTERVKQCLXMSLRCAVSSSPHXWCAWLPLAQFWYNTNYHFALQCSPXKITVGTDPSYGLLPAMSVNAFASTDSDSPVADALLRERAMFSSLLKHHLTCAQNRMKKTADLKRTRRSFQIGDLVLLKLQPYAQKSVVSQPFPKLVFKYFGPFPIVDKIGSVAYRLQLPDHSGFHPVFHEXQLKQFVPDAKPVFSSLPSPLQLDITELVPSAILDHRMXKKGNALVVQELVRWGSLAPEWATWEDYEVVRARFPEPIAWGQAPARRGKGGGGGKCHARHSD

SEQ ID NO: 137589 - protein, 61 aa, Oryza sativa
  Clone ID: PAT_MRT4530_39058C.1.pep
MALAPRYWERRGEEPPMPSPASAPRRHYLLPGLSSLYFYRKCERRKRGEMKKSGEIMKKMR

SEQ ID NO: 137590 - protein, 293 aa, Oryza sativa
  Clone ID: PAT_MRT4530_39059C.1.pep
MATGGRRGRAVPLSKSFSRRLRHGRTGFGGSGHARGMMQLHVASAPSRCRRCWPTGGEETDGARWERRSGGRRYGGSDDGDDAGAGEQGGGGGGEMSMVRYWRRSSVGAGSGSTAVDGGHGIASRPNAGASAGIARPRAISPTAVMNCNAPRAEGQCGGDGVTDGCHRGGSGEAAEEGEIEDDGAVSAGVAQQSMEMPMRTFLNWYRCADYTAYVFNTRPLACQPCQMPQVYYMRQSRLDRRRNTTVTEYERHRVAPVNCGWRIPDLATLLDRVIVLKKPDPDLWKRVIKHTP

SEQ ID NO: 137591 - protein, 49 aa, Oryza sativa
  Clone ID: PAT_MRT4530_3905C.1.pep
CYATNVILYVCKGLCHLGCTKCAKYYLLWASRTVTHVLYISFLLGLWHA

SEQ ID NO: 137592 - protein, 181 aa, Oryza sativa
  unsure (1)..(181): unsure at all Xaa locations
  Clone ID: PAT_MRT4530_39060C.1.pep
RPILHHLQEPNKNGTNKGKKEKKCRNQEQGVQEPEQCSESTKLREISESSKQRRLPILCVQRGARTKEDEKKGRQLQLLFLLSTTTPPSAQWSEAAAVQCNATHSQLAATTWVEGIYNALSFSFPLLCFPSFLLRLPGKCFFSSGHWDSEVFALLRPIRSXRGVRRPGDXPAPMVTCQGGT

SEQ ID NO: 137593 - protein, 61 aa, Oryza sativa
  Clone ID: PAT_MRT4530_39061C.1.pep
MTIAATEVRYMSGRLAMVWLRGRMDNTANIVSSGWGGVSGFSHGRSGSGEVSHNRLGVGGR

SEQ ID NO: 137594 - protein, 114 aa, Oryza sativa
  Clone ID: PAT_MRT4530_39062C.1.pep
FFFFYFITSYFVFKNISLFIICFDHYLVACKQQRCDPTSYEEASSLVLAWLCEDACTCMGAQPCAHLSGSCCLRTCIALCQPHCCVSSPVLLFACLAVVALLLTDPSTRSTPGS

SEQ ID NO: 137595 - protein, 125 aa, Oryza sativa
  unsure (1)..(125): unsure at all Xaa locations
  Clone ID: PAT_MRT4530_39063C.1.pep
MRKEDEEGILASVEEGEMGIGYSRGCQRKRKRKEERYMGNIISFYLPKMKGNDTFASEGDKLSTLRVKRELFHDRKGSSPFQKLAIKVRSSPTCILGXPPSHIGAPQPFAATSPFPHGSSGIRAL

SEQ ID NO: 137596 - protein, 77 aa, Oryza sativa
  Clone ID: PAT_MRT4530_39064C.1.pep
MADPPSCAAEMRQKGGAVTTTPGAKTMATVAPCGLRNGRSALARRIEDVEDWDRRPQPLQWRAHRLRLRYLMAAALQ

SEQ ID NO: 137597 - protein, 80 aa, Oryza sativa
  unsure (1)..(80): unsure at all Xaa locations
  Clone ID: PAT_MRT4530_39065C.1.pep
ELLRRLKTXSKQREGAKPRYTPNKSPKKATPTKDHSWPSERMDSRTTATEASAESKTLEFRSFHSYQETRNTWSRSLSIL

SEQ ID NO: 137598 - protein, 67 aa, Oryza sativa
  unsure (1)..(67): unsure at all Xaa locations
  Clone ID: PAT_MRT4530_39066C.1.pep
GLVEGARQEQRRGAVVXXGHPRRRQRLLVAPSTDFSPASIISAAALLEEEDEVEVEETLAFIWSDAW

SEQ ID NO: 137599 - protein, 272 aa, Oryza sativa
  Clone ID: PAT_MRT4530_39067C.1.pep
MSPLRPPPTPRTPLGGAATTPDQLPPPSPHTPRPAITLTAPPSKKKRRGGAAARSLRAIRAVRALFRSLPILAPACRFHGAIRAPGGASRAHDGHVSGASRTTGTLFGYRKARVTLAVQETPGSVPILLLELAMQTGRFMQEMGAEHLRVALECEKKPPGAGAGIGRTRLLDEPLWTAYVNGRKIGYAMRREPTEGDLTVMQLLRTVSVGAGVLPTDVMGGDAGAEVQDAGDLAYMRARFDRVVGSRDSESFYMLNPDGNNGPELSIFFIRI

SEQ ID NO: 137600 - protein, 122 aa, Oryza sativa
  unsure (1)..(122): unsure at all Xaa locations
  Clone ID: PAT_MRT4530_39068C.1.pep
STGKFENRNLELAEISSELKKLAKETGCPVYALSQLNRSLEQRANKRPVNSDLRDSGSLEQDADVIYHLYRDEVYNPQSEQRGCVXXXXXXXXXXPLATVTAKFLGQYSLFENMDNKDSRYE

SEQ ID NO: 137601 - protein, 140 aa, Oryza sativa
  unsure (1)..(140): unsure at all Xaa locations
  Clone ID: PAT_MRT4530_39069C.1.pep
LLTTKFGNSSIGDRDKXKRNPRXRSFRKQCKNRLKSESXRPGLAEFESDKVSRLSRSRXCDTFGQKSTTKTFGILEFVRDKSRVRQGHILIKSTGTLTNLKARFWTCTEVKQIFQASVCFSHQQELDQERYIHRLVGCSS

SEQ ID NO: 137602 - protein, 119 aa, Oryza sativa
  Clone ID: PAT_MRT4530_3906C.1.pep
MPEVVVVQQADEPGRRKGRPKGHRRRRGWRGRRGDGVPAKPRSSRGGGRRCDVNGGDGDVGRRTGDEQQPAVDGEVVATPLDAGEDASPVISPRIGGESRGKEGGSCDAGRRWGRKPEG

SEQ ID NO: 137603 - protein, 115 aa, Oryza sativa
  Clone ID: PAT_MRT4530_39070C.1.pep
NYRKQGVMASNYVDTAGEEGRFHGHGHHSSGTTPTGAAASPKMRRSWSSAASASSGGGGHGSGPKCVCAPATHAGSFKCRLHRSSSHGHPSSSPTAAAAPAAAVQSSSSRTVAAQ

SEQ ID NO: 137604 - protein, 69 aa, Oryza sativa
  Clone ID: PAT_MRT4530_39071C.1.pep
ITSASTIYDLPSLPSSSSLSSFFLTPLTTRRRGWIRATPTWARRRRTRYVVHRGLRTLSIWQQHYSMAL

SEQ ID NO: 137605 - protein, 50 aa, Oryza sativa
  Clone ID: PAT_MRT4530_39072C.1.pep
YHPKFHMSHMMISELIFNSRNNILVKIITRNRPKGVVNGYLVVAPNKVNP

SEQ ID NO: 137606 - protein, 53 aa, Oryza sativa
  Clone ID: PAT_MRT4530_39073C.1.pep
IALAIVTCGSGRSGKCQISHEPCMCTLLSVAQEPVHLNSASLPHAFYNLASPS

SEQ ID NO: 137607 - protein, 68 aa, Oryza sativa
  unsure (1)..(68): unsure at all Xaa locations
  Clone ID: PAT_MRT4530_39074C.1.pep
TGPEIRATRQRPEEYSXDATNKFNIYPEQIPGWLVDWIPEKGVYLIGNLHSADMDIRFFYFGNRCIKA

SEQ ID NO: 137608 - protein, 49 aa, Oryza sativa
  Clone ID: PAT_MRT4530_39075C.1.pep
PSPHSRSPAGPAPRVTSPEHLATPHSTTSSAGSGGRAHPRVSEVAGERS

SEQ ID NO: 137609 - protein, 552 aa, Oryza sativa
  Clone ID: PAT_MRT4530_39076C.1.pep
MALYLLFESASGYGLFHAYGIDEIGQSVDAVRASVVDLDRFGKAVKLAAFTPFSSAVDALNQCNAISEGIMTDELRSFLELNLPKPKEGKKAKYSLGVVEPKVGSHISEVTGIPCQSNEFVQELLRGVRLHFDRFISELKKSDLEKAQLGLGHSYSRAKVKFNVNRVDNMVIQAIFLLDTLDKDINSFSMRVREWFGWHFPELVKIVNDNYIYAKLADYIKDKSELAEKDISKLADLIGDEDKAKEVVEAAKASMGQDLSEVDLMNVKQFAQRVMNLSEYRKNLYEYLVTKMNDIAPNLTSLIGEVVGARLISHAGSLSNLAKCPASTLQILGAEKALFRALKTRGNTPKYGLIFHSSFIGRASTKNKGRMARYLANKCSIASRIDCYSESATAVFGQKLREQVEERLDFYDKGVAPRKNLDVMKAAIDSMVNDATNDVDDGEKVDASAKKSKKKKSKAEADGEAMDLDKPSNVADEAEPGTEKKKKKKKHKLEEEPQEQEKSVAHANGDAEENGTPKKKKKKNREVSEDAEPKTATEGKKKKKKSKTEDSD

SEQ ID NO: 137610 - protein, 535 aa, Oryza sativa
  Clone ID: PAT_MRT4530_39077C.1.pep
MPAPTASSLAAAADPALPAAFLSLPSPLLPASPPLPAAPAPSSNAFCVPRGPARAVAVSVSVSAYGAGSTAAASRLHRMWAEFSRFVRLHGNQIAPLGFASLGLGVGGGGGGSGEGAGGGGGGGGGEVDGLVEEEGVARAEAPKKVLILMSDTGGGHRASAEAIKAAFIQEFGDDYQVFVTDLWTDHTPWPFNQLPRSYSFLVKHGPLWKMTYYGTAPRVVHQPHFAATSTFIAREVAKGLMKYQPDVIISVHPLMQHVPLRILRSKGLLDKIPFTTVVTDLSTCHPTWFHKLVTRCYCPSAEVSKRALKAGLQPSQIKVYGLPVRPSFVKPIRPEDELRRELGMDEYLPAVLLMGGGEGMGPIEATARALGDALYDEVLGEPTGQILVICGRNKKLTSRLQSINWKVPVQVKGFVTKMEECMGACDCIITKAGPGTIAEAMIRGLPIILNGYIAGQEAGNVPYVVDNGCGKFSKSPEQIAKIVADWFGPRSDELKMMSQNALKLARPDAVFKIVHDLHELVRQKCFVPQYACAS

SEQ ID NO: 137611 - protein, 91 aa, Oryza sativa
  Clone ID: PAT_MRT4530_39078C.1.pep
MDGRQIFFFPSDREQTNGQGIKLAAGNQPAGCTYGCAWARSGYCLIDLIGDNRNVALRLSASYIMEIVSRHMLVVRNAKVRTVVCQRREQL

SEQ ID NO: 137612 - protein, 63 aa, Oryza sativa
  Clone ID: PAT_MRT4530_39079C.1.pep
MASGDLHPMSSCSGIPLLPSAESSLARSKGWESTVESGVASVSGFSGLPVCGYLLAVAVVVAD

SEQ ID NO: 137613 - protein, 325 aa, Oryza sativa
  unsure (1)..(325): unsure at all Xaa locations
  Clone ID: PAT_MRT4530_3907C.1.pep
KTVADVSKGERQRRQAGPTGQRHKGAGPPWTGTTEAVHRXVHGNRRPGSARLGHGXRLRPAQPSDGARQRGHRRRRPATARGGEEGCSPRAATAETAQSGINRXRRGDTDGDGKHGGDLGLVVKLVLGQREATTERRPSLTXGGEGTGSGGALGRRLGRRRRAAGGGERGGGLGCAVGVVLEGWRGGNKRRPDFPLQWRSWRWRRLGVATAVAAGNGDRNSPECGSAWVRRGESEGEYAGLGKNGEMDEGSTGMLFIXAREGGIEPGRGGNRRRSGAASWRVWRLGVASIPAGREGEWGGMWSRGGRGLGSTPVGTRGGVGSAEG

SEQ ID NO: 137614 - protein, 104 aa, Oryza sativa
  unsure (1)..(104): unsure at all Xaa locations
  Clone ID: PAT_MRT4530_39080C.1.pep
HRISMQVLLLPLLVAAAVGLARAAATDDPFLSGAPGNHSYNIDCGGAADFVSVFGRRWLADQFFSAGGQAGMVAEPHRFPQXPQXSXXRSRLSFPGPIVGGASS

SEQ ID NO: 137615 - protein, 120 aa, Oryza sativa
  unsure (1)..(120): unsure at all Xaa locations
  Clone ID: PAT_MRT4530_39081C.1.pep
GPPPLTTESPSLPSSSSVSPSSPPASLPGTPGALPSVTAPLALSSSTPSGLLQPHGPHRRRPPPLCGVTXSSGCLLLDPPPSPRTSSTPASPPAVFPYTPPSWSPLSSSSPAPSPDPPPP

SEQ ID NO: 137616 - protein, 100 aa, Oryza sativa
  Clone ID: PAT_MRT4530_39082C.1.pep
QSIIFDTTMPQNPTNIHHHTCDKVHVLQKNPFLVFLPSIAAMPCHHHVVAELRPELLPPELLGTAVAVAVVASLQPQLDEHHRRRHLRHLHGHGDEAREA

SEQ ID NO: 137617 - protein, 78 aa, Oryza sativa
  Clone ID: PAT_MRT4530_39083C.1.pep
PGCRNSAEGTTCFSLTALGIVTPCLKLSGCSHYPNKGSEKVRSAVRIGDQQEDLSLIFRQATRPTTWMVCFHLQLSFV

SEQ ID NO: 137618 - protein, 96 aa, Oryza sativa
  unsure (1)..(96): unsure at all Xaa locations
  Clone ID: PAT_MRT4530_39084C.1.pep
MGILQEMKIIIASALLAIAACNACAHVDALTQRHTQYELAIAYSATSNIVLTPCSEIVREXHSIVGXRPLWPPATMXLINNQVMQQQCCQHVTLAA

SEQ ID NO: 137619 - protein, 116 aa, Oryza sativa
  unsure (1)..(116): unsure at all Xaa locations
  Clone ID: PAT_MRT4530_39085C.1.pep
AQMVVQQELAVVGHLFRCWSAPSTFLVLXPFLCGKFVGWIEVVACQREKLRLPKQCHPVPGSPSVRSGEEGSGWWNGGVLSQLSRMDWKMAGGGTSVGCGGSHSVVTAPGQHEDGD

SEQ ID NO: 137620 - protein, 193 aa, Oryza sativa
  Clone ID: PAT_MRT4530_39086C.1.pep
MGLLSIIRKIKRKEKEMRILMVGLDNSGKTTIVLKINGEDTGVISPTLGFNIKTIKYHKYSLNIWDIGGQKTIRSYWRNYFEQTDGLVWVVDSSDIRRLDDCHIRRLDGGRADLHNLLKEERLAGASLLVFANKQDIQGALKPSEIAKVLNLEAMDGSRHWQIVGCSAHTGEGLLQGFDWLVQDIASRIYVLE

SEQ ID NO: 137621 - protein, 501 aa, Oryza sativa
  Clone ID: PAT_MRT4530_39087C.1.pep
MSSFPWLTILVVLPIFAGSLIFFLPHRGNKIVRWYTMSICLLEFLLMTYAFCYHFQLEDPLIQLKEDSKWIDVFNFHWRLGIDGLSLGSILLTGFMTTLATLAAWPVTRNSRLFYFLMLAMYSGQIGLFSSRDLLLFFIMWELELIPVYLLLSMWGGGKRRLYSATKFILYTAGGSIFFLIGVLGMGLYGSNEPRLDLERLINQSYPATLEILFYFGFLIAYAVKLPIIPLHTWLPDTHGEAHYSTCMLLAGILLKMGAYGLIRINMELLPHAHYLFSPWLVIIGAMQIIYAASTSLGQRNFKKRIAYSSVSHMGFIIIGIGSITNIGLNGAILQILSHGFIGATLFFLAGTACDRMRLVYLEELGGVSIPMPKIFTMFSSFSMASLALPGMSGFVAELVVFFGLITSPKFLLMPKMLITFVMAIGMILTPIYLLSMLRQMFYGYKLFHVPNENFEDSGPRELFLLICIFLPVIGIGIYPDFVLSLSVDRVEALLSNYYPK

SEQ ID NO: 137622 - protein, 31 aa, Oryza sativa
  Clone ID: PAT_MRT4530_39088C.1.pep
CFCCGPGLAIGQKVLLDIMFTWLYMCYLNNY

SEQ ID NO: 137623 - protein, 114 aa, Oryza sativa
  unsure (1)..(114): unsure at all Xaa locations
  Clone ID: PAT_MRT4530_39089C.1.pep
KKLLFRLSAPNHWMLYTLGGAFAHKPSYGTYTSRECLPLILIIRNRLYCALTYRGGICILMQSHVLXEGYVKTDKTYPAGFMAVIYIPKTGENXGLVCDPIGRYRLEYVQDGDA

SEQ ID NO: 137624 - protein, 2064 aa, Oryza sativa
  unsure (1)..(2064): unsure at all Xaa locations
  Clone ID: PAT_MRT4530_3908C.1.pep
MESTDGKSPTRIEIGRHYIVSGPMSLSPTWRPVDLRYKRDPLGGPKALNLRANTSXHSLRNPRTSVPQYPLYPVYGYPPSIVARQVGGLGAQGSTTLTSRFVDNSVNTNLNQGVPTSTTLVWTQVGEXVFPVYTTMPISAXVEGLKHVLMKKKNHKKSKDPPTEAEIGTLTTSKPEKDPSAAKPCLSDRNHEPTRITSEVTRSWCPIHKTRKHTLQACWVFLNVHAEIRACEERGIQCTSPTRDVYCPIHKTKNHDLSSCKVFLSAMKTPPPKVQQSRIPIRDEDKEQGATPISDRFVGVIDIDPHEPSVLHLLEDYGSSTTSTPREVLAIDDVGTSARTNAEAENQVTTPAQHIRAVNAXVTNLSNAFEEAAAAAHPKQPPTCDANGEDPERRXSPHRATPPPRGTGDLRDHLNGRREARRTRDNENRSRRHISSRRHDNXRSRSHNRHDHNDRERRVLGDTGRGRRNNDGDDGDRHRDNSGRRRQDSREPGRRPRNRTPELDDPSSSSSSSSSSSSDRHPRRTHDRQQPTAPSVGCRAFGCSLRDVRWPERFXPGAIEKYDGSTDPEEFLXVYSTVLCAAGADDNALVNYLPTAFKGFARSWLMHLPPNSISSWADLWQQFVANFQGTYKRHAIEDDPHALTQNPGESLRDYVRRFNECRNTIPEITDASVIRAFKSGVRDRYTTQELVTRRIMTTRRLFEIVDRCAHADDALRCKNDKPKTEGEKKPAKDAPESSKKKNRKSGKRKAQSEVLATEYADPAKRPDPQGSDTKKAWCPIHKTDRHSLEDCLVFKKSLAKHMASEKGKRVRVVEKDAKAPTQESDLAYPDYDLHVSHIFXVPRRQYPIMVEPTIRNIKVARVLIDGGSSINLLFASTLDAMGIPRSELTPTDQPFHGITPQSSSKPLGKITLPVTFSQANNFRTEQITFDVAAFDTAYNAIIGRTALVKLMAASHYAYQVLKMPGPKGTITIQGNAKLAVQCDKRSLDMVEHTPSPPATAEPPKKVSKTNKTPKPDGAIKIVPLSSANPDKTELALITFSRDNADVFAWQPSDMPGVPREVIEHKLMVRPDAKPVIXKLRRFSPDRKQAIREELDKLLKAGFIREVLHPEWLANPVMVRKANGKWRMCVDFTDLNKACPKDHFPLPRIDQLVDSIAGCELLSFLDAYSGYHQISMAKEDEEKTAFITPFGVFCYVKMPFGLITAGNTFQRTVXVHLVTXLRNNVEAYVDDIVVKTKASDSLIDDLRETFDNLRRYRLMLNPEKCTFGVPSGKLLGFLVSGRGIEANPEKIKAIENMKSPTRLKEVQKLTGCMAALSRFVARMGERGQPFFALLKKQDKFVWTQEAEEAFIAFKRYLSNPPVLVAPQPNEELFLYIAATPYSVSTVIVVEREKVQRLVYYVSEALHDAKTRYPQIQXLLYAVIMTSRKLRHYFQAHRVTVVSSFPLGEVVRNKDVVGRVAKWVVELSQFDIYFMPRTIIKSQVLADFVVDWTMPDNRSDNQIDNETWTMAYDGALNSQGAGTGFILTSPSGDQFKHAIHLNFRATNNTAEYEGLLAGIRAAAALRVKRLIVKGDSKLVTNQVHKDYKCSNPELSKYLTEVMKLEKRFDGIEVRHVYRKDNIEPDDLAXCASRREPLEPGTFLDVLTRPSVKEASGEDSPVAPDTTSGATEAERAVADIETTDDWRTPLIKFISSEELPEDDAEAEKISRKAKVYCMIGNDLYKKAPNGVLLKCVSSDDGRHLLLDIREGICGSHAAGRTLVGKAFRQGFFXPTALKDACDMXTHKAASASTPDYPSHLAVLVLGDRYTRAIPTRTRRLQVPIXVAIDKFTKXIEATPTGEIKADNTIKFIKGIFCRFGLPHRIITDNGSQFISVDFQDCCIRLGVKICFASVSHPQSNGQVERANGIVLQGIKTLLWAVRTTPTTSNKETPFFLVYGSEGMLPTELRHQSTXIQKYSNEDQEEQXYDDVNLLEKHRKRVVVRAASYQQALRCYHEKRIRARTLSISDYVLRRVQSQAGRNKLSRKWEGPYTITQVLWPGAFKIADGDGRELANSWNIDQLRKFYV

SEQ ID NO: 137625 - protein, 61 aa, Oryza sativa
  Clone ID: PAT_MRT4530_39090C.1.pep
CRCPPYPPSPINSIIISRTSINRSSMNSAEPQTWERKRSGHRKRSTMEERRRMRKNAINHT

SEQ ID NO: 137626 - protein, 389 aa, Oryza sativa
  unsure (1)..(389): unsure at all Xaa locations
  Clone ID: PAT_MRT4530_39091C.1.pep
MSALLLLKGTIEAFDKKRRAFLWSENDYCSASSCLVVWDTVCTAKDVGGLGIKNMHDQKCALLVKRLHHLHSVDSSWGRWIWQEHSGSSLFCDNQLGPHWESLATLLPVLQRLTRVQVGDGTRTSFWKDCWCGPNSFKDHFATLFSHALDGEATVVMFLSRPIEDNFAPRLSSMAESQLLQLREVLQDVCLSASTDLRTPRDAPGILRTKSVYSSSQQTLPLCKNWHFIWDNRAPXPPRIQFFAWLLAKDRLPTKANLLKKNIVQTAGCIVCNRGVETASHLFLHCQFAQDFWRALRISVVSDVHDLADLAVPCHLPAKHFRIFFLLCFWGLWNHRHDXVVFRGLPNSRTRLVVKCIEDATLWAERLRREDRSVVTDWKNLLSSSIRSP

SEQ ID NO: 137627 - protein, 42 aa, Oryza sativa
  Clone ID: PAT_MRT4530_39092C.1.pep
LLPLISSLLASWLTEHRFIYTPIDAEPHYRRRSHDVQLTKLS

SEQ ID NO: 137628 - protein, 72 aa, Oryza sativa
  Clone ID: PAT_MRT4530_39093C.1.pep
PTRILINGLFWQSSINHNCAVDSGHTQSLNGVHIPESTPDTCQIACDAGRDKQRMESGICSPGAGELLVSFG

SEQ ID NO: 137629 - protein, 244 aa, Oryza sativa
  Clone ID: PAT_MRT4530_39094C.1.pep
MEMDEVGGRWTSLGQMKATRAAARDVDDEDVQQRGQPESPAIIPALEFEPHASPDNVDQTLATGTEMAMTSVDLESALAGQDRRIQYWKTKFEVAELERTMLAVKKEQDVETLRGREVWFNSYLKSCCTSMAKVCRELRVPRGDPEESAAGYISWLNGACAQLDGVGKRIDEALKQECRRSSRYAGGHVLACLRDHRPRLDLDFLREGFVRSRRTPSEIDHLARSMAPLAEKIFQPMDWRWPSW

SEQ ID NO: 137630 - protein, 329 aa, Oryza sativa
  unsure (1)..(329): unsure at all Xaa locations
  Clone ID: PAT_MRT4530_39095C.1.pep
ESGGEASPTQYPILPIREYHSSTKAFLPDYALDEAPWEIRLHKWYMEASKKGLTNLTIRSLAKTLACEGFIWLDFNDLHAIHRREKMDVNYVVAWCFMQNMDAENLGKPIGFLDLTRICQTQHTVRLSPNSEQLKDKTPTEIAEYKKSLHKXKMIIVVQYIGRAFLHFQNKXIMVAYNFNDHYICFIIYPKTGIVTVLDPLDYSHKTYKXFLQILQYAYNYYKFRGGEQTKTREKLLCHKQPKGTIIYGYYASKFLRVNGRYRVNAEDLPRIECRTXFDDMSIKNVQRDLCQFIHHECCHVLGNFFDPDSILVSSDEYKVLREWNNAMP

SEQ ID NO: 137631 - protein, 828 aa, Oryza sativa
  Clone ID: PAT_MRT4530_39096C.1.pep
MAMSGATSMSPIAGASPNASPEPKSESESGVPNIGTEDPCQNAVQIPEDNCSRVIVRPKERSNQAPSQSTDKKDGTLQPNYGANRTVIWKMDNGRTMIITGLEFTPEDAARIPKRQRRKNTFRGVRQLTRHLIKYGPPRPEDDESGERFSADDDDNDDDDDDEDEATLNSFMERGMEFKAYDNSSHNPSALPPTPAPAEANHGRSNIARDVQKSLLVPVSAAKVHNQKPAPRDQASRLCRNCRKPGHCFSDCPLPRAAKAVHRCSQVTSTAHDTNRQLNVQPPPQWIIVKGTVKGRIVPPATASSLQHQRQQGCPTIANPSNAPRIAPIRRPIGKSSLGPYSISPLRLRNIAASRTTSLRRRCRLQPRATAAPAAVVLRRLHCRLHRHAGKLGLRFVSPFHHRNSISSVSPSRHHLAATASDLQPHTLLRRLRSNDREPDIPSSKLFVAGNPFPAILPVAVRRFPLAEHCRTAVAVPPRGVPPPSRLPLVPCRLLSIPSPLFPPLSACRPAPPVSSPVVAVRPRVAVVVRRRSAAPVLWPPVDHSCGLGPWCRQAAVDRVHRAPSPSPADVWGPPVGAPFPFDDFPSFRKSVVMRKRVRKIKVKKQGKDVDDEDVQQRGQPESPATIPVLAFEPHALPDNVDQTLATGTEMATTFLDLESALAGQDRRIQYWKTKFEVAELERTMLAVKKEQAVETLRGREVWFNSYLKSCCTSMARVCRELRVPRGDPEESAAGYISWLNGACAQLDGVGKRIDEVLKQECRRSSRYAEGHVLACLRDHRPRLDLDFLREGFARSRRTPAEIDHLARSMAPLAEKIFQSIDWSWPSW

SEQ ID NO: 137632 - protein, 1157 aa, Oryza sativa
  Clone ID: PAT_MRT4530_39097C.1.pep
MAKELELLKCVLPDKFVAGCIIAKLPPSWRSFGTALKHKRQEYSVEGLIASLDVEEKARKKDDASKGDGGQSSANVVHKAQNKSKGKYKAQQTTNFKKQKKNNNNPNQDEMTCFVCGQPGHLARKCPQRKGMKAPAGQTSKSANMTIGNIGDGSGYGNLPTVFSVNQSTNWWVDTGANVHVCADISLFSSYQVARGSTVLMGNGSHASVHGVGTVDLKFTSGKIVQLKNVHHVPSIDRNLVSGSRLTRDGFKLVFESNKVVVSKHGYFIGKGYECGGLFRFSLSDFCNKSVNHICGSVDDEANVWHSRLCHINFGLMSRLSSMCLIPKFSIVKGSKCHSCVQSKQPCKPHKAAEERNLAPLELLHSDLCEMNGVLTKGGKRYFMTLIDDAIRFCYVYLLKTKDEALDYFKIYKAEVENQLDRKIKRLRSDRGGEFFSKEFDLFCEEYGIIHERTPPYSPESNGIAERKNCTLTDLVNAMLDTAGLPKAWWGEALLTSSHVLNRVPNRNKDKTPYEIWIGRKPSLSYLRTWGCLAKVNVPITKKRKLGPKTVDCVFLGYAHHSIAYRFSIVKSEVPDMHVGTIMESRDATFFESFFPMKDTHSSSSQPSEIIPSSITPPEQTEHTHEHVTEEDDSEAPRRSKRQRTAKSFGDDFTVYLVDDTPKSISEAYASPDADYWKEAVRSEMDSIIANGTWEVTERPYGCKPVGYKWVFKKKLRPDGTIEKYKARLVAKGYTQKEGEDFFDTYSPVARLTTIRVLLSLAASHGLLVHQMDVKTAFLNRELDEEIYMDQPDGFVVEGQEDKVCKLLKYLYGLKQAPKQWHEKFDRTLTSAGFAVNEADKCVYYRHGGGEGVILCLYVDDILIFGTNLEVINEVKSFLSQKFDMKDLGVADVILNIKLIRGENEITLLQSHYVEKILNRFGYIDSKPSPTPYVPSLLLRKNKRIARNQLEYSQIIGSLMYLASATRPDISFAVSKLSWFTSNPGDDHWRALERVMRYLKGTMELGLHYSGYPAVLEGYSDSNWISDVDEIKATSGYVFTLVGGAVSWRSCKQTILTRSTMEAELTALDTATVEAEWLRDLLMDLPIVEKPVPAILMNYDNQTVIVKVNSSKDNMKSSRHVKRRLKSVRKLRNSGVITLDYIQTTRNLADPFTKGLS

SEQ ID NO: 137633 - protein, 59 aa, Oryza sativa
  Clone ID: PAT_MRT4530_39098C.1.pep
MRMVRSIDGAISWQRNSEEDRSAGPCTGNVDEAKFSMGGDGDSGATVGVNDCGVGVDRR

SEQ ID NO: 137634 - protein, 256 aa, Oryza sativa
  Clone ID: PAT_MRT4530_39099C.1.pep
MPSLEARVDIVASEVPKLAESAARKAITEWGRPATDITHLIFSTYSGCCAPSADLQLASLIGLRPTVSRTILSLYGCSGGARALQLAKELVENNRGARILVALSELTLICFSAPDESKIVGHGLFGDGAGAIIVGAGPLADGERPLFEMVAASQTTIPGTENALGMQATSSGIDFHIEIAEKPVARQELLAVAGADEGAQHASGEEDEPSRTNREQSRKTLFKNLIAAFSRCKTSKAEVPETCSPDYRCTPASGME

SEQ ID NO: 137635 - protein, 185 aa, Oryza sativa
  Clone ID: PAT_MRT4530_3909C.1.pep
MVKLTMIARVTDGLPLAEGLDDGRDQKDADFYKQQAKLLFKNLSKGQHEASRMSIETGPYYFHYIIEGRVCYLTMCDRSYPKKLAFQYLEDLRNEFERVNGSQIETAARPYAFIKFDTFIQKTKKLYLDTRTQRNLAKLNDELYEVHQIMTRNVQEVLGVGEKLDQVTEMSTRLTSGTRFYAGSV

SEQ ID NO: 137636 - protein, 56 aa, Oryza sativa
  Clone ID: PAT_MRT4530_390C.1.pep
KFVTTPRKSGLQQLLSQKTGISCSLLLFIPSKAQGHISCKIKRNTISKQQDQMSCH

SEQ ID NO: 137637 - protein, 520 aa, Oryza sativa
  unsure (1)..(520): unsure at all Xaa locations
  Clone ID: PAT_MRT4530_39100C.1.pep
MGGGSTAPLLAAFACVFLAVFPPVASDPGHDKVIAPIVRFGNRNDQLVQPSAVLLPLNQMTDFFLRVSNDPELYRKIAGVLVEANGVDNMLEFSPDRKFPQQAFAPYSNLSHHWNPTLADKNEKSANGYLANVAEFDLVMQGSVWTSLPPISNSSTKHQKPIIMVTASQDSASFFRDRSLGADSPISGLIALLTAVDALSHLHDISNLKKQLVFAVFNGEKMXMHSNSASESLGSDNVKVKPAASSNPGVPPSSLMSFLGKNSSTPGLVLEDFEGXSSISMKMVDALQSASESLGSDNVKVKPAASSNPGVPPSSLMSFLGKNSSTPGLVLEDFDSQFSNRFYHSTLDGPANVNSSSIAAAAALIARSLYILASADLPIDLITLNTIKVNVSLVEELIGCLLKCDPGLSCGIVKSFISPSNSCPSHYVGVFQDLPAGTQFPSYADDISRFIWNFLADRTSSLADPVWTESFWNTIGLRVYAVQATSYDWLVLLIGIIITVASYFAVIVGRSYISKIIKRD

SEQ ID NO: 137638 - protein, 884 aa, Oryza sativa
  Clone ID: PAT_MRT4530_39101C.1.pep
MPVRCNGRRVAAEVLGAVVGLLNELDAGQRQELHQLKANDYSIPLAGVHQRSGEQVSGTSVFDVLHREKAAIRHCDFTMAGFADALRPDKFTGVHFKRWQIRVTLWLTAMKCFWVSTGKPEGVLTAEQQKQFEEATTLFVGCILSVLGDRLVEVYMHMTDAKELWDALNSKFGATDASNDLYIMEQFHDYKMADNRSVVEQAHEIQAMAKELELLKCVLPDKFVAGCIIAKLPPSWRSFGTALKHKRQEYSVEGLIASLDVEEKAREKDAASKGDGGQSSANVVHKAQNKSKGKYKAQQTTNFKKQKKNNNNPNQDERTCFVCGQVGHLARKCPQRKGMKAPAGQTSKSANVTIGNTGDGSGYGNLPTVARGSTVLMGNGSHASVHGVGTVDLKFTSEKIVQLKNVQHVPSIDRNLVSGSQSRDAIFFESFFPMKDTHSGSNQPSEIIPSSITPPEQTEHTHELVSEEDVSEAPRRSKRQRTAKSFGDDFTVYLVDDTPKSISEAYASPDADYWKEAVRSEMDSIIANGTWEVTERPYGCKPVGCKWVFKKKLRPDASHGLLVHQMDVKTAFLNGELDEEIYMDQPDGFVVEGFAVNEADKCVYYRHGGGEGVILCLYVDDILIFGTNLEVINESHYVEKILNRFGYIDSKPSPTPYDPSLLLRKNKRIARNQLEYSQIIGSLMYLASATRPDISFAVSKLSRFTSNPGDDHWRALERVMRYLKGTVELGLHYTGYPAVLEGYSDSNWISDVDEIKATSGYVFTLGGGAVSWRSCKQTILTRSTMEAELTALDTATVEAEWLRDLLMDLPVVEKPVPAILMNCDNQTAAAAVPKVLIADDCYLSMPSPISSATSSATESPRPPHRLGPGSSSRRTLSAPPPAIR

SEQ ID NO: 137639 - protein, 1134 aa, Oryza sativa
  unsure (1)..(1134): unsure at all Xaa locations
  Clone ID: PAT_MRT4530_39102C.1.pep
GRALKHKRQEYTVEGLIASLDVEEKARGKDVMSKDDGGQSSANVVHKAQNKNKGKYKPQQTTNFKQKKNNNNPNQDERTCFVCGXPGHLAKKCPQRKGMKAPTGQPSMTIGNTVDGSGYGNLPTVFSVNQSTNWCVDIGANLYVCADISLFSSYQVTRDSTVLMRNGLHASIHGAETVDLKFTSRKIVQLKNVQPVPTINRNLVSGSCLTRDGFKLVLXYNKVVVSKHGXFIGKGYECGGLFHFSISDFCNKSVNYICGSVDDEANVWHSRLCHINFRLMSQLSSMCFIPKFSIVKGSKCHSCVQSKQPRKPHKAAEERNLAPLELLHSDLREMNGVLTNGGKXYFMMLIDDATRVCYVYLLKMKDEALDYFKMYKTEVENXLDKKIKRLRSDRGGEFYSNEFDLFREKHSIIHERTPPYSPESNGIAERKNRTLTYLLNAMLDTAGLPKAWSGEXHVLINSSRIKNHFPNRVKRAWPGAIWDGRKPISKELQGXACLAWSNLGWVTDREILPGCTRVRTKLVAYANHXMQILPGCTRVRTKLXRMQITNMQELQVNDYLRDNMLLKVTDSDPWYGTIVNFMVAGMXPPEENKKRLIYESRKHLRDARYLYIVCSDGLLRRCVLVDEGMKIIEKCCAAPYGGHYGAFRTHTQIWQSGFFWPSIPSETFCKNLGLSTTLPSVSSPDKWTSRNEQQTXIKNILQKTVNDMGKTWKNKLPNALWAYRTAYKTPIGMSPYQLVHGKTCHLPVELEHRAHWXNPDLDVMMKKKEKKKKIAMHSPKFQKRKNKWRRRYTKGVIIISIFLCSPTNLPYTCTFLTRKYVXCIFMDPLFDFAVYVEVXNSVVESIAFTRDEQRLSVGVLLTVLKXIFDRQYLHIMKXKYGIQLSGRVYYXSFPPVLVKYVYAGILRKKHIXKRQTAPPRIQDTFTWIGGPISPEVFRALADLSVVVRNTNNDHWRALEXVVYLRDTMDLELHYTGYLAVLERYSDANWISDMDEIKATSGYVFTLGGGAVSLRSCKHTISMRSTMEXRDTATVEAEWLRDLLMDMPIVEKPVPAILMNCDNXTVIIKVNSSKDNMKSSGYVKIRLKYVRKLRNSGVITLDYIQIGRNLANPFMKGLSRNMIDNSSNEMGLRPM

SEQ ID NO: 137640 - protein, 105 aa, Oryza sativa
  Clone ID: PAT_MRT4530_39103C.1.pep
GNISLLASSGASGRPWTKSCRCSLLNNHSSVFTAGRFSPSSRRSLSRTGFPWKVLQNATRVWELSIEMIKHPSKNVNLQTLVASYQYYVHRSLWSYNVLFLHLKW

SEQ ID NO: 137641 - protein, 92 aa, Oryza sativa
  unsure (1)..(92): unsure at all Xaa locations
  Clone ID: PAT_MRT4530_39104C.1.pep
VDKSRVTYPDSMSFSRTGFFGTFPKQNKSEFPAAKQNXKRRLHLRKVRNQFQRTIRRXTSCTPDFWNISKTKQIRISHSKTKLKNEAASAKV

SEQ ID NO: 137642 - protein, 971 aa, Oryza sativa
  unsure (1)..(971): unsure at all Xaa locations
  Clone ID: PAT_MRT4530_39105C.1.pep
MAKELELLKFVLPDKFVVGCIIAKLPPSWRGFGTALEHKRHEYSVKGLIASLDVEEKAREKDAASKGDGGQSSANVVHKAQNKSKGKYKAQQTTNFKKQKKNNNNPNQDERTCFVCGQPGHLARKCLQRKGMKAPAGQTSKSANVTIGNTGDGSGYGNLPTVFSVNQSTNWWVDTRANVHVCADILLFSSYQVARGFTVLMGNGSHASVHGVGTVDLKFTSGKIVQLKNVQHVPSIDRNLVSGSRLTRDGFKLVFESNKVVVSKHGYFIGKGYECGGLFRFSLFDFCNKSVNHICGSVDDEANVWHSRLCHINFGLMSRLSSMCLIPKFFIVKGSKCHSCVQSKQPRKPHKAAEERNLAPLELLHSDLCEMNGVLTKGGKRYFMTLIDDATRFCYVYLLKTKDEALDYFKIYKADVENQLDRKIKRLRSDRGGEFFSNKFDLFCEEHGIIHERTPPCSPESNGIAERKNRTLTDLVNAMLDTAGLPKAWRGEALLTSNHVLNRVPNINKDKTPYEIWIGRKPSLSYLRTWGCLAKVNVPITKKRKLGPKTVDCVFLGYAHHSIAYRFLIVKSEVPDMHVGTIMESRDATFFESFFPMKDTHSSSSQPFEVIPSSITLPEQTEHTHEHVTEEDVSEAPRRSKRQRTAKSFGDDFTVYLVDDTPKSISQAYASLDVNYWKEAIRSEMDSIIANGTWEVTERPYGCKSVGCKWVFKKKLRPDGTIEKYKARLVAKGYTQKEGEDFFDTYSPIARLTTIRVLLSLAASHGLLVHQMDVKTAFLNGELDEKIYMDQPDRFVVEGQQGKVCKLLKSLYDLKXAPKQWHEKFDRTLTSARFAVNEADKCVYYHYGGGEGVILCLYVDDILIFGTNLEVISEVKSFLSQSFHMKDLGVADXINIKLIRGENGTTLLQSHYVEKILNRFGYIDSKPSQTPYDSNLLLRKNKRIAGNQLEYSQIIGSLMYYAGALLVGIHM

SEQ ID NO: 137643 - protein, 82 aa, Oryza sativa
  Clone ID: PAT_MRT4530_39106C.1.pep
KSDLYAQVGYTQRNYDVSLPHNKIPDLLSALAKKMAIPAMPSGEEFKPEAAIVNYYGIGDMLGGHVDDMEADWSKPIVSIRL

SEQ ID NO: 137644 - protein, 182 aa, Oryza sativa
  unsure (1)..(182): unsure at all Xaa locations
  Clone ID: PAT_MRT4530_39107C.1.pep
MAPTTTMGSALYPLGEMRRSQRADGLAAVLAIGTANPPNCVTQEEFPDFYFRVTNSDHLTALKDKFKRICQEMGVQRRYLHHTEEMLSAHPEFVDRDAPSLDARLDIAADAVPELAAEAAKKAIAEWGRPAADIXHLVVTTNSGAHVPGXVDFRLVPLLXLRPSVRXTMLHLNGCFAGWAAL

SEQ ID NO: 137645 - protein, 1028 aa, Oryza sativa
  Clone ID: PAT_MRT4530_39108C.1.pep
MGTKTNPDRWNGSLSQGLGEGGLFFEDESGYDDKVGVGSAGQTGRQASQASGTPAVRPTHDVGQTGLGRRLRVLLMLLEMVLQKLLLRPILIQNVDQLQKLLLLCTFTADIRRNTIIGNIGERTARLVWLLPVTRPNCGKGETSVKGNTGGKTYIRVLGNHVEHGGGVLELISKPHILKAQVSVLYYYSIPLAGVHQRSGEQVSGTSAFDVLHREKAAIRVTLWLTAMKCFWVSTGKPEGVLTAEQQKQFEEATTLFVGCILSVLGDRLVEVYMHMTDAKELWDALNTKFGATDASNDLYIMEQFHDYKMADNRSVVEQAHEIQTMAKELELLKCVLPDKFVAGCIIAKLPPSWRSFGTALKHKRQEYSVEGLIASLDVEEKAREKDAASKGDGGQSSANVVHKAQNKSKGKYKAQQTTNFKKQKKNNNNPNQDERTCFVCGQVGHLARKCPQRKGMKAPAGQTSKSANVTIGNTGDGSWYGNLPTVARGSTVLMGNGSHASVHGVGTVDLKFTSGKIVQLKNVQHVPSIDRNLVSGSRLTRDGFKLVFESNKVVVSKHGYFIGKGYEYGGLFRFSLSDFCNNMCLIPKFSIVKGSKCHSCVQSKQPRKPHKAAEERNLAPLELLHSDLCEMNGVLTKEVENQLDRKIKRLRSDRGGEFFSNEFDLFCEEHGIIHERTPPYSPESNGIAERKNRTLTDLVNAMLDTAGLPKACEAPRRSKRQRTAKSFGDDFIVYLVDDTPKSISEAYASPDADYWKEAVRSEMDSIIANGTWEVTERPYGCKPVGCKWVFKKKLRPDASHGLLVHQMDVKTAFLNGELDEEIYMDQPDGFVVEGFAVNEADKCVYYRHGGGEGVILCLYVDDILIFGTNLEVINESHYVEKILNRFGYIDSKPSPTPYDPSLLLRKNKRIARNQLEYSQIIGSLMYLASATRPDISFAVSKLSRFTSNPGDDHWRALERVMRYLKDYSIPLAGVHQRSGEQVSGTSAFDVLHREKAAIRFLGSASRDCSLFVRDGSPSSSLACFVPS

SEQ ID NO: 137646 - protein, 70 aa, Oryza sativa
  unsure (1)..(70): unsure at all Xaa locations
  Clone ID: PAT_MRT4530_39109C.1.pep
ELVIXHILDYLVKSSYSLLGGSRGRRSFRPSQIKMIVIRPPYLLDTLPPDKEYVLSTMSSAGTLPDFTLG

SEQ ID NO: 137647 - protein, 144 aa, Oryza sativa
  Clone ID: PAT_MRT4530_3910C.1.pep
VSTASLNLYGSHPFYMDVRSGGGGGGGAAHGVLLLNSNGMEVIYGGSYVTYKVIGGVLDFYFFAGPSPLAVVDQYTQLIGRPAPMPYWSFGFHQCRYGYKNVADLEGVVAGYAKARIPLEVMWTDIDYMDAYKDFTLDPVNFPA

SEQ ID NO: 137648 - protein, 78 aa, Oryza sativa
  unsure (1)..(78): unsure at all Xaa locations
  Clone ID: PAT_MRT4530_39110C.1.pep
LSLLNFDWEHDHPNYISENISMLLKLNMPHSAILCRSMRPYKALQFCVFCXTMRIEYASIAHEIVVMYRSKVFYRXKM

SEQ ID NO: 137649 - protein, 1355 aa, Oryza sativa
  Clone ID: PAT_MRT4530_39111C.1.pep
MAGFADTLRPDKFTGVHFKRWQIRVSTGKPEGVLTAEQQKQFEEATTLFVGCILSVLGDRLVEVYMHMTDAKELWDALNTKFGATDASNDLYIMEQFHDYKMADNRSVVEQAHEIQTIAKELELLKCVLPDKFVAGCIIAKFPPSWRSFNTALKHKRQEYSVEELIASLDVEEKAREKDAASKGDDGQSSANVVHKAQNKSKGKYKAQQTTNFKKQKNNNNNPNQDERTCFVCGQPGHLARKCPQRKGMKAPAGQTSKSANVTIGNTGDGNGYSNLPTVFSVNQSNNWWVDTGANVARGSTVLMGNGSHASVHGVGTFSIVKGSKCHSCVQSKQPRKPHKAAEERNLAHLELLHSDLCEMNGVLTKGGKRYFMTLIDDATRFCYVYLLKTKDEALDYFKIYKAEVENQLDRNIKRLRSDRGGEFFLYEFDLFCEEYGIIHERTPPYSPESNGIAERKNRTLTDLVNAMLDTAGLPKAWWGESISEAYASPDADYWKEAVRSEMDSIIANGTWEVTERPYGCKPVGCKWVFKKKLRPDSTIEKYKARLVAKGYTQKEGEDFFDTYSPVARLTTICVLLSLAASHGILVHQMDVKTAFLNGELDEEIYMDQPDGFVVEGQEAKVCKLLKSLYSLKQAPKQWHEKFDRTLTSACFAVNETDKCVYYRHGGGEGVILCLYVDDILIFRTNLEVINEVKSFLSQKFDMKDLGVADVILNIKLIRGKNGITLLQSHYVEKILNHFGYIDSKPSPTPYDPNLLLRKNKRIARNQLEYSQIIGSLMYLASATRPDISFAVSKLSRFTSNPGDDHWRALERVMRYLKGTMELGLHYSGYPAVLEGYSDSNWISDVDEIKATSGYVFTLGGSAVSWRSCKQTILTRSTMEAELTALDTATVEAEWLRDLLMDLPIVEKPVPAILMNCDNQTVIVKVNSSKDNMKSSRHVKRRLKSVRKLRNSGVITLDYIQTTRNLADPFTKGLSRNVIDNASKEMGLRPMTAVTAGGRWRHTRQIIPKEFVQRLKGDIPGEIQLETRNRNSHTVRVDKTQEKVIFTEGWAQFVKTFDLQMGDSMMFRFNGNSQFDVIIVDQIGREKACSAVVDDSQNPNVQERRVDATETLNSSRAHSQPMPMQSTTETVNHSHARPCPMHTAVDCMPLSHAHPQPMPMQFPTETVNHCHAPTGPMEMPLENVALSHAHARPLQMQSQPTDRLTQVQRGYSLSSKDQDCRVGVIPDPIIGQKTILSRVQVNVVKRKIQNIGSQIPIFVSVIGKNNASGRISSLSIANRYVDNYLQDEKTIRLSRLGDKWNIRLSDSSGNRRMVGGCRKFAEDNDVGVGDICLFELLKNHKCTMKVHIIRAKDIC

SEQ ID NO: 137650 - protein, 118 aa, Oryza sativa
  Clone ID: PAT_MRT4530_39112C.1.pep
IVQYYRVCVPNNWAASRKEEVHLFFQKAPSISSNCTTTPHLLSLRRHCGASGRPGSPAATAFIGGMELPTFGMLGRVPVFSSAQAAAYRSLSAMDGLRRRPAAVCSSRRSAARRRPST

SEQ ID NO: 137651 - protein, 189 aa, Oryza sativa
  unsure (1)..(189): unsure at all Xaa locations
  Clone ID: PAT_MRT4530_39113C.1.pep
MLGLFRFSISDFSNKSVNHICSSVDDNANVWHSRLCHIIFGLMSRLSSMCLIPKFSIVKGCKCAKCHCCVQSKQPRKPHKAAKERNLAPLXLLHSDLCEMNGGIDEGFCYVYLLKMKDEDLDYFKIYKTKVENQLDKKIKRLRSDRGGEFFSNELDLLCEEHGIIYERMPPYSPESNGXAERKNRTLTC

SEQ ID NO: 137652 - protein, 167 aa, Oryza sativa
  Clone ID: PAT_MRT4530_39114C.1.pep
MGRPTRAAGKDRPSKSHRKKRKKILFKSKPLSLISSPRELGGERAMAAEEGVVIACHNKDEFDAQMTKAKEAGKVVIIDFTASWCGPCRFIAPVFAEYAKKFPGAVFLKVDVDELKEVAEKYNVEAMPTFLFIKDGAEADKVVGARKDDLQNTIVKHVGATAASASA

SEQ ID NO: 137653 - protein, 1200 aa, Oryza sativa
  unsure (1)..(1200): unsure at all Xaa locations
  Clone ID: PAT_MRT4530_39115C.1.pep
MASSSISAGNPFSGHAVPKKLTRTNFLLWKGQILPVIRGARLEGYLTGATQAPSAVIDAKEGEATVKKSNPAFETWIAADQQVLGFLLSTLSKEILTQVIHMETAAQVWKAINEMLSSQSRARSLNTRLALATTQKVDLSVSDYINKMKILADEMTSAGKPMDDEELMSYILAGLDDDWEPVVSSLVGRPDAVSFSEFYSQLLSFESRQKLRHAAAHQSSANSAKCGGGRGGYTPFNRGGHSGNNGGRGNSNNGGRGGGRGNNNGGRGGKPRPVCQLCGKTGHVVADCLYRYDENFVSDNKMAAAASYGVDTNWYVDTGATDHITRELDKLTTREKYNGKDQIYMASGAGMDIKHIGHSVIHTPTRNLYLKNILHVPKAKKNLLSARRLALDNHAFVEVHSRFFAIKDQVTRNLLLRGPCRNGLYPIPQSSLSSSKQVFGAIKPTISKWHSRLGHPSLSIVQKVVNNNNLPCLGDINELGVCDACQRGKSHQLPYPKSFSVSNNPLELVFSDVWGPAPDSVGGRKYYVSFIDDFSKFTWIYLLKKKSEVIHKFHEFQQLVERMFNRKIIAMQSDWGGEYEKLHSFFTKIGITHHVSCPHAHQQNGSAERKHRHIVEVGLSLLAHASMPLKFWDEAFLAATYLINRTPSKVIQYSTPLERLLHQKPNYSSLRTFGCACWPNLRPYNTRKLQFRSKQCVFLGYSNIHKGFKCLDVATGRVYISRDVVFYENIFPFSNLHSNAGVRLKSEILLLPSTLLNPEVASRGIQENGYMFNSPPVESNIFDEQVSEQGEEGEQNSYAAHDTENPDDGGNDFSVASDAENSGSEPAANTHGAENENSATAAGSTTAEPANGSGGGKSASRSSSSTAIGSSVTANQSVDDSVQVQQQQTRPTTRLQRGIRKEKVYTDGTVRYSFLASSSEEPQSLNEALADSNWKQAMDTEFTALIHNKTWHLVPPQHGRNVTDCKWVYKIKRKADGSLDRYKARLVAKGFKQRYGIDYEDTFSPVVKAATIRAILSIAISRGWCLRQLDVQNAFQHGLLEEESSKADTSLFFYSKGSVTIFVLIYVDDIIVASSTQDAAEALLRDLKQDFALKDLGDLHYFMGIEVNKNLTLTRPDISFAVNKVCQFLHAPTLQHWMAVKRILRYVKSSVDLGLKINRSSSTLVSAFSDADWAGSVDDRRSTGGFXAVFLGSNLVSWSA

SEQ ID NO: 137654 - protein, 322 aa, Oryza sativa
  unsure (1)..(322): unsure at all Xaa locations
  Clone ID: PAT_MRT4530_39116C.1.pep
MRQAAGHEGDRRRRQGFYYRWGRAVADGRARWRRSSAAGDARWSSAEDGXIGYHYLWLYAADTSRWAADGDSLALAGGWPAGGEKAGGVMRERRRTSVAGDGRRRGSRPPHRVGRRPADDVQLRVVTAENELEDAAAAGGRCRRCHGGRVVGHRQGRRAGAEYLTIGVDDRPLFHGRTPIQLYADFMKRFRENMAGFLDSGLIVDIRGWAWPCKVAATEAGHPKWELPDAAAGEYNDTPEDTFFFTADGGTYLTEAGRFFLTWYSNKLVEHGDKILDEMNMGPAGLLTPRGGLWPRRQPPTPSFSPASPRRPSLHPPTCAEK

SEQ ID NO: 137655 - protein, 98 aa, Oryza sativa
  unsure (1)..(98): unsure at all Xaa locations
  Clone ID: PAT_MRT4530_39117C.1.pep
LLTPKPPDSDPPTNLEDPGFGGSPPPPPTNRRPPAXQPPPLPPDRQPAPPSAFPADQRPDLVDVPXPPSPTVGVFGLSPRPPTSSTSPSPPSPPPISD

SEQ ID NO: 137656 - protein, 330 aa, Oryza sativa
  unsure (1)..(330): unsure at all Xaa locations
  Clone ID: PAT_MRT4530_39118C.1.pep
MLSRRHRLIGVASPAATELRRAFRSEAALEAIRAHSKDADGPAHLAXYNYPTFAGGYAALAADLFHRRLRRRLLVLPFSSVEPFSVIAFDHRRSTLARIPHLGHCPSNLELNIDTTKSSARATFDYFSRNLAEIKSDSDMCEKLLDQEDEERVFNVLKYIEDADLRQWKLPNAKEFQTALRDERAKLNCITNPLVFEQLQQLDVCNLLSRGKSLAHDRFEAAGKLIHKPFRIHLGRGLHGECLAIRADGNSKLSHEIGLELSKMSTAAGLRPIGAVVFMQRGLLKICLRTTDSSTNTAEIAKAYGGGGKPSSSSFALRMDEFNAWISVNS

SEQ ID NO: 137657 - protein, 56 aa, Oryza sativa
  unsure (1)..(56): unsure at all Xaa locations
  Clone ID: PAT_MRT4530_39119C.1.pep
TRMKEGQNDIYYITGEXKKAVENSPFLEKXLKKKGYEVSTWFDAIDEXYAVGQLKE

SEQ ID NO: 137658 - protein, 243 aa, Oryza sativa
  Clone ID: PAT_MRT4530_3911C.1.pep
MVKLTMVARVTDGLPLAEGLDDGRDQKDADFYKQQAKLLFKNLSKGQHEASRMSIETGPYFFQYPYVLYIIEGRVCYLTMCDRSYPKKLAFQYLEDLKNEFERVNGSQIETAARPYAFIKFDTFIQKTKKLYLDTRTQRNLAKLNDELYEVHQIMTRNVQEVLGVGEKLDQVTEMSTRLTSDTRMYADKAKDLNRQFTIYGQLRLIYGMHKPFGFQALIRKYAPVAIVIGVVLMLFWLKNKIW

SEQ ID NO: 137659 - protein, 140 aa, Oryza sativa
  Clone ID: PAT_MRT4530_39120C.1.pep
MKEKEDDGDAEKKKRREPPCKQSSHTKRSLLLMRFATKEGGGGGGAQLVRHHTSIHHSLSLTHSLSSLLLRDGQEKIGASQFMSKVCSSTSTTTTQYCDNQHTTGRLTAAAAQREEEQQQLQWPCKAKPSALLAVCVAVW

SEQ ID NO: 137660 - protein, 499 aa, Oryza sativa
  Clone ID: PAT_MRT4530_39121C.1.pep
MAGELGQQTVELGAVVRRAAEDSYLALRELVEKSRVEAEGKNGQQRSDTEKKIDLLKFIDRTRQRMLRLHVLAKWCQQVPLVHYCQQLASTLSSHETCFTQTADSLFFMHEGLQQARAPIFDVPSAIEVLHTGSYRRVPKCVEEIGTQNTLFQDEQKPTLKKLSTLVRAKLLEISLPKEISEVSVTDGIANVQVDGEFKVLITLGYRGHFSLWRILHMELLVGEKAGPIKLEETRRYALGDDIERRMAVADNPFMILYTILHELCISLVMDTVIRQTNVLRQGRWKDAIKSELISDIGTGQGGSNAVMQLGQDGELDSSGSRIPGLKINYWLEEKNNASAESDSSPYIKIEAGQDMQIKCQHSSFVLDPFTDKEADLSIDLSCIDVEALILKAIACNRHTRLLEIQRELMKNVQMSQSSTEVILKREVHGEGFQKRVHRRDSNDCCTNEMLQVRAYGQSYIDLGINISNTLVKVPNILHYESIVILIRAGTIIGDNSSM

SEQ ID NO: 137661 - protein, 52 aa, Oryza sativa
  Clone ID: PAT_MRT4530_39122C.1.pep
MPISTANQRRLYRVTVVEGDDPTAGGDQEIVVLFRYTRYSRTWNRRKGIAIR

SEQ ID NO: 137662 - protein, 154 aa, Oryza sativa
  unsure (1)..(154): unsure at all Xaa locations
  Clone ID: PAT_MRT4530_39123C.1.pep
LITVEKAAGGHGSWPELARAFRAGLNRVDLGEETTLXSREREEREDAGREEDDDLARGPHAGARRQRACDARARGKEGRLGQGAAWAGRPAQEERRERRPGGEXGGGGSGPGGGGEAREREGKEREERETLGWAKREREDFGPDLAQRRKEDYF

SEQ ID NO: 137663 - protein, 84 aa, Oryza sativa
  unsure (1)..(84): unsure at all Xaa locations
  Clone ID: PAT_MRT4530_39124C.1.pep
VPPRRCXLGAAAPHRVPRQASXSPCAAVEPEGVADPNEGQDPQDYEQGKSSLFLEHIDPNCEIVLFTNKIACNDKHPTCYYAMP

SEQ ID NO: 137664 - protein, 255 aa, Oryza sativa
  Clone ID: PAT_MRT4530_39125C.1.pep
METRRLPLRTAAYRPLALPAPWSGVGMRRRWLGNGAGVAAARPGKGGDDGSSDVRGREGGRTEHARQRMRVAWADGWVDGSRKGLTSGLTDPTCERREERLPFCPTTGWTLFQRASRFGRCSKKCPEVDVVPKHVQARFGAPMPPCGEAPSSTLLSSGPMLVQGSGKVLPCPPFTSTLGDCNSRLPASASTTSGICRCSSPQLTSKALESGEDAAAFCLHAGRSQPLSTFWLSHAGTITHSCRLVLRRLSAPLGS

SEQ ID NO: 137665 - protein, 203 aa, Oryza sativa
  unsure (1)..(203): unsure at all Xaa locations
  Clone ID: PAT_MRT4530_39126C.1.pep
MADNRSVVEHAHEIQTMAKELELLKCVLPDKFVAECIIAKLPPSWRGFGTALKHKRQEYSVEGLIASLDVEEKAREKDAASKGDGGQSTANVVHKAQNKSKGKYKAQQTTNFKKKKNNNNPNQDERTCFVCGQPGHLARKCPQRKGMKAPAGQTSKSANVTIGNTGDGSGYGGNXRAGFHRPNGEWVICFYSWCWHGRSSRTN

SEQ ID NO: 137666 - protein, 1561 aa, Oryza sativa
  Clone ID: PAT_MRT4530_39127C.1.pep
TPAKSFDQAAGLSVTSVSTGKPEGVLTAEQQKQFEEATTLFVGCILSVLGDRLVEVYMHMTDAKELWDALNTKFGATDASNDLYIMEQFHDYKMADNRSVVEQAHEIQTMAKELELLKCVLPDKFVAGCIIAKLPSSWRSFGTALKHKRQEYFVEGLIASLDVEEKAREKDAASKGDGGQSSANVVHKAQNKSKGKYKAQQTTNFKKQKNNNNNPNQDERTCFVCGQVGHLARKCPQRKGMKAPAGQTSKSANVTIGNTGDGSGYGNLPTVFLVNQSTNWWVDTGANVHVCADISLFSSYQVARGSTDLMGNGSHASVHGVGTVDLKFTSGKIVQLKNVQHVPSIDRNLVSGSRLTRDGFKLVFESNKVVVSKHGYFIGKGYECGGLFCFSLSDFCNKSVNHICGSVDDEANVWHSRLCHINFGLMSRLSSMCLIPKFSIVKGSKCHSCVQSKQPRKPHKAAKERNLAPLELLHSDLCEMNGVLTNGGKRYFMTLIDDATRFCYVYLLKTKDEALDYFKIYKAEVENQLDRKIKRLRSDRGGEFFSNEFDLFCEEHGIIHERTPPYSPESNGIAERKNRTLTDLVNAMLDTAGLPKAWWGEALLTSNHVLNRVPNRNKDKTPYEIWIGRKPSLSYLRTWGCLAKVNVPITKKRKLGPKTVDCVFLGYAHHSIAYRFLIVKSEVPDMHVGTIMESRDSIFFESFFPMKDTHSGSNQPFEIIPSSITPPKQTEHTHELVSEEDVSEAPRRSKRQRTAKSFGDDFTVFLVDDTPKSISEAYASPDADYWKEAVRSEMDSIIANGTWEVIELPYGCKPMGCKWVFKKKLRPDGTIEKYKARLVAKGYTQKEGEDFFDTYSPVARLTTIRVLLSLAASHGLLVHQMDVKTAFLNGELDEEIYMDQPDGFVVEGQEGKVCKLLKSLYGLKQAPKQWHEKFDKTLTSAGFAVNEADKCVYYRHGGGEGVILCLYVDDILIFGTNLEVINEVKSFLSQNFDMKDLGVADVILNIKLIRGENGITLLQSHYVEKILNRFGYIDSKPSPTPYDPSLLLRKNKRIARNQLEYSQIIGSLMYLASATRPDISFAVSKLSRFTSNPGDDHWRALERVMRYLKGTVELGLHYTGYPAVLEGYSDSNWISDVDEIKATSGYVFTLGGGAVSWRSCKQTILTRSTMEAELTALDTATVEAEWLRDLLMDLPVVEKPVPAILMNCDNQTTCEKTIEVCQEIKKLRSYNVGLHPNSEKPGRSLHEGTITKCDRQCIEGDGFETHKEEANKRLQGVQITTTAPIISHLLFADDSLLLFKATSVCADAVSRVLTNYCAASGQLVNFSKSCIFFSKKCDMAIREDIKRKVGMTNESITDRYLGLPTDVGRAKEGKFKYLKDRVWKRVQGWMEKTLSVGGKEVLIKSIVQAIPTYSMSCFRLPMGLCNHINSLIRKFWWASKQGSRKTNWVAWDKMTVPKFLGGMGFRDINIFNLVLLAKQGWRILQYPNSLAARVLKAVYFSNGDFLNAGLGSRPSHTWRAIIEGREILKLGIIRRIGSGKDTFIWDDNWIPRDWMLRPIRA

SEQ ID NO: 137667 - protein, 67 aa, Oryza sativa
  Clone ID: PAT_MRT4530_39128C.1.pep
SGSLQSWTELSAKKRTNRTGDHKSSFTSISQVTEKNPTKSSPGMKCSCSLHTTTTTSSSSPACSSLS

SEQ ID NO: 137668 - protein, 1210 aa, Oryza sativa
  Clone ID: PAT_MRT4530_39129C.1.pep
MAGFADALRPDKFTGVHFKRWQIRVTLWLTAMKCFWVSTGKPEGVLTAEQQKQFEEATTLFVGCILSVLGDRLVEVYMHMTDAKELWDALNTKFGATDASNDLYIMEQFHDYKMADNRSVVEQAHEIQTMAKELELLKCVLPDKFVAGCIIAKLPPSWRSFGTALKHKRQEYSVEGLIASLDVEEKAREKDAASKGDGGQSSANVVHKAQNKSKGKYKAQQTTNFKKQKKNNNNPNQDERTCFVCGQVGHLARKCPQRKGMKAPAGQTSKSANVTIGNTGDGSGYGRTGFHRPNGEWVTCFCSWCWHGRSEVYFGKDRAAEERAACPFYRQESCYECGGLFRFSLSDFCNKSVNHICGSVDDEANVWHSRLCHINFGLMSRLSSMCLIPKFSIVKGSKCHSCVQSKQPRKPHKAAEERNLAPLELLHSDLCEMNGVLTKGGKRYFMTLIDDATRFCYVYLLKTKDEALDYFKIYKAEVENQLDRKIKRLRSDRGGEFFSNEFDLFCEEHGIIHERTPPYSPESNGIAERKNRTLTDLVNAMLDTAGLPKAWWGEALLTSNHVLNRVPNRNKDKTPYEIWIGRKPSLSYLRTWGCLAKVNVPITKKRKLGPKTVDCVFLGYAHHSIAYRFLIVKSEVPDMHVGTIMESRDATFFESFFPMKDTHSGSNQPSEIIPSSITPPEQTEHTHELVSEEDVSEAPRRSKRQRTAKSFGDDFTVYLVDDTPKSISEAYASPDADYWKEAVRSEMDSIIANGTWEVTERPYGCKPVGCKWVFKKKLRPDASHGLLVHQMDVKTAFLNGELDEEIYMDQPDGFVVEGQEGKVCKLLKSLYGLKQAPKQWHEKFDKTLTSAGFAVNEADKCVYYRHGGGEGVILCLYVDDILIFGTNLEVINEVKSFLSQNFDMKDLGVADVILNIKLIRGENGITLLQSHYVEKILNRFGYIDSKPSPTPYDPSLLLRKNKRIARNQLEYSQIIGSLMYLASATRPDISFAVSKLSRFTSNPGDDHWRALERVMRYLKGTVELGLHYTGYPAVLEGYSDSNWISDVDEIKATSGYVFTLGGGAVSWRSCKQTILTRSTMEAELTALDTATVEAEWLRDLLMDLPVVEKPVPAILMNCDNQTTCEKTIEVCQEIKKLRSYNVGLHPNSEKPGRSLHEGTITKCDRQCIEGDGFETHSILEGTHLCELDCWSQSMKILGESSRKLTKDLGV

SEQ ID NO: 137669 - protein, 82 aa, Oryza sativa
  Clone ID: PAT_MRT4530_3912C.1.pep
MGPAAAIEGDLGLQIDPDVTASSFFSHTRGDTPPRCYSPPRCCFSPSQSPLLPGRHVSSSAKHSCSWSSLEASCAAAADPNA

SEQ ID NO: 137670 - protein, 54 aa, Oryza sativa
  Clone ID: PAT_MRT4530_39130C.1.pep
MPPKWRVARFTYCALRSLAALYKGCKGASSMEKVNMSRHATQIARSPTPRMGRG

SEQ ID NO: 137671 - protein, 1509 aa, Oryza sativa
  unsure (1)..(1509): unsure at all Xaa locations
  Clone ID: PAT_MRT4530_39131C.1.pep
MAAICGETISVDELWREILLRAPTKDVARSCCVSTQWRGIVRDPSFRKLHHDRHAVPSKDDVPDALLVITVNADGQSVSTVVPAMVSPVSTSQRAPMYRVIKNGISYSLANVCNGFLCFASWSRAKVVVCNPITGEKLAIPRAPPIGPDYKSSRARIDVYTLPTSGGKICVMTATGTPSWHPPEIPTLGPVLVVDVASEKHRMYSPPDNGCPAADETSFTAFELHGRLCLAIRISMTNTVQFWTLSVEEDDDDDDDLPWQLLYTIKINMKDGYNNGFQELEPMNDWFNGGNNGFIQVPEPMDAWLDGETHTLATERAAHCTLDYSIPLAGVHQRSGEQVSGTSAFDVLHREKAAIRSNDAFMLVFICDVMIYLWNKLNPYMPIISTIQKPYYRHCDFTMAGFADALRPDKFTGVHFKRWQIRVTLWLTAMKCFWVSTGKPEGVLTAEQQKQFEEATTLFVGCILSVLGDRLVEVYMHMTDAKELWDALNTKFGATDASNDLYIMEQFHDYKMADNRSVVEQAHEIQTMAKELELLKCVLPDKFVAGCIIAKLPPSWRSFGTALKHKRQEYSVEGLIASLDVEEKAREKDAASKGDGGQSSANVVHKAQNKSKGKYKAQQTTNFKKQKKNNNNPNQDERTCFVCGQVGHLARKCPQRKGMKAPAGQTSKSANVTIGNTGDGSGYGNLPTVFSVNQSTNWWVDTGANVHVCADISLFSSYQVARGSTVLMGNGSHASVHGVGTVDLKFTSGKIVQLKNVQHVPSIDRNLVSGSRLTRDGFKLVFESNKVVVSKHGYFIGKGYECGGLFRFSLSDFCNKSVNHICGSVDDEANVWHSRLCHINFGLMSRLSSMCLIPKFSIVKGSKCHSCVQSKQPRKPHKAAEERNLAPLELLHSDLCEMNGVLTKGGKRYFMTLIDDATRFCYVYLLKTKDEALDYFKIYKAEVENQLDRKIKRLRSDRGGEFFSNEFDLFCEEHGIIHERTPPYSPESNGIAERKNRTLTDLVNAMLDTAGLPKACIAYRFLIVKSEVPDMHVGTIMESRDATFFESFFPMKDTHSGLNQPSEIIPSSITPPEQTEHTHELVSEEDVSEAPRRSKRQRTAKSFGDDFTVYLVDDTPKSISEAYASPDADYWKEAVRSEMDSIIANGTWEVTERPYGCKPVGCKWVFKKKLRPDGTIEKYKARLVAKGYTQKEGEDFFDTYSPVARLTTIRVLLSLAASHGLLIHQMDVKTAFLNGELDEEIYMDQPDGFVLEGQEGKVCKLLKSLYGLKQAPKQWHEKFDKTLTSAGFAVNEADKCVYYRHGGGEGVILCLYVDDILIFGTNLEVINEVKSFLFQNFDMKDLGVADVILNIKLIRGENGITLLQSHYVEKILNRFGYIDSKPSPTPYDPSLLLRKNKRIARNQLEYSQIIGSLMYLASATRPDISFAVSKLSRFTSNPGDDHWRALERVMRYLKGTVELGLHYXGILRYWRVIVILTGSLMWMRSKPLVDMFSHWVVVLFHGGLANRQF

SEQ ID NO: 137672 - protein, 53 aa, Oryza sativa
  unsure (1)..(53): unsure at all Xaa locations
  Clone ID: PAT_MRT4530_39132C.1.pep
XHQANSRLIKIVIWDRSFRSIHXXLGLREFASVQFSLHLRGIYMPIFLHIFIV

SEQ ID NO: 137673 - protein, 229 aa, Oryza sativa
  unsure (1)..(229): unsure at all Xaa locations
  Clone ID: PAT_MRT4530_39133C.1.pep
MVRPQNWLLTLAHMQSPFAVLFCCRKIRICFVXLETFRKIRCVKTAWSPDKLRATYLARCGVRISYARLIRLGYAEWRSCGRPDQATYLYLNRAAAFTQHTRNQSRVCLLLCVAPSLVDYSIPLASVHQRSGEQVSGTSAFDILHREKAAIRFLGSASRDCSLFVRDGSPSSPLACCAHSSTLATASSSVAAAVISGAGELGSFLQWLQTNFSFNSNPLRTLTPRLLHS

SEQ ID NO: 137674 - protein, 914 aa, Oryza sativa
  Clone ID: PAT_MRT4530_39134C.1.pep
MADQGHSVAGSDEMLLGVYMTDAKELWDALNTKFGATDASNDLYIMEQFHDYRMADNRSVVEQAHEIQTMAKELELLKCVVPDKFVAGCIIAKLPPSWRSFGTALKHKRQEYSVEGLIASLDVEKKAREKDAASKGDGGQSSANVVHKAHNKSKGKYKAQQTTNFKKQKKKKNNPNQDERTCFVCGQPGHLARKCPQRKGMKAPAGQTSKSANVTIGNTRDGSGYVARGSTVLMGNGSHASVHGVGTVDLKFTSGKIVQLKNVQHVPTIDMNLVSGSRLTRDGFKLVFESNKVVVSKHGYFIGKGYECGGLFCFSLSDFCNKSVNHICGSVDRGGKNKTEPKNRTEKTETETEKTEIETEKTETEKFGSDHGGELFSNKFDLFCEEHGIIHERTPPYSPESNGIAERKNRTLTDLVNAMLDTAGLPKAWWGKALLTSNHVLNRVPNRNKDKTPYEIWIGRKPSLSYLRTWGCLAKVNVPITKKRKLGPKTVDCVFLGYAHHSIAYRFLIVKSEVPDMHVGTIMESRDATFFESFFPMKDTHSSSSQPSEIIPNSITEHTHEHVTEEDVSEAPRRSKRQRTAKSFGDDFTVYLVDDTPKSISEAYASPDADYWKEAVRSEMDSIIANGTWEVTERPYGCKPVGCKWVLKKKLRPDGTIEKYKARLVAKGYTQKEGEDFFDTYSPVARLTTIRVLLSLEDSHGLLVHQMDVKTAFLNGELDEEIYMDQPDGFIVEVNEADKCVYYRHGGGEGVILCLYVDDILIFGTNIEVINESHYVEKILNHFGYIDSKPSPTPYDPSLLLRKNKRIARNQLEYSQIIGSLMYLASATRPDISFAVSKLSRFTSNPGDDHWCALERVMRYLKGTMELGLHYTGYPAVLEGYSDSNWIFDVDEIKATSGYVFTLGGGAVSWRSCK

SEQ ID NO: 137675 - protein, 78 aa, Oryza sativa
  Clone ID: PAT_MRT4530_39135C.1.pep
MEWLLVGWLRLREAGSDEASEAGWHRRDGETTQAKDGLALPAVACFACYARLENNTVIGLRFVGRRRKEGRRGNCGWD

SEQ ID NO: 137676 - protein, 1145 aa, Oryza sativa
  Clone ID: PAT_MRT4530_39136C.1.pep
MAGFADALRLDKFTGVHFKRWQIRVTLWLTAMKCFWVSNGKPEGILTADQQKQFEEATTLFVGCILSVLGDRLVEVYMHMTDAKELWDALNTKFGATDASNDLYIMEQFHDYKMADNRSVVEQAHEIQTMANELELLKCVLPDKFVAGCIIAKLPPSWRSFGTALKHKRPEYSVEGLIASLDVEEKAREKDAASQGDGGQSSANVVHKAQNKSKGKYKAQQTTNFKKQKKNNINPNQDERTCFVCGQPGHLARKYPQRKGMKAPAGQTSKSANVTIGNTGDGSGYGYECGGLFRFSLSDFCNKSVNHICGSVDDEANVWHSRLCHINFGLMSRLSSMCLIPKFSIFKGSKCHSCVQSKQPRMPHKAAEERNLAPLELLHSDLCEMNGVLTKGGKRYFMTLIDDATRFCYVYLLKTKDEALDYFKIYKAEVENQLDRKIKWLKSDRGGEFFSNEFDLFYEEHGIIHERTPPYSPESNGIAERKNRTLTDLVNAMLDTAGLPKAWWGEALLTSNHVLNRVPNRNKDKTPYEIWIGRKPSLSYLRTWGCLAKVNVPITKKRKLGPKTVDCVFLGYAHHSIAYRFLIVKSEVPDMHVGTIMESHDATFFESFFPMKDTHSGRGPNQAAPPPSSPGVADRWGPPVGSFPHLQPTPHPQPPHPQPPPRPRLRLLRATSTTFPVAPSRFFPISPTSPELPITPAPCNHPPPPFLLLRPPLAAARVAAAPRRLRRRVRKAKLHPGRPFPVEFRRRNSHPLALRAPRIPSASGRRPPVTCRRRSPSSSSAPATLAPPPFGAAFAPPSPPSVAVIGNARARAVAVAVAAWPALSRAGSPPPVRSTPRAIWAVGSVDRRWTTRVVPVHDSGSSDAPVYFEIVAEVPPAAEQGKSCLSLEHVDPIFRRIQARVGVMERGGPCDGLCRFRIHLGMRGDCPLPAGDGDYSIPLTGVHRRSGEQVSETSTFDVLHREKAAIRFLGSASRDCSLFVRDGSPSSPLACFAFSSTLATASSSCRATDLSTTLLPPPFPPELGRRRDCRRGENGGVARGAEGEAEGAVRSEGAVDGEGRQEDDDDGVVGGGVRVGKEKRRVYSWKIRSLIMVLYLTFGDFLLFLKNRAATVLATASVTKGRVQVPPSNVIYVPGATPQQSIGVY

SEQ ID NO: 137677 - protein, 217 aa, Oryza sativa
  unsure (1)..(217): unsure at all Xaa locations
  Clone ID: PAT_MRT4530_39137C.1.pep
CLAWQAARVHDVRVECSAKLAPHPCADAAFFCSFVLLREIRICFVLETFRKIRCVKTAWXRISYARLIRFGYAEWRSSGRPDQATYLYINRAAAFTQNTRNQSRVCLLLCVAPSLVDYSIPLASVHRRSGEQVSGTSAFDVLHREKAAIRFLGSASRDCSLFVRNGSPSSPLASCAPSSTLATASSSCRATGLSAISVRPQMVDNLGGTPLKTQSFI

SEQ ID NO: 137678 - protein, 163 aa, Oryza sativa
  unsure (1)..(163): unsure at all Xaa locations
  Clone ID: PAT_MRT4530_39138C.1.pep
KTSRYGRTESSRVKRFQKPYRRLLPVQDVEGRGSRDLLSXSPVHAGERDGVVYERRRSTEAPAXSPLHVTXMDKSRVTYPDSMSFSRTGFFGTFPKQNKSEFPAAKQNXKRRLHLRKVRNQFQRTIRRXTSCTPDFWNISKTKQIRISHSKTKLKNEAASAKV

SEQ ID NO: 137679 - protein, 401 aa, Oryza sativa
  Clone ID: PAT_MRT4530_39139C.1.pep
MESMMTPKRTVKKDSLVGQAAKTMPKTVNMTSSNIPGHAVVNKGTDSGKSSVVNRRAKPETIQQRLKAVTGNTVDIVGRSKLVVKEVPGIMGVRRPSSPALQRPSTRERRPVTRDSSRKAPEVATMCRPSTAERRPATRELAPKQANTVVPCRPSTPNRRPMTRELAPVHSSIATPRRPSTAERRPITRGMAPMHPSIATPVRPSTAERRPTSKQMAQKHVGMATPSRPSTAERRPITREAARKNADVAILHRPSTAERRPITRETPQKHANVVALHRPSTAERRPVVREIAPKHADVTLTPARRPSTSERRPVTRETALRHSNFTGSCWPLTPQRHISRGSAQIHADVSTTPRHPSTGERRPITKESNIKLDEKTPIKLRGMLANPKGAMATVVTPQKAI

SEQ ID NO: 137680 - protein, 51 aa, Oryza sativa
  unsure (1)..(51): unsure at all Xaa locations
  Clone ID: PAT_MRT4530_3913C.1.pep
LNLLIRNADNGMKKGNWFRVSMLTNDVTENLVKILLREGXLIESVRKHQGK

SEQ ID NO: 137681 - protein, 74 aa, Oryza sativa
  unsure (1)..(74): unsure at all Xaa locations
  Clone ID: PAT_MRT4530_39140C.1.pep
APWYFKPSLLENNLPRKDFFXSFVRRTAFKRVGNPKKVSSLVGFLCMPGASYFPGQTFSVDGGIPINGLFPTQG

SEQ ID NO: 137682 - protein, 109 aa, Oryza sativa
  Clone ID: PAT_MRT4530_39141C.1.pep
FFTFLANTREGLLYIIPGGVHPPPAPHKWRIRSSSSSYRRRSNALANDDDDDELGKSGPHRAPVADLTRPRGDPKGFLGGVVRLGLSSGRTAHRGQLCSVSALEPVRQV

SEQ ID NO: 137683 - protein, 78 aa, Oryza sativa
  Clone ID: PAT_MRT4530_39142C.1.pep
YWGGFQAGSWNTKQSKGCHRNSREHLTQKICLDRPAGIGPKATLIHSFLGCLLQDHIILQTRPLLNVFLTKSMFLNFF

SEQ ID NO: 137684 - protein, 138 aa, Oryza sativa
  Clone ID: PAT_MRT4530_39143C.1.pep
MGKAPKAATHLDPHGMEATCGAMEKKESRRCLRSSACTRSRRRRLVIIKPATESRVGPRHACRGAGGAASSSSSSRVPAAEPRAPPPSAPVARASGAGGAVSSSSSRAPAVEPHGPRCRPRPPRVHATCLRKRTDIPM

SEQ ID NO: 137685 - protein, 280 aa, Oryza sativa
  Clone ID: PAT_MRT4530_39144C.1.pep
MAVTGTSVAAAATMLAAAAAIFITFVVCFYLFLCAKRYRGAAPTIGGDSGGGGRGRARFVFGGPGDGGCGGGRGLDEAAIAALPTKVVAAAAEGGDGGDPAADCAVCITELAAGESARVLPRCGHGFHVECVDMWLRSNSTCPLCRCAVIDEALPPPPAVRPPEADAESPNFPTNVLFFGSQDAVRTGGAAAATPPPPPPSSHHQQQPAFPPQPSAGPIAGVAAVVEAARIAALRRLLGCGGATPPPPPAPAQGDRDVEMGLPGGESSASRPATKPQPGS

SEQ ID NO: 137686 - protein, 29 aa, Oryza sativa
  Clone ID: PAT_MRT4530_39145C.1.pep
NNKNSVLIILIKLIYYIVIQINISNMVKS

SEQ ID NO: 137687 - protein, 289 aa, Oryza sativa
  Clone ID: PAT_MRT4530_39146C.1.pep
MAFRRRSCIPAALAVFFLLLAGQSTAGEDQTAVIWGRHGDEGTLREACDTGHYNTVIISFLSVFGHGRYSLDLSGHDLRRVGNDIKHCQRKGIVVLLSIGGQGGDYSLPSSRSAADVADNLWNAFLAGRRKGVLRPFGNAAVDGIDFFIDRGSGDHYDELARKLYSYRNNKGKGVMLTATPRCRFPDRRLEKALATGVFARIHVRMFGDDVNCTAAPRESWEKWAAAYPASQVYLGLVASSEQDPGYLSPKPLYYTLVMYIRDRLNYGGKMIWDRYYDKKTDYSIGKLI

SEQ ID NO: 137688 - protein, 100 aa, Oryza sativa
  Clone ID: PAT_MRT4530_39147C.1.pep
MWASPGGGGPALSGPRYEEFGGVLVDWPTLVPCAAREGRGRRTRRPWEGDQAPCLWSSWVVPATAIATDKEGRELDGVAVSTTHPPQQLGGGRLEPSAYL

SEQ ID NO: 137689 - protein, 124 aa, Oryza sativa
  Clone ID: PAT_MRT4530_39148C.1.pep
VHFSVSGSLSDRLVYYLSVGRLVFLTVPLVVQGFVPFFQVSLTYFPKTFFGSPVFFCEIFGFFFFLVLASFVVQFRSDVFFLLSSCGQDDKLPSSQNIACKVHLAWGGIPLSRFHLCGARGLAL

SEQ ID NO: 137690 - protein, 676 aa, Oryza sativa
  unsure (1)..(676): unsure at all Xaa locations
  Clone ID: PAT_MRT4530_39149C.1.pep
MASSSSALVVVVAVLALAEAAVAFSGYNTSAGAVAGKLNVHLVPHSHDDVGWLKTIDQYFVGTNNSIQCACVMNTLDSVVDALILDPARKFVFAEQAFFQRWWAEKSPKIQAIVHKLVDSGQLEFINGGWCMHDEAAVHYIDMIDQTTLGHRVIQKQFNKIPRAGWQIDPXEVIWRGSRTFGSSSQIFTNAFPVHYSPPDGFGFEIFDDFVPVQDDMLLFDYNLKERVNDFVAAALKQANVTRTNHIMWTMGDDFNYQYAESWFRNMDRLINYVNKDGRVHALYSTPSIYTDAKHASNESWPLKYDDYFPYADAKNAYWTGYFTSRPTFKRYIRMISGYYLAARQLEFLVGRSSLGLFTSSLEDPLGIAQHHDAVSGTAKQHTTDDYSKRLAIGVSQVEKGVNTALSCLTSSKGTCTATKFSQCQLLNISYCPSTEEGISSAKSLVIVVYNPLGWERSDFVRVPVNDANLIVKTSDGTSLESQLVEVDIVTARLRKLYIKAYLGITSDKPPKYWLVFQASVPPLGWNTYFISKSTGTGSNGMGYVSTMVSPSNDTIEIGPGPLKMSYSSKSGQLKRMFNSISAVDLPIQQSFLWYASSTGDSEDSQASGAYIFRPNRTTPTIVSGMAPLKVIHGPLVDEVQQQFSSWIIRSRDSTRIRSTLKLNILLDQYPVMMMM

SEQ ID NO: 137691 - protein, 448 aa, Oryza sativa
  Clone ID: PAT_MRT4530_3914C.1.pep
IAIPRAAPAFGVETGWPPEHCLRCFAPPDAPFVLGAAAAIHLGNTNSCIAGYDDDDAPLGAKRSYYQFCIPSWVALAHDNGTVISGEAAMNRAALSPSTAVSAFMRLLHRRVEDDVVKREIELVPYKFTKMLGWVSVQLDTDAEFSVDHLAGILISHLKHTAEAHLGRHINNAVITLPSRLSYSADGRQVLSSAAKEYSGFRAVKVVDEHIAAAAAYGHHTKQGDRKAILVFHLGGRTSHATIFKFVDGTARLIATRAHHFLGGDDFTARIVDHMVEHIKEQHGRDVRQEEKAMVRLRVACEHAKKALSEQQETLVQMDSLLDDGAVFSATLTRAKFEELNHDLLDRAMALVKEVVVTTGGVEVVDEVLVVGGSARIPKVRQLVKDYFNGNGNGTHPNMKRATGWRAVVDDGIMEGYSGMKYKEKLFAEGTAAARSIGSGGGIWISLV

SEQ ID NO: 137692 - protein, 124 aa, Oryza sativa
  Clone ID: PAT_MRT4530_39150C.1.pep
MWVVSKVSATRSSAYPTDVLPGGNPRPRPNQRCCGQGRAKRPVVSVGRLPIVAVAFAIRSGRAVFFLGIRAFLAAVGLSCGSSRRGADQLLSRSDMRSFYGKPADQARRRPPYLPQAPNCPMVY

SEQ ID NO: 137693 - protein, 54 aa, Oryza sativa
  Clone ID: PAT_MRT4530_39151C.1.pep
RRREGQKDIGREQGQRRHIDITSKVTTKDKYFSTPRCYGTHHLLATQIVIEKKL

SEQ ID NO: 137694 - protein, 112 aa, Oryza sativa
  Clone ID: PAT_MRT4530_39152C.1.pep
MLRQSSSRNHRSKGLKLKKALQITLLVLVSVWLIYQVKHSYEKKAYHENEPNDLHKDDDQNQGEIRLGRKDLPTKLEADSSTLDERIEDEENEEMEQEMKHDENDEDPIDEP

SEQ ID NO: 137695 - protein, 54 aa, Oryza sativa
  Clone ID: PAT_MRT4530_39153C.1.pep
KGKAEAKTWTNHHRRDLGTRPKPLKLIEADLLLEELLVSGIHFIFFSNWGGLFI

SEQ ID NO: 137696 - protein, 165 aa, Oryza sativa
  Clone ID: PAT_MRT4530_39154C.1.pep
MQAPPIASSPSPAWTAIQPAPARLCCSRRGALRLEAKAGWRPAARGPRVPGTGAVLAYEVEGPFHLLDARNEQELILHITKEVEKGKLPADVAANLEELYYNYEDAAMQSRDPNAHDIVLANMAALTDCALLDVENSVTFSPYNKAAREPFAYYMFGQNYIRPVV

SEQ ID NO: 137697 - protein, 477 aa, Oryza sativa
  Clone ID: PAT_MRT4530_39155C.1.pep
MSGRIEEWWRHGRQRSLVEGTVSGSGGQPGCIASALMAARMLRFTTARLLRPRCRRLYHGCSDGAAACSVVGERVTVLTIDGGGIRGIIPGKVLEFLENELQQLDGPEARLADYFDYIAGTSTGGLITAMLAAPGAGGDGRRRPLFAAKEICPFYQEHGPRIFPQRWCKLASTVAAVWGPKYNGRYLRNMVREVLGEMTVGDTLTNVVIPTFDVRLLQPVIFSTYDAKHSPLKNALLSDVCIGTSAAPTYLPAHCFRTHDGAGETREYNLIDGGVAANNPTMVAMTMITEEMIAEEKARLFLAKPPEECGRFLLLSIGTGLASDEGLYTAEKCSRWGTLGWLRHRGMAPIIDIFMAGSSDMVDIHIGVKFQLLHIERNYLRIQEYQDYDPLKATAAAALDEATPENMRNLVGVGERMLEQQVTRVNVETGRYEKVSDEGSNADALIRMARQLSEERTARLQRRMGEVTAASACATGF

SEQ ID NO: 137698 - protein, 674 aa, Oryza sativa
  unsure (1)..(674): unsure at all Xaa locations
  Clone ID: PAT_MRT4530_39156C.1.pep
MEKPMMDTGGGMIARTKSNKLAPPPLASFAPFLSRTASAXTVLSTADVTTLTILSCKSCLGNISASGGAGAGGKCNCYGSTNYNNSGKSESRSAQLKLEMEDHVSSGASLSPASSASLGFSFTFTGFTPPPQDTMSSAEIHPFSHDYXMMGMEAGTARKKVMTEPTLAVFLXLKKGNYXFISGASPPVNPLREITGVVAKGDVSAGPGHSDQCHTSSTTAXRSCSSGRDDHRLQGSSVHVSEKNEDFSQLANRSSSALTGVWISARMAPVLTRXIGHREVCNYIYXIAPRKDRSFLTVLSFCYLFRARHICSYLPHRSIVGNNXSISPKSLLFLDEPTSGLDSTTALRIIQLLHDIAEDGKTVITTIHQPSSRLFHKFDKLILLGRGSLLYFGKASEAMPYFQSIGCTPLIAMNPAEFLLDLANGNTTDVSVPSELDDKVHMENQNLQTNTKNDYKPSAQDVHEYLVDAYENRVAYKAKKQLLDPLPISDDMKTTITSSKREWGTSWWQQYSILFCRGIKERRHDYLSWMRITQVIATSVILGLLWWHSDPSTPKGLQDQAGLLFFIAVFWGFFPVFTAIFTFPQERAMLNKERAADMYKLSAYFLARTTSDLPLDLFLPVIFMVIVYFMAGLKATAAHFFLSMLTVFLSIIAAQSKFGSRPKQALPKFGQRHN

SEQ ID NO: 137699 - protein, 245 aa, Oryza sativa
  Clone ID: PAT_MRT4530_39158C.1.pep
MELFHDYKMADNRSVVEQAHVIQTMAKKLEQAHEYSVEGLIASLDVEEKTREKDSASKGDGGQSSANVVHKAQNKSKGKYKAQQTTNLKKKKNNNPNQDERTCFVCGLPGHLARKCPQRKGMKALAGQTSKSANVTIGNTRDGSGYDNLPSGFSVNQSTNWWIDIGANVARGSTVLIGNGSHASVHGVGTVDLKFTSGKIVQLKNVQHIPTIDRNLGSGSRLTRDGFKLVFESNKIVLSKHGYLI

SEQ ID NO: 137700 - protein, 116 aa, Oryza sativa
  unsure (1)..(116): unsure at all Xaa locations
  Clone ID: PAT_MRT4530_39159C.1.pep
AIXASDGSXGXAXSRTWXDTRARCLRLAAALTGLLGVQRHDVVAVFAQNIPAVCKLHFGVPMAGAVICTLNSRLDAAMXAVLLRHSEAKVVFVDRALLGVXQKXLVLVAEAGAXVP

SEQ ID NO: 137701 - protein, 60 aa, Oryza sativa
  unsure (1)..(60): unsure at all Xaa locations
  Clone ID: PAT_MRT4530_3915C.1.pep
GRNTDATXGFXXSQGXFQLNVFKPXMAHACXESIRLIADSCISFDKHCAYGIEPNPDKXK

SEQ ID NO: 137702 - protein, 35 aa, Oryza sativa
  Clone ID: PAT_MRT4530_39160C.1.pep
TPAKAPVAVWSPEKQTKFRASMHSFDFARATVEVA

SEQ ID NO: 137703 - protein, 134 aa, Oryza sativa
  Clone ID: PAT_MRT4530_39161C.1.pep
FVRAFGTKFLPGGEGHPFFWHFFLGSKFFPFGKGRDSRFFFSPVGGAKGGEPREIRTGFFFGPGGLFSGGPPGKKKKVPRRPPKGARFKTFFPGARRKPRGFPPKKKKKKKKKKKKKKKKTPKKKKKKNKTRPP

SEQ ID NO: 137704 - protein, 117 aa, Oryza sativa
  unsure (1)..(117): unsure at all Xaa locations
  Clone ID: PAT_MRT4530_39162C.1.pep
STTCSFVFAALSTDGXVPLYWGFPPYGSLVICDEREIVKGGCGKSYAPFPVGCMFHSEGGLKSFEHPMNRLKAMPRVDSEGVMCGATFKVDTFTKINSMPRVGSATNWAATWDDAAA

SEQ ID NO: 137705 - protein, 484 aa, Oryza sativa
  unsure (1)..(484): unsure at all Xaa locations
  Clone ID: PAT_MRT4530_39163C.1.pep
LSIVLQKNLFKVKCCFSQVRPYPHLLLKSTRLVAKGYTQKEDKYFFDTYSPVARLMTIHVILSLAVSHGLFVHQMDVKTTFLNGELDEELYMDQPDGFVVEGQERKMCKLLKFLYGLKQAPKQLHDKFDRTLTSAGFTVNKADKCVXYRYGGGEGVILCLYVDDILLFGTNLEVINEVKSLLYQXFDMKDLGVADVILNIKIIIGEDGITFLQSHYVEKILNRFGYIDSKPSPTPYDFSLLFHKNKIIARNQLEYSQIIGTLMYLASATRPDISFDVSKLSRFTFNLGDDHWRALERVMRYLKDTMKLGLHYTRYPVVLEGXSDFNWISNVDEIKATSGYVFTLYDGAISWRSCKQTIXTRSTMEAKLNGLQTDHFDTTIXATVEIEWLRNLLMDLHVVEKPVLGILMDCDNQTVIVKVNSSKDNMKSSRHVKRRLKSVRKLKNSGIITLDYIQIARNLADPFTKGLSQNVIDNASKEVGLRPM

SEQ ID NO: 137706 - protein, 161 aa, Oryza sativa
  unsure (1)..(161): unsure at all Xaa locations
  Clone ID: PAT_MRT4530_39164C.1.pep
PLFEIVSPAQTXIIPESAHALNIGFTERRLDGVLGRQVPGLIGDNVXERCLLDMFGPLLGGDGGGGWNDLFWAVHPGSSTIMDQVDAALGLEPGKLAASRRVLSDYGNMSGATVIFALDELRRQRKEAAAAGEWPELGVMMAFGPGMTVDAMLLHATSHVN

SEQ ID NO: 137707 - protein, 670 aa, Oryza sativa
  unsure (1)..(670): unsure at all Xaa locations
  Clone ID: PAT_MRT4530_39165C.1.pep
QSLVIQCWLLQGAAGVVAAAAAAADLDPEVHNLNARLLEISRMLQSGLPLDDRPEGARSPSPEPVYDNLGIRINTREYRARERLNRERQEIISQLIRRNPAFKPPADYRPPKLQKKLYIPMKEFPGYNFIGLIIGPRGNTQKRMEKETGAKIVIRGKGSVKEGKLLQKRDMKPDPSENEDLHVLVEAETQEALDAGAGMVEKLLTPVDEVLNEHKRQQLRELAALNGTIRDDECCRTCGEPGHGHGTTGKKMDDEYQNFLNELGGSAPESVTKSSGPMLALTGSGGSGGSSGGVGAGSGSNPPWAAGGGAAASGANGIKKEYDETNLYIGYLPPTLDDSGLIGLFSQFGEIVMAKVIRDRITGQSKGYGFVKYSDVSQANAAIAAMNGYHLEGRVIAVRVAGKPPQPAVPPGPPAVPAPPTYPPADPAAGGYTSQPYMGAPPPPPPGSYAPVPWGQPPPYASYPPPPPGSSMYNPPPPAPGQATPPPYGVQYAPPPAPIPPPGTAPSTDGAQNYPPGVTPPSSGAPTQPVPAPVYGTSGAPNAPPMYPPPPYGYASYYPSVTPVQPPPPPPPAGADPSQSLANAPWQLTXAPPPPPSGADPSQSIANAPWATHSAPPPPPATADHSQSIASAPWATHNAPPPPPPPSSIEQPPATYGADAEYDKFMSEMK

SEQ ID NO: 137708 - protein, 123 aa, Oryza sativa
  Clone ID: PAT_MRT4530_39166C.1.pep
MEAAARAPSRAAARFVQRRLFSSGGKVLGEEEKAAENVYIKKMEHEKLEKLAHKGPNPGEQASTAGAAANAVKTGSGSTESRSAGVSTDKNRNYAVLAGTVAALSGLGWYLLSKPKKSEDIVD

SEQ ID NO: 137709 - protein, 112 aa, Oryza sativa
  Clone ID: PAT_MRT4530_39167C.1.pep
MTENRFLDKTSPKDESEGAQIATPISGDETPSSSTMTRLVQYNSCRSATSTVAANLPRSMRRRWGTSTTAASVPVQCPRCRPPPAARLTLPTVRAARGTHRALLEEDSSPIT

SEQ ID NO: 137710 - protein, 183 aa, Oryza sativa
  unsure (1)..(183): unsure at all Xaa locations
  Clone ID: PAT_MRT4530_39168C.1.pep
MAATWLTVGEEWGRRRWWGGGGGGGAGGEEVGAAALLGNYSRLRASTKARSTRAERKDVEGRGSGDLLSRSPVHAGERDRVVYERRCSTEXEANPILISHVLREGGGSAYIEIGRLIRTPVRSPLRVTEPDKSRITYPDSTSFSRTGFFGMFPKQNKSEFPAAKQNCKKRLHLRKGEEPILQT

SEQ ID NO: 137711 - protein, 62 aa, Oryza sativa
  unsure (1)..(62): unsure at all Xaa locations
  Clone ID: PAT_MRT4530_39169C.1.pep
MAASSLHQTTSFLXTAPRRDELVRRVIYFGGRITMRRTVKSALQSXIWFGSDRPKYLGPFLE

SEQ ID NO: 137712 - protein, 97 aa, Oryza sativa
  Clone ID: PAT_MRT4530_3916C.1.pep
NRWLFVLTKKMCRCKNNTPSQFFLGEYMIVLICCQLLTHSFFELSIHAVLSATSAYGLILFELILCSFFELIVLSIHAAVSAASAYGCDLNPSGLLQ

SEQ ID NO: 137713 - protein, 152 aa, Oryza sativa
  unsure (1)..(152): unsure at all Xaa locations
  Clone ID: PAT_MRT4530_39170C.1.pep
MATEVTQNYFAWSQEESPVQDSSQGTPQVFDHGSISFGRFELEXLAWEKWSVFANDRRHEEFGKFNGXLVAKKKAYFEEYFKRIXELKALQQQNQQTELNLDYSGDGXSDSSQTEXDVPTADQAXSSGSGTLLDSMVQTGVQTIFENDFGML

SEQ ID NO: 137714 - protein, 1272 aa, Oryza sativa
  Clone ID: PAT_MRT4530_39171C.1.pep
MEAVASYCLDVCGFAQSRMIYLAPPEESFCSRSRVNRPAHPARVYVPRNPQFRALVVCWRSRTHLALRAVRIGLFVNCVCGGNLCATECVLPWKVRNVNKRYAKINEDWQDKDATNVHKSKVRKKKLSDMLGSQWSKDELERFYGSYRKYGKDWRKVASSIRDRTSEMVEALYNMNKAYLSLPEGTATAAGLIAMMTDHYNILDGSNSDHESNGSPKTSRKPRKRGRAKFQSVSKASDTQHPDQLQSQPASSSYGCLSLLKKKRSGGNKPRAVGKRTPRVPVASMYQRDEKIGPTNRQAKPDGNGDDEGAHVAALALAEVFQRGGSPQDSQTPGRSGDRMFLSPVKSTDRKNADSEMGSSKLHGFQVDADFPEGSLGSREAETGDYPKYASYLMNNEGSASGKSQQKVKRTQRRRKKAARKTDDQLEDDREACSGTEEGHSAKKTKDESEVNGLGRKGRWPSKKSNKRNRQLFFGDESSALDALHTLADLSVNILQPSSIVESESSAQIKDENKDNDSDEKPSMPAAVSVLEKKDKSKSTVKKVKRQSELASADMAARKKARIAKVPNRDGIAISETKQLDSKFGVQTEKKKRKPSAAKISKDEKSALKDVEKTEWMEISDLDNVSAEEGKVSSNKAMDTVDTTQGATTQQADLASKGRSRRKIGILKALAPECRPTDGADDLRSDKFSYAVNNVIDLKDSLSHCLSSRLLRRWCTFEWFYSAIDFPWFEKSEFVEYLNHVKLGHVPRLTRVEWGVIRSSLGKPRRLSKQFLQEEREKLAQYRESVRQHYAELRSGVREGLPTDLARPLGVGQRVIACHPRTRELHDGNVLNVDHNRCRVQFDRPELGVEFVMDIDCMPLHPLENFPESLRRQNIVNKYYNSFSEAKFEDRSKELGTGGPTRFTSNVCFDGGDATSNIPSNYPINTLMKQAKGDTVDSIAQAKVAVNEVAVAAQQSMYSQPCTLSQIQEREADIRALAELSRALDKKASLKGLVLMFSVEALLVELRHMNEEVYGRQKDGEAFRDFEHFRKQYAMVLVQLRDSNDHVASALLSLRQRNTYHGHPAQSYPKPMENGALTGTPDLYNLFGYINQESGSQVMEVIETSRSRAKLMVDVAIQAMCSVSEGEDAYAKVGEALDNLNNRSTGSGSSILGIRRIPPDSGQANSSHQDNTTSGHFDPATNNISSPRLPNGCDSEPQFPSELISSCVATILMIQNCTEKQYHPAEVAHILDSALSRLQPCSSQNVTIFREIEMCMGIIKNQMLALIPTPSG

SEQ ID NO: 137715 - protein, 374 aa, Oryza sativa
  Clone ID: PAT_MRT4530_39172C.1.pep
MVAWQEAGVAKQCGHANCTWRDKVWYPVTAAIGKISFDGPECIKQVQMRPSEKPISTFFMKKPVKSEKKDQDHAETKAFRAANKEWHESAENQLDKTYQHQVEEEQDASIFNDQPITLEHDVEKAKTMKNDDLIFTDEATQKQDALRLKRKNEDDEVHADKVMEKSGRSPVHVKKKSISEAYASPDADYCEKAVRSEMDSIIANGTSEVTERLYGCKLVGCKWVFNKKLRPDVSHGLLVHQMDVKTAFFIEELDEEIYIDQPDGFVVEGQEGKVCKLLKSLYGLKQALKQWHEKFDRTLIYAGFAVNETDKCVYHCYGGVINEIKSFLSQSFDMKNLGVADIILNIKLIRGENGITLLQSHYVEKMMRTQLARI

SEQ ID NO: 137716 - protein, 132 aa, Oryza sativa
  unsure (1)..(132): unsure at all Xaa locations
  Clone ID: PAT_MRT4530_39173C.1.pep
RPFRVPTVDVSDVALTERIETYAXYDAIHSAIKSEYQGKLKGIIGYVXEDYLDCTDFVRDRTSSLFDPKGGTAVNDNCLKIAGXAHNTWXYRNRCIDLITHMAKTEQNAVACHGITWPTSRTYRNATAMLRI

SEQ ID NO: 137717 - protein, 795 aa, Oryza sativa
  unsure (1)..(795): unsure at all Xaa locations
  Clone ID: PAT_MRT4530_39174C.1.pep
IDVATGALGSVLAKLGVLLQDGFKHNLPKSAKHDIHSLRMDLQIMYSVLRDVVDSRAEQQGHNKLWALELRELSYDVEDAVDTILVRLGGLESSTEAASSTGSSWLIKITKRATTHKVFDEIKDIRLRAKEVNEWRDRYMIDDSLHKPRVSAIYDPPRLPADLSVDQHSLVGIDQAAAELIEMLALEGGAFERRLKTVSIVGMGGLGKTTLAKLVYSMLKDRDQFQCGAFVSVSQCPNNRKKVFWEMLYQLDGKNYNNVQYNADNNVDQLIHASRDSLQNKRYFIVVDDIWSMEAWEVIRLALLENNNGSRVITTTRIFEVASSADDVYTMRPLSPENSKRLLCKRIFSGEDNSDGVELAEVRDKLLKKCDGLPLAVLTIAGALAGKTIEQWYMVYNSIAFGHVNGRVMDDMIRILSLSYYDLPPHLRTCLLYLSIFPEDYLIKKDFLIWRWIAEGFIEYDGGRSLFGVGESYFAELINRSMIQPVEVGDRDSVDGCRVHGAVLHLLRYLAREENFVTLLIDNMLSSGRGRPRRLALQGNNEDHTLQTNIDLANVRSFNASMCSANMMPLLSGFKFLRVLXKYVGKLFLLRYLGLVGAPISELPDGIGELEFLQTLDLRETGIQELPRSICRLRKLIRLRRLTMTRTALPAEWIGSLSALYYLCIEAPELRLGDLKILGGLPSLRSLWISSRSNERPLVITARDFXSLIEFTLLNXGPDFQRGAMPKVRRVEFSFSLRDFSSRADFGFGLENLLSLEHVTIRLHDKVHSVEAALRHLTKKHPRRPTITLIRDGEE

SEQ ID NO: 137718 - protein, 318 aa, Oryza sativa
  Clone ID: PAT_MRT4530_39175C.1.pep
MEDSLDGNSPPIYSYIKGINYKCVLVGSSTRPDQSGSSSVAHGSRSDRHGRDCEKGFTHHTTRVQGYRILVSYVLLPSSIAPTQRICFKHMSVSSVRRRRRIGHSAQLAGVDRFDRPLSNRSQLTSSPNTPIYLPDEQVARVMCSLSLSRVDRQWTDRSVLQAAGADAGGSLTVGSACVSEMGVVEIEPFPHRQPQPTLIYDSNVTDRLLPHQPAPIKAASTRTDFRFESHSMAMGLKLHELRPVSIAQLELAKLCFFIRVRKPLPTSDQTSDVTPKIFFSLTKYTLTCERRAGELTDQRPRVIVVASYFLRPKKNQT

SEQ ID NO: 137719 - protein, 118 aa, Oryza sativa
  Clone ID: PAT_MRT4530_39176C.1.pep
MPVWSSLPCPWCVVFVCRGTRTAAFRGVSKGKSKGMGDFPFEVRESRIYPLEVVLASALFSSSLVALPGALSAVFMDIMGSPLGLVWPFMPPPVSKSENRLARVMYALLLLCVVDLLS

SEQ ID NO: 137720 - protein, 39 aa, Oryza sativa
  Clone ID: PAT_MRT4530_39177C.1.pep
MLGQPTMLRQRPRHDPTATPVAVAPSTFTAPFSEALMGD

SEQ ID NO: 137721 - protein, 75 aa, Oryza sativa
  unsure (1)..(75): unsure at all Xaa locations
  Clone ID: PAT_MRT4530_39178C.1.pep
MVSGSGVCAPRVVVDSRHHMLGRLASIIXAKELLNGQCVVVVRCEEICMSGGLVRQKMXFLLFFRKRMNTKFFHG

SEQ ID NO: 137722 - protein, 35 aa, Oryza sativa
  Clone ID: PAT_MRT4530_39179C.1.pep
LGGPWGFLIYGHRISRANPFFGKLFHQCLLSVMLS

SEQ ID NO: 137723 - protein, 492 aa, Oryza sativa
  Clone ID: PAT_MRT4530_3917C.1.pep
MGDERGSGWHGGECRAAPAATRLLRSTCAALPHRRRLASSTPASRLAATLATLLPCLLRCPHRACLASPPPPRLLRPATLASPPPSLLRPRRARLSVAPRSRAAPAAARLLRSTCAALPHRRRLASSTPASRLAATLATLLPRLLRCPHRACPASPPPPRLLRPATLASPPPRLLRPRRARLSVAPRSRAAPAAARLLRSTCAALPHRRRLASSTPASRLAATLATLLPRLLRCPHRACPASPPPPRLLRPATLASPPPRLLRPRRARLSVAPRSRAAPAAARLLRSTCAALPHRRRLASSTPASRLAATLATLLPRLLRCPHRACPASPPPPRLLRPATLASPPPRLLRPRRARLSVAPRSRAAPAAARLLRSTCAALPHRRRLASSTPASRLAATLATLLPRLLRCPHRACPASPPPPRLLRPATLASPPPRLLRHRRARLSAAPTALVSPLPPLLSTAAAAASPRLAAADSACACCLGRRHQKEKRERQ

SEQ ID NO: 137724 - protein, 555 aa, Oryza sativa
  Clone ID: PAT_MRT4530_39180C.1.pep
KPTHPPPSHCAFRLVASPIPLPPGADRRPLRGGGVNHSWTKKSVSALSVTSNLGVLMAHSHEMTSRKPPGIRLFGGITVLRTYQTLVLVLTFVAYTCFHMTRKIPSIVKSVLDPQTKLGSSPWGRLHTKNTLNIGWLPFNTIDGSALLGEIDVAFLAVYSVGMFFAGHLGDRMDLRIFLTIGMFGTAVFTALFGAGYWLNIHNFYYFLVIQMIAGLFQAIGWPSVVAIVGNWFGKSKRGLIMGIWNAHTSVGNISGSLLAAFLLKFGWGWSFAIPSLIMVAVGLLVFVFLPVSPEVMEIDIDDGEISSVKDTTKEPLLEPGQEVKHNAVGFLEAWKIPGVAPFALCLFFSKLVAYTFLYWLPFYISHTPIGGEYLSDALAGSLSTIFDVGGVLGGVLAGHISDRLNARAVTAASFMYCAIPALFLYRTYGSMSIMWNICLMFITGMFVNGPYALITTAVSADLGTHSSLNGNSRALATVTAIIDGTGSVGAAIGPLLTGYISSSSWSAVFTMLMAAALLAGLLLTQLVCSELKGKATSNASKDVADAQGTYSDEV

SEQ ID NO: 137725 - protein, 583 aa, Oryza sativa
  Clone ID: PAT_MRT4530_39181C.1.pep
MDPDHVVAATGGGGGERAAHQYHVTDDTDAATASEEVGGGGGWPRALLRRGWELAGKAAVAGAAATAAPVVVPPVMLLTAAGLALSLPFAAYLATLAATHRLMAALLPPHESGLDGAAVEQELLDAFYHFSTTDQEEDGGGGGVGIGLASPPPSVDEPVSFQESSVSRNGGKIEDGTTKETVSLTTDVPEFPELPVVETREEDGVIPVQQLGQDHHHTHVLDTGDKAEESTISSVSGTPVEIFTDKDNVEKGVVEDTVVVEAAVVEQLASNAGIVAQELVDTNVAIVAISAPENEATTPTSDLVARVSEEVVGSSCDGEMQETAVVDDTMRELSDANMDEDVQHHDQRVVCSSVLMASPLAVGDYEDVMSSGSTQDIPEVCDETSQPGQEHDQSDGFEAKVISGDKKESVAPIQQLVPAGTEINPSVHVRRDLYTEEHETGSRSPCPEREAMSQGLHCSPPLGLLCAARRLPQLSPSPHALLGYSPPAAAVVKIEPSNPVFATGIRFGGFVMGGSSIGEGTLSLGDFVASAKALIEKWKEEGYLALEGVYRNPGGRHVSIVLVSIPILVGHGSLCIPVEPVTV

SEQ ID NO: 137726 - protein, 48 aa, Oryza sativa
  unsure (1)..(48): unsure at all Xaa locations
  Clone ID: PAT_MRT4530_39182C.1.pep
FLPNVEANNTLTYLCLLIYINCCLTTTCQNFWSTTSVEAQLXPDXACW

SEQ ID NO: 137727 - protein, 87 aa, Oryza sativa
  unsure (1)..(87): unsure at all Xaa locations
  Clone ID: PAT_MRT4530_39183C.1.pep
MEACFSQYPSATAKHTGKQAISPITAXNTAQLKSGTRRQGSKGGAGGEVEVPAEEHENEPEPDGRRGHRPEVPDRHRRRRCRNSDLR

SEQ ID NO: 137728 - protein, 25 aa, Oryza sativa
  unsure (1)..(25): unsure at all Xaa locations
  Clone ID: PAT_MRT4530_39184C.1.pep
RGXXTYRYTXDXIFAXILTPVHLFS

SEQ ID NO: 137729 - protein, 142 aa, Oryza sativa
  unsure (1)..(142): unsure at all Xaa locations
  Clone ID: PAT_MRT4530_39185C.1.pep
VALCPSFDALTQVYRQYXLHPSSCFQQQMLSPSGEFLSAQXSTVATPFFQSPVFQLRNCQVMQQQCCQQLRMIAQQSHCQDISSVQAIVQQLQLQQFAGVYFDQAQAQAQAMLALNLPSICGIYPSYNTAPCSIPTVGGIWY

SEQ ID NO: 137730 - protein, 128 aa, Oryza sativa
  unsure (1)..(128): unsure at all Xaa locations
  Clone ID: PAT_MRT4530_39186C.1.pep
DPYPSVILKHSQHSGNPFFQSPVFQLRILPSHAAHSGCQQLRMIAQQSHCQPITSVQAIVXQQLQLQQFAXVYFDQAQAQAQAMLALNFPSIXGIYPSYNTAPCSIPTVXGGIWYWNCTSIVVPRREK

SEQ ID NO: 137731 - protein, 369 aa, Oryza sativa
  unsure (1)..(369): unsure at all Xaa locations
  Clone ID: PAT_MRT4530_39187C.1.pep
MATEWSDGGEEFLLPDEFLDDDFFSEEEKAAVAARSDSSDEEDCLAGLSRRLAGLLGDDGERDAPPKAEVTVGSPQSTLCGLPKSGQESPNGGXASQVSSPPSSPLEQKPADPWDMLYEAAGQVARMRVTNSIPVPNNPYGFPAHGGFAAPARKASPPPPVSPPATKVAPAAYYHPLAQLLTQRQIQAAQFHLLKQQQLLKLQRDRHLAAAAAWGARQTAAAKTAGCGVAASPVDMNPAAWPPLQKQQHAPAPGVGGGGGGGMRAVFLTPPGAKRERNGTGVFLPRPAGAPAEPKRKTGCSTVLVPARVVQALNLNLDDLGAQPRYPGGFVLDHDALINRSNAMLASQKRRASPAVPSPAPAPALCHSS

SEQ ID NO: 137732 - protein, 157 aa, Oryza sativa
  unsure (1)..(157): unsure at all Xaa locations
  Clone ID: PAT_MRT4530_39188C.1.pep
SCAIAACSAXSAIDLVTQVYSQYXLHPHLMLQQQMAYAPSGEFRKATSPATVGNPPSFXSPVFQLRELPSHASSKWLANSLRMIAATVSTARPLASVQAIAASKLQLQQFAGVYFDQAQAQAHSXMLPLNLPSICGIYPQLQHTAPCSIPTVGGIWY

SEQ ID NO: 137733 - protein, 115 aa, Oryza sativa
  Clone ID: PAT_MRT4530_39189C.1.pep
FSGVYPFSPLEKLIHQYCSGCTLYPYYATCPTHEPSLAPAIEQSRGAARAAQPGRGRPGGGQGRRGGGSGDLPPAATAQGGAAWPPWPSSRVQGDSANGEVSNQLVWRKSLYSLW

SEQ ID NO: 137734 - protein, 322 aa, Oryza sativa
  Clone ID: PAT_MRT4530_3918C.1.pep
MRRQRVRSGRHHAHASSSSNRLLPTLLRPPRDGFRGGRLIASSSSSSSQMAAPADAPGGSADAFEVIRAHQEKAARLPPVEEIRTILDQSVRGVLATHSQGHVGYPSGSMVDFACDQDGSPILAVSSLAIHSKNLSENPKCSLLVAKDPEDRTDTVITVYGDATPVSDQEKDAVRSAYLRRHPEAFWVDFGDFRFLHIKPKAVRYVSGVATAILGSGEFSAAEFKEAKVDPISQFSTPITSHMNKDHSDDTKLIVQYSTTVKVDFAYMLDVDSLGFNVKAGYDGSVLKLRIPFPRRAQDRKDVKTLIVEMLQAAKASSSSAE

SEQ ID NO: 137735 - protein, 149 aa, Oryza sativa
  Clone ID: PAT_MRT4530_39190C.1.pep
MKIIFFFALLAEAACSASAQFDAVTQVYRQYQLQQQMLSPCGEFVRQQCSTVATPFFQSPVFQLRNCQVMQQQCCQQLRMIAQQSHCQAISSVQAIVQQLQLQQFSGVYFDQAQAQAQAMLGLNLPSICGIYPSYNTVPEIPTVGGIWY

SEQ ID NO: 137736 - protein, 43 aa, Oryza sativa
  unsure (1)..(43): unsure at all Xaa locations
  Clone ID: PAT_MRT4530_39191C.1.pep
QSPVFQLRNCQVMQXQCCQQLRMIAQQSHCRPLAVFQAICAAA

SEQ ID NO: 137737 - protein, 185 aa, Oryza sativa
  unsure (1)..(185): unsure at all Xaa locations
  Clone ID: PAT_MRT4530_39192C.1.pep
GVRVEWSTKLAPHPCADAASFCSFVLLQEIQICFVLETFRKIRCVKMAWSPDKLRATYLVRFXGRPDQATXLYTNRAAAFTQHTRTQSRVCLLLCTASWLVDYSIPLAGVHRRSGEQVSGTSTFDVLHREKAAIRFLGSASRDCSMFVRDGSPSSPLACCAPSSTPATASSSCRATGLSATFVRV

SEQ ID NO: 137738 - protein, 107 aa, Oryza sativa
  unsure (1)..(107): unsure at all Xaa locations
  Clone ID: PAT_MRT4530_39193C.1.pep
QPPFFQSPVFQLRNCQVMQQQCCQQLRMIAQQSHCQAXISSVQADCASQLXLHQFAGVYFDXQAQAPSPKLLLAPKPCPSKYAGIYPSYQPPASPXAIPYPSGGIWY

SEQ ID NO: 137739 - protein, 70 aa, Oryza sativa
  Clone ID: PAT_MRT4530_39194C.1.pep
MGQWRGPVALDGEAALREGGSRMMVSDCRRGTTILRQQIHGRPFLASAIVAKVREKETAPAIPAGIATSA

SEQ ID NO: 137740 - protein, 1003 aa, Oryza sativa
  Clone ID: PAT_MRT4530_39195C.1.pep
MAGFADALRPDKFTGMHFKRWQIRVTLWLTAMKCFWVSTGKPMGVLNADQQKEFDEATTLFVGCILSVLGDRLVENKSKGKYKAQQTTNFKKKKNNNNPNQDERTCFVCGQPGYLARKCPQHKGMKAPAGQTSKSANVTIGNTGDGSGYGANIHVCADISLFSSYQAARGSTVLMGNGSHDSIDRNLVSGSRLTRDGFKLVFESNKVVVSKHGYFIGKGYECGGLFCFSLFDFCNKSVNHISGSVDDEANGGKRYFMTLIDDATRFCYVYLLKTKDEALDYFKIYKAEVENQLDRKIKRLWSDRGGEFFSNEFDLFCKEHGIIHERTPPYSPESNGIAERKNRTLTDLVNAMLDTAGLPKAWWGEALLTSNHVLNRVPNRNKDKTPYEIWIGRKPSLSYLRTWGCLAKINVPITKKRKLGPKTMDCVFLGYAHHSIAYRFLIVKSEVPDMHVGTIMESRDAIFFESFFPMKDTHSSSSQPSEIIPSSITPPEQTEYTHEYVTKDDDSEAPRRSKRQRMAKSFGDDFTVYLVDDTPKSISEAYASPDADYWKEAVRSEMDSIIANGTWEVTERPYGCKPVGCKWVFKKKLRPDASHGLLVHQMDVKTTFLNGELDEDIYMNQPDGFVVEGQEGKVCKLLKSLYGLKQAPKQWHEKFDKTLTSAGFAVNEVDKCVYYHHGGGEGVIPCLYVDDILIFGTNLEVINEVKSFLSQNFDMKDLGVADVILNMKLIRSENGITLLQSHYVEKILNRFGYIDNKPSPTPYDPSLLLRKNKRIARNQLQYSQIIGSLMYLASATRPDISFAMSKLSRFTSNPGDDHWRALERVMRYLKGTMELGFHYSGYPTVLEGYSDSNWISDMDEIKATSGYVFTLGGGAVSWRSCNQTILTRSTMEAELTALDTATVEAEWLRDLLMDLPIVEKPVPAILMNCDNQTVILKVNSSKDNMKSSRHVKRQVKSVRKLRNSGVITLDYIQTARNLADPFTKGLSRNVIDNASKEMGLRPM

SEQ ID NO: 137741 - protein, 135 aa, Oryza sativa
  unsure (1)..(135): unsure at all Xaa locations
  Clone ID: PAT_MRT4530_39196C.1.pep
WLLLKFTAISAAPQLMLQQQMLSPSGEFVSXQCSTVPTPFFQSPVFQLRNCQVMQQLCCQQLRMIAQQSHCQAITSVQAIVQQLQLQPFAGVYFDQAQAQAXAMLALNLPSICGIYPQLQXTLPCSIPTVGGIWY

SEQ ID NO: 137742 - protein, 104 aa, Oryza sativa
  Clone ID: PAT_MRT4530_39197C.1.pep
EMHHRLEGNASQITNTSHHKISNKKYITNPKRNTSQLKYITDQIQYHIHHRSNPMNHKFKKIHKLKKNPAADKRAPPASRSPCCMIQIQLIFICLPVNLPYHLG

SEQ ID NO: 137743 - protein, 1049 aa, Oryza sativa
  unsure (1)..(1049): unsure at all Xaa locations
  Clone ID: PAT_MRT4530_39198C.1.pep
MPERSCRFPRGDATPPPPPAAASTCGRLGAGTRTSPAGGACAGSGRFVCISPDKYAMQCHGCMCHRSFGTALKHKRHEFPVEGLIASLDVEEKAREKDAASEGDGGQSSANVVHKAQNKSKGKYKAQQTTNFKRQXKNNNNPNQDERTCFVCGQXVARGSTVLMGNGSHASVHGVGTVDLKFTSGKIVQLKNVQHVPSIDRNHVSGSRLTRDGFKLVFESNKVVVCKHGYFIGKGYECGGLFRFSLSDFCNKSVNHICGSVDNEANVWHSRLCHINFGLMSRLSSMCLIPKFSIVKGSKCHSCVQSKQPRKPHKAAEERNLAPLELLHSDLCEMNGVLTKGGKRYFMTKIKRLRSDRGEEFFSNEFDLFCEEHGIIHERTPPYSPESNGIAERKNRTLTDLVNAMLDTAGLPKAWWGEALLTSNHVLNRVPNRNKDKTPYEIWIGRKPSLSYLRTWGCLAKVNVPITQKRKLGPKTVDCVFLGYAHHSIAYRFLIVKSEVPDMHVGTIMESLDATFFESFFPMKDTHSGSSQPSEIIPSSITPPEQIEHTHEHVSEEDVCEAPRRSKRQRTAKSFGDDFTVYLVDDTPKSISEAYASPDADYWKEAVRSEMDSIIANGTWEVTERPYGCEPVGCKWVFKKKLRPDGTIEKYKARLVAKGYTQKEGEDFFDTYSPVARLTTIRVLLSLAASHGLLVHQMDVKTAFLNGELDEEIYMDQPDGFVVEGQEGKVCKLLKSLYGLKQAPKQWHEKFDKTLTSAGFAVNEADKCVYYRHGGGEGVILCLYVDDILIFGTNLEVINEVKSFLSQNFDMKDLGVADVILNIKLIRGENGITLLQSHYVEKILNRFGYIDSKPSPTPYDPSLLLRKNKRIARNQLEYSQIIGSLMYLASATRPNISFAVSKLSRFTSNPGDDHWRALERIMRYLKGTMELGLHYIGYPAVLEGYSDSNWISNVDEIKATSGYIFTLGGGAVSWRSCKQTILTSSTMEAELTALDTATVEAEWLCDLLMDLPIVEKTVPAILMNCDNQTVIVKVNSFKDNMKSSRHVKR

SEQ ID NO: 137744 - protein, 154 aa, Oryza sativa
  Clone ID: PAT_MRT4530_39199C.1.pep
MKIIFFFALLAIAACSASAQFDAVTQVYRQYQLQPHLMLQQQMLSPCGEFVRQQCSTVATPFFQSPVFQLRNCQVMQQQCCQQLRMIAQQSHCQDISSVQAIVQQLQLQQFAGVYFDQTQAQAQAMLALNLPSICDIYPSYNTAPCSIRTVGGI

SEQ ID NO: 137745 - protein, 108 aa, Oryza sativa
  Clone ID: PAT_MRT4530_3919C.1.pep
MAAEEKASPSSPPLWRQKDSLFRWVAITKDPLGPVLEQCLDIPTTLPNLRHNASLNTPLLDSHGRFVFVLALPYWDTVAMEVVAVGHLPQTSSPTTSSFPASKLEERR

SEQ ID NO: 137746 - protein, 88 aa, Oryza sativa
  Clone ID: PAT_MRT4530_391C.1.pep
ISLVRRLYTVFTFALFCLLGRSVVLQLARQAPVSFHILVGVLLRFLRLPRLELVCAMNCTALRNHVQCYCRCLGAVHELSPPIPPPCG

SEQ ID NO: 137747 - protein, 1156 aa, Oryza sativa
  Clone ID: PAT_MRT4530_39200C.1.pep
MARLPLRSRAARLHRRSQPRVVPAEQSVFPPPRRYDFTMAVFADALRPDKFNGVHFKRWQIRVTLWLTAMKCFWKEFDEATTLFVGCILSVLGDHLVEVYMHMTDAKELWDALNTKFGATNASNDLYIMEQFHDYKMADNRSVVEQAHEIQTMAKELELLKCVLPDKFVVGCIIAKLPPSWRGFGTALKHKRQEYSVEGLIASLDVEEKAREKDAASKGDGGQSIANVVHQAQNKSKGKYKAQQTTNFKKKKNNSNPNQDERTCFVCGQPGHLARKCPQRKGMKAPGGQTSKFANVTIGNTGDGSGYGNLPTVFSVNQSTNWWVDTGANVHVCADISLLSSYQVARGSTVLMGNGSHASVHDVGTVDLKFTSGKIVQLKNMQHVPSIDKNLVSGSRLTRDGFKLVFESNKVVVSKHGYFIGKGYECGGLFRFSLSAFCNKSVNHICGSVDDEANVWHSRLCHINFGLMSRFSSMCLIPKFSIVKGSKCHSCVQSKQPRKPHKATEERNLAPLELLHSDLCEMNGVLTKGGKRYFMTLIDDATRFCYVYLLKTKDEALDYFKIYKAEVENQLDRKIKILRSDRGGEFFSNEFDLFCEEHGIIHERTPPYSPESNRIAERKNRTLTDLSRDATFFESFFPMKDTHSSSSQPSEIIPSSITPPEQTEHTHEHVTKEDDSEAPRSSKRQRTAKSFGYDFTVYLVDDTPKSISEAYASLDADYWKEAIRSEMDSIITNGTWEVTERPYGCKPVGCKWVFKKKLRLDGTIEKYKARLIAKGYTQKEGEDFFDTYSLVARLTTIRVLLSLAASHGLLVHQMDIKTAFLNGELDEEIYMDQRDGFVVEGQEGKVCKLLKSLYGLKQAHKKWHKKFDKTLTSASFAVNEADKCVYYRHGGGEGVILCLYVDDILIFGTNLEVINEVKSFLSQNFDMKDLGVADVILNIKLIRGENEITLLQSHYVEKILNRFGYIDILEGYSDSNWISDVDKIKATSGYVFTLGGGAVSWRSCKQTILTRSTMEAELTALDTATIEAEWLRDLLMDLPIVEKPVPSILMNCNNQTVIVKVNSSKDNMKSSRHVKRRLKSVRKLRNSRVITLDYIQTARNLANPFTKGLSRNVIDNASKEMGLRPCELYYGGNPVNVIGDRRSRRLEPGKNKPLVN

SEQ ID NO: 137748 - protein, 156 aa, Oryza sativa
  Clone ID: PAT_MRT4530_39201C.1.pep
MKIIFFFALLAIAACSASAQFDAVTQVYRQYQLQPHLMLQQQMLSPCGEFVRQQCSTVATPFFQSPVFQLRNCQVMQQQCCQQLRMITQQSHCQAISSVQAIVQQLQLQQFAGVYFDQAQAQAQAMLALNLPSICGIYPSYNTAPCSIPTVGGIWY

SEQ ID NO: 137749 - protein, 1079 aa, Oryza sativa
  Clone ID: PAT_MRT4530_39202C.1.pep
GLPATLYCTVARRLFHPARRRAPAIGRAGLRNLCLRHPAPGEGGNKVFAKRFARLLPVRPRRLAFLFARVLRAFVDAALKHKRQEYSVEGLIPSLDVKEKAQEKDAASKGDVNQSTNWWVDTGASVHVCADISLFSSYQVARGSTVLHVHGVGTVDLKFTSGKIVQLKNVQHVPSIDRNLVSGSRLTRDRFKLVFESNKVVVSKHGYFIGKGYECGGLFRFSLSDFCNKSMNHICGSVDDEANIWHSRLCHINFGLMSRLSSMCLIPKFSIVKGSKCHSYVQSKQPRKPHKAAEERNLAPLELLHSDFCEMNRVLTKGGKRYFMTLIDDATRFCYVYLLKTKDEALDYFKIYKAEVENQLDRKIKRLRSDSGGEFFSNEFDLFCEEHGIIHERTPPYSLESNGIAERKNRTLTDLVNAMLDTAGLPKAWWGEALLTSNHVLNRVPNRNKDKTPYEIWIGRKSSLSYLRTWGCLAKVNVPITKKRKLGPKTVDCVFLGYAYQSIAYKFLIVKSEVPDMHVGTIMESRDATFFESFFPMKNTHSSSSQSSEIIPSSITPPEQTEHTHEHVTEEDDSAAPRRSKRQRTAKSFGDDFTVYLVDDTPKLISEAYASPDADYWKEAVRSEMDSIIANGTWEETERPYGCKPVGCKWVFKKKLRPDGTIEKYKARLVAKGYTQKEGEYFFDTYSPVARLTTIRVLLSLAASHGLLVHQMDVKTAFINGELDEEIYMDQPDGFVVEGFAVNEADKCVYYRHGGGEGVILCLYVDDILIFWTNLEVINEVKSFLSQNFDMKDLGVADVILNIKLIRGDNGITLLQSHYVEKILNRFGYIDSKPCPTPYDPSLLLRKKKRIARNQLEYSQIIGSLMYLASATRPAISFAVSKLSRFTSNPGDNHWRALERVMRYVKDTMELGLHYSGYPAVLEGYSDSNWISDVDEIKATSGYVFTLGGGAVSWRSCKQTILTRSTMEAELTALDTTTVEAEWLCDLLMDLPIVEKPVPAILMNYDNQTVIVKVNSSKDNMKSSRHVKRRSKSVRKLRNSGVITLDYIQTARNLADPFTKGLSRNVIEYASKEMGLRPM

SEQ ID NO: 137750 - protein, 122 aa, Oryza sativa
  unsure (1)..(122): unsure at all Xaa locations
  Clone ID: PAT_MRT4530_39203C.1.pep
MPPSDPSPCFFFFLSSSSSSLPYLPPPWPLGFLYPSSSSYLPPPPPDLPYWEAAWRSSAAAPATRPLSXSPGCGPGTPTWPPPPPAWRSTXRSPLPPPPPPPDDGRCCCGGGRPRWPSPPPS

SEQ ID NO: 137751 - protein, 400 aa, Oryza sativa
  Clone ID: PAT_MRT4530_39204C.1.pep
MKAMGYNNPYDSSGTDDDLPPTQNRGLRVRSFSANGRASVMPFSYIRPHGDLESEIHQVEQEAYTGVLRAFKVQSDAISWEKESLITELRKELRVSDDEHRELLNKVNEDVAIRRMREFRQGGGSLSAQHRGSRIFHDTEPGPAAKRQRTPLSIPSHSAGLQSPAMPSPSVPSSTKWGPFSGTKGKKTRTNTPLAVPSADPTSLINRKIYTRWPDDNNFYEATITDYNPATGKHALVYDMGTVAQTWESVRLSDLAPEDIIWDLDDQGISNRDGWGPHPGMRRHPGNNGTMAMASRGGGRFSRNEPTKDSAPPQNGINRNIGHIDVPNTRSVVIEVERVLSNPNMGEIEKAKKLLQDQEQSLLDAIARLDDASDSESEDMAVGAQMVSAGDHMGRNGVAC

SEQ ID NO: 137752 - protein, 1488 aa, Oryza sativa
  unsure (1)..(1488): unsure at all Xaa locations
  Clone ID: PAT_MRT4530_39205C.1.pep
MPLRRGALPPRAPLRPAPGGLCGRALLRRTCSLSWPATTGGAALRHTKYKNLADLYYAEDLVVDLISALYSYQMKNSRWKPVFALETGGPSNADSQDFEDDGGFLGRTRLGRLIQAAGRELLEKLNSARSNSPTKIFLVLFGFYTANALATILGQTGDWDVLVAGVVVAAIEGIGMLMYRKPMSRPPGRFQSLIAMVNYWKAGEAKVRECLGDRRRRGELDAGWEWWIVEGDELLLDIICHSPLGIGALLWVWRIHTVHAAAYSQRVTIQLPTMGLESRDATSGGDLRSRAKDDSYHNPQAPCKEELGAVTGQRRRKIRICFIVGNIPKNPVSTGKPMGVLNADQQKEFDEATTLFVGCIPSVLGDRLVEVYMHMTDAKELWDALNTKFGATDASNDLYIMEQFHDYKMADNRSVVEQAHEIQTMAKELELLKCVLPDKFVAGCIIAKLPPSWRGFGTALKHKRQEYSVEGLIASLDVEEKAREKDVASKGDGGQSTANVVHKAQNKSKGKYKAQQTTNFKKKNNNNNPNQDKRTCFVCGQPGHLARKCPQCKGMKAPAGQTSKSANVTIGNTGDGSGYGANVHVCADISLFSSYQVAWGSTVLIGNGSHASVHGVGTVDLKFTSGKIVQLKNVQHVPSIDRNLVSGSRLTRDGFKLVFESNKVVVSKHRYFIGKGYECGGLFCFSFSDFCNKSVNHICGSVDDEANVWHSRLCHINFGLMSRLSSMCLIPKFSIVKGSKCHSCVQSKQPRKPHKAAKERNLAPLELLHSDLCKMNGVLTKGGKRYFMTLIDDATRFCYVYLLKTKDEALDYFKIYKAKVENQLDRKIKRLRSDRGGEFFSNEFDLFCEEHGIIHERTPPYSPESNKIAERKNRTLTDLVNAMLDTAGLPKAWWGETLLTSNHVLNRVPNRNKDKTPYEIWIGRKPSLSYLRTWGCLAKVNVSITNKRKLGPKTVDCVFLGYAHYSIAYRFLIVKSEVPDMHVGTIMESRDATFFESFFPMKDTHSSSSQPSEIILSSITPPEQTEHTHEHVTEEDDSEAPRRSKRQRTVKSFGDDFTVYLVDDTPKSISEAYASPDADYWKEVVRSEMDSIIANGTWEVTERXYGCKHVGCKWVFKKKLRPDGTIEXSYGLLVHQMDVKTAFLNGELDEEIYMDQPDGFVVEGFAVNEADKCVYYRHGGGEGVILCLYVDDILIFGTNLEDLGVVDVILNIKLIRGENEITLLQSHYVEKILNCFGYIDSKPSPTPYNPSLLLRKNKRIARNQLEYSQIIGSPMYLASATRPDISFAVSKLSWFTSNPGDDHWRALERVMRYLKGTMELGLHYSGYPAVLEGYSDSKWISDVDEIKATSGYVFTLGGGAVSWRSCKQTILTRSTMEAELTALDTATVEAEWLHDLLMDLPIVEKPVLAILMNCDNQTVIVKVNSSKDNMKSSRHVKRRLKSVRKLRNSGVITLDYIQTARNLADPFTKGLSRNMIDNASKEMGLRPM

SEQ ID NO: 137753 - protein, 100 aa, Oryza sativa
  Clone ID: PAT_MRT4530_39206C.1.pep
GQQQKITSFTLVFKFKFLKIQLHWWANFIELWILGRQKIERIFSKRVSRAFSKGTKHFDIETIFWVAMIFRVVILGFTLPSPNNGLKSWVHGLLPQRGGF

SEQ ID NO: 137754 - protein, 1704 aa, Oryza sativa
  Clone ID: PAT_MRT4530_39207C.1.pep
MAGFSLISCAVGIIFFSVCYLPAAPAAALSFNYSTFSSDNQEDFTFEGNASIHDGCIDFVANGTWGRGYRPYSTGRVSYKLPVRLWDAATGEVASFTTTFSFNITPMNISDKGDGMAFFLVSYPSRMPLTADGDTLGLVSNKPENAPAGGDQFVAVEFDTYPNPGLDPNATGDHIGIDINSVRSLTTEPLTNSSLIGNMTAIVHYDSSSSILSVKLWINDTTKPPYNLSYEIVDLKKKLPENVTIGFSAATGASDELHQLTSWYFNSSSSFEHKHGRAGVVAGATVGATLFVVLLFTAAAILIRRRRIKNRKEAEDEQDISSDSEDNDGEPIVEIEMGTAPRRLPYYELVEATKNFAVEEKLGQGGFGSVYRGYLREQGLAVAIKRFAKDSSKQGRKEYKSEIKVISRLRHRNLVQLVGWCHGRNELLLVYELVPNRSLDVHLHGNGTFLTWPMRIKIVLGLGSALLYLHQEWEQCVVHRDIKPSNVMLDESFSAKLGDFGLARLIDHTIGIKTMTAMSGTPGYLDPECVITGRASAESYVYSFGIVLLEVACGRRPMSLLDSQNNGVFRLVEWAWDLYGKGDVLMAADKRLDGDYDSAEMERVIALGLWCVHPDPSVRPSIRDAMAILQSSGGQLPVLSAKMPVPMYAPPMASFDGLAVCVIYRDVVVLRSNDVLLLVYICNVMIYLWNILNHYMPIFSTIQKPYYRRCDFTMAGFADALRPDKFTGVHFKRWQIRVALWLTAMKCFWVSTGKPEGILAADQHKQFEKATTLFVGCILSVLGNRLVEVYMHMTNAKELWDALNTKFGATDASNDLYIMEQFHDYRMADNRSVVEQAHEVQTMAKELELLKCVLPDKFVAGCIIAKLPLSWRSFGTALKYKRQEYSVEGLIVSLDVEEKAREKDAASKGDGGQSSANVVHKAQNKSKGKYKAQQTTNFKKQKKNNNNPNQDERTCFVCSQPSHLARKCPQRKGMKAPAGQTSKSANVTIGNTGDGSGFFYVYLLKTKDEALDYFKTYKAEVENQLDRKIKRLRSDRGGEFFSNEFDLFCEEHGIIHERTPPYSPESNGIAERNNRTLTDLVNAMLDTAGLPKAWWGEALLTSNHVLNRVPNRNKDKTPYEIWIGRKPSLSYLRTWGCLAKVNVLITKKRKLGPKTVDCVFLGYAHHNIAYRFLIVKSEVPDMHVGTIMESRDATFFESFFPMKDTHSSSSQPCEIIPSSITPPEQTEHTHEHVTEEDDSEAPRRSKRQRTAKSFGDDFTVYLVDDTPKSISEVYASPDADYWKEAVRSEMDSIIANGTWEVTERPYGCKPVGCKWVFKKKLRPDASHGLLVHQMDVKTTFLNGELDEEIYMDQPDRFVVEGQEDKVCKLLKSLYGLKQAPKQCHEKFDRTLTSVGFAVNEADKCVYYRHGGGEGVILCLYVDDILIFGTNFEVINEVKSFLSQKFDMKDLGVADVILNIKLIRGENGITLLQSHYVEKILNRFGYIDSKPSPISYDPSLLLRKNKRIARNQLEYSQIIGSLMYLASATRPDISFAVSKLSRFTSNPGDDHWRALERVMRYLKGTMELGLHYTGYPAVLEEYSDSNWISDVDEIKATSGYVFTLGGGVVSWRSCKQTILTRSTMEAELTALDTATVEAEWLRNLLMDLPIVEKLVPAILMNCDNQTVIVKVNSSKDNMKSSRHVKRRLKSVRKLRNSGVITLDYI

SEQ ID NO: 137755 - protein, 2103 aa, Oryza sativa
  Clone ID: PAT_MRT4530_39208C.1.pep
MAGFADALRPDKFTGVHFKRWQIRVTMWLTAMKCFWVSTGKPMGVLNADQQKEFDEATTLFVGCILSVLGDRLVEVFMHMTDAKELWDVLNTKFGATNASNDLYIMEQFHDYKMADNCSVVEQAHEIQTMAKELELLKCVLPDKFVAGCIIAKLPPSWRASLDVEEKGREKDDASKGDGGQSSANVVHKAQNKSKGKYKAQQTTNIKKQKKNNNNPNQDERTCFVARGSTVLMGNGSHASVHGVGTVDLKFTSRKIVQLKNVQHVPSIDMNLVSGSRLTRDRFKLVFESNKVVVSKHGYFIGKGYECEGLFRFSLSDFCNKSVNYICGSVDDEANQPRKPHKAAEERNLAPLELLYVPITKKRKLGPKTVDCVFLGYAHHSIAYRLLIVKSEVPDMHVGTIMESRDATFFESFFPMKDIHSSSSQPSEIIPSSIIPSEQTEHTHEHVTEEDDSEAPRRSKRQRMAKSFGADFTVYLVDDTPKSISEAYASPDADYWKEVVHSEMDSIIANGTWEVTERPYGCKPVGCKWVFKKKLRPDGTIEKYKARLVAKGYTQKEDEDFFDTYSPVARLTTIRVLLSLAASHGLLVHQMDVKTAFLNGELDEEIYMDQPDGFVVEGQEGKVCKLLKSLYGLKQAPKQCHEKFDKTLTSAGFAVNEADKCVYYRHGGGERVILCLYVDDILIFGTNLEVINEVKSFLSQNFDMKDLRVADVILNIKLIRGENGITLLQSHYVKKILNRFGYIDSKPSPIPYDPSLLLRKNKRIVRNQLEYSQIIGSLMYLASATRPDISFALSKLSWFTSNPGDDHWRVLERVMRYLKGTMELGLHYSGYPTVLEGYSDSNWISDVDEIKATSGYVFTLGGGAVSWRSCKQTILMRSTMEAELTALDTATVKAEWLRYLLMDLPIVEKPVPAILMNCDNQTVIVKVNSSKDNMKSSRHVKRQLKSVRKLRNSGVITLDYIQTAGNLADPFTKGLSRNVIDNAAKEMGLRPISNDALNLVYICNVMIYLWNKLNHYVLIISTIQKPYYRRCDFTMAGFADALRPDKFTGVHFKRWLIRVTMWLTAMKCFWVSSGKPMGVLNADQQKEFDVATTLFVGCILSVLGDRLVEVYMYMTDAKELWNALNTKFGATDASNDLYIMEQFHDYKMADNRSVVEQAHEIQTMAKELELLKCVLPDKFVAGCIIAKLPPSWRGFGTALKHKTQEYSVEGLIASLDVKEKSREKDAASKGDGGQSTANVVHKAQNKSKGKYKAQQATNFKKKNNSNNPNQDEMTCFVCGQPGHLVRKCPQRKGMKAPAGQTSKSANVTIGNTGDGSGYGANVHVCADISLFSSYQVARGSTVLLGNGLHASVHGVGTVDLKFTSGKIVQLKNVQHVPSIDRNLVSGSRLTRDGFKLVFESNKVVVSKHGYFIGKDYECRGLFRFSLSDFYNKSMNHICGSVGDEANAAEERNLAPLELLHSDLCEMNRVLTKGGKRYFMMLIDDATRFCYVYLLKTKDEALDYFKIYKAEVENQLDRKIKRLRSDRGGEFFLNEFDLFCEEHGIIHERTPPYSPESNGIAERKNRTLTDLVNAMLDTAGLPKAWWGEALLTSNHVLNRVPNRNKDKTPYEIWIGRKPSLSYLRTWGCLVKVNVPITKKRKLGPKTVDCVFLGYAHHSIAYRFLIVKSESISEAYASPDADYWKEAVRSEMDSIIANGTCEVIERLYRCKPVGCKWVFKKKLRPDGTIEKYKARLVAKGYTQKEGEDFFDTYSPVARLTTIRVLLSLVASHGLLVHQMDVKTAFLNGELDEEIYMDQPDGFVVEDQEGKVCKLLKSLYGLKQAPKQWHEKFDKTLTSAGFAVNEADKCVYYRHGGGEGVIMCLYVDDILIFGTNLEVINEVKSFLSQNFDMKDLGVADVILNIKLISGENGITLLQSHYVEKILNHFGYIDSTMELGLHYSGYPAVLEGYSDSNWISDVDEIKATSGYVFTLGGGAVSWRSCKQTILTRSTMEAELTALDTATVEAEWLHDLLMDLPIVEKPVPAILMNCDNQTVIVKVNSSKDNMKSSRHVKRRLKSVRKLRNSGVITLDYIQTARNLADPFMKGLSRNVIDNASKEMGLRLV

SEQ ID NO: 137756 - protein, 52 aa, Oryza sativa
  Clone ID: PAT_MRT4530_39209C.1.pep
KKKKKKKKKKKKEKKKKKREKSFKDKRIKKRVNKKKKIVLFGLAVLNYLAVV

SEQ ID NO: 137757 - protein, 244 aa, Oryza sativa
  Clone ID: PAT_MRT4530_3920C.1.pep
TSPRARCRTAPRIKTSPRQGRRRRWCRPAAGAALTPHAGEGVHQVVEVRVALVHVLRRRPHVRRRADEATEHGARAVRARRRAHLRRLLEESRRRHLRQHRRLIVVEPCRRNMVATNEVTAEDPRRRRVRTAAAACTTAELVIAHQPLAGMLMARPRAVAVVGEEAEVEEVRSRRAGARSAIPRAGGQLHEAMERLGLQERVLPIASVVAEILPSRRRRRGGVEEERRLRGAEGRRARRRQQPR

SEQ ID NO: 137758 - protein, 124 aa, Oryza sativa
  Clone ID: PAT_MRT4530_39210C.1.pep
PGGGSPRGVFTGGGPPTRRGFGSPWSGSAPPPWASLPGGLKNPLPRPPSSSFFKKFAKERNPLPFFFPSSFFPGVKAPGFLQGPAPWFPGSHPLWAPMGHPLRVFLFPVETGILINCSPRFFVS

SEQ ID NO: 137759 - protein, 80 aa, Oryza sativa
  unsure (1)..(80): unsure at all Xaa locations
  Clone ID: PAT_MRT4530_39211C.1.pep
AFRQCXWXGXFVCPXLLXCXISYHMXCXFXSSGXIFXFVGDXXFXXLXLXXMXXTLAXLLXXKKKKKKKKKKKKKKKKKK

SEQ ID NO: 137760 - protein, 158 aa, Oryza sativa
  Clone ID: PAT_MRT4530_39212C.1.pep
RARSLASPGRRRACTTYASNDYSIPLAGVHRRSGEQVSGTSAFDVLHQEKAAIRFLGSASRDCSLFVRDGSPSSSLVCFAPSSTLATASSSCRATCLSATSVRVQQRRTASARWRTAVASTAPVEEAGQGARWPDLVAAIPERDDHHHDVVLVLLGRE

SEQ ID NO: 137761 - protein, 183 aa, Oryza sativa
  Clone ID: PAT_MRT4530_39213C.1.pep
MAAAAAEEEEAASPSATAHGDCVLPTACKVFDSEPVELSAKVLLLQLRPAEATAGLHGGYWCTVIASGIDGSAAVEVLAQVEAACAEHGVHLASESVSLVVECDCDDSPWHVARRRAHTTVPLHIPADGRGSFFSPDHWPLFVQLVRAMERPAEAHEDDLPAAGRLAVPSGSRTAEDATAKHV

SEQ ID NO: 137762 - protein, 1308 aa, Oryza sativa
  unsure (1)..(1308): unsure at all Xaa locations
  Clone ID: PAT_MRT4530_39214C.1.pep
MAGFADALRPDKLTGVHFKRWQIRVTLWLTAMKCFWVSTGKPEGVLTAEQQKQFEEATTLFVGCILSVLGDRLVEVYMHMTDAKELWDALNTKFGATDASNDLYIMEQFHDYKMADNRSVVEQAHEIQTMARELELLKCVLPDKFVAGCIIAKLPPSWRSFGTALKHKRQEYSVEGLIASLDVEEKAREKDAASKGDGGQSSANVVHKAQNKSKGKYKAQQTTNFKKQKKNNNNPNQNERTCFVCGQVGHLARKCPQRKGMKAPAGQTSKSANVTIGNTGHGSGYGNLPTVFSVNQSTNWWVDTGANVHVCADISLFSSYQVARGSTVLIGNGSHASVHGVGTVDLKFTSGKIVQLKNMQHVPSIDRNLVSGSRLTRDGFKLVFESNKVVVSKHVYFIGKGYECGGLFRFSLSDFCNKSVNHICGSVDDEANVWHSRLCHINFGLMSRLSSMCLIPKFSIVKGSKCHSCVQSKQPRKPHKAAEERNLAPLELLHSDLCEMNGVLTKGGKRYFMTLIDDATRFCYVYLLKTKDEALDYFKIYKAEVENQLDRKIKRLRSDRGGEFFSNEFDLFCEEHGIIHERTPPYSPESNGIAERKNRTLTDLVNAMLDTAGLPKAWWGEALLTSNHVLNIVPNRNKDKTPYEIWIGKKPPLSYLRTWGCLAKVNVPITKKRKLGPKTVDCVFLGYAHHSIAYRFLIVKSEVPDMHVGTIMESRDSIFFESFFPMKDTHSGSNQPSEIIPSPITPPEQTEHTHELVSEEDVSEAPRRSKRQRTAKSFDDDFTVYLVDDTPKSISEAYASPDADYWKEAVRSEMDSIIANGTWEVTERPYGCKPVGCKWVFKKKLRPDGTIEKYKARLVAKGYTQKEGEYFFDTYSPVARLTTIRVLLSLAASHGLLVHQMDVKTAFLNGELDEEIYMDQPDGFVVEGQEGKVCKLLKSLYGLKQAPKQWHEKFDKTLTSAGFAVNEADKCVYYRHGGGEGVILCLYVDDILIFGTNLEVINEVKSFLSQNFDMKDLGVADVILNIKLIRGENGITLLQSHYVEKILNRFGYIDSKPSPTPYDPSLLLRKNKRIARNQLEYSQIIGSLMYLASATRPDISFAVSKLSRFTSNPGDDHWRALERVMRYLKGTVELGLHYTGYPAVLEGYSDSNWISDVDEIKATSGYVFTLGGGAVSWRSSKQTILTRSTMEAELTALDTATVEAEWMRDLLMDLPIVEKPTCEKTIEVCQEIEKLRSYNVGLHPNSXKPGRSLHEGTITKCDRQCIEGDGFETHSILERTHLCELDCWSQSMEILGESSRKLTKDLGV

SEQ ID NO: 137763 - protein, 500 aa, Oryza sativa
  unsure (1)..(500): unsure at all Xaa locations
  Clone ID: PAT_MRT4530_39215C.1.pep
MGFFFFASRAAARFLGEARIIHPGVSTAALLVAAASGGGLVAYADSAGENASSETSQEAPRKKKVVVLGTGWAGTSFLKDLDCSKYEVKVISPRNYFAFTPLLPSVTCGTVEARSIVEPIRKMLEKKRKDVAFYEAECFKIDASKKAVHCRSAVGTNFDGNGDFMVDYDYLVVALGATVNTFNTPGVMENCYFLKTLFQELSLSQLVECVGVHSRFPEMHDFLVEDLVKLYPAIQDFVKITIIQSGEHILNMFDQRIATFAEMKFQRDGIEVNTGFRVVKVSDDLITMKSKSLGETNRRVLATNEWLRVHECDNIYAIGDCASITQRKIMDDISTVFKMADKDNSGTLTLKEINDVLEDICIRYPQVELYMKSMHMLDIRDLIKDAIGDSHKESMVVNIEEFKKALSHVDSQVKSIPATAQVAAQQGHYLAECFNKMDQCKEHPEXYKHLGQFAPLGGEQAAAELPGDWVSMGHSTQWLWYSVYASVICSYCHMALSNCD

SEQ ID NO: 137764 - protein, 36 aa, Oryza sativa
  Clone ID: PAT_MRT4530_39216C.1.pep
MVAVTGATPAAETGVAALCWEMASMANPDGVSRDTG

SEQ ID NO: 137765 - protein, 171 aa, Oryza sativa
  unsure (1)..(171): unsure at all Xaa locations
  Clone ID: PAT_MRT4530_39217C.1.pep
FRVRFFQDDISTVFKMADKDNSGTLTLKEINDVLEDICIRYPQVELYMKSMHMLDIRDLIKDAIGDSHKESMVVNIEEFKKALSHVDSQAKSIPATAQVAAQQGHYLAECFNXMDQCKEHPEGPVAHDRNRIRTTQFPPFRYKHLVQFAPLCGEEAAAELPGDWVSIGHST

SEQ ID NO: 137766 - protein, 112 aa, Oryza sativa
  Clone ID: PAT_MRT4530_39218C.1.pep
MGREGRGRAPPPPPPPRALLPPHAAGSAAPFPGSTRGRRGGGARRRRPRPPPPDQPPPSPPFAGSATGRRGGRERAPPPLSPAAVRRAVDVEGREREGERGEERRVGGDAPR

SEQ ID NO: 137767 - protein, 69 aa, Oryza sativa
  Clone ID: PAT_MRT4530_39219C.1.pep
FFSLCLENMKLERLFQERFQEPVYVWPGFLWFVMMGALDMKLKALSDNHRGMIYPFSNTVFFSNSKHKK

SEQ ID NO: 137768 - protein, 86 aa, Oryza sativa
  Clone ID: PAT_MRT4530_3921C.1.pep
MAGGGAPAGGSGNMGWQPANYEKGENSGCDRTPLLRHEEEEMMKLATRLKDTIALLRKNYKITTVEDRIQEKEENNHHPHTDSSRT

SEQ ID NO: 137769 - protein, 95 aa, Oryza sativa
  unsure (1)..(95): unsure at all Xaa locations
  Clone ID: PAT_MRT4530_39220C.1.pep
RRRRPRTRARPPMEDARSNDTNGKELRREQSGATTLSTHKATGQKSTXLFIAKRKLTTKEDAEDTRGHPHNIDHLTGHPNAVERKGAYKDKRSEH

SEQ ID NO: 137770 - protein, 71 aa, Oryza sativa
  Clone ID: PAT_MRT4530_39221C.1.pep
FKEIKRIIVVARRTYFDYVCCLSIYDLFFIVVKKKLFFFVWPSVFLRFLTPFCSRGPQFGVVNILLTSPPR

SEQ ID NO: 137771 - protein, 93 aa, Oryza sativa
  unsure (1)..(93): unsure at all Xaa locations
  Clone ID: PAT_MRT4530_39222C.1.pep
KKVEVQPRCRPLGALRXHNAHGRRPTRRVPPLXPPPCXKPXPSPRPGGGGSAPXSATHARARRGPCPHQPSLSPRARARRHPRLWIWMEGERE

SEQ ID NO: 137772 - protein, 118 aa, Oryza sativa
  Clone ID: PAT_MRT4530_39223C.1.pep
LSTIAHVNRAPFLFSAAPSSSLPSSPFPGSLPFVLSSPLSTRLRGPPLPAGELILSFPPPPPPPPPPSVLFLSDPYASSAREQRAATAPSPPPYLAVGDVAGGDARGEATAAPDPPLR

SEQ ID NO: 137773 - protein, 514 aa, Oryza sativa
  Clone ID: PAT_MRT4530_39224C.1.pep
MACHAAALLQHPPPPPPPASLPSTACTSSSRRRASPWGGAGRLIRLRLRGHCPSPASARAARVVSPRCSSYGAAADAGESPAEALRRVLESPGAHQAPACYDALSARLVGRAGFKVCFTSGFSISAARLGLPDVGLISYGEMIDQGCLITEAASIPVIGDADNGYGNCMNVKRTVKGFIKAGFAGIILEDQVSPKACGHTQGRKVVSREEAIMHIKAAVDARKESGSDIVIVARTDSRQALSLDEALWRVRAFADAGADVLFIDALASREEMKAFCAVSPGVPKMANMLEGGGKTPILSPAELEETGYKLIAYPLSLIGVSMRAMEDALIAIKGGRIPPPSSLPSFEEIKDTLGFNSYYEEEKRYVVTPAQSSSYRSGYYDNTSEASSPGDAKSRTETPQEPVIDILPQLYDLGSTGGRGPSAGMWSRTLRLRITGRDGVQKIDARIPVAFVYPHYLQQAGFLEGMTKVIPGLAGANIMERLRNAPIDSENPQNGQILLDFEDAMGDRIQVFIE

SEQ ID NO: 137774 - protein, 209 aa, Oryza sativa
  Clone ID: PAT_MRT4530_39225C.1.pep
MPVTMYADHTAMSLQVLLGPSAHFPPAPIRWAGLRPRPNSPRAPPLSPGVADRWGPPVGSSPNLRRPPPPPTTAAPAVLGPRPASTAPQWPRPAHATHSPHPTTPSPAHACAGNGQDSIFESHLSLSSRTSPTLPVNPRHSRPFLTSRPEQTRRREVGGVAGGEEETARSFGSSLSSSFPRSSCSTEGRTGKRRKRRSRWWRRILVCDR

SEQ ID NO: 137775 - protein, 75 aa, Oryza sativa
  Clone ID: PAT_MRT4530_39226C.1.pep
FKHTCMQYACGIDTTGVQKIYISSKFHHIYPEANSHYMQYVGISQQVRLCSKLHYKRMTSSCCQNKFILHSLLST

SEQ ID NO: 137776 - protein, 182 aa, Oryza sativa
  unsure (1)..(182): unsure at all Xaa locations
  Clone ID: PAT_MRT4530_39227C.1.pep
RITSPGRRHRSAPPIPAARGAPVARSPPTPSAVIRSPSRRRPRRLPALAPPPAVQTASPTPPSHAAHHTRPPTPPVVPSTHHSAVHRPSRWSPPHRPRSSPGTPPRRSPPXPPPISGSSTVSVQPPISAFRTVSPHPRSAPPXPPSTSPCRHRPSRTTPVTPRRSPPWPLPTGAATRTATTT

SEQ ID NO: 137777 - protein, 47 aa, Oryza sativa
  Clone ID: PAT_MRT4530_39228C.1.pep
VTHKVLFIFYHLSNNKNTNYKTEGVRTSMLFALENHVFIASCFNYCI

SEQ ID NO: 137778 - protein, 561 aa, Oryza sativa
  Clone ID: PAT_MRT4530_39229C.1.pep
MAKKLGKSPVAKEEDKEGLFASCSFTDLGLHPTLCAHLQDKMGFQAPTRIQAQAIPVAMSGQHMLVKAATGTGKTLAYLAPIVHLLQMREPRVERTDGTFALVLVPTRELCLQVYGIAQQLVHRFHWLVPGYIMGGENRAKEKARLRKGISILIATPGRLLDHLQHTSSFVYPNMRWIVFDEADSILELGFGKALEDILEHLGSRNDTSNQNKNKMEPMKRQNLLLSATLNEKVNRLAKISLKNPVMIGLDEQNSSAHGKNHTSLLSDDEEEILEKHNVTVEQAVDDFKLPAQLVQRYVKVSCGSRLAILLTILKSLFERQLSHKVVVFLSTCDSVDFHHTVLSQLEWSPGLQLDTDKKQKFISCKVFRLHGNMDQDDRKKSFLGFSSEKSAILVSTDVAARGLDFPKVKCIIQYDSPGEASEYVHRVGRTARIGEKGEALLFLQPIETDYLRDLELHGASLTEYPLQKRALESFVTSEDTTKKLARDAFCSWVRAYTAHRGELKKIFMVKKLHLGHVARSFGLKEQPSLLGRSHQVQLKKRKKEQKRERPAKRRKIPAKR

SEQ ID NO: 137779 - protein, 81 aa, Oryza sativa
  Clone ID: PAT_MRT4530_3922C.1.pep
MSNNTTQRLSSDKAANNSTICFRAQGITISASLPCMFYQHNFNPVKVIQRMILVRCHSRSMPARKNLEPPPFNLFQMDRHT

SEQ ID NO: 137780 - protein, 109 aa, Oryza sativa
  unsure (1)..(109): unsure at all Xaa locations
  Clone ID: PAT_MRT4530_39230C.1.pep
KARKKDKAPPQTSNPGKSDGRKQKKKKCSKANQKEKVTKSVLLEQPPHFQMLSEGAXSTTQVTPSVLSERLRIVGSLACRAIDHLMPPGLTRMVRYHPSRQIHTRAPNS

SEQ ID NO: 137781 - protein, 118 aa, Oryza sativa
  Clone ID: PAT_MRT4530_39231C.1.pep
CWDVSELTLQKGGNLQWLLCYEGDLADGRETAAFQSKNVASGLASFAACTEVIKMNRGKVHPLLRLSKPEGNGCGSVFDKAQWMEYDIELICQDEIMFCIVQRIDKRCSEFRPIRSFT

SEQ ID NO: 137782 - protein, 959 aa, Oryza sativa
  Clone ID: PAT_MRT4530_39232C.1.pep
MAAAVLPALRPTPPASNFPALLPTPPRSQMLPLLPTPCLIILPASFRAPPASDPKPGRADAVERWDARKEAGSSAASSSSSSSSSGLPCRADSCERWDAHKNKKAGGSAASSSSRARGGISPGRADSYERWDAHKTPGSPASSTGSSRSPCRADSVERWDSNKRPLSRASSAERWDINKKPRPKKDAVGSGKNNSTSQTTTMVSGTSAFDVLHREKTAIRFLGSASRDCSLFVRDGSPSSPLACFAPSSTLATASSSCRATGLSTTSIRVTLWLMVMKCFWVSTGKPEGILTADHQKQFEEATTLFVGCILSVLGDRLVKVYMHMTDAKELWDALNTKFGATDASNDLYIMEQFHDYKMADNRSVVEQAHEIQTMAKELELLKCVLPDKFVAGCIIAKLPPSWRSFGTALKHKRQEYSVEGLIASLDVEEKAREKDAASKGDGGQSSANVVHKVQNKSKGKYKAQQTTNFKKQKKNNNNPNQDERTCFVCGQPGHLARKCPQRKGMKAPAGQTSKSANVTIGNTGDGSGYVGTVDLKFTSGKIVQLKNVQHVPSIDRNLVSGSRLTRDGFKLVFESNKVVVSKHGYFIGKGYECGGLFRFSLSDFCNKSVNYICASVDDEANVWHSPSHGLLVHQMDVKTAFLNGELDEEIYMDQPDGFVVEVNEADKCVYYRHGGGEGVILCLYVDDILIFGTNLEVINEVKSFLSQNFDMKDLGVADVILNIKLIRGENEITLLQSHYVEKILNRFGYSDSKPSLTPYDPSLLLRKNKRIARNQLEYSQIIGSLMYLASATRSDISFAVSKLSRFTSNPGDDHWRALERVMRYLKGNMELGLHYTGYPAVLEGYSDSNWISDVDEIKATSGYVFILGGGAVSWRSCKQTILTRSTMEAELTALDTATVEAEWLRDLLMDLPIVEKPPVGAEPQPPAPHLPTPPAFSAPLRAPLRARVAAHLPHISRP

SEQ ID NO: 137783 - protein, 1238 aa, Oryza sativa
  Clone ID: PAT_MRT4530_39233C.1.pep
MAGFADALRPDKFTGVHFKRWQIRVTLWLTAMKCFWVSTGKPEGVLTAEQQKQFEEATTLFVGCILSILGDRLVEVYMHMTDAKELWDALNTKFGATDASNDLYIMEQFHDYKMADNRSVVEQAHEIQTMAKELELLKCVLPDKFVAGCIIAKLPPSWRSFGTALKHKRQEYSVEGLIASLDVEEKAREKDAASKGDVGHLARKCPQRKGMKAPAGQTSKSANVTIGNTGDGSGYGNLPTVFSVNQSTNWWVDTGANVARGSTVLMGNGSHASVHGVGTVDLKFTSGKIVQLKNVQHVPSIDRNLVSGSRLTRDGFKLVFESNKVVVSKHGYFIGKGYECGGLFRFSLSDFCNKSVNHICGSVDDEANVWHSRLCHINFGLMSRLSSMCLIPKFSIVKGSKCHSCVQSKQPRKPHKAAEERNLAPLELLHSDLCEMNGVLTKGGKRYFMTLIDDATRFCYVYLLKTKDEALDYFKIYKAEVENQLDRKIKRLRSDRGGEFFSNEFDLFCEEHGIIHERTPPYSPESNGIAERKNRTLTDLVNAMLDTAGLPKAWWGEALLTSNHVLNRVPNRNKDKTPYEIWIGRKPSLSYLRTWGCLAKVNVPITKKRKLGPKTVDCVFLGYAHHSIAYRFLIVKSEVPDMHVGTIMESRDATFFESFFPMKDTHSGSNQPSEIIPNSITPPEQTEHTHELVSEEDVSEAPRRSKRQRTAKSFGDDFTVYLVDDTPKSISEAYASPDADYWKEAVRSEMDSIIANGTWEVTERPYGCKPVGCKWVFKKKLRPDGTIEKYKARLVAKGYTQKEGEDFFDTYSPVARLTTIRVLLSLAASHGLLVHQMDVKTAFLNGELDKEIYMDQPDGFVVEGQEGKVCKLLKSLYGLKQAPKQWHEKFDKTLTSAGFAVNEADKCVYYRHGGGEGVILCLYVDDILIFGTNLEVINEVKSFLSQNFDMKDLGVADVILNIKLIRGENGITLLQSHYVEKILNRFGYIDSKPSPTPYDPSLLLRKNKRIARNQLEYSQIIGSLMYLASATRPDISFAMSKLSRFTSNPGDDHWRALERVMRYLKGTVELGLHYTGYPAVLEGYSDSNWISDVDEIKATSGYVFTLGGGAVSWRSCKQTILTRSTMEAELTALDTATVEAEWLRDLLMDLPVVEKPVPAILMNCDNQTVIVKVNSSKDNMKSSRHVKRRLKSVRKLRNSGVITLDYIQTARNLADPFTKGLSRNVIDNASKEMGLRPM

SEQ ID NO: 137784 - protein, 73 aa, Oryza sativa
  Clone ID: PAT_MRT4530_39234C.1.pep
KGMYNHLLTLMKSLNLCLEHDIYDHEHLAYTTSLPQICSQRNETPCNSVNDVESFVSSVYILQLEITCLAVVI

SEQ ID NO: 137785 - protein, 1178 aa, Oryza sativa
  unsure (1)..(1178): unsure at all Xaa locations
  Clone ID: PAT_MRT4530_39235C.1.pep
MAGFADALRPDKFTGMLFKRWQIRVTLWLTAMKCFWVSTSKPMGVLNADQQKEFDEATTLFVGCILSVLGDRLVEVYMHMTDTKELWDALNTEFGATDASNDMYIMEQFHDYKMADNRSVVEQAHEIQTMAKELELLKCVLLDKFVAGCIIAKLPPSWRGFGTALKHKRQEYSVEGLIASLDVEEKAREKDAASKGDGGQSNANVVHKAQNKSKGKYKAQQTTNFKKQKKNNNNPNQDERTCFVCGQPGHLARKCPQRKGMKAPARQTYKSANVTIDNIGDGSGYDNLPTVFSVNQSTNWWVDTRANVARGSTVLMGNGSHASVHGVGTVDLKFTSGKIVQLKNVQHVPSIDRNLVSGSRLTRDGFKLVFESNKVVISKHGYFIGKGYECGGLFRFSLSDFCNKSVNHICGSVDDEANVWHSRLCHINFGLMSRLSSMCLIPKFSIVKGSKCHSCVQSKQPRKPHKAAEERNLAPLELLHSDLCEMNGVLTKKTKDEALDYFKIYKAEVENQLDRKIKRLRSDHGGEFLSNEFDLFCEEHSIIHERTPPYSPETNGIAERKNRILTDLVNAMLDTAGLPKAWWGEALLTSNHVLNRVPNRNKDKTPYEIWIGRKPSLSYLRTWGCLVKVNVPITKKRKLGPKTVDCVFLGYAHHSITYRFLIVKSEVPDMHVGTIMKSRDATLFESFFPMKDTHSGSSQPSEIIPSSITPPEQTEHTHEHVSEEDVSEAPRRSKRQMTAKSFGDDFTVYLVDDTPKSISEAYASPDADYWKEAVRSEMDSIIANGTWEVTERPYGCKPVGCKWVFKKKLRPDGTIEKYKARLVAKGYTRKECEDFFNTYSPVARLTTIRVLLSLAASHGLLVHQMDVKTAFLNGELDEEIYMYQPDGFVVEGQEGKVCKLLKSLYGLKQAPKQWHEKFDKTLTSAGFVVNEADKCVYYRHGGGEGVILCLYVDDILIFGTNLEVINEVKSFLSQNFDMKDLGVADVILNIKLIRGENGITLLQSHYVEKILNRFGYIDSTMELGLHYSGYPAVLEEYSGSNWISDVDEIKATSGYVFTLGGGAVSWRSCKQTILMRSIMEAELTALDTATVEAEWLRDLLMDLPIVEKPVPAILMNCDNQTIITCEKTIEVCQEIEKLRSYNVGLYPNSXKPGKSLHEGTITKCDRXCIEGDGFETHI

SEQ ID NO: 137786 - protein, 113 aa, Oryza sativa
  Clone ID: PAT_MRT4530_39236C.1.pep
MPMMQEARHGDGGSCGSARPEKVVVRVCGGGGVSMLRKWWPRARGLESWPRGAESADNVAAGELHPAARFGENLEKWWRSGWQPRSRGRTRARDGGGGGFGYGVGGNGGFRRT

SEQ ID NO: 137787 - protein, 1166 aa, Oryza sativa
  Clone ID: PAT_MRT4530_39237C.1.pep
MGVLNADQQKEFNEATTLFVGCILSVLGDRLIEVYMHMTDAKELWDALNTKFGATDANNDLYIMEQFHDYKMADNRSVVEQAHEIQTMAKELELLKCVLSDKFVARKCPQRKGMKAPAGQTSKSANVTIGNTGDGSGYGYECGGLFRFSLSDFCNKSVNRICGSVDDEANGGKQCFMTLIDDATRFCYVYLLKTKDEALDYFKIYKAEVENQLDRKIKRLRSDRGGEFFSNEFDLFCEEHDIIHERMPPYSPESNGIAKRKNRTLTDLVNAMLDTAGLPKACIAYRFLIVKSEVPDMHVGIIMESRDATFFESFFPMKDTHSSSSQPSEIIPSSITPPEQTEHTHEHVTEEDDSEAPRRSKRQRTVKSFGDDFTVYLVDDTPKSILEAYASPDADYWKEAVRSEMDSIIANGTWEWVFKKKLRPDGTIEKYKARLVAKGYTQKEGEDFFDTYSPVARLTTIRVLLSLAASHGLPVHQMDVKTTFLNGELDEEIYMDQPDGYVVEGQYSKVCKLLRSLYGLKQAPKQWHEKFDKTLTSAGFAINEADKCVYYRHGGGEGVILCLYVDDILIFGTNLKVINEVKSFLSQNFDMKDLGVADVILNIKLIRGENGITLLQSHYVEKILNRFGYIDSKPSPTPYDPSLMLRKNKRIARNQLEYSQIIGSLMYLASATRPDISFAASKLSRFTSNPRDDHWRALARVMRYLKDTMELGLHYSGYPVVLEGYSDSNWISDVDEIKATSGYVFTLGGGAVSWRSCKQTILTRSTMEAELTALDTATVEAEWLRDLLMDLPIVEKQVPAILMNCDNQTVIVKLNSSKDNMKSSRHVKRRLKSVRKLRNSGVITLDYIQTARNLADPFTKGLSRNVIDNASKEMGLRPIVCLLLCVAPSLIDYSIPLASVHRRSGEQVSGTSAFDVLHREKAAIRFLGCASRDCFLFIRDGSPSSPLACCAPSSTLATASSSCRATGLSATSRSYLDGVTDAFNMTDEMLGAHSFLRQLMDQISLAKTYLVVAKEANNLQFSAELSSQIRRAPQSFLAHAAAHGGTVAGSGAAVAASSHARSSSAYGITSPSPCFHFRPSTFASCREAGGEVGDMIRDGEAVKAGNEEVVEVGSGRDWSDGRGSEGVGGGVLHDGGGGGDGLLGEWMRRRSALMLIGHEGAPSLRL

SEQ ID NO: 137788 - protein, 1177 aa, Oryza sativa
  Clone ID: PAT_MRT4530_39238C.1.pep
MAGFANALRPDKFTGVHFKRWQIRVTLWLIAMKCFWVSTGKAMGVLNVDQQKEFDEATTLFVGCIFSVLGDRLVKVYMHMTDAKELWDALNTKFGATDASNDLYIMQQFHDYKMANNRFVVEQAHEIQTMAKELELLKLSYPTNFWPGFSTALKHKRQEYFVEGLIASLDVEEKAREKDSASKGDGGQSSANVVHKARNKSKVNQSTNWWVDARANVARGSTVLMGNRSHASVHGVGTADLKFTSGKIVQLKNVQPHKAAEERNLAPLELLHSDLCEMNGVLMKGGKRYFMSLIDDATRFCYVYLLKTKDEALDYFKIYKVEVENQLNKKIKRLRSDRGGEFFSNEFDLFCEEHGIIHERTPPYSPESNGIAERKNRTLTDLVNTMLDTAGLPKAWWGEALLTSNHVLNRVPNRNKDKTLYEIWIGRKPSLSYLRTWGCLAKVNVLIMKKRKLGPKTVDCVFLGYVHHSVAYRFLIVKNVSRDVTFFESFFPIKNTHSSSNQPSKIIPSLITPPEQIEHTHEHVTEEDGNEAPRRSKRQRTAKSFGDDFTVYLVDDTPKLISEAYASPDADYWKDAVGSKMDSIIANGTWELIEHLYGCKPEGCKWVFKKKLRPDGTIEKYKARLVAKGYTQKENEDFFDTYSPVARLTTIRVLLSLAASHGLLVHQMDVKTTFLNGELDEEIYMDQPDGFVIEGQDGKVCKLLKSLYGLKQAPKQWHEKFDRTLTSAGFAVNEADKCVYYRHGGEGVILCLYVDDILIFGTNLEVINEVKSFLSQNFDMKDLGVADVILNIKLIRGKNEITLLQSHYVEKILNRLGYIDSKPSPTPYDPSLLLRKNKRIARNQLEYSQIISSLMYLASATRPDISFAVSKLSRFTSNPGNDHWRALERVMHYLKGGGAVSWRSCKQTILTRSTIEAEMTALDTATVEAEWLRDLLMDLPIVEKLVPTILMNCDNQTIIVKTCEKTIEVYPEIEKLRSYNVGLHPNSQKPGKSLHEGTITKCDRQCIKGDGFETHSILERTHLCELDYWSQSMEILGESSRKLTKDLGLPPSRNTCEINLGFASYSVLRAAPSLVEYSIPLTGVHRRSGEQVFRTSAFDILHREKAVIRSNDALMLVYICNVMIYLWNILNHYMPIISTSAHYLHPHADLFRELGLRRRYWLCRSNLETGRCGSSVP

SEQ ID NO: 137789 - protein, 859 aa, Oryza sativa
  Clone ID: PAT_MRT4530_39239C.1.pep
VSTDKPMGVLTADQQKEFDEATTLFVGCILSVLGNRLVEVYMHMTDAKELWDALNTKFGATDASNDLYIMEQFHDYKMADNRSVVEQAHEIQTMAKEFELLKCVLPDKFVDGCIIAKLPPSWRGFGTALKHKRQEYSVEGLIASLDVEEKAREKDVAFKGDGGQSTANVVHTAQNKSKGKYKAQQTTNFKKKNNNNNPNQDERTCFVCQPGHLARKCPPAGQTSKSANVTIGNTGDGSGYGANVSRGSTVLMGNGSHASVHGVGMVDLKFTSGKIVQLKNVQHVPSIDRNLVSGSRLTRDGFKLVFESNKVVVSKHGYFIGKGYECGGLFRFSLSDFCNKSVNHMAVWMMRLIFYYVYLLKTKDEALDYFKIYKAEVENQLDRKIKRLRSDRGGEFFSNEFDLFCEEHGIIHERTPPYSPESNGIAERKNRTLTDLVNVMLDTTGLPKACSITPPKQTEHAHEHVTEEDDSEVPRRSKSQMTAKSFGDDFIVYLVDDTPKSISEAYASPDADYWKEAVRSEMDSIVANGTWEVTERPYRCKCVGCKWVFKKKLRPDASHGLLVHQMDVKTTFLNGELDEEIYTDQPDGFVVEGQEGFAVNEADKCVYYRHGGGEGVILCLYVDDILIFETNLEVINEVKSFLSQNFDMKDLGVADVILNIKLIRGENGITLLQSHYVEKILNRFGYIDSKPSPTPYDPSLLLRKNKRIARNQLEYSQIIGSLMYLASATRSDISFAVSKLSWFTSNPGDDHWCALERVMRYLKGTMELGLHYSGYPAVLEGYSDSNWITDVDEIKATSGYVFTLGGGAVSWRSCKQTILTRSTMEAELTALDTATVEAEWLRDLLMDLPIVKKPVPVSL

SEQ ID NO: 137790 - protein, 383 aa, Oryza sativa
  Clone ID: PAT_MRT4530_3923C.1.pep
MMVVDTVSASTSLVAHHLFDQRSKANHHLRRTLHVVSCRPLPTHFAGRRLVARAPRQHQPRLADWTVKALAMGVTKEASPHREYRGIPGEGADMGDIGITNPKTTWPPRNRADDPKLHNPLLRLERMGCGWLGVIFEWEGVIVEDDAELERQAWFTLAQEEGKSPPLAFVLKRIEGMKSEQAISEVLCWSRDPSELRRLSSRKEEIRCNLRGTAFYQMRNGSREFMSTLANYKIPLAVATTRPRKVIEEAIDAVGVRSFFDAVVAAEDVYRGKPDPEMFLYAAQLLSFIPERCIVFGNSNSAVEAAHDARMKCVAVASKHPIYELNAADLVVKQLDELSVVDLKNLADIESPEFGMEPEPEMEEEEDEDSSPSTSVGVDDLFW

SEQ ID NO: 137791 - protein, 117 aa, Oryza sativa
  Clone ID: PAT_MRT4530_39240C.1.pep
NIYASLFSDTISLCTILEVNSGSALFCSTSQPHSPLSKYYFTILHHNCNLKHTSVTSIRYGDSLCCIFTAQLCIATCRSLLHQTYGRRKEQYQKHACRQVLHELHMLAIATRKEMVQ

SEQ ID NO: 137792 - protein, 858 aa, Oryza sativa
  Clone ID: PAT_MRT4530_39241C.1.pep
MKCFWVSTGKPMGVLNADQQKEFDEPTTLFVGCILSVLGDRLVEVYMHMTNAKELWDALNTKFGATDASNDLYIIEQFHDYKMADNRSVVEQAREIQTMAKELELLKCVLADKFVAGCIIAKLPPSWRGFGTALKHKRQEYSVEGLIASLDVEEKAREKDATSKGHGGQSSANVVHKAQNKSKGKYKAQQTTNFKKQKKNNNNPNQDERTCFVCGQPVNQSTNWWVDTGANVHVCADISLFSPYQVAPGSTVLMGNGSHASVHGVGTVDLKFTSGRIMQLKNVQHVPSIDRNLVSGFRLTRDGFKLVFESNKVVMSKHGYFIGKGYECGGLFRFSLSDFCNKWGCLAKVNVRITKKRKLRPKTMDCVFLGYAHHSIAYRFLIVKSGAPDMHVGTIMESRDATFFESFFPMNDTHSGSSQPSEIIPSTITPPEQTEHTHEHVSEEDVSEAPRRSKRQRTAKSFGDDFTVYLMDDTPKSISEAYASPDGDYWKEAVRSEMDSIIANGTWEVAERPYGCKPVGCKWVFKKKLRPDGTIENYKARLVAKGYTQKGGEDFFDTYSPVARLTTIRVLLSLATSHGLLVHQMDVKTAFLNGELDEEIYMDQPDGFVVEGFAVNEADKCVYYCHGGGEGVILCLYVDDILIFGTNLEVINESHYVEKILNRFGYIDSKPSPTPYDPSLLLRKNKKIARNQLEYSQIIGSLMYLASATRHVISFVVSKLSRFTSNPGDDHWRALERVMRYLKGTMELGLHYTGYPAVLEGYNDSDWISDVDEIKATSGYVFTLGGDYSIPLAGVHRRSGEQVFGTSAFDVLHREKAAMRFFGSASRDCSLFVRDGSPSSPLVCFAPSSTLATAKMTY

SEQ ID NO: 137793 - protein, 135 aa, Oryza sativa
  Clone ID: PAT_MRT4530_39242C.1.pep
FGFFFFFFFFFFFFLFFFFFFCFWEQKSPRLSKNQPKHGEPLTKGTPWPFGKKKGGKTGQDRVKTQGEHLLRGTGNIFLEGKTEYGGNKVPGDRGGNGKGKGGPLSTHLAKGGGPGIGGGEPLDPPAGTIGGLGG
